United States Patent Application Publication US 2024/0271161 A1 - sequence listing, part 2

SEQ ID NO: 11896 - protein, 537 aa, Streptococcus agalactiae; identical to SEQ ID NO: 406

SEQ ID NO: 11897 - DNA, 50 bp, Streptococcus agalactiae; identical to SEQ ID NO: 402
  source 1..50: mol_type = genomic DNA

SEQ ID NO: 11898 - DNA, 40 bp, Streptococcus agalactiae; identical to SEQ ID NO: 11873
  source 1..40: mol_type = genomic DNA

SEQ ID NO: 11899 - DNA, 50 bp, Streptococcus agalactiae; identical to SEQ ID NO: 11874
  source 1..50: mol_type = genomic DNA

SEQ ID NO: 11900 - DNA, 40 bp, Streptococcus agalactiae; identical to SEQ ID NO: 11875
  source 1..40: mol_type = genomic DNA

SEQ ID NO: 11901 - protein, 548 aa, Clostridium butyricum
MNIAIYSRKSLFTGKGESIENQIQMCRVYIINSIDSNAHICIYEDEGYSGGNTNRPKFKEMIKDIKSGKINRVVCYKLDRIGRSVAQLSNMFELLDRYNCSFTSITEQQFDTTTPMGRAMINIASTFAQLERETIAERVRDNMLGLAKTGRWLGGQSPLGYSPEKMTYLDEEFKERTLMKLTPIDDELKIVKLVFDTYFEIHSVSQVTKKLNLSRIKGKNGGDFNSSNVVKMLRNPLYVISDEDSHDYLTQTGANVFGTPNGNGYLTYNKRKNMNIERNVNEWIVAVSKHKGIISSSEWIRIQEILDSNKDKNFIRLGTGSKNSAILSGVLKCAKCGGNMLVKHGHTEAKTGKKFSYYTCSNKYNKYVDKCTNKNIRVDRLDRNIISQLKAFNRDKLINSLQCALSKTKMENKADLNKQIQIEIDEKTKSVSNLVNTLAQAPNEDITKIIMNQIKDINNEINQLKSSLEGNSAKKSKLDSEIKNIELVIDALKNFNDNIDFIEDVNQKRLLIQAIADTIIWDGETYTAKVKIHGLNDYENEDIDKKKD

SEQ ID NO: 11902 - DNA, 50 bp, Clostridium butyricum
  source 1..50: mol_type = genomic DNA
tgatgtcattttacgactcgcggatctcctctgggtataaaacgacaaca

SEQ ID NO: 11903 - DNA, 40 bp, Clostridium butyricum
  source 1..40: mol_type = genomic DNA
tggttcaggatttaatagatcatcatgtgttccaacaatc

SEQ ID NO: 11904 - DNA, 50 bp, Clostridium butyricum
  source 1..50: mol_type = genomic DNA
tgatgtcattttacgactcgcggacttcctctgggtataaaacgacaaca

SEQ ID NO: 11905 - DNA, 40 bp, Clostridium butyricum
  source 1..40: mol_type = genomic DNA
tggttcaagattaactaccctatctggtcttcaaacaatc

SEQ ID NO: 11906 - protein, 548 aa, Clostridium butyricum
MNIAIYSRKSLFTGKGESIENQIQMCRVYIINSIDSNAHICIYEDEGYSGGNTNRPKFKEMIKDIKSGKINRVVCYKLDRIGRSVAQLSNMFELLDRYNCSFTSITEQQFDTTTPMGRAMINIASTFAQLERETIAERVRDNMLGLAKTGRWLGGQSPLGYSPEKMTYLDEEFKERTLMKLTPIDDELKIVKLVFDSYFEIHSVSQVTKKLNLSRIKGKNGGDFNSSNVVKMLRNPLYVISDEDSHDYLTQTGANVFGTPNGNGYLTYNKRKNMNIERNVNEWIVAVSKHKGIISSSEWIKVQEILDSNKDKNFIRLGTGSKNSAILSGVLKCAKCGGNMLVKHGHTEAKTGKKFSYYTCSNKYNKYVDKCTNKNIRVDRLDRNIISQLKAFNRDKLINSLQCALSKTKMENKADLNKQIQIEIDEKTKSVSNLVNTLAQAPNEDITKIIMNQIKDINNEINQLKSSLEGNSAKKSKLDSEIKNIELVIDALKNFNDNIDFIEDVNQKRLLIQAIADTIIWDGETYTAKVKIHGLNDYENEDIDKKKD

SEQ ID NO: 11907 - DNA, 50 bp, Clostridium butyricum
  source 1..50: mol_type = genomic DNA
cgatgtcattttacgactcgcgaatctccttgcacaataaaatgacatca

SEQ ID NO: 11908 - DNA, 40 bp, Clostridium butyricum; identical to SEQ ID NO: 11903
  source 1..40: mol_type = genomic DNA

SEQ ID NO: 11909 - DNA, 50 bp, Clostridium butyricum
  source 1..50: mol_type = genomic DNA
cgatgtcattttacgactcgcgaacttccttgcacaataaaatgacatca

SEQ ID NO: 11910 - DNA, 40 bp, Clostridium butyricum; identical to SEQ ID NO: 11905
  source 1..40: mol_type = genomic DNA

SEQ ID NO: 11911 - protein, 548 aa, Clostridium butyricum
MNIAIYSRKSLFTGKGESIENQIQMCKVYIINSIDSNAQIYIYEDEGYSGGNTNRPKFKEMIKDIKAGKINRVVCYKLDRIGRSVAQLSNMFELLDKYNCSFTSITEQQFDTTTPMGRAMINIASTFAQLERETIAERVRDNMLGLAKTGRWLGGQPPLGYSPEKITYLDEEFKERTLMKLTPIEDELKKVKLIFDSYFELHSVSQVTKKLNLSRIKGKNGGDFNSSNIVKMLRNPIYVISDEDSHDYLIRTGANVFGTPNGNGYLTYNKRKNMNIERNVTEWIVAVSKHKGVISSSEWIKVQEILDSNKDKNFIRLGTGSKNSAILSGVLKCAKCGGNMLVKHGHTEAKTGKKFSYYTCSNKYNKYVNKCTNKNIRVDRLDKNIILQLKAFNRDKLIKALQSALNKTQLENKTDLNKQIQIEIDEKNKAVSNLVNTLSQAPNKDITKIIMNQIKDINDEINELKSSLEDNSAKKGKLNSEIKNLELVIDALKNFNDNIDFIEDVNQKRLLIQTIADTIIWDGETYTAKVKIHGLNDYEDEDVDKKKV

SEQ ID NO: 11912 - DNA, 50 bp, Clostridium butyricum
  source 1..50: mol_type = genomic DNA
tgatgtcattttacgactcgcggatctcctcggggtataaaacgacaaca

SEQ ID NO: 11913 - DNA, 40 bp, Clostridium butyricum; identical to SEQ ID NO: 11903
  source 1..40: mol_type = genomic DNA

SEQ ID NO: 11914 - DNA, 50 bp, Clostridium butyricum
  source 1..50: mol_type = genomic DNA
tgatgtcattttacgactcgcggacttcctcggggtataaaacgacaaca

SEQ ID NO: 11915 - DNA, 40 bp, Clostridium butyricum; identical to SEQ ID NO: 11905
  source 1..40: mol_type = genomic DNA

SEQ ID NO: 11916 - protein, 540 aa, Bacillus subtilis
MTSLNRTAIYLRKSRADMEAEERGEGETLEKHRKHLLDFAKENGLNIIKIRKEIVSGDSLLHRPEMMKLLQEIEAREYDSVLVIDIDRLGRGNMKEQGLILETFKESNTKIITPRKVYDLNNEWDEEHTEFETFISRRELKNTTRRLQRGRIASIKEGNYLGTAPPYGYEIVKTYKTRTLKPHPEESKIVKLIFDWYTNPDPDIRMGSSAIANKLNDMGVRTKKGDYWKPSSVLFIIKNAVYAGRIQWKKKDYKKSTTVGKKRDTKTRPKEDWIDVEGKHEGLVSLETYNKAQEILKTKYHIPYQIVNGITNPLAGLIRCKKCGGSMVYRPYTKQKPHIKCVNAPRCQNKASNFELVEQRLLQALNEWFRGYKAQWQHYKQNESNEKKSQEQEIKKAALNSLKNELAQTEKQKIKLFELLERGIYSEELFLERSEAVTSSINELKINIQKLEKELRVIKEDNKKNIDEILPYYENILDLYYKTDDPKKKNAMLKSIIHKAVYNKEKHQFRDEFELVIYPKLPEENDSILHHFNATKTDNM

SEQ ID NO: 11917 - DNA, 50 bp, Bacillus subtilis
  source 1..50: mol_type = genomic DNA
aacggataacatgtgagtggcattgaattgccactcgcaggttatccgtg

SEQ ID NO: 11918 - DNA, 40 bp, Bacillus subtilis
  source 1..40: mol_type = genomic DNA
gcaggataaggaagggaatgaaataagcctgattgacgtt

SEQ ID NO: 11919 - DNA, 50 bp, Bacillus subtilis
  source 1..50: mol_type = genomic DNA
aacggataacatgtgagtggcattcaattgccactcgcaggttatccgtg

SEQ ID NO: 11920 - DNA, 40 bp, Bacillus subtilis
  source 1..40: mol_type = genomic DNA
gcctgattagggagagaatcagaggagcctgattaacgtt

SEQ ID NO: 11921 - protein, 650 aa, Leclercia adecarboxylata
MYRPICYERVSSFDQVLSGSGLDDQRSIIDQFLDDNPENFTKNRIYITDEGVSAFKNANISAESNLGKFLQDVRGRKYGKGDALIVTSLDRLSRRSSWSENTIQFIVTSDIVIYDISTGLVLKKDDNFSKILMEIILQRSHNESLMKSVRAKVAWENKVARAALCGEVVSNRMPFWLENVDGKYSVISEQAEIVVKCFEWYVEGLSTGEIIRKINDPKWQMVKVSRLIRDRRLLGEHKRSNNEVVPNVYPIIVDSDLFATANRMMDAVMIPKKKPAEKMEYVPEVVKQIFILYDSGVGTGTIVKQIEPGWSTVNVLRVLRDKRVVDERIIDNLTFERVNQKLTKNGVAERIRKDIKIAKDDYITNLFPHILKCDCCDGNIAIHYNHVRAKYVVCRTREEKKQCDSKSIQYIRIERNIISTVMNVDFTKLLIEGNSNNNFKVIDALKIELDALRLEEQSYQSKIADRKVAGKKTSLPLMEGLTDVQDRIEETLEQLEQASVTRTVPDMSYDIESLLNPLNVELRAKARKELRHVLSKITYRVIGKHIVVRMRYFTDVLEHVLIIDNKRGSVGEVVCQIAVHNKDDVTTYETASFKLIATDEQLTIEVLQMIVLNDYVLLLNYIDGLKDGHSTNVAMWMREHMNEVLTNTLM

SEQ ID NO: 11922 - DNA, 50 bp, Leclercia adecarboxylata
  source 1..50: mol_type = genomic DNA
tgcccattgatgattttatgcgtcctgttgtaatctatgggaacattcaa

SEQ ID NO: 11923 - DNA, 40 bp, Leclercia adecarboxylata
  source 1..40: mol_type = genomic DNA
atattcatggcatgccgtcctttcgttttttagcacagga

SEQ ID NO: 11924 - DNA, 50 bp, Leclercia adecarboxylata
  source 1..50: mol_type = genomic DNA
tgcccattgatgattttatgcgtctggttgtaatctatgggaacattcaa

SEQ ID NO: 11925 - DNA, 40 bp, Leclercia adecarboxylata
  source 1..40: mol_type = genomic DNA
agcttcattgctttccgtctgttagtttttgggcacatga

SEQ ID NO: 11926 - protein, 535 aa, Flavonifractor plautii
MSKEYNIGIYIRLSMADEDTGYGSKAESDSIGNQRMLINRFLDNHPELSHCQRSEFADDGYTGTNFHRPQFTQMMEKVKRGEINLICVKDFSRFSRDYIETGNYLECTFPFMGVRFISINDGYDSDDYKGTTGGLEVVMRSIIYAAYSKDLSVKTTSAKIQMMKQGKYVGGYAPYGYVLHPTIRNELAVDPEAADVIRRIFREALEGSNTSQIARSLNDDGIPTPGQYFKSKHPDKKKFSNMSEKISWETVMVYNILKNLVYTGTLVSRKMKSCGVGSKKRVVNEPIIVEGTHEAIISKEDFELAQKVIRGGGRNPTRKQHDYPLKGLVRCGNCKRAMTRRKNKAGIRYFQCIHSVNNGNTDCPVGRSFPEMDIEKVVFHALTQFLALAQKEAIQNREVGDLRKSAIKECADKIRTLQKQNEQHKASKLRLYEKYAAGSITKEAYIQQKAAADVKIAENDGVIQRSHERMKELDSETACSDEKLDAVCEQYADCKALTYELTHAFISAVYIYDLDNIEIVWKFKDFLTTSEGEAK

SEQ ID NO: 11927 - DNA, 50 bp, Flavonifractor plautii
  source 1..50: mol_type = genomic DNA
tttagtccctacttgacacaagaagattattgtgcgataataggactaaa

SEQ ID NO: 11928 - DNA, 40 bp, Flavonifractor plautii
  source 1..40: mol_type = genomic DNA
caactgtattgtagtgaaggacctctcgcgctttggcagg

SEQ ID NO: 11929 - DNA, 50 bp, Flavonifractor plautii
  source 1..50: mol_type = genomic DNA
tttagtccctacttgacacaagaatgttattgtgcgataataggactaaa

SEQ ID NO: 11930 - DNA, 40 bp, Flavonifractor plautii
  source 1..40: mol_type = genomic DNA
aatcagtattgtcataaagtgcatcttgcgttttggcagg

SEQ ID NO: 11931 - protein, 483 aa, Streptococcus porcinus
MTTNKVAIYVRVSTTNQAEEGYSIEEQKDKLSSYCHIKDWSIYNIYTDGGFSGSNTERPALEKLIKDAKKKKFDTVLVYKLDRLSRSQKDTLYLIEDIFLENKIDFVSLLENFDTSTPFGKAMVGILSVFAQLEREQIKERMQLGKLGRAKSGKSMMWAKTSYGYDYHKETGTVTVNPWQSIIIADIFDWYLSGKSITKIRDALNDMYGEDNGGKVWNYRAVRMILANPVYCGYNQYKGEIYKGNHEPIISEEVFNKTQEELKIRQQLAAEYSNPRPFQAKYMLSGIAQCGYCYAPLKIIMGMVRKDGTRYIRYECYQRHPRKTKGVTVYNNNEKCHSGAYEKDEVEEYVLNEISKLQNDTNYLDELFSNPETESIDRDSYQKQIDELTKKLSRLNDLYIDDRISLEELQKKSAEFTTIRAFLEAELENDPTLKADKQKENMRQTLATDDILGLDYDKQKAIVRTLINKVQVTDEDIAIKWKI

SEQ ID NO: 11932 - DNA, 50 bp, Streptococcus porcinus
  source 1..50: mol_type = genomic DNA
taaagaaatttactatcctacatttcaataaaggatagtaaaattcatga

SEQ ID NO: 11933 - DNA, 40 bp, Streptococcus porcinus
  source 1..40: mol_type = genomic DNA
gggggcctttcctttattttcaaagaacatgaagccattt

SEQ ID NO: 11934 - DNA, 50 bp, Streptococcus porcinus
  source 1..50: mol_type = genomic DNA
taaagaaatttactatcctacattcaaataaaggatagtaaaattcatga

SEQ ID NO: 11935 - DNA, 40 bp, Streptococcus porcinus
  source 1..40: mol_type = genomic DNA
gggattttttactgtatgtcaaaagaataggaagccattt

SEQ ID NO: 11936 - protein, 485 aa, Enterococcus faecium
MYKIGIYMRLSKEDYEKNEESNSIKNQRQLILSYIDKNFSDFCVDNKIEYIDDGYSGMNTNRPAFERLMEDIRDLNTNCIIVKDLSRFSRDYIETGNYLENIFPFLGIRFISINDGFDSKDNCNGTIEIDTQFKSLLYDYYSKELSEKIKLTLNSLKTKGKIINEAPFGYVKDPKNKYKIIKDDISSKVVRKAFDMILEGHSQGSIAKNFNKEKYLTGSERKRVLRGESLENYKKILWTTGQISRILRNESYTGTFLYNKTYKTPIRKSIPRPKEEWGRIENAFEPIIFKEEFNKVQDILNQRSFPAHNDARDVDSPLRSKVICGVCGHKMKFDYRAVVGKNEKKYDCRFRCRVCSLNSKSNSISSKAVESYVLESLKRRGVKLEERKTIKSKKIDQGKVNALKFEIQKNYELYLDSKLTREEFLEIKNNINEQLSSLKEESETKDKLENITMCNTDLKLTNEIVENNIKEIIVDASKNIEIVYK

SEQ ID NO: 11937 - DNA, 50 bp, Enterococcus faecium
  source 1..50: mol_type = genomic DNA
ttataagcaataacttgacacaatagggggagaatagtataatagtgaca

SEQ ID NO: 11938 - DNA, 40 bp, Enterococcus faecium
  source 1..40: mol_type = genomic DNA
cttgttggtccaacaggatcggggaaaacgacgatcatga

SEQ ID NO: 11939 - DNA, 50 bp, Enterococcus faecium
  source 1..50: mol_type = genomic DNA
ttataagcaataacttgacacaataaggggagaatagtataatagtgaca

SEQ ID NO: 11940 - DNA, 40 bp, Enterococcus faecium
  source 1..40: mol_type = genomic DNA
gttgttgttcccacagtataagagaaaatggagatcatgt

SEQ ID NO: 11941 - protein, 497 aa, Christensenella minuta
MNGVIYARYSSDNQREESIEGQIRECMEFAEKQDINILGTYIDRALSAKTDNRPDFQRMIKDSTKGLFDVAIVWRLDRFARNRYDSAHYKMILRKNGVKVVSARESIAEDSTGILLESVLEGYAEFFSAELSEKVRRGMKENALKCKSNGCSIPMGYVVDSERHFQIDPVAAPIVQEVFNQYAEGATMKEIADGLNAKGIRSSRGGPISLNIISHMLKNRRYLGEYRYGDIVTPGGMPVIISEELFERAQERMKQNKKAPARHKAEDDYLLTTKLYCGKCGAFMVGESGTSHTAKIYRYYKCTNTKQRKTCDKKAVQKDWIENFVVSRIMQELMHDDELERLIDALLNLQSKESRELPLLERQLAETENGIRNLLDAIQQGLLTESTKERLRELEETKSKLQTSILQEKIRHPLLTREQISFFIYRFRDSDITKREQRQRLIDSFVNAIYLYDDKVVITLNYTEGAKTISLRDIEGSDLLKEATPKNVSIRSVEAFF

SEQ ID NO: 11942 - DNA, 50 bp, Christensenella minuta
  source 1..50: mol_type = genomic DNA
gggaagcgcggtgcgatgtatcctcccgggcacaccaaaccaagataatc

SEQ ID NO: 11943 - DNA, 40 bp, Christensenella minuta
  source 1..40: mol_type = genomic DNA
ggccagaggttcgaatcctcccgggcacaccaaatcggaa

SEQ ID NO: 11944 - DNA, 50 bp, Christensenella minuta
  source 1..50: mol_type = genomic DNA
gggaagcgcggtgcgatgtatcctagcgggcacaccaaaccaagataatc

SEQ ID NO: 11945 - DNA, 40 bp, Christensenella minuta
  source 1..40: mol_type = genomic DNA
agccagaggttcaaatccgagcggggtcaccccagcagaa

SEQ ID NO: 11946 - protein, 460 aa, Mycobacterium bohemicum
MTTALYLRQSFDRSRDEAAIDRQRAECRALAERKGWKKLVEYVDNDRSATNVRKPRPAYEQMLADMAAGRITAVVAWDLDRLHRRPIELEAFMPLADSMKIKLATVSGETDLSTAQGRLTARIKGDVAAHECEHKAARQRAAAKQMAERGIPKWPVVPFGYTADCQPHPVEAELVRKGYETILGGGSLSGLAREWNKGGYYGRNGKPWTASTMSLFIRAPRNAALRAHNNVIVGPGTWPPLVDETTWRATQSLLDDPARKPGPKTVRRHFLTGVLRCGKCEDGGRISGYHGPKGQERYRCWKCLGVAISKPETEETIRGIVCARLARPDATKLLIDRDAPNLDKLTAEANTIRARRIELATVFADGELTAAELRAARERLNAKLDAIEAKMSDAAAKRVFADVPLGTDRVQAALDKLDLDRQRVIINVMMTATIMPVGKGHRPRDGERFDPERIAIEWRR

SEQ ID NO: 11947 - DNA, 50 bp, Mycobacterium bohemicum
  source 1..50: mol_type = genomic DNA
atgggttatctagccagtcggtaacattagctgctggctagataaccctc

SEQ ID NO: 11948 - DNA, 40 bp, Mycobacterium bohemicum
  source 1..40: mol_type = genomic DNA
caagtgctactgctccacacatcatttgctgaagacgttt

SEQ ID NO: 11949 - DNA, 50 bp, Mycobacterium bohemicum
  source 1..50: mol_type = genomic DNA
atgggttatctagccagtcggtaagattagctgctggctagataaccctc

SEQ ID NO: 11950 - DNA, 40 bp, Mycobacterium bohemicum
  source 1..40: mol_type = genomic DNA
ctagttctactacttctcagattatttgctgaacacactt

SEQ ID NO: 11951 - protein, 615 aa, Enterobacter hormaechei
MLIQTKNRRLHMKKVFVYHRVSSDQQLDGSGIARQAELLEGYLERTGICAEMDDPAPVVLSDQGVSAFKGLNISEGELGAWMEQVRNGMWDGSILVVESIDRFSRQNPFDVMGYINALMAHNVAIHDVMANIVISRSNSKDLPFVMMNAQRAYDESKYKSDRIRKGWAKKREQAFNKGTIVTNKRPQWIEVENDKYVLNHKAAVVKEIFALYQTGMGCPTIAKQLQKKEGEQYKFNRPWTGELVHKILTNRRVTGKIFISEIIRNHDDIDNPVTQKKYDMDVYPVVINEEEFELVQELLKSRRPNAGRITVKKEGQEEVLIKSNLFSGIARCTECGGSMYHNVVRAKRTPKKGDPKIEEYKYIRCLNERDGLCENKAMAYETVERFVVEHLLGMDLNTVIKEQEFNPEIEVIRIQIDQVKDQITNYENGIERRKSAGKAVSFEMREELDDAKLELEQLLARQASLVTVQVDVPVLQDVNVTELYDVNNVDIRTRYENELNKIVSNVRLKRNGNFYTIDIIYKQNEVKRHVLFIENKKKEQKLISEVIIEDVDGTKFYYTQSFVISFKDGEIRFQQTKKDLSIIDYSLLLNYVDAVDRIDAVGVWMRNQFNFLTSN

SEQ ID NO: 11952 - DNA, 50 bp, Enterobacter hormaechei
  source 1..50: mol_type = genomic DNA
atgttgtaataagcatcacacactcaagtgtgttatgcttatacaaacaa

SEQ ID NO: 11953 - DNA, 40 bp, Enterobacter hormaechei; identical to SEQ ID NO: 4913
  source 1..40: mol_type = genomic DNA

SEQ ID NO: 11954 - DNA, 50 bp, Enterobacter hormaechei
  source 1..50: mol_type = genomic DNA
atgttgtaataagcatcacacactttagtgtgttatgcttatacaaacaa

SEQ ID NO: 11955 - DNA, 40 bp, Enterobacter hormaechei; identical to SEQ ID NO: 2275
  source 1..40: mol_type = genomic DNA

SEQ ID NO: 11956 - protein, 615 aa, Enterobacter sp HK169
MLIQTKIRRFNMKKVFVYHRVSSDQQLDGSGIARQAELLEGYLERTGICAEMDDPAPVVLSDQGVSAFKGLNISEGELGAWMEQVRNGMWDSSILVVESIDRFSRQNPFDVMGYINALMAHNVAIHDVMANIVISRSNSKDLPFVMMNAQRAYDESKYKSDRIRKGWAKKREQAFNKGTIVTNKRPQWIEVENDKYVLNHKAAVVKEIFALYQTGMGCPMIAKQLQTKEGEQYKFNRPWTGELVHKILTNRRVTGKIFISEIIRNHDDIENPVTQKKYDMDVYPVVINEEEFELVQELLKSRRPNAGRVTVKKDGQEEVLIKSNLFSGIARCTECGGPMYHNVVRAKRTPKKGDPKIEEYRYIRCLNERDGLCENKAMTYETVERFVVEHLLGMDLNTVIKEQEFNPEIEVIRIQIDQVKDQITNYENGIERRKSACKAVSFEMREELDDAKLELEQLLARQASLATVQVDLPVLKDVNVTELYNVNNVDIRTRYENELNKIVSNIRLKRNGNFYTIDIIYKQNELKRHVLFIENKKKEQKLISEVIIENVDGAKFYYTPSFVISVKDGEIRFQQTKEDLTIIDYSLLLNYVDAVDRCDAVGVWMRNNMSFLFTK

SEQ ID NO: 11957 - DNA, 50 bp, Enterobacter sp HK169; identical to SEQ ID NO: 10992
  source 1..50: mol_type = genomic DNA

SEQ ID NO: 11958 - DNA, 40 bp, Enterobacter sp HK169; identical to SEQ ID NO: 4913
  source 1..40: mol_type = genomic DNA

SEQ ID NO: 11959 - DNA, 50 bp, Enterobacter sp HK169
  source 1..50: mol_type = genomic DNA
atgttgtaataagcgtcacacactttaatgtgttatgcttatacaaacaa

SEQ ID NO: 11960 - DNA, 40 bp, Enterobacter sp HK169; identical to SEQ ID NO: 2275
  source 1..40: mol_type = genomic DNA

SEQ ID NO: 11961 - protein, 615 aa, Enterobacter roggenkampii
MLIQTKNRRLHMKKVFVYHRVSSDQQLDGSGIARQAELLEGYLERTGICAEMDDPAPVVLSDQGVSAFKGLNISEGELGAWMEQVRNGMWDSSILVVESIDRFSRQNPFDVMGYINALMAHNVAIHDVMANIVISRSNSKDLPFVMMNAQRAYDESKYKSDRIRKGWAKKREHAFNKGTIVTNKRPQWIEVENDKYVLNHKAAVVKEIFSLYQTGMGCPTIAKQLQTKEGEQYKFNRPWTGELVHKILTNRRVTGKIFISEIIRNHDDVENPVTQKKYDMDVYPVVINEEEFELVQELLKSRRPNAGRVTVKKDGQEEVLIKSNLFSGIARCTECGGPMYHNVVRAKRTPKKGDPKIEEYRYIRCLNERDGLCENKAMTYEMVERFVVEHLLGMDLSTVIKEHEFNPEIEVLRIQIDQVKDQITNYENGIERRKSAGKPISFDMREELDDAKSALERLLARQASLATVKVDVPVLQDVNVTELYDVNNVDIRTRYENELNKIVSNIRLKRNGKSYTIEINYKQNELKRHVLFVENKKKEQTLISEVIIEDVDGANFYYTPSFMIMLKDGEIRFQQTNEDLSIIDYSLLLNYIDAVDRNDVVGVWMRNQFNFLTSN

SEQ ID NO: 11962 - DNA, 50 bp, Enterobacter roggenkampii
  source 1..50: mol_type = genomic DNA
atgttgtaataagtgtcacacactcaagtgtgttatgcttatacaaacaa

SEQ ID NO: 11963 - DNA, 40 bp, Enterobacter roggenkampii; identical to SEQ ID NO: 4913
  source 1..40: mol_type = genomic DNA

SEQ ID NO: 11964 - DNA, 50 bp, Enterobacter roggenkampii
  source 1..50: mol_type = genomic DNA
atgttgtaataagtgtcacacactttagtgtgttatgcttatacaaacaa

SEQ ID NO: 11965 - DNA, 40 bp, Enterobacter roggenkampii; identical to SEQ ID NO: 2275
  source 1..40: mol_type = genomic DNA

SEQ ID NO: 11966 - protein, 604 aa, Enterobacter roggenkampii; identical to SEQ ID NO: 10996

SEQ ID NO: 11967 - DNA, 50 bp, Enterobacter roggenkampii; identical to SEQ ID NO: 10992
  source 1..50: mol_type = genomic DNA

SEQ ID NO: 11968 - DNA, 40 bp, Enterobacter roggenkampii; identical to SEQ ID NO: 4913
  source 1..40: mol_type = genomic DNA

SEQ ID NO: 11969 - DNA, 50 bp, Enterobacter roggenkampii; identical to SEQ ID NO: 11959
  source 1..50: mol_type = genomic DNA

SEQ ID NO: 11970 - DNA, 40 bp, Enterobacter roggenkampii; identical to SEQ ID NO: 2275
  source 1..40: mol_type = genomic DNA

SEQ ID NO: 11971 - protein, 604 aa, Enterobacter roggenkampii
MKKVFVYHRVSSDQQLDGSGIARQAELLEGYLERTGICAEMDDPAPVVLSDQGVSAFKGLNISEGELGAWMEQVRNGMWDSSILVVESIDRFSRQNPFDVMGYINALMAHNVAIHDVMANIVISRSNSKDLPFVMMNAQRAYDESKYKSDRIRKGWAKKREQAFNKGTIVTNKRPQWIEVENDKYVLNHKAAVVKEIFALYQTGMGCPTIAKQLQTKEGEQYKFNRPWTGELVHKILTNRRVTGKIFISEIIRNHDDIENPVTQKKYDMDVYPVVISEDEFELVQELLKSRRPNAGRVTVKKDGQEEVLIKSNLFSGIARCTECGGPMYHNVVRAKRTPKKGDPKIEEYRYIRCLNERDGLCENKAMTYETVEHFVVEHLLGMDLNTVIKEQEFNPEIEVIRIQIDQVKDQVTNYENGIERRKSAGKAVSFEMREELDDAKLELEQLLARQASLATVQVDLPVLQDVNVTELYNVNNVDIRTRYENELNKIVSNIRLKRNGNFYTIDIIYKQNELKRHVLFIENKKKEQKLISEVIIENVDGAKFYYTPSFVISVKDGEIRFQQTKEDLTIIDYSLLLNYVDAVDRCDAVGVWMRNNMSFLFTK

SEQ ID NO: 11972 - DNA, 50 bp, Enterobacter roggenkampii; identical to SEQ ID NO: 10992
  source 1..50: mol_type = genomic DNA

SEQ ID NO: 11973 - DNA, 40 bp, Enterobacter roggenkampii; identical to SEQ ID NO: 4913
  source 1..40: mol_type = genomic DNA

SEQ ID NO: 11974 - DNA, 50 bp, Enterobacter roggenkampii; identical to SEQ ID NO: 11959
  source 1..50: mol_type = genomic DNA

SEQ ID NO: 11975 - DNA, 40 bp, Enterobacter roggenkampii; identical to SEQ ID NO: 2275
  source 1..40: mol_type = genomic DNA

SEQ ID NO: 11976 - protein, 615 aa, Enterobacter roggenkampii
MLIQTKIRRFNMKKVFVYHRVSSDQQLDGSGIARQAELLEGYLERTGICAEMDDPAPVVLSDQGVSAFKGLNISEGELGAWMEQVRNGMWDSSILVVESIDRFSRQNPFDVMGYINALMAHNVAIHDVMANIVISRSNSKDLPFVMMNAQQAYDESKYKSDRIRKGWAKKREQAFNKGTIVTNKRPQWIEVENDKYVLNHKAAVVKEIFALYQTGMGCPTIAKQLQTKEGEQYKFNRPWTGELVHKILTNRRVTGKIFISEIIRNHDDIENPVTQKKYDMDVYPVVINEEEFELVQELLKSRRPNAGRVTVKKDGQEEVLIKSNLFSGIARCTECGGPMYHNVVRAKRTPKKGDPKIEEYRYIRCLNERDGLCENKAMTYETVERFVVEHLLGMDLNTVIKEQEFNPEIEVIRIQIDQVKDHITNYENGIERRKSAGKAVSFEMREELDDAKLELEQLLARQASLATVQVDLPVLQDVNVTELYNVNNVDIRTRYENELNKIVSNIRLKRNGNFYTIDIIYKQNELKRHVLFIENKKKEQKLISEVIIENVDGAKFYYTPSFVISVKDGEIRFQQTKEDLTIIDYSLLLNYVDAVDRCDAVGVWMRNNMSFLFTK

SEQ ID NO: 11977 - DNA, 50 bp, Enterobacter roggenkampii; identical to SEQ ID NO: 10992
  source 1..50: mol_type = genomic DNA

SEQ ID NO: 11978 - DNA, 40 bp, Enterobacter roggenkampii; identical to SEQ ID NO: 4913
  source 1..40: mol_type = genomic DNA

SEQ ID NO: 11979 - DNA, 50 bp, Enterobacter roggenkampii; identical to SEQ ID NO: 11959
  source 1..50: mol_type = genomic DNA

SEQ ID NO: 11980 - DNA, 40 bp, Enterobacter roggenkampii; identical to SEQ ID NO: 2275
  source 1..40: mol_type = genomic DNA

SEQ ID NO: 11981 - protein, 615 aa, Enterobacter roggenkampii
MLIQTKIRRFNMKKVFVYHRVSSDQQLDGSGIARQAELLEGYLERTGICAEMDDPAPVVLSDQGVSAFKGLNISEGELGAWMEQVRNGMWDSSILVVESIDRFSRQNPFDVMGYINALMAHNVAIHDVMANIVISRSNSKDLPFVMMNAQRAYDESKYKSDRIRKGWAKKREQAFNKGTIVTNKRPQWIEVENDKYVLNHKAAVVKEIFALYQTGMGCPTIAKQLQTKEGEQYKFNRPWTGELVHKILTNRRVTGKIFISEIIRNHDDIENPVTQKKYDMDVYPVVISEDEFELVQELLKSRRPNAGRVTVKKDGQEEVLIKSNLFSGIARCTECGGPMYHNVVRAKRTPKKGDPKIEEYRYIRCLNERDGLCENKAMTYETVEHFVVEHLLGMDLNTVIKEQEFNPEIEVIRIQIDQVKDQITNYENGIERRKSAGKAVSFEMREELDDAKLELEQLLARQASLATVQVDLPVLQDVNVTELYNVNNVDIRTRYENELNKIVSNIRLKRNGNFYTIDIIYKQNELKRHVLFIENKKKEQKLISEVIIENVDGAKFYYTPSFVISVKDGEIRFQQTKEDLTIIDYSLLLNYVDAVDRCDAVGVWMRNNMSFLFTK

SEQ ID NO: 11982 - DNA, 50 bp, Enterobacter roggenkampii; identical to SEQ ID NO: 10992
  source 1..50: mol_type = genomic DNA

SEQ ID NO: 11983 - DNA, 40 bp, Enterobacter roggenkampii; identical to SEQ ID NO: 4913
  source 1..40: mol_type = genomic DNA

SEQ ID NO: 11984 - DNA, 50 bp, Enterobacter roggenkampii; identical to SEQ ID NO: 11959
  source 1..50: mol_type = genomic DNA

SEQ ID NO: 11985 - DNA, 40 bp, Enterobacter roggenkampii; identical to SEQ ID NO: 2275
  source 1..40: mol_type = genomic DNA

SEQ ID NO: 11986 - protein, 615 aa, Enterobacter roggenkampii
MLIQTKIRRFNMKKVFVYHRVSSDQQLDGSGIARQAELLEGYLERTGICAEMDDPAPVVLSDQGVSAFKGLNISESELGAWMEQVRNGMWDSSILVVESIDRFSRQNPFDVMGYINALMAHNVAIHDVMANIVISRSNSKDLPFVMMNAQRAYDESKYKSDRIRKGWAKKREQAFNKGTIVTNKRPQWIEVENDKYVLNHKAAVVKEIFALYQTGMGCPTIAKQLQTKEGEQYKFNRPWTGELVHKILTNRRVTGKIFISEIIRNHDDIENPVTQKKYDMDVYPVVINEEEFELVQELLKSRRPNAGRVTVKKDGQEEVLIKSNLFSGIARCTECGGPMYHNVVRAKRTPKKGDPKIEEYRYIRCLNERDGLCENKAMTYETVERFVVEHLLSMDLNTVIKEQEFNPEIEVIRIQIDQVKDQITNYENGIERRKSAGKAVSFEMREELDDAKLELEQLLARQASLATVQVDLPVLQDVNVTELYNVNNVDIRTRYENELNKIVSNIRLKRNGNFYTIDIIYKQNELKRHVLFIENKKKEQKLISEVIIENVDGAKFYYTPSFVISVKDGEIRFQQTKEDLTIIDYSLLLNYVDAVDRCDAVGVWMRNNMSFLFTK

SEQ ID NO: 11987 - DNA, 50 bp, Enterobacter roggenkampii; identical to SEQ ID NO: 10992
  source 1..50: mol_type = genomic DNA

SEQ ID NO: 11988 - DNA, 40 bp, Enterobacter roggenkampii; identical to SEQ ID NO: 4913
  source 1..40: mol_type = genomic DNA

SEQ ID NO: 11989 - DNA, 50 bp, Enterobacter roggenkampii; identical to SEQ ID NO: 11959
  source 1..50: mol_type = genomic DNA

SEQ ID NO: 11990 - DNA, 40 bp, Enterobacter roggenkampii; identical to SEQ ID NO: 2275
  source 1..40: mol_type = genomic DNA

SEQ ID NO: 11991 - protein, 615 aa, Enterobacter roggenkampii
MLIQTKIRRFNMKKVFVYHRVSSDQQLDGSGIARQAELLEGYLERTGICAEMDDPAPVVLSDQGVSAFKGLNISEGELGAWMEQVRNGMWDSSILVVESIDRFSRQNPFDVMGYINALMAHNVAIHDVMANIVISRSNSKDLPFVMMNAQRAYDESKYKSDRIRKGWAKKREQAFNKGTIVTNKRPQWIEVENDKYVLNHKAAVVKEIFALYQTGMGCPTIAKQLQTKEGEQYKFNRPWTGELVHKILTNRRVTGKIFISEIIRNHDDIENPVTQKKYDMDVYPVVINEEEFELVQELLKSRRPNAGRVTVKKDGQEEVLIKSNLFSGIARCTECGGPMYHNVVRAKRTPKKGDPKIEEYRYIRCLNERDGLCENKAMTYETVERFVVEHLLGMDLNTVIKEQEFNPEIEVIRIQIDQVKDQITNYENGIERRKSAGKAVSFEMREELDDAKLELEQLLARQASLATVQVDLPVLQDVNVTELYNVNNVDIRTRYENELNKIVSNIRLKRNGNFYTIDIIYKQNELKRHVLFIENKKKEQKLISEVIIENVDGAKFYYTPSFVISVKDGEIRFQQTKEDLTIIDYSLLLNYVDAVDRCDAVGVWMRNNMSFLFTK

SEQ ID NO: 11992 - DNA, 50 bp, Enterobacter roggenkampii; identical to SEQ ID NO: 10992
  source 1..50: mol_type = genomic DNA

SEQ ID NO: 11993 - DNA, 40 bp, Enterobacter roggenkampii; identical to SEQ ID NO: 4913
  source 1..40: mol_type = genomic DNA

SEQ ID NO: 11994 - DNA, 50 bp, Enterobacter roggenkampii; identical to SEQ ID NO: 11959
  source 1..50: mol_type = genomic DNA

SEQ ID NO: 11995 - DNA, 40 bp, Enterobacter roggenkampii; identical to SEQ ID NO: 2275
  source 1..40: mol_type = genomic DNA

SEQ ID NO: 11996 - protein, 602 aa, Enterobacter kobei
MKKLFIYHRVSTDKQAESGTGIERQEEDLQRFIESKNLLEGMDEPTPTVISDRGVSAFKGHNMTRGELGKWVDQVSRGMWDGSILVVESMDRFSRQNPLIVSRYLSTIVEQNVTIWDKALNIAINLDNSAMLPIIIMSTQRAYEESKVKSDRIRDGKKRKRETSLANGDIITSLRPKWIDVKGTKYVLNERAEIVREIFRLYQSGLGTPTIANVLNERGKEWQFDRVWRAEAVHKVLRNKRVTGEITLIETVRHHNDLKNPVTQTKRVMDVYPIVIEREVFDLVQATLKARRPGAGRTEVKDELDSDLVHPNILGGLCRCTKCGSAMYHNKIVANRKSKKNGDFKEEYRYIRCLNERDNLCDNKAVNYGIVEQRLIEHIVGLDFSTILTSTEVNPANELLKMKILKAKEVVQEYEEGIAEMEREGEMVGFKTMKALEKAEANLKELEDSYVDDEVQVDTSLFTQANMDDMLNASKLDIRGRLERELSKVISTIKIQREGKQYYCEIKYKQRPEIKHILVIDSRKKGGVNGFYAEQQEEYEVFYSTTFALFVQPGQMPQFKQLEKPVNQIDYTLLQNHLEYIHGYDSTVAWMRDSVKFVMMDH

SEQ ID NO: 11997 - DNA, 50 bp, Enterobacter kobei
  source 1..50: mol_type = genomic DNA
tgtttgtaaaatccgctcactatacaaatagtgaatgcttagtacaaaca

SEQ ID NO: 11998 - DNA, 40 bp, Enterobacter kobei; identical to SEQ ID NO: 4913
  source 1..40: mol_type = genomic DNA

SEQ ID NO: 11999 - DNA, 50 bp, Enterobacter kobei
  source 1..50: mol_type = genomic DNA
tgtttgtaaaatccgctcactatattaatagtgaatgcttagtacaaaca

SEQ ID NO: 12000 - DNA, 40 bp, Enterobacter kobei; identical to SEQ ID NO: 2275
  source 1..40: mol_type = genomic DNA

SEQ ID NO: 12001 - protein, 615 aa, Enterobacter kobei
MLIQTKIRRFNMKKVFVYHRVSSDQQLDGSGIARQAELLEGYLERTGICAEMDDPAPVVLSDQGVSAFKGLNISEGELGAWMEQVRNGMWDSSILVVESIDRFSRQNPFDVMGYINALMAHNVAIHDVMANIVISRSNSKDLPFVMMNAQRAYDESKYKSDRIRKGWAKKREHAFNKGTIITNKRPQWIEVENDKYVLNEKAAVVKEIFALYQTGMGCPTIAKQLQRKEGEQYKFNRPWTGELVHKILTNRRVTGKIFISEIIRNHDDIENPVTQKKYDMDVYPVVINEEEFELVQELLKSRRSNAGRITVKKDGQEEVLIKSNLFSGIARCTECGGPMYHNVVRAKRTPKKGDPKIEEYRYIRCLNERDGLCENKAMTYETVERFVVEHLLGMDLSTVMKEQEFNPEIEVLRIQIDQVKDQITNYENGIERRKSAGKPISFDMREELDDAKSELERLLARQASLATVQVDVPVLQDVNVTELYDVNNVDIRTRYESELNKIVSNICLKRNGTSYTIDINYKQNELKRHVLFVENKKKEQTLISEVIIEDVDGAKFYYTPSFMIMLKDSEIRFQQTNEDLSIIDYSLLLNYIDAVDRNDAVGVWMRDQFNFLTSN

SEQ ID NO: 12002 - DNA, 50 bp, Enterobacter kobei
  source 1..50: mol_type = genomic DNA
gtgttgtaataagcgtcacacactcaagtgtgttatgcttatacaaacaa

SEQ ID NO: 12003 - DNA, 40 bp, Enterobacter kobei; identical to SEQ ID NO: 4913
  source 1..40: mol_type = genomic DNA

SEQ ID NO: 12004 - DNA, 50 bp, Enterobacter kobei
  source 1..50: mol_type = genomic DNA
gtgttgtaataagcgtcacacactttagtgtgttatgcttatacaaacaa

SEQ ID NO: 12005 - DNA, 40 bp, Enterobacter kobei; identical to SEQ ID NO: 2275
  source 1..40: mol_type = genomic DNA

SEQ ID NO: 12006 - protein, 615 aa, Enterobacter ludwigii
MLKQTKIRRFNMKKVFVYHRVSSDQQLDGSGIARQAELLEGYLERTGICAEMDDPAPVVLSDQGVSAFKGLNISEGELGAWMEQVRNGMWDSSILVVESIDRFSRQNPFDVMGYINALMVHNVAIHDVMANIVISRSNSKDLPFVMMNAQRAYDESKYKSDRIRKGWAKKREQAFNKGTIVTNKRPQWIEVENDKYVLNHKAAVVKEIFALYQTGMGCPTIAKQLQKKEGEQYKFNRPWTGELVHKILTNRRVTGKIFISEIIRNHDDIDNPVTQKKYDMDVYPVVINEEEFELVQELLKSRRPNAGRVTVKKDGQEEVLIKSNLFSGIARCTECGGTMYHNVVRAKRTPKKGDPKIEEYRYIRCLNERDGLCENKAMTYETVERFVVEHLLGMDLSTVMKEQEFNPEIEVLRIQIDQAMDQITNYENGIERRKSTGKPISFEMREELDDAKSELERLLARQASLATVQVDVPVLQDVNVTELYDVNNVDIRTRYENELNKIVSIIRLKRNGTSYTIDINYKQNEVKRHVLFIENKKKEQKLISEVIIEDVDGTKFYYTQSFVISFKDGEIRFQQTKKDLSIIDYSLLLNYVDAVDRIDAVGVWMRNQFNFLTSN

SEQ ID NO: 12007 - DNA, 50 bp, Enterobacter ludwigii
  source 1..50: mol_type = genomic DNA
atgttgtaataagcgtcacacactcaagtgtgttatgcttaaacaaacaa

SEQ ID NO: 12008 - DNA, 40 bp, Enterobacter ludwigii; identical to SEQ ID NO: 4913
  source 1..40: mol_type = genomic DNA

SEQ ID NO: 12009 - DNA, 50 bp, Enterobacter ludwigii
  source 1..50: mol_type = genomic DNA
atgttgtaataagcgtcacacactttagtgtgttatgcttaaacaaacaa

SEQ ID NO: 12010 - DNA, 40 bp, Enterobacter ludwigii; identical to SEQ ID NO: 2275
  source 1..40: mol_type = genomic DNA

SEQ ID NO: 12011 - protein, 615 aa, Enterobacter ludwigii
MLIQTKIKRFNMKKVFVYHRVSSDQQLDGSGIARQAELLEGYLERTGICADMDDPAPVVLSDQGVSAFKGLNISEGELGAWMEQVRYGMWDSSILVVESIDRFSRQNPFDVMGYINALMAHNVAIHDVMANIVISRSNSKDLPFVMMNAQRAYDESKYKSDRIRKGWAKKREQAFNKGTIVTNKRPQWIEVENDKYVLNHKAAVVKEIFALYQTGMGCPTIAKQLQTKEGEQYKFNRPWTGELVHKILTNRRVTGKIFISEIIRNHDDIDNPVTQKKYDMDVYPVVISEDEFELVQELLKSRRPNAGRITVKKEGQEEVLIKSNLFSGIARCTECGGSMYHNVVRAKRTPKKGDPKIEEYRYIRCLNERDGLCENKAMTYETVERFVVEHLLGMDLNTVIKEQEFNPEIEVIRIQIDQVKDQITNYENGIERRKNAGKAVSFEMREELDDAKLELEKLLARQASLATVQVDVPVLQDVNVAELYNVNNVDIRTRYENELNKIVSNISLKRNGNFYTIDIIYKQNELKRHVLFIENKKKEQKLISEVIIENVDGTKFYYTPSFVISVKDGEIRFQQTKEDLTIIDYSLLLNYVDAVDRNDAVGVWMRNQFNFLTSN

SEQ ID NO: 12012 - DNA, 50 bp, Enterobacter ludwigii; identical to SEQ ID NO: 11952
  source 1..50: mol_type = genomic DNA

SEQ ID NO: 12013 - DNA, 40 bp, Enterobacter ludwigii; identical to SEQ ID NO: 4913
  source 1..40: mol_type = genomic DNA

SEQ ID NO: 12014 - DNA, 50 bp, Enterobacter ludwigii; identical to SEQ ID NO: 11954
  source 1..50: mol_type = genomic DNA

SEQ ID NO: 12015 - DNA, 40 bp, Enterobacter ludwigii; identical to SEQ ID NO: 2275
  source 1..40: mol_type = genomic DNA

SEQ ID NO: 12016 - protein, 615 aa, Enterobacter ludwigii
MLIQTKNRRLNMKKVFVYHRVSSDQQLDGSGIARQAELLEGYLERTGICADMDEPAPVVLSDQGVSAFKGLNISEGELGAWMEQVRNGMWDSSILVVESIDRFSRQNPFDVMGYINALMAHNVAIHDVMANIVISRSNSKDLPFVMMNAQRAYDESKYKSDRIRKGWAKKREQAFNKGTVVTNKCPQWIEVENDKYVLNHKAAVVKEIFALYQTGMGCPTIAKQLQKKEGEQYKFNRPWTGELVHKILTNRRVTGKIFISEIIRNHDDIDNPVTQKKYDMDVYPVVINEEEFELVQELLKSRRPNAGRITVKKEGQEEVLIKSNLFSGIARCTECGGSMYHNVVRAKRTPKKGEPKIEEYRYIRCLNERDGLCENKAMTYETVERFVVEHLLGMDLNTVIKAQEFNPEIEVIRIQIDQVKDQITNYENGIERRKNAGKAVSFEMREELDDAKLELEQLLARQASLATVQVDVPVLQDVNVTELYNVNNVDIRTRYENELNKIVSNIRLKRNGNFYTIDIIYKQNELKRHVLFIENKKKEQKLISEVIIDDVDGAKFYYTPSFIISVKDGEIRFQQTKEDLSIVDYSLLLNYVDAGDGIDAVGVWMRNNMSFLFTN

SEQ ID NO: 12017 - DNA, 50 bp, Enterobacter ludwigii; identical to SEQ ID NO: 11952
  source 1..50: mol_type = genomic DNA

SEQ ID NO: 12018 - DNA, 40 bp, Enterobacter ludwigii; identical to SEQ ID NO: 4913
  source 1..40: mol_type = genomic DNA

SEQ ID NO: 12019 - DNA, 50 bp, Enterobacter ludwigii; identical to SEQ ID NO: 11954
  source 1..50: mol_type = genomic DNA

SEQ ID NO: 12020 - DNA, 40 bp, Enterobacter ludwigii; identical to SEQ ID NO: 2275
  source 1..40: mol_type = genomic DNA

SEQ ID NO: 12021 - protein, 615 aa, Enterobacter ludwigii
MLIQTKTRRFNMKKVFVYHRVSSDQQLDGSGIARQAELLEGYLERTGICADMDDPAPVVLSDQGVSAFKGLNISEGELGAWMEQVRNGMWDSSILVVESIDRFSRQNPFDVMGYINALMAHNVAIHDVMANIVISRSNSKDLPFVMMNAQRAYDESKYKSDRIRKGWAKKREQAFNKGTVVTNKRPQWIEVENDKYVLNHKAAVVKEIFALYQTGMGCPTIAKQLQTKEGEQYKFNRPWTGELVHKILTNRRVTGKIFISEIIRNHDDIENPVTQKKYDMDVYPVVINEEEFELVQELLKSRRPNAGRVTVKKDGQEEVLIKSNLFSGIARCTECGGPMYHNVVRAKRTPKKGDPKIEEYRYIRCLNERDGLCENKAMTYETVERFVVEHLLGMDLSTVMKEQEFNPEIEVLRIQIDQVKDQITNYENGIERRKSTGKPISFEMREELDDAKSELERLLARQASLATVQVDVPVLQDVNVTELYNVNNVDIRTRYENELNKIVSNIRLKRNGNFYTIDIIYKQNELKRHVLFIENKKKEQKLISEVIIENVDGAKFYYTPSFVISVKDGEIRFQQTKEDLSIIDYSLLLNYVDAVDRCDAVGVWMRNNMSFLFTK

SEQ ID NO: 12022 - DNA, 50 bp, Enterobacter ludwigii; identical to SEQ ID NO: 2497
  source 1..50: mol_type = genomic DNA

SEQ ID NO: 12023 - DNA, 40 bp, Enterobacter ludwigii; identical to SEQ ID NO: 4913
  source 1..40: mol_type = genomic DNA

SEQ ID NO: 12024 - DNA, 50 bp, Enterobacter ludwigii
  source 1..50: mol_type = genomic DNA
atgttgtaataagcgtcacacactttagtgtgttatgcttatacaaacaa

SEQ ID NO: 12025 - DNA, 40 bp, Enterobacter ludwigii; identical to SEQ ID NO: 2275
  source 1..40: mol_type = genomic DNA

SEQ ID NO: 12026 - protein, 615 aa, Enterobacter bugandensis
MFIQTKIRRSPMKKVFVYHRVSSDQQLDGSGIARQAELLEGYLERTGICAEMDDPAPVVLSDQGVSAFKGLNISEGELGAWMEQVRNGMWDSSILVVESIDRFSRQNPFDVMGYINALMAHNVAIHDVMANIVISRSNSKDLPFVMMNAQRAYDESKYKSDRIRKGWAKKREQAFNKGTIITNKRPQWIEVDNDKYVLNEKAAVVKEIFALYQTGMGCPTIAKQLQRKEGEQYKFNRPWTGELVHKILTNRRVTGKIFISEIIRNHDDIENPVTQKKYDMDVYPVVINEEEFELVQELLKSRRSNAGRITVKKDGQEEVLIKSNLFSGIARCTECGGPMYHNVVRAKRTPKKGDPKIEEYRYIRCLNERDGLCENKAMTYETVERFVVEHLLGMDLSTVMKEQEFNPEIEVLRIQIDQVKDQIANYENGIERRKSTGKPISFEMREELDDAKSELERLLARQASLATVQVDVPVLQDVNVTELYDVNNVDIRTRYENELNKIVSNIRLKRNGTYYTIDINYKQNELKRHVLFVENKKKELTLISEVIIEDVDGGKFYYTPSFMIRLKDGEIRFQQTNEDLSIVDYSLLLNYVDAIDRNDAVGVWMRNQFNFLTSN

SEQ ID NO: 12027 - DNA, 50 bp, Enterobacter bugandensis
  source 1..50: mol_type = genomic DNA
atgttgtaataagcgatacacactcaagtgtgttatgtttatacaaacaa

SEQ ID NO: 12028 - DNA, 40 bp, Enterobacter bugandensis; identical to SEQ ID NO: 4913
  source 1..40: mol_type = genomic DNA

SEQ ID NO: 12029 - DNA, 50 bp, Enterobacter bugandensis
  source 1..50: mol_type = genomic DNA
atgttgtaataagcgatacacactttagtgtgttatgtttatacaaacaa

SEQ ID NO: 12030 - DNA, 40 bp, Enterobacter bugandensis; identical to SEQ ID NO: 2275
  source 1..40: mol_type = genomic DNA

SEQ ID NO: 12031 - protein, 615 aa, Enterobacter bugandensis
MLVQTKIRRSPMKKVFVYHRVSSDQQLDGSGIARQAELLEGYLERTGICAEMDDPAPVVLSDQGVSAFKGLNISEGELGAWMEQVRNGMWDSSILVVESIDRFSRQNPFDVMGYINALMAHNVAIHDVMANIVISRSNSKDLPFVMMNAQRAYDESKYKSDRIRKGWAKKREQAFNKGTIVTNKRPQWIEVENDKYVVNEKAAVVKEIFALYQTGMGCPTIAKQLQRKEGEQYKFNRPWTGELVHKILTNRRVTGKIFISEIIRNHDDIENPVTQKKYDMDVYPVVINEEEFELVQELLKSRRPNAGRVTVKKDGQEEVLIKSNLFSGIARCTECGGPMYHNVVRAKRTPKKGDPKIEEYRYIRCLNERDGLCENKAMTYETVERFVVEHLLGMDLSTVMKEQEFNPEIEVLRIQIDQVKDQITNYENGIERRKSAGKPISFDMREELDDAKSELERLLARQASLATVQVDVPVLQDVNVTELYDVNNVDIRTRYESELNKIVSNIRLKRNGISYTIDINYKQNELKRHVLFVENKKKEQTLISEVIIEDVDGAKFYYTPSFMIMLKDSDIRFQQTNEDLSIIDYSLLLNYIDAVDRNDAVGVWMRDQFKFLTSN

SEQ ID NO: 12032 - DNA, 50 bp, Enterobacter bugandensis
  source 1..50: mol_type = genomic DNA
atgttgtaataagcgtcacacactcaagtgtgttatgcttgtacaaacaa

SEQ ID NO: 12033 - DNA, 40 bp, Enterobacter bugandensis; identical to SEQ ID NO: 4913
  source 1..40: mol_type = genomic DNA

SEQ ID NO: 12034 - DNA, 50 bp, Enterobacter bugandensis
  source 1..50: mol_type = genomic DNA
atgttgtaataagcgtcacacactttagtgtgttatgcttgtacaaacaa

SEQ ID NO: 12035 - DNA, 40 bp, Enterobacter bugandensis; identical to SEQ ID NO: 2275
  source 1..40: mol_type = genomic DNA

SEQ ID NO: 12036 - protein, 615 aa, Raoultella planticola
MLIQTKIRRFNMKKVFVYHRVSSDQQLDGSGIARQAELLEGYLERTGICAEMDDPAPVVLSDQGVSAFKGLNISEGELGAWMEQVRNGMWDSSILVVESIDRFSRQNPFDVMGYINALMAHNVAIHDVMANIVISRSNSKDLPFVMMNAQRAYDESKYKSDRIRKGWAKKREQAFNKGTIVTNKRPQWIEVENDKYVLNYKAAVVKEIFALYQTGMGCPTIAKQLQTKEGEQYKFNRPWTGELVHKILTNRRVTGKIFISEIIRNHDDIENPVTQKKYDMDVYPVVISEDEFELVQELLKSRRPNAGRVTVKKDGQEEVLIKSNLFSGIARCTECGGPMYHNVVRAKRTPKKGDPKIEEYRYIRCLNERDGLCENKAMTYETVEHFVVEHLLGMDLNTVIKEQEFNPEIEVIRIQIDQVKDQITNYENGIERRKSAGKAVSFEMREELDDAKLELEQLLARQASLATVQVDLPVLQDVNVTELYNVNNVDIRTRYENELNKIVSNIRLKRNGNFYTIDIIYKQNELKRHVLFIENKKKEQKLISEVIIENVDGAKFYYTPSFVISVKDGEIRFQQTKEDLTIIDYSLLLNYVDAVDRCDAVGVWMRNNMSFLFTK

SEQ ID NO: 12037 - DNA, 50 bp, Raoultella planticola; identical to SEQ ID NO: 10992
  source 1..50: mol_type = genomic DNA

SEQ ID NO: 12038 - DNA, 40 bp, Raoultella planticola; identical to SEQ ID NO: 4913
  source 1..40: mol_type = genomic DNA

SEQ ID NO: 12039 - DNA, 50 bp, Raoultella planticola; identical to SEQ ID NO: 11959
  source 1..50: mol_type = genomic DNA

SEQ ID NO: 12040 - DNA, 40 bp, Raoultella planticola; identical to SEQ ID NO: 2275
  source 1..40: mol_type = genomic DNA

SEQ ID NO: 12041 - protein, 615 aa, Enterobacter asburiae
MLIQTKNRGFNMKKVFVYHRVSSDQQLDGSGIARQAELLEGYLERTGICAEMDDPAPVVLSDQGVSAFKGLNISEGELGAWMEQVRNGMWDSSILVVESIDRFSRQNPFDVMGYINALMAHNVAIHDVMANIVISRSNSKDLPFVMMNAQRAYDESKYKSDRIRKGWAKKREQAFNKGTIVTNKRPQWIEVENDKYVLNHKAAVVKEIFALYQTGMGCPTIAKQLQRKEGEQYKFNRPWTGELVHKILTNSRVTGKIFISEIIRNHDDIENPVTQKKYNMDVYPVVINEEEFELVQELLKSRRPNAGRVTVKKDGQEEVLIKSNLFSGIARCTKCGGPMYHNVVRAKRTPKKGDPKIEEYRYIRCLNERDGLCENKAMAYETVERFVVEHMLGMDLSTVIKEQEFNPEIEVLRIQIDQVKDQITNYENGIERRKSAGKPISFDMREELDDAKSELERLLARQASLATVQVDVPVLQDVNVAELYNVNNVDIRTRYENELNKIVSNIRLKRNGTSYTIDINYKQNELKKHVLFVENKKKEQTLISEVIIEDVDDAKFYYTPSFMIRLKDGKIRFQQTKEDLSVIDYSLLLNYVDAVDGIDAVGVWMRNQFNFLTSK

SEQ ID NO: 12042 - DNA, 50 bp, Enterobacter asburiae
  source 1..50: mol_type = genomic DNA
atgttgtaataggcatcacacactcaagtgtgttatgcttatacaaacaa

SEQ ID NO: 12043 - DNA, 40 bp, Enterobacter asburiae; identical to SEQ ID NO: 4913
  source 1..40: mol_type = genomic DNA

SEQ ID NO: 12044 - DNA, 50 bp, Enterobacter asburiae
  source 1..50: mol_type = genomic DNA
atgttgtaataggcatcacacactttagtgtgttatgcttatacaaacaa

SEQ ID NO: 12045 - DNA, 40 bp, Enterobacter asburiae; identical to SEQ ID NO: 2275
  source 1..40: mol_type = genomic DNA

SEQ ID NO: 12046 - protein, 615 aa, Enterobacter asburiae
MLIQTKNRGFNMKKVFVYHRVSSDQQLDGSGIARQAELLEGYLERTGICAEMDDPAPVVLSDQGVSAFKGLNISEGELGAWMEQVRNGMWDSSILVVESIDRFSRQNPFDVMGYINALMAHNVAIHDVMANIVISRSNSKDLPFVMMNAQRAYDESKYKSDRIRKGWAKKREQAFNKGTIVTNRRPQWIEVENDKYVLNHKAAVVKEIFALYQTGMGCPTIAKQLQRKEGEQYKFNRPWTGELVHKILTNRRVTGKIFISEIIRNHDDIDNPVTQKKYDMDVYPVVINEEEFELVQELLKSRRPNAGRITVKKEGQEEVLIKSNLFSGIARCTECGGSMYHNVVRAKRTPKKGDPKIEEYRYIRCLNERDGLCENKAMTYETVERFVVEHLLGMDLNTVIKEQEFNPEIEVIRIQIDQVKDQITNYENGIERRKSAGKAVSFEMREELDDAKLELEQLLARQASLATVQVDVPVLQDVNVTELYKVNNVDIRTRYENELNKIVSNIRLKRNGKSYTIDINYKQNELKRHVLFVENKKKEQTLISEVIIEDVDGAKFYYTPSFMIMLKDGEIRFQQSKEDLSNIDYSLLLNYVDAVDRNDAVGVWMRNQFNFLTSN

SEQ ID NO: 12047 - DNA, 50 bp, Enterobacter asburiae; identical to SEQ ID NO: 3102
  source 1..50: mol_type = genomic DNA

SEQ ID NO: 12048 - DNA, 40 bp, Enterobacter asburiae; identical to SEQ ID NO: 4913
  source 1..40: mol_type = genomic DNA

SEQ ID NO: 12049 - DNA, 50 bp, Enterobacter asburiae
  source 1..50: mol_type = genomic DNA
atgttgtaataggcgtcacacactttagtgtgttatgcttatacaaacaa

SEQ ID NO: 12050 - DNA, 40 bp, Enterobacter asburiae; identical to SEQ ID NO: 2275
  source 1..40: mol_type = genomic DNA

SEQ ID NO: 12051 - protein, 615 aa, Enterobacter asburiae; identical to SEQ ID NO: 10991

SEQ ID NO: 12052 - DNA, 50 bp, Enterobacter asburiae; identical to SEQ ID NO: 10992
  source 1..50: mol_type = genomic DNA

SEQ ID NO: 12053 - DNA, 40 bp, Enterobacter asburiae; identical to SEQ ID NO: 4913
  source 1..40: mol_type = genomic DNA

SEQ ID NO: 12054 - DNA, 50 bp, Enterobacter asburiae; identical to SEQ ID NO: 11959
  source 1..50: mol_type = genomic DNA

SEQ ID NO: 12055 - DNA, 40 bp, Enterobacter asburiae; identical to SEQ ID NO: 2275
  source 1..40: mol_type = genomic DNA

SEQ ID NO: 12056 - protein, 604 aa, Enterobacter asburiae
MKKVFVYHRVSSDQQLDGSGIARQAELLEGYLERTGICAEMDDPAPVVLSDQGVSAFKGLNISEGELGAWMEQVRNGMWDSSILVVESIDRFRRQNPFDVMGYINALMAHNVAIHDVMANIVISRSNSKDLPFVMMNAQRAYDESKYKSDRIRKGWAKKREQAFNKGTIVTNKRPQWIEVENDKYVLNHKAAVVKEIFALYQTGMGCPTIAKKLQTKEGEQYKFNRPWTGELVHKILTNRRVTGKIFISEIIRNHDDIENPVTQKKYDMDVYPVVINEEEFELVQELLKSRRPNAGRVTVKKDGQEEVLIKSNLFSGIARCTECGGPMYHNVVRAKRTPKKGDPKIEEYRYIRCLNERDGLCENKAMTYETVERFVVEHLLGMDLNTVIKEQEFNPEIEVIRIQIDQVKDQITNYENGIERRKSAGKAVSFEMREELDDAKLELEQLLARQASLATVQVDLPVLQDVNVTELYNVNNVDIRTRYENELNKIVSNIRLKRNGNFYTIDIIYKQNELKRHVLFIENKKKEQKLISEVIIENVDGAKFYYTPSFVISVKDGEIRFQQTKEDLTIIDYSLLLNYVDAVDRCDAVGVWMRNNMSFLFTK

SEQ ID NO: 12057 - DNA, 50 bp, Enterobacter asburiae; identical to SEQ ID NO: 10992
  source 1..50: mol_type = genomic DNA

SEQ ID NO: 12058 - DNA, 40 bp, Enterobacter asburiae; identical to SEQ ID NO: 4913
  source 1..40: mol_type = genomic DNA

SEQ ID NO: 12059 - DNA, 50 bp, Enterobacter asburiae; identical to SEQ ID NO: 11959
  source 1..50: mol_type = genomic DNA

SEQ ID NO: 12060 - DNA, 40 bp, Enterobacter asburiae; identical to SEQ ID NO: 2275
  source 1..40: mol_type = genomic DNA

SEQ ID NO: 12061 - protein, 460 aa, Enterobacter asburiae
MLIQTKIRRFNMKKVFVYHRVSSDQQLDGSGIARQAELLEGYLERTGICAEMDDPAPVVLSDQGVSAFKGLNISEGELGAWMEQVRNGMWDSSILVVESIDRFSRQNPFDVMGYINALMAHNVAIHDVMANIVISRSNSKDLPFVMMNAQRAYDESKYKSDRIRKGWAKKREQAFNKGTIVTNKRPQWIEVENDKYVLNHKAAVVKEIFALYQTGMGCPTIAKQLQTKEGEQYKFNRPWTGELVHKILTNRRVTGKIFISEIIRNHDDIENPVTQKKYDMDVYPVVINEEEFELVQELLKSRRPNAGRVTVKKDGQEEVLIKSNLFSGIARCTECGGPMYHNVVRAKRTPKKGDPKIEEYRYIRCLNERDGLCENKAMTYETVERFVVEHLLSMDLNTVIKEQEFNPEIEVIRIQIDQVKDQITKEGANKQVISSQADSLIKISRIWADFFPANTSNQPI

SEQ ID NO: 12062 - DNA, 50 bp, Enterobacter asburiae; identical to SEQ ID NO: 10992
  source 1..50: mol_type = genomic DNA

SEQ ID NO: 12063 - DNA, 40 bp, Enterobacter asburiae; identical to SEQ ID NO: 4913
  source 1..40: mol_type = genomic DNA

SEQ ID NO: 12064 - DNA, 50 bp, Enterobacter asburiae; identical to SEQ ID NO: 11959
  source 1..50: mol_type = genomic DNA

SEQ ID NO: 12065 - DNA, 40 bp, Enterobacter asburiae; identical to SEQ ID NO: 2275
  source 1..40: mol_type = genomic DNA

SEQ ID NO: 12066 - protein, 630 aa, Enterobacter asburiae
MKKCFIYHRVSSELQLSGTGIERQEQNLNAYVERINLLAEMDDPEATIISDQGVSAFKGLNMSEGELGRWMDQVRAGMWDDSHLVLESIDRFSRQNPFQVVGYLAELDRHNITIHDVSLNMLINRGNSAMLPIVAMSAQRAYEESKIKSDRIRDGWRRKREQAFKQGTIVTNKRPQWIDIVEDRYELNDKVAIVREIFRLYQTGIGTPTIAKMLNERGSEWLFVSGRLWRGESIHKLLRNKRVTGSIFISEIIRDYSSTSNPVDQKRYEMDVYPIAISKEEFDLVQELLKSRRPGAKVTGGKALKKFYDPNTNKPYLDRDGNVIELEVDTGKEIIQSNIFNGICRCARCGEAMYHNVVVAKRDSKKKGKFNEEYRYIRCIAERDGLCDNKALKYEVVEQFVIEHIKNLDFTKILKPNEINPEIELVRLKIEEEEAHIEDYKLNIERIRNTGKKIPFAVLVELEESEDRLKELKERQTTFTEVQVDTDYLKTVDPSVLFDVKNIEVRARMAAELSKIVDSIQLYRTGKHYVITINYKKVEVLKHVLFVEAKKEPVLVSGVAIERFGDTVAYSTPSFSIVVEGVTSPRLINIEEEPLSIIDYSLLLNYVDAVDPNNAVGVWMRNQFNFLTSN

SEQ ID NO: 12067 - DNA, 50 bp, Enterobacter asburiae
  source 1..50: mol_type = genomic DNA
tgtttgtttacattagccgttattcaaatgtatgataatctctacaaaca

SEQ ID NO: 12068 - DNA, 40 bp, Enterobacter asburiae; identical to SEQ ID NO: 4913
  source 1..40: mol_type = genomic DNA

SEQ ID NO: 12069 - DNA, 50 bp, Enterobacter asburiae
  source 1..50: mol_type = genomic DNA
tgtttgtttacattagccgttattttaatgtatgataatctctacaaaca

SEQ ID NO: 12070 - DNA, 40 bp, Enterobacter asburiae; identical to SEQ ID NO: 2275
  source 1..40: mol_type = genomic DNA

SEQ ID NO: 12071 - protein, 615 aa, Enterobacter cloacae
MLIQTKIRRFNMKKVFVYHRVSSDQQLDGSGIARQAELLEGYLERTGICAEMDDPAPVVLSDQGVSAFKGLNISEGELGAWMEQVRNGMWDSSILVVESIDRFSRQNPFDVMGYINALMAHNVAIHDVMANIVISRSNSKDLPFVMMNAQRAYDESKYKSDRIRKGWAKKREQAFNKGTIVTNKRPQWIEVENDKYVLNHKAAVVKEIFALYQTGMGCPTIAKQLQTKEGEQYKFNRPWTGELVHKILTNRRVTGKIFISEIIRNHDDIENPVTQKKYDMDVYPVVISEDEFELVQELLKSRRPNAGRVTVKKDGQEEVLIKSNLFSGIARCTECGWPMYHNVVRAKRTPKKGDPKIEEYRYIRCLNERDGLCENKAMTYETVEHFVVEHLLGMDLNTVIKEQEFNPEIEVIRIQIDQVKDQITNYENGIERRKSAGKAVSFEMREELDDAKLELEQLLARQASLATVQVDLPVLQDVNVTELYNVNNVDIRTRYENELNKIVSNIRLKRNGNFYTIDIIYKQNELKRHVLFIENKKKEQKLISEVIIENVDGAKFYYTPSFVISVKDGEIRFQQTKEDLTIIDYSLLLNYVDAVDRCDAVGVWMRNNMSFLFTK

SEQ ID NO: 12072 - DNA, 50 bp, Enterobacter cloacae; identical to SEQ ID NO: 10992
  source 1..50: mol_type = genomic DNA

SEQ ID NO: 12073 - DNA, 40 bp, Enterobacter cloacae; identical to SEQ ID NO: 4913
  source 1..40: mol_type = genomic DNA

SEQ ID NO: 12074 - DNA, 50 bp, Enterobacter cloacae; identical to SEQ ID NO: 11959
  source 1..50: mol_type = genomic DNA

SEQ ID NO: 12075 - DNA, 40 bp, Enterobacter cloacae; identical to SEQ ID NO: 2275
  source 1..40: mol_type = genomic DNA

SEQ ID NO: 12076 - protein, 604 aa, Enterobacter cloacae
MKKVFVYHRVSSDQQLDGSGIARQAELLEGYLERTGICAEMDDPAPVVLSDQGVSAFKGLNISEGELGAWMEQVRNGMWDSSILVVESIDRFSRQNPFDVMGYINALMAHNVAIHDVMANIVISRSNSKDLPFVMMNAQRAYDESKYKSDRIRKGWAKKREQAFNKGTIVTNKRPQWIEVENDKYVLNHKAAVVKEIFALYQTGMGCPTIAKKLQTKEGEQYKFNRPWTGELVHKILTNRRVTGKIFISEIIRNHDDIENPVTQKKYDMDVYPVVINEEEFELVQELLKSRRPNAGRVTVKKDGQEEVLIKSNLFSGIARCTECGGPMYHNVVRAKRTPKKGDPKIEEYRYIRCLNERDGLCENKAMIYGTVERFVVEHLLGMDLNTVIKEQEFNPEIEVIRIQIDQVKDQITNYENGIERRKSAGKAVSFEMREELDDAKLELEQLLARQASLATVQVDLPVLQDVNVTELYNVNNVDIRTRYENELNKIVSNIRLKRNGNFYTIDIIYKQNELKRHVLFIENKKKEQKLISEVIIENVDGAKFYYTPSFVISVKDGEIRFQQTKEDLTIIDYSLLLNYVDAVDRCNAVGVWMRNNMSFLFTK

SEQ ID NO: 12077 - DNA, 50 bp, Enterobacter cloacae; identical to SEQ ID NO: 10992
  source 1..50: mol_type = genomic DNA

SEQ ID NO: 12078 - DNA, 40 bp, Enterobacter cloacae; identical to SEQ ID NO: 4913
  source 1..40: mol_type = genomic DNA

SEQ ID NO: 12079 - DNA, 50 bp, Enterobacter cloacae; identical to SEQ ID NO: 11959
  source 1..50: mol_type = genomic DNA

SEQ ID NO: 12080 - DNA, 40 bp, Enterobacter cloacae; identical to SEQ ID NO: 2275
  source 1..40: mol_type = genomic DNA

SEQ ID NO: 12081 - protein, 630 aa, Enterobacter cloacae
MKKCFIYHRVSSELQLSGTGIERQEQNLNAYIERINLLAEMDDPEATIISDQGISAFKGLNMSEGELGRWMDQVRAGMWDDSHLVLESIDRFSRQNPFQVVGYLAELDRHNITIHDVSLNMLINRGNSAMLPIVAMSAQRAYEESKIKSDRIRDGWRRKREQAFKQGTIVTNKRPQWIDIVEDRYELNDKVAIVREIFRLYQTGIGTPTIAKMLNERGSEWLFVSGRLWRGESIHKLLRNKRVTGSIFISEIIRDYSSISNPVDQKRYEMDVYPIAISKEEFDLVQELLKSRRPGAKVTGGKVLKKFYDPNTDKPYIDRDGNVIELEVDTGKEIIQSNIFNGICRCARCGEAMYHNVVVAKRDSKKKGKFNEEYRYIRCIAERDGLCDNKALKYEVVEQFVIEHIKNLDFTQILKPNEINPEIELVRLKIEEEEAHIEDYKLNIERIRNTGKKIPFAVLVELEESEDRLKELKERQTTFTEVQVDTDYLKTVDPSVLFDVKNIEVRARMAAELSKIVDSIQLYRTGKHYVITINYKKVEVLKHVLFVEAKKEPVLVSGVAIERFGDTVAYSTPSFSIVVEGVTSPRLINIEEEPLSIIDYSLLMNYVDAVDPHNAVGVWMRNQFNFLTSN

SEQ ID NO: 12082 - DNA, 50 bp, Enterobacter cloacae
  source 1..50: mol_type = genomic DNA
tgtttgtttacattagccgttattcaaatgtatgataacctctacaaaca

SEQ ID NO: 12083 - DNA, 40 bp, Enterobacter cloacae; identical to SEQ ID NO: 4913
  source 1..40: mol_type = genomic DNA

SEQ ID NO: 12084 - DNA, 50 bp, Enterobacter cloacae
  source 1..50: mol_type = genomic DNA
tgtttgtttacattagccgttattttaatgtatgataacctctacaaaca

SEQ ID NO: 12085 - DNA, 40 bp, Enterobacter cloacae; identical to SEQ ID NO: 2275
  source 1..40: mol_type = genomic DNA

SEQ ID NO: 12086 - protein, 615 aa, Enterobacter cloacae
MLIQTKIRRFNMKKVFVYHRVSSDQQLDGSGIARQAELLEGYLERTGICAEMDDPAPVVLSDQGVSAFKGLNISEGELGAWMEQVRNGMWDSSILVVESIDRFSRQNPFDVMGYINALMAHNVAIHDVMANIVISRSNSKDLPFVMMNAQRAYDESKYKSDRIRKGWAKKREQAFNKGTIVTNKRPQWIEVENDKYVLNYKAAVVKEIFALYQTGMGCPTIAKQLQTKEGEQYKFNRPWTGELVHKILTNRRVTGKIFISEIIRNHDDIENPVTQKKYDMDVYPVVINEEEFELVQELLKSRRPNAGRVTVKKDGQEEVLIKSNLFSGIARCTECGGPMYHNVVRAKRTPKKGDPKIEEYRYIRCLNERDGLCENKAMTYETVERFVVEHLLGIDLSTVMKEQEFNPEIEVLRIQIDQVKDQITNYENGIERRKSTGKPISFEMREELDDAKSELERLLARQASLATVQVDVPVLQDVNVTELYDVNNVDIRTRYENELNKIVSNIRLKRNGTSYTIDINYKQNELKRHVLFVENKKKEQTLISEVIIEDVDGGKFYYTPSFMIRLKDGEIRFQQTNEDLSIVDYSLLLNYVDAIDRNDAVGVWMRNNMSFLFTK

SEQ ID NO: 12087 - DNA, 50 bp, Enterobacter cloacae; identical to SEQ ID NO: 2497
  source 1..50: mol_type = genomic DNA

SEQ ID NO: 12088 - DNA, 40 bp, Enterobacter cloacae; identical to SEQ ID NO: 4913
  source 1..40: mol_type = genomic DNA

SEQ ID NO: 12089 - DNA, 50 bp, Enterobacter cloacae; identical to SEQ ID NO: 12024
  source 1..50: mol_type = genomic DNA

SEQ ID NO: 12090 - DNA, 40 bp, Enterobacter cloacae; identical to SEQ ID NO: 2275
  source 1..40: mol_type = genomic DNA

SEQ ID NO: 12091 - protein, 615 aa, Enterobacter cloacae; identical to SEQ ID NO: 2271

SEQ ID NO: 12092 - DNA, 50 bp, Enterobacter cloacae; identical to SEQ ID NO: 11002
  source 1..50: mol_type = genomic DNA

SEQ ID NO: 12093 - DNA, 40 bp, Enterobacter cloacae; identical to SEQ ID NO: 4913
  source 1..40: mol_type = genomic DNA

SEQ ID NO: 12094 - DNA, 50 bp, Enterobacter cloacae
  source 1..50: mol_type = genomic DNA
atgttgtaataagcgatacacactttagtgtgttatgcttatacaaacaa

SEQ ID NO: 12095 - DNA, 40 bp, Enterobacter cloacae; identical to SEQ ID NO: 2275
  source 1..40: mol_type = genomic DNA

SEQ ID NO: 12096 - protein, 615 aa, Raoultella terrigena
MLIQTKNRRSPMKKVFVYHRVSSDQQLDGSGIARQAELLEGYLERTGICKEMDDPTPVVLSDQGVSAFKGLNISEGELGAWMEQVRNGMWDSSILVVESIDRFSRQNPFDVMGYINALMAHNVAIHDVMANIVISRSNSKDLPFVMLNAQRAYDESKYKSDRIRKGWAKKREQAFNKGTIVTNKRPQWIEVEKDKYVLNEKAAVVKEIFALYQTGMGCPTIAKQLQRKEGEQYKFNRPWTGELVHKILTNRRVTGKIFISEIIRNHDDIDNPVTQKKYDMDVYPVVISEDEFELVQELLKSRRPNAGRITVKKEGQEEVLIKSNLFSGIARCTECGGSMYHNVVRAKRTPKKGDPKIEEYRYIRCLNERDGLCENKAMTYETVERFVVEHLLGMDLSTVLKEQEFNPEIEVLRIQIDQVKDQITNYENGIERRKSAGKPISFEMREELDDAKSELERLLARQASLATVQVDVPVLQDVNVTELYNVNNVDIRTRYENELNKIVSNICLKRNGKSYTIDINYKQNELKRHVLFVENKKKEQTLISEVIIEDVDGGKFYYTPSFMIRLKDGEIRFQQINEDLSIVDYSLLLNYVDAVDRNDAVSVWMRNQFNFLTSN

SEQ ID NO: 12097 - DNA, 50 bp, Raoultella terrigena; identical to SEQ ID NO: 2272
  source 1..50: mol_type = genomic DNA

SEQ ID NO: 12098 - DNA, 40 bp, Raoultella terrigena; identical to SEQ ID NO: 4913
  source 1..40: mol_type = genomic DNA

SEQ ID NO: 12099 - DNA, 50 bp, Raoultella terrigena; identical to SEQ ID NO: 2274
  source 1..50: mol_type = genomic DNA

SEQ ID NO: 12100 - DNA, 40 bp, Raoultella terrigena; identical to SEQ ID NO: 2275
  source 1..40: mol_type = genomic DNA

SEQ ID NO: 12101 - protein, 503 aa, Enterocloster aldenensis
MNNRIDAIYARQSVDKKDSISIESQIEFCKYELKGGNCKEYTDKGYSGKNTDRPKFQELVRDIKRGLIAKVVVYKLDRISRSILDFANMMELFQQYNVEFVSSTEKFDTSTPMGRAMLNICIVFAQLERETIQKRVTDAYYSRSQRGFKMGGKAPYGFHTEPIKMDGINTKKLVVNPDEAANIRLMFEMYAQPTTSYGDITRYFAEQGILFNGKELIRPTLAQMLRNPVYVQADLDVYEFFKSQGTVIVNDAADFTGMNGCYLYQGRDVKPSKKNDLKDQMLVLAPHEGIVPSDIWLTCRKKLMNNMKIQSARKATHTWLAGKIKCGNCGYALMSINNPVGKQYLRCTKRLDNKSCAGCGKIITSELEAVVYQQMVKKLEKHKTLTGRKKAAKANPKIAALQVELLHVDSEIEKLVDSLTGANNVLLSYVNVKIAELDGRKQELVKQIAELTVEAISPEQVNQISGYLDTWDNVSFDDKRRVVDLMITTVAATSDSLNITWKI

SEQ ID NO: 12102 - DNA, 50 bp, Enterocloster aldenensis; identical to SEQ ID NO: 12
  source 1..50: mol_type = genomic DNA

SEQ ID NO: 12103 - DNA, 40 bp, Enterocloster aldenensis
  source 1..40: mol_type = genomic DNA
cttttattataatcaatctttccatctgttgcaagaacat

SEQ ID NO: 12104 - DNA, 50 bp, Enterocloster aldenensis; identical to SEQ ID NO: 344
  source 1..50: mol_type = genomic DNA

SEQ ID NO: 12105 - DNA, 40 bp, Enterocloster aldenensis
  source 1..40: mol_type = genomic DNA
cttttgttaaggtcaatcttaacatctgatacaacaatat

SEQ ID NO: 12106 - protein, 488 aa, Flavonifractor plautii
MKAVIYARYSSDSQREESIEGQLRECTEFAERNGITILRSYIDRALSARTADRPEFQNMIKDSEQKLFDVVLIWKLDRFSRDRYDSAHYKRILKKNGVKVVSVKENISDGPEGIILESMLEGYAEYYSAELSEKIQRGQKENALKGRNNGGGIPLGYLLGNEQKLVLDPVTAPIVREIFQRYADGEIVRTIVEDFNRRGLKTKNGKPFSPNSFNRILKNRKYIGEYQYQDVIILGGVPAILSDDLFYRVQARLEKNKRAPATAKADVDYLLTTKLFCGLCERMMIGESGTSHTGDKHYYYKCAGAKRKLGCKKKSAKKDFIERAAVVLTVNRVLKDEEIDRIADGILTLQASEDTTIPALKKQLADTERGIENMLNAIQQGVLTSSTKERLEALEMQRDDLKIAVLQAELQKHKYTKEQIASWIGQFKYGDVNSREYQKRIIDTFVNSLYLFDDRLVITYNFKGGTETITLKDVEAVYGSDLKAMSPP

SEQ ID NO: 12107 - DNA, 50 bp, Flavonifractor plautii
  source 1..50: mol_type = genomic DNA
gatttgaaagcgatgtctccaccagatggacattacatgaacacctactt

SEQ ID NO: 12108 - DNA, 40 bp, Flavonifractor plautii
  source 1..40: mol_type = genomic DNA
actccccccgcctccaccagaaaagaaagacacgacgaaa

SEQ ID NO: 12109 - DNA, 50 bp, Flavonifractor plautii
  source 1..50: mol_type = genomic DNA
gatttgaaagcgatgtctccaccaaatggacattacatgaacacctactt

SEQ ID NO: 12110 - DNA, 40 bp, Flavonifractor plautii
  source 1..40: mol_type = genomic DNA
accacccccaccaccagaaaaaaagaaagagactaagaaa

SEQ ID NO: 12111 - protein, 500 aa, Flavonifractor plautii
MNVVIYARYSSHSQTEQSIEGQLHTCYEYAKNNGYLVVGEYIDRAQSGTTDSRGEFQRMIADSDKHTFEGVLVYQLDRFARNRYDSAINKAKLKKNGVRVISARENISDDASGILVEGVLESMAEYYSAELSQKIRRGMEINAQKCLANGSNPGLGYKVDSERRYYVDEEEAKIVREIFERYASGETVADIIRDLNRRKLTTSLGKPFNKNSVHRILNNRRYIGYYLYKGQETPGGMPRIIEDELFERVHYILDRNKKAPARARGREEYLLTTKLFCGYCREMMTGYGGTGKSGKTYHYYACNNFKRRKCKKKVISKERIEDRVVLECRKLLTDSNIERIAASVSEVCESNRDTASIKRIKAAIQEADTAIENLWKALERGQAADMITERIEKRQHEKEELQAQLAVEMAKQVTLTAPQVRAYLYSLRQGDKNDENIKRGIINIFLRAVYLYDDRFTLVLNGSDTPITIDDILLDEIEEGLEGDLTSCEGCSSLVADAPP

SEQ ID NO: 12112 - DNA, 50 bp, Flavonifractor plautii
  source 1..50: mol_type = genomic DNA
tcgttggttgcggacgctccaccagatggacattacacgaacacctactt

SEQ ID NO: 12113 - DNA, 40 bp, Flavonifractor plautii; identical to SEQ ID NO: 12108
  source 1..40: mol_type = genomic DNA

SEQ ID NO: 12114 - DNA, 50 bp, Flavonifractor plautii; identical to SEQ ID NO: 2507
  source 1..50: mol_type = genomic DNA

SEQ ID NO: 12115 - DNA, 40 bp, Flavonifractor plautii; identical to SEQ ID NO: 12110
  source 1..40: mol_type = genomic DNA

SEQ ID NO: 12116 - protein, 532 aa, Clostridium perfringens
MLNNNKQIQNVVIYCRTSSELQADNFSIEGQATFIKEFCKKNNYTIVNSYIDECKTGTSIDSRNSFKQMLIDIKINNVNAVVVYKLSRISRKMKDIVNFVNYLQENDIHLITIEDHIDTSSPMGVIFLYLLGIFSEMDRDNIVSNCKMGMRQRAIDGLWNGGKMFGYISNKNKELEIVPEQANIVKEIFNLYVNKNWGYKKIACHLNACNYKTLKNGTWSIYSIKQIIDNPTYAGFIRWGQYLDWAKKRRKGKNENYELFEGQHQPIIDMDTWTKSQAMRKINKDKFNKIYEGDFILTGLLRCPICGASMISHRTKKKNKPNEFYRYYQCSNFFNKGVTVCKSNLVNANTAEKYVLDRISEIINSQEIINSLISKLNNTTNKDITPLEKQLGELEKSLAKIDIKRNEHMENHFNDLISSEDYNTGLKFLREKEDKITTQINITKNEISQLSSFQCIDTEKVINILKNFNNIFVNATIEQKKSLLRSIIDSISVNKGKTTKDRTINKIKLHFEPVDVQAQKINKKFATTYDTV

SEQ ID NO: 12117 - DNA, 50 bp, Clostridium perfringens
  source 1..50: mol_type = genomic DNA
gtttgcgactacttatgatacggttcaccgtcaacaagtaactcgcaaaa

SEQ ID NO: 12118 - DNA, 40 bp, Clostridium perfringens
  source 1..40: mol_type = genomic DNA
catttatttatggtacggttcgttcttcataattctaaat

SEQ ID NO: 12119 - DNA, 50 bp, Clostridium perfringens
  source 1..50: mol_type = genomic DNA
gtttgcgactacttatgatacggtcaaccgtcaacaagtaactcgcaaaa

SEQ ID NO: 12120 - DNA, 40 bp, Clostridium perfringens
  source 1..40: mol_type = genomic DNA
catttatttagtttacagtcatatcttcattattcagaat

SEQ ID NO: 12121 - protein, 480 aa, Clostridioides difficile
MKKNVVLLRVSTDMQDFESQKNGINKYVKENDIMVHKVIEEQGVSGYKTKLEDREGLQELIRMANNEELNSVIVFNQDRIGRTLELISFMLIMKDQGVKVYSVTEGLLNDNNDTSDLMQFIKFWTANQESKKTSLRVKNGKRATIEKNGYSGGVPNFGYKVVDRKLEIDEDESKIVEFIFKNYIKYGCKRTKELLDENNILKRGEKWTKSKIFSVIYNNIYRGKKQYQGELLDFPELQIINDEIFNKAQERAKARNTRGTSRYENRTNILFESLLFHECEDGIERKLNIDYVNTKNGRVHTYRCRHCKEVKANITKNFNSTKIEPLLIENIKSIMNNISIEMLEKRYSEEITSNTSMITKNINASNKSIDKKKKAIDSAMSEIEKIFMGDSNVDINIPSNMIKKLEIEIKDLEEQLMLHQNELQDLKKKTSNAMYLLDKYKDFEYIYNNANNDKKKVILQELVERIVITEGEIKIKLNLY

SEQ ID NO: 12122 - DNA, 50 bp, Clostridioides difficile
  source 1..50: mol_type = genomic DNA
tagtgggcaacagttccatttgcatcagtgaatcacattattgcccacta

SEQ ID NO: 12123 - DNA, 40 bp, Clostridioides difficile
  source 1..40: mol_type = genomic DNA
aaatggaacaccatttgaatctgttggataaattccatat

SEQ ID NO: 12124 - DNA, 50 bp, Clostridioides difficile
  source 1..50: mol_type = genomic DNA
tagtgggcaacagttccatttgcagcagtgaatcacattattgcccacta

SEQ ID NO: 12125 - DNA, 40 bp, Clostridioides difficile
  source 1..40: mol_type = genomic DNA
aaatggaaaaacattctatgctcatggataaaatcaatat

SEQ ID NO: 12126 - protein, 480 aa, Clostridioides difficile
MKKNVVLLRVSTDMQDFESQKNGIDRYIKENNITVHKTIEEQGVSGYKTKLENREGLQELIQMALNGELDTIVVFSSDRIGRRLEMLSFMSIMKEQNVRIVSVTEGVINEDNDTSDLIQAVKFWTANYESKKTSMRVKSGLRATIEKNAYTGGVPNFGYKVVDKKLVINEEESHIVKLIFESYIDFGYKKTLELLEEKNILKRGKKWTKVKVFSILKNNIYRGKKQYQGELLDFPHLRIISDELFKKAEERAESRNNRGINRYTNRTNIPFEGLLYHKCEDGIERKLNIDYVNTKHGRVHTYRCKHCKDVKAEITKNFNSTKIEPILIDNIKSIMNKISIEELEKRYNEKITNSSSIIITNINAITKTIEKKKKAIDSAMNEVEKIFMGDSNIDISIPSNMIKKLEIEIEELKNQLEGYNKELQDLKNTTSNAMYLLDKYKDFEYSFDNAIDEERKVMLQDLVNKIVISQDEVNIQLNIY

SEQ ID NO: 12127 - DNA, 50 bp, Clostridioides difficile
  source 1..50: mol_type = genomic DNA
gatgggtttatattataactagcatctgctaattataacgattacccatt

SEQ ID NO: 12128 - DNA, 40 bp, Clostridioides difficile; identical to SEQ ID NO: 12123
  source 1..40: mol_type = genomic DNA

SEQ ID NO: 12129 - DNA, 50 bp, Clostridioides difficile
  source 1..50: mol_type = genomic DNA
gatgggtttatattataactagcagctgctaattataacgattacccatt

SEQ ID NO: 12130 - DNA, 40 bp, Clostridioides difficile; identical to SEQ ID NO: 12125
  source 1..40: mol_type = genomic DNA

SEQ ID NO: 12131 - protein, 540 aa, Blautia massiliensis
MKQPYNTTIYNTALYLRLSRDDELQGESGSIQTQRMMLRQYAAEHGLTVVDEYIDDGWSGTNFERPSFQRMIDDIEDGKINCVVTKDLSRLGRNYILTGQYTEIYFPSKGVRYIAINDNVDTINGESELAPFLNILNEMHARQTSKKVKAAMHTRFANGAHYGAYAPLGYVKDPDKKGHLLIDPETRWIVEKIFDLAVHGRGAASITRILVEEKVPTPGWLNYERYGTFANIYAGAPAEKAYAWTIAQVKSILKEETYIGHSIHNKQSNISFKNKKKVRKPQEEWYRVENTHEAIISEEVFQKVQELIASRRRKRRNGTTQIFAGLIKCADCGWSLAYGENKQNKNPYGYYHCSKNGQGLRQCSMHYIRYDVLYAYVLARLQYWSMLAQKDEDKLLKRLLNASDRERNSAKKKQAAELKKAEKRKAEVDGLFAKMYEDWSAGRITEYNFNMLSEKYQNEQKELETKIRQLHETMEAAVQTAADAEKWIALMKQYVNPVELTAELLNTLIEKITVHEAVKGEDGSREQEVEIYYRFIGKID

SEQ ID NO: 12132 - DNA, 50 bp, Blautia massiliensis; identical to SEQ ID NO: 2472
  source 1..50: mol_type = genomic DNA

SEQ ID NO: 12133 - DNA, 40 bp, Blautia massiliensis
  source 1..40: mol_type = genomic DNA
tttttccaagtatctcagcggcctttccaagcttataatt

SEQ ID NO: 12134 - DNA, 50 bp, Blautia massiliensis
  source 1..50: mol_type = genomic DNA
caatatctttaattaagggagacgttagtttcccatagttaaagatacca

SEQ ID NO: 12135 - DNA, 40 bp, Blautia massiliensis
  source 1..40: mol_type = genomic DNA
gttttccaattatcttaacttccttgcctagattattatc

SEQ ID NO: 12136 - protein, 495 aa, Bacillus pumilus
MNIDENSKVAVYSRKSREDPDTEDTLLKHRDQLKALLNRYSFTDVEWFEEVVSSDSIDNRPIFSRLLPRIRSGEFDVVCVIANDRLSRGSQIDSGRIMEAFKESNTLLITPQKIYNMSNESDEMLSEFELVIARNEYRAIKRRLLNGRKGAVKEGRPHSGSVPYGFKWDKNDKTAKVDEEKIKIYRMMIDWFLNEEMSSVAIADRLNQLEIPPPSSRGKMWYGEVVTYLLINDFHRGYVWYGKDEQNKGIHQPTKTEEEHIKIVERLSKLRTYPEAGRRLNMNTNRLSGIVRCPYCLKVQSIDQPKGRQKHVRKCLRRSTAREPMCDTTKGINEDILYGAILQEMKQYSSELFKRNKNTETEEQATFSVQLIELKEKAIKKLRGRIDRLKELYLDGDLDKNEYKEKLEKAQENLIKSEKELSELYSSVEYQKEKALEKRTYLWQKEDVQALLESDQGMSESEINIILKKLISHVSYKVKDEDGKQPELSVKVYYN

SEQ ID NO: 12137 - DNA, 50 bp, Bacillus pumilus
  source 1..50: mol_type = genomic DNA
tgttatactcaaacgatacctgtcgtaaggaatatagtttgagtacaaca

SEQ ID NO: 12138 - DNA, 40 bp, Bacillus pumilus
  source 1..40: mol_type = genomic DNA
tgtcgtgacagggtctgtcgtcactattattggcattacc

SEQ ID NO: 12139 - DNA, 50 bp, Bacillus pumilus
  source 1..50: mol_type = genomic DNA
tgttatactcaaacgatacctgtcttaaggaatatagtttgagtacaaca

SEQ ID NO: 12140 - DNA, 40 bp, Bacillus pumilus
  source 1..40: mol_type = genomic DNA
agtggggactgggtctgtcttcattattattcccattggc

SEQ ID NO: 12141 - protein, 503 aa, Lachnospira eligens
MNNRIDAIYARQSVDKKDSISIESQIEFCKYELKGGNCKEYTDKGYSGKNTDRPKFQELVRDIKRGLIAKVVVYKLDRISRSILDFANMMELFQQYNVEFVSSTEKFDTSTPMGRAMLNICIVFAQLERETIQKRVTDAYYSRSQRGFKMGGKAPYGFHTEPIKMDGINTKKLVVNPDEAANIRLMFEMYAQPTTSYGDITRYFAEQGILFHGKELIRPTLAQMLRNPVYVQADLDVYEFFKSQGTVIVNDAADFTGMNGCYLYQGRDVKPSKKNDLKDQMLVLAPHKGIVPSDIWLTCRKKLMNNMKIQSARKATHTWLAGKIKCGNCGYALMSIFNPSGKQYLRCTKRLDNKSCPGCGKIITSELETVVYQQMVKKLASYKTLTGRKKAAKANPKIAALQVDLAHVDSEIEKLVDSLTGANNVLLSYVNVKIAELDGRKQELVKQIAELTVEAISPEQVSQISGYLDTWENVSFDDKRRVVDLMITTIAATSDSLNITWKI

SEQ ID NO: 12142 - DNA, 50 bp, Lachnospira eligens; identical to SEQ ID NO: 12
  source 1..50: mol_type = genomic DNA

SEQ ID NO: 12143 - DNA, 40 bp, Lachnospira eligens
  source 1..40: mol_type = genomic DNA
ctgcgtcttagcgtctggcttcctttactataaatttttc

SEQ ID NO: 12144 - DNA, 50 bp, Lachnospira eligens; identical to SEQ ID NO: 14
  source 1..50: mol_type = genomic DNA

SEQ ID NO: 12145 - DNA, 40 bp, Lachnospira eligens
  source 1..40: mol_type = genomic DNA
ctacatcttagcttctggcaaattttcctataaatatgac

SEQ ID NO: 12146 - protein, 547 aa, Streptococcus suis
MIKDIESGLINCVITKDLSRLGRNYLDCGLYLEVFFPEHNVRYIAVNDGVDTLNKSAMDITPFRNILNEMYAADISVKIKSAYRARFQQGKFMGTTAPYGYIKDPADHNHLLIDDKVAHVVKEIFDLALKGNGVAKICRHLNKQHILRPAAYAAERGETGFERHFEGNEDKRYIWSGNSVRSILRSPIYAGNLVGYKRIAANMKSKKRPSKLPEEWEVIPNTHEGIVTQEEFDIVQQLITSRRLPQNKGGFVNIFAGVIKCVDCGCALRAMNVHRRKRPEIIDCVQYSCNNYARNGRSECSAHNIEARDLFNAVLADINCFADMAVNDEKAVRAIEKRLTETDQSRAKALEKERKKLNKRLAELDRLFSSLYEDKVMERITERNFEMMSGKYQKEQLEIEARLKEVTETLNESYEKSRGIRDFLALIRNYQGLKELDATVINALIDKILVSEREKIADGTVKQEIKIYYKFIGFVDELHIIPTKRWAAMPAKNCTVCGVEYVPGSGASRYCPACAKKIRREKSNESKRRSREQKRIACMNCPQKMTD

SEQ ID NO: 12147 - DNA, 50 bp, Streptococcus suis
  source 1..50: mol_type = genomic DNA
aactgtccgcaaaaaatgaccgactgatccaaggatgtaggacggatttt

SEQ ID NO: 12148 - DNA, 40 bp, Streptococcus suis
  source 1..40: mol_type = genomic DNA
gcaaattccagcataccaacgaactacaacaagtgagaac

SEQ ID NO: 12149 - DNA, 50 bp, Streptococcus suis
  source 1..50: mol_type = genomic DNA
aactgtccgcaaaaaatgaccgacatatccaaggatgtaggacggatttt

SEQ ID NO: 12150 - DNA, 40 bp, Streptococcus suis
  source 1..40: mol_type = genomic DNA
aaaaattaaagcatacaaaataacttcctcaagtgagacc

SEQ ID NO: 12151 - protein, 540 aa, Bacillus oceanisediminis
MGGEEMKEKKNENISAVYVRVSSLKVSQKDSPEHQKALCLEKADMEDLVVPEAFIYEDRSSATTIMNRESIMQLIEDAKEGHFSTVIFASLSRFSRDGYDAIALKRTLVNALGIRLISIEDAYDSMLKDDELLFQIVSAVNQKLSEQISISSRRGIRESANKGNFTGSIAPYGYKKVLIPLGNDESRKSLEVVEEAAAIVKLIYHLYVHENMGEKRIVDYLNVVKQIPSPKGEKPWGLTTIQRILQNEAYTGVNVHNKYTVKKVYPDIYDLQNRKNVLVQRDKSKWVKNPKKEWEAIVDDELFQKAQEIRLKRGGGKRGGIRNVQVNPFAGILKCEHCGSNFVSMKGGKVGKSGQEYRYLICSSRRRMGVKGCKNDLWIPLKSFKEDIMMQITLQLENFIHIDEVAAGVEVTNSTSDIDVETRKKKLENTIKQKRKMLKKIREDFHSGKIEDEDQYEFEKEEYEEEIKKLKAQLDNLQETHNKVNNNAVIKEQVKDGLKKLVKLDFNRIDELQLVLKQLIQEITVNSAGEVKIYTPLGKL

SEQ ID NO: 12152 - DNA, 50 bp, Bacillus oceanisediminis
  source 1..50: mol_type = genomic DNA
tatatgcattcaaaccacacgacgaatatcatgtgttatgaatgcagtac

SEQ ID NO: 12153 - DNA, 40 bp, Bacillus oceanisediminis
  source 1..40: mol_type = genomic DNA
agttcgaaatcatatttctaatgctatgcagaagctgggc

SEQ ID NO: 12154 - DNA, 50 bp, Bacillus oceanisediminis
  source 1..50: mol_type = genomic DNA
tatatgcattcaaaccacacgacgggtatcatgtgttatgaatgcagtac

SEQ ID NO: 12155 - DNA, 40 bp, Bacillus oceanisediminis
  source 1..40: mol_type = genomic DNA
agttccgaatcatattattggtgctattcagaaaaaggcc

SEQ ID NO: 12156 - protein, 481 aa, Streptococcus mitis
MITTNKVAIYVRVSTTSQAEEGYSIEEQKAKLSSYCDIKDWSVYKIYTDGGFSGSNTDRPALEGLIKDAKRKKFDTVLVYKLDRLSRSQKDTLYLIEDIFIKNNIAFLSLQENFDTSTPFGKAMIGLLSVFAQLEREQIKERMQLGKIGRAKAGKSMMWAKTSYGYNYHKETGTVTINPAQALAVKFIFESYLRGRSITKLRDDLNEKYSKHVPWSYRAVRAILDNPVYCGFNQYKGEIYPGNHEPIISKEEYDKTQSELKIRQRTAAENVNPRPFQAKYILSGITQCGYCGAPLKIMLGVKRKDGSRLKKYECHQRHPRTLRGVTTYNDNKKCDSGFYYKDKLEAYVLEEISKLQDNADYLDKIFSGDNAETIDRESYKKQIEELSKKLSRLNDLYIDDRITLEELQSKSAEFISMRATLETELENDPALRKDKRKADMRKLLNAEKVFLMDYEGQKVLVRGLINKVQVTAENIVIKWKI

SEQ ID NO: 12157 - DNA, 50 bp, Streptococcus mitis
  source 1..50: mol_type = genomic DNA
tagataattttagtaacctacatttcaatcaaggatactaaaattattga

SEQ ID NO: 12158 - DNA, 40 bp, Streptococcus mitis
  source 1..40: mol_type = genomic DNA
gagcaagaccaccaacatctccacaagtgtaaaagcttta

SEQ ID NO: 12159 - DNA, 50 bp, Streptococcus mitis
  source 1..50: mol_type = genomic DNA
tagataattttagtaacctacattcaaatcaaggatactaaaattattga

SEQ ID NO: 12160 - DNA, 40 bp, Streptococcus mitis
  source 1..40: mol_type = genomic DNA
gagcaagaccaccaaattccaaataagtgtttaccattta

SEQ ID NO: 12161 - protein, 481 aa, Streptococcus mitis
MKSINKVAIYVRVSTTSQAEEGYSIEEQKAKLSSYCDIKDWSVYKIYTDGGFSGSNTDRPALEGLIKDAKRKKFDTVLVYKLDRLSRSQKDTLYLIEDIFIKNNIAFLSLQENFDTSTPFGKAMIGLLSVFAQLEREQIKERMQLGKIGRAKAGKSMMWAKTSYGYNYHKETGTVTINPAQALAVKFIFESYLRGRSITKLRDDLNEKYSKHVPWSYRAVRAILDNPVYCGFNQYKGEIYPGNHEPIITEEVYNKTKEELKIRQRTAAENVNPRPFQAKYILSGIAQCGYCGAPLKIMLGVKRKDGSRLKKYECHQRHPRTLRGVTTYNDNKKCDSGFYYKDKLEAYVLKEISKLQDDADYLDKIFSEDSAETIDRESYKRQIEELSKKLSRLNDLYIDDRITLEELQSKSAEFISMRGTLEAELENDPALGKDKRKADMRKLLNAEKVFSMDYEGQKVLVRGLINKVQVTAEDIVIKWKI

SEQ ID NO: 12162 - DNA, 50 bp, Streptococcus mitis
  source 1..50: mol_type = genomic DNA
taaataattttagtaacctacatttcgatcaaggatagtaaaattattga

SEQ ID NO: 12163 - DNA, 40 bp, Streptococcus mitis; identical to SEQ ID NO: 5778
  source 1..40: mol_type = genomic DNA

SEQ ID NO: 12164 - DNA, 50 bp, Streptococcus mitis
  source 1..50: mol_type = genomic DNA
taaataattttagtaacctacattcagatcaaggatagtaaaattattga

SEQ ID NO: 12165 - DNA, 40 bp, Streptococcus mitis; identical to SEQ ID NO: 12160
  source 1..40: mol_type = genomic DNA

SEQ ID NO: 12166 - protein, 537 aa, Ruthenibacterium lactatiformans
MKQQIYNTALYLRLSRDDELQGESSSITTQRSMLRLYAKEHHLNVIDEYIDDGWSGTNFDRPSFQRMIEDIEAGKINCVVTKDLSRLGRNYIMTGQYTELYFPSHNVRYIAIDDGVDSEKGESEIAPFKNIINEWVARDTSRKVKSAFKTKFAEGAHYGAYAPLGYKKHPDIKGKLLIDDETKWIIEKIFSLAYQGYGSAKITKQLRAEKVPTASWLNFTRYGTFAHIFEGKPESKRYEWTIAHVKAILKSEVYIGNSVHNMQSTVSFKSKKKVRKPESEWFRVENTHEPIIEKEVFYRVQEQIKSRRRQTKEKATPIFAGLVKCADCGWSMRFGTNKANKTPYSYYACSYYGQFGKGNCSMHYIRYDVLYQAVLERLQYWAKAVQQDEEKVLNKIQKVGNAERIREKKKKSSTLKKAENRQNEIDRLFAKMYEDRACEKITERNFVMLSSKYQKEQIELEQQITSLREELSKMEQDMIGAEKWIELIKEYSVPKELTAPLLNAMIEKILIHEATTNEDNERIQEIEIYYRFIGKVE

SEQ ID NO: 12167 - DNA, 50 bp, Ruthenibacterium lactatiformans; identical to SEQ ID NO: 3072
  source 1..50: mol_type = genomic DNA

SEQ ID NO: 12168 - DNA, 40 bp, Ruthenibacterium lactatiformans
  source 1..40: mol_type = genomic DNA
tatctctaaatgggaaagtggaacatctacacctgaattg

SEQ ID NO: 12169 - DNA, 50 bp, Ruthenibacterium lactatiformans
  source 1..50: mol_type = genomic DNA
taatatttttaactaagggaaaccaaagtttcccaaacaaaaggatatta

SEQ ID NO: 12170 - DNA, 40 bp, Ruthenibacterium lactatiformans
  source 1..40: mol_type = genomic DNA
tttctctaagggggaaaaaaaaacaacaacagctgaatag

SEQ ID NO: 12171 - protein, 512 aa, Pseudooceanicola nitratireducens
MNHVGTRSDTQTKALIYCRVSDKKQKTQGHGLESQEHRCRKYAQDRGYEVEMVFPDDITGGVDFMKRPGMRAMLAYLDAKNEDNYVVIFDDPKRFARHTEFHLKLRREFAQRGARVECLNFTFEDTPEGLFVETVIAAQGQLEREQNRRQVIQKMTARVEKGYYVFHPPIGYKYERVAAHGKILVPNEPIASIIREALEGFADGRFTSQVEVKRFLEGKPDFPKSGKSGYVHPTKVRDMLERSVYAGCVEAPNWGVTLRKGHHEALISFSTYERIQARLKGTLNAPARKDINQDFPLRGFVLCDDCGEPMTSCWSKGRNQLYPYYLCDTPSCDSKRKSIRRADIEEGAEALLRSLQPAAQLFKLAKAIFTDIWEMRRADALGAQKALEAQLNDTSKQIDNLLDRIMNSSSPSVIGAYEKRIEELEREKIRLAERAESAVPSEVRLSEFIEPAMTFLASPWNIYKNGNFALKRTVLKLAFAEPLRYSRNEGYRTAETTFPFKVLADFSSLKCG

SEQ ID NO: 12172 - DNA, 50 bp, Pseudooceanicola nitratireducens
  source 1..50: mol_type = genomic DNA
gcggatttttcatccctaaagtgcggggatggtggacccaactggagcgg

SEQ ID NO: 12173 - DNA, 40 bp, Pseudooceanicola nitratireducens
  source 1..40: mol_type = genomic DNA
ccgaattttcatgttgggggggatggtgggcgaccctgga

SEQ ID NO: 12174 - DNA, 50 bp, Pseudooceanicola nitratireducens
  source 1..50: mol_type = genomic DNA
gcggatttttcatccctaaagtgcatggatggtggacccaactggagcgg

SEQ ID NO: 12175 - DNA, 40 bp, Pseudooceanicola nitratireducens
  source 1..40: mol_type = genomic DNA
tgtaactctcaacttggagatgatggtgggagaccctgga

SEQ ID NO: 12176 - protein, 655 aa, Vibrio alginolyticus
MKPTIITYLRYSSKQQADGLSEFRQSEINRKFVEKFCAEHDVDLNEVISLKDLGVSAYRGLNLTLGSFSQTIKKFKSGEIKKRFNEDGEINTYLIVESLDRITRTGPFKSTQIFTELLEYTNIVVLADGEKKIYSKKSIDSTHGMMDLFMALISLQRSHTESLMKEYRSRKSWEKKREDLLNYFTLPEDEREGLERPKNATAMCPFWLTAKKDGRGYDFIPENKKVMDFLIEKLLDGNGMTRAVRLLNDEIDAGNLKPKLKKANRKTRHFRAAAYSGLFNSEISTVKGDYLLTESYYPTEDDVEQGKYPEKHLGKRVRKEIAVLKNYYPALMTESQAAYIRKMMDERRSSGTKPNKSIKNLAQGILRCPNCNSTYIKSKDRRNVYLRCNLAREGLCNAKVIKHGVFEHNLLQFCKGLNINKIISNQSSDQVIDSSLKELEQKILPLKVKKSQLEDDIEQIVKNISSIKIPSLLEKVQDDYLSKENELKKVVQEIDLIETSIMKLQHQIAMSDGDNSLQDLIDLTLDENADDEIRQRFNVELKKVVKSMTVLYRDTDDNPFGYHMISIQFLDGVHRLIPVHEKMTDKIYNILPYQDAVKVDSVDFSENVILPTDYLEGFESGKYPQLDGMAKYYQENPAKYLKLKHQIDQSQEIYE

SEQ ID NO: 12177 - DNA, 50 bp, Vibrio alginolyticus
  source 1..50: mol_type = genomic DNA
gacagtacttatttctcgccaatggagatggttgatctatttgtgcagta

SEQ ID NO: 12178 - DNA, 40 bp, Vibrio alginolyticus
  source 1..40: mol_type = genomic DNA
aaccgcaccaagcccaatggaaatggtactaatggctgct

SEQ ID NO: 12179 - DNA, 50 bp, Vibrio alginolyticus; identical to SEQ ID NO: 12177
  source 1..50: mol_type = genomic DNA

SEQ ID NO: 12180 - DNA, 40 bp, Vibrio alginolyticus
  source 1..40: mol_type = genomic DNA
accctcacaaagaccaaaggagatgctactaatatctgct

SEQ ID NO: 12181 - protein, 509 aa, Escherichia coli
MRRAISYIRFSSERQLKGDSVRRQSKLVTDWLDKNPEFYLDSSLSFKDLGKSAFSGKHLKGGLGDFLTAIEKGLVKAGDTLLIESLDRLSRQDIDIASELLRRILRAGVDVVTLSDGEHYTRESLKDPLSLIKSILIMQRAHEESLRKSERVQAAWNRKKELISEGIKVSRRCPAWLRLNDDRRTFTIIPDKVEVVKRAFDLRLQGLSFWAITRTLNDEGHLSLNQYTPKQKGWSDTAVKKLLRNRAVIGCFTPAGREEVQGYYPAIISESLFYRVQQLNTGQYGRASVSSNPLSVNLFRGIIKCSECGATIVLGGYALKRFGMYRCPNRSANRCSAKAISRKQTDTTILYMLALCDRFETENTDTIDSLKLQREDLQRKISKMAELAIELDDMTIITEKLRDMKNALSKLNHDIEEETKRIKAITTGSLKDIDRTTKEGMIETQLLIKGVLKEIVIDAAKRRCKVTFHNGRAITLPITEDPSEDVTEAIQSLSEVTERGLIDVDTFQL

SEQ ID NO: 12182 - DNA, 50 bp, Escherichia coli
  source 1..50: mol_type = genomic DNA
tagtgtatttagggaacaaatatcagtataatgggttcctaaacacatca

SEQ ID NO: 12183 - DNA, 40 bp, Escherichia coli
  source 1..40: mol_type = genomic DNA
gtggtccggcattgtcttcagcattacatttttattttcg

SEQ ID NO: 12184 - DNA, 50 bp, Escherichia coli
  source 1..50: mol_type = genomic DNA
tagtgtatttagggaacaaatatctgtataatgggttcctaaacacatca

SEQ ID NO: 12185 - DNA, 40 bp, Escherichia coli
  source 1..40: mol_type = genomic DNA
gtggtctggcctagtctcctgcatttaatttctatttcct

SEQ ID NO: 12186 - protein, 474 aa, Lysinibacillus fusiformis
MKCVIYVRVSTYEQAKHGFSIPAQIERLEAFCVSQGWEVAFTFIDDGYSAKDLNRPQFEEMMKMIKAGGIDVLLVYRLDRLTRSVLDLYQILKDLDEYGCKFKSATEIYDTTNAMGRLFITLVAAIAQWERENTAERVLMAVEKKTKLGQWKGGTPPFGYKVVEGELQVFEEEAKVVREIFQMSRTVGFLTIAKELTSKRYPTRRGGEWHVDTVRDIANNATYAGYLSFSEKSKDSKKPPRERNLFEGIHERIIDRNEFWELQDVLDKRRTFGGKRETSNYYFSTLLKCARCGHSLAGHRGSNRQKTYRCSGKKVGKSCTSHIFLEDSLTKAIFSYLENFGSFTNNQREADQNFEKYDSLKNELKEIQKLLQKKKQMFENDIISIDELIATTGELREKEKNIQQEIHAIESNIKSQSNEEIKEIIQNIDSLWSYADDFERKQLMQTIFSQIIVDTKDDYRGSKYPREVIIVSAK

SEQ ID NO: 12187 - DNA, 50 bp, Lysinibacillus fusiformis
  source 1..50: mol_type = genomic DNA
aaaatgtcttgcatgggtggtggaacacttccaccgacataagacatata

SEQ ID NO: 12188 - DNA, 40 bp, Lysinibacillus fusiformis
  source 1..40: mol_type = genomic DNA
catttgggttggtggcggaacattgattccttgggcctta

SEQ ID NO: 12189 - DNA, 50 bp, Lysinibacillus fusiformis
  source 1..50: mol_type = genomic DNA
aaaatgtcttgcatgggtggtggaatacttccaccgacataagacatata

SEQ ID NO: 12190 - DNA, 40 bp, Lysinibacillus fusiformis
  source 1..40: mol_type = genomic DNA
tttctggggtgatgggggaatattaattccttgggtcttc

SEQ ID NO: 12191 - protein, 533 aa, Enterococcus faecium
MLKQQANNKEKVALYSRLSRDDGLDKESNSIANQREMLKRYAKENKFYVYDEYIDDGFSGTTFNRPALNRMFEDIEAGKVNVVLVKDMSRLGRNNALFMYYVEEVFPDLDVRFIAINDMVDTAQDDNEIMPFKSVLNEYYARDISKKIRSSIRTTALTGGFTGAFAPYGYLVDPENKKKLIVDPETAPIVKRIFELSQQGTSTHQIARILCKDGILVPRAYRAKKKGILEQSKGFTFPTDWVGKNVKMILENQVYLGHMVSHKSQTKSFKNKKIVPVPKEDWIVVENTHEAIIDKETFEIVQKFISVKKQPNKTGKPNIFVGLVKCPDCGRNLAYSNPNGNEPRFRCRTYARNTELCTTHAISYKALYEIVQNDIKNHVNSMEELGDHFIKEMRELSETSGSQKIHQFNQELVSLEKRIDEIDSIFTKLIEQNALGKITDERFSKMSMNYETEQAEVVQSYRELKSKIKSEEEKVQGTDRFLETISKYKDVTELNRSMLCELIDSIYVYQAEGIGKERTQKVEINYRFLAVSH

SEQ ID NO: 12192 - DNA, 50 bp, Enterococcus faecium
  source 1..50: mol_type = genomic DNA
cagtgtctcattgatacattctctgatggaaatgtaccatcaagacacct

SEQ ID NO: 12193 - DNA, 40 bp, Enterococcus faecium
  source 1..40: mol_type = genomic DNA
aagaaatcatcagttgggcgaaggaaatgggtgtactttt

SEQ ID NO: 12194 - DNA, 50 bp, Enterococcus faecium
  source 1..50: mol_type = genomic DNA
cagtgtctcattgatacattctctagtggaaatgtaccatcaagacacct

SEQ ID NO: 12195 - DNA, 40 bp, Enterococcus faecium
  source 1..40: mol_type = genomic DNA
tagaaatcagccctggtgcagacaatatgggtgtactttt

SEQ ID NO: 12196 - protein, 515 aa, Chryseobacterium sp JV274
MKIMKVADLYIRVSTDEQADKGYSQRDQEDRLKKYCLSNNISIGQIIYEDHSAKSFNRPGWIRLLTTLKKRSCKTNLILFTKWDRFSRNAGDAYQMISTLAKLGIEPQAVDQPLDLSIPENKMMLAIYLAAPEVENDRRALNVFYGMRRAKKEGRVMGKAPFGYANKSRENGEKYIVLQEPEASAMNWAFNEIAKGVLASNQIRKRVNELTIKKVSRTSFHVAIRNPIYYGKVFLEKHKDEEAHFVDGQHEALISEGLFNRVQEILDGKRRLQRPNTKILSGEHFPLRGFLVCPKCGKNITASASKGRNNRYYYYHCNAVCGFRHRAELVNSVFEEGLKQLEMTEPSKKLIEKVFLDNYQKFIKAPQDEGKKISDEIDRLNSRISLARNKLLSEIITDEEYLEIKKEYKEQIEKLETQLNDKPIENKVDIPKLLEKALETLTNIWKVYTEGNIAVKRQIIGSIFPEKLEFDENHYRTTRINAVAHYIFQINNGLSQNKNRRNDNNNHFSCYVDPQ

SEQ ID NO: 12197 - DNA, 50 bp, Chryseobacterium sp JV274
  source 1..50: mol_type = genomic DNA
aataataatcatttctcctgctatgtagacccacaggaacaaatctcgaa

SEQ ID NO: 12198 - DNA, 40 bp, Chryseobacterium sp JV274
  source 1..40: mol_type = genomic DNA
ccttaaaaaaggatggtttgtagacccacagggattcgaa

SEQ ID NO: 12199 - DNA, 50 bp, Chryseobacterium sp JV274; identical to SEQ ID NO: 12197
  source 1..50: mol_type = genomic DNA

SEQ ID NO: 12200 - DNA, 40 bp, Chryseobacterium sp JV274
  source 1..40: mol_type = genomic DNA
tctgaaacaaggggggtttgtagactcacaaggattaaaa

SEQ ID NO: 12201 - protein, 504 aa, Paeniclostridium sordellii
MKTCIYLRKSRSDEEAEKQGEFETLSRHRSTLLKVAKEQNLNIVEIKEELVSGESIAYRPKMLELLEEVKNNFYDSVLVMDIDRLGRGNMQDQGLILETFKKSKTKIITPRKTYDLTNEFDEEYSEFEAFMARKELKLITRRMQRGRIKSVEEGKFIASKPPYGYKFIFDENGKKSMVIDEEKANVVKLIFKLYTDGNGASKVANHLNSLGLKTTTGRSWYEKGVRDIIKNKTYAGYVVWNKIERTKTSSKPRSQDEIIESKGLHDPIISEDLWNKAQRVLKGNAILPTPVFKEITNPLAGLIICRCCGHKMLARSSTSKNVYEKFIRCTNCGMNRGSKLYIVEEEVIKQLREWVKVYKTNFKNIPSIENSNSNLDAYSKLLKNLNSEYETLVKQKENLHNLLEQGIYDVDTYLDRSKTLTDKIETNKFNIESVKKDIAKEQKVNVSIDDIIPSVEDVLDLYYKTDLMSERNDLLRSVIDYIDYYKEPGSKKSKLDIVINPKLD

SEQ ID NO: 12202 - DNA, 50 bp, Paeniclostridium sordellii
  source 1..50: mol_type = genomic DNA
aactgtcatcatagaactgataaccaattatcagttttatgatgacagta

SEQ ID NO: 12203 - DNA, 40 bp, Paeniclostridium sordellii; identical to SEQ ID NO: 7208
  source 1..40: mol_type = genomic DNA

SEQ ID NO: 12204 - DNA, 50 bp, Paeniclostridium sordellii
  source 1..50: mol_type = genomic DNA
aactgtcatcatagaactgataacttattatcagttttatgatgacagta

SEQ ID NO: 12205 - DNA, 40 bp, Paeniclostridium sordellii
  source 1..40: mol_type = genomic DNA
aaatgtgtgttcagatcttttactcattttttaatcaggt

SEQ ID NO: 12206 - protein, 661 aa, Vibrio cyclitrophicus
MFSFDKSLYKGICIPYARFSTKSQSKVGKKSLERQLGEARRYADQNNLFINEDLIFADKGVSGRSLSGNLAKAFKKGQMQVMLAMLDDVPAEGRQFVFITFHNFDRFSRMSPDDAQAYFNLILQKGFNIITTIDNQLYTRNNKSLSSMIISIIKMTTAWQESEVKSIYVKDALARKKEIVDYLYNHPSQKGKHKHIGVVQPSIPRWIKQENITYEYVDQNGLKKVDTFKRFYLHEAKAKIVQYIFELRLSGLGHTRISQRLNEEGIPVFDQGKFKEAKHWHGYAIQNILVNEKVLGHLVLKSYKEEEFLCEESKTFKKRKVPVDSTGKLHNYYPAAVTEDMFIRANNVQLNKKSKPKPIGRIGERTNIFARIMVCSCGGSLQYHRTVKKFKNHERIKEYLRCLNAQFKNKCNCSGINYTELEESFFRFVNHLDFRSICAIGAGSVDNKIQSIEMQISESETVFNKLKLTKQGLEKTFNSAIEKGMDATFVLNSISQNDEQQKEVKSKIEDLGLHIKKLELSKQNTDDEIIDMQAYSKDLKKADMDTKIKMRKKINDFLSSHIEHMEVCSNDYQRFVIVCFGDNIIRTYAYSDNFASDLMFNSIKVNFEGLNATQSKFLFVNYLKIIRESLKGERGAVSRLDMLNDLKQAKELYYNNLGIEL

SEQ ID NO: 12207 - DNA, 50 bp, Vibrio cyclitrophicus
  source 1..50: mol_type = genomic DNA
ggttgtgtaaacgtgtgtgcatccttagatatgcaccatattacgaaacc

SEQ ID NO: 12208 - DNA, 40 bp, Vibrio cyclitrophicus
  source 1..40: mol_type = genomic DNA
agaagacatcttgatatctttcattgtgaagaaacccagt

SEQ ID NO: 12209 - DNA, 50 bp, Vibrio cyclitrophicus
  source 1..50: mol_type = genomic DNA
ggttgtgtaaacgtgtgtgcatcctgagatatgcaccatattacgaaacc

SEQ ID NO: 12210 - DNA, 40 bp, Vibrio cyclitrophicus
  source 1..40: mol_type = genomic DNA
agttaacctctttatattttgcagtgtgatgaaacccact

SEQ ID NO: 12211 - protein, 537 aa, Peptacetobacter hiranonis
MKQQIYNTALYLRLSRDDELQGESSSITTQRSMLRLYAKEHHLNVIDEYIDDGWSGTNFDRPSFQRMIEDIEAGKINCVVTKDLSRLGRNYIMTGQYTELYFPSHNVRYIAIDDGVDSEKGESEIAPFKNIINEWVARDTSRKVKSAFKTKFAEGAHYGAYAPLGYKKHPDIKGKLLIDDETKWIIEKIFSLAYQGYGSAKITKQLRAEKVPTASWLNFTRYGTFAHIFEGKPESKRYEWTIAHVKAILKSEVYIGNSVHNMQSTVSFKSKKKVRKPESEWFRVENTHEPIIDKEVFYRVQEQIKSRRRQTKEKATPIFAGLVKCADCGWSMRLGTNKANKTPYSYYACSYYGQFGKGYCSMHYIRYDVLYQAVLERLQYWAKAVQQDEEKVLNKIQKVGNAERIREKKKKASTLKKAENRQNEIDRLFAKMYEDRACEKITERNFVMLSSKYQKEQIELEQQITSLREELSKLEQDMIGAEKWIELIKEYSVPKELTAPLLNAMIEKILIHEATTNEDNERIQKIEIYYRFIGKVE

SEQ ID NO: 12212 - DNA, 50 bp, Peptacetobacter hiranonis; identical to SEQ ID NO: 3072
  source 1..50: mol_type = genomic DNA

SEQ ID NO: 12213 - DNA, 40 bp, Peptacetobacter hiranonis
  source 1..40: mol_type = genomic DNA
tatttcaaaatgggagagaggacttggatgtccagatata

SEQ ID NO: 12214 - DNA, 50 bp, Peptacetobacter hiranonis; identical to SEQ ID NO: 3074
  source 1..50: mol_type = genomic DNA

SEQ ID NO: 12215 - DNA, 40 bp, Peptacetobacter hiranonis
  source 1..40: mol_type = genomic DNA
tattttaaaatgggacatttcacttgaaaatccagatttc

SEQ ID NO: 12216 - protein, 497 aa, Streptococcus pyogenes
MSKIALYIRLSVEDMIKTDESESIINQRAYLNDYLDKNEEFKIFTREEYVDDGYSGTNENRPAFQRMLEDVKKNNIQTIIVKDLSRFMRDYITLGDYLENIFPFLGVRFIAINDGYDSNKEKGNGTDLDIQFKGLLYDFYTKDISEKVKSSMTTLKKQGKFLAWSPPLGYMKDPNDRHKIIVDEETAWIVKEIFKLALDGISSRNIAKILNEEKIPTPSKRKSELTNLDFEYSIIRTAKKPRPTWTNGNVIDVLANENYTGTYTFNMQDKSVLNPSSFKFKPKEEWGRVENNHEAIISKEDFEKVQKIKEKNLFMKGKNTDYEWRKKSPLQGFAKCPTCNHILGCTQSKRKRQDGTIRVHTYFTCRICKCNNVKHKNSRAGSLKEQVFEAIKEKYGLEDPIKDEKVKVKPMEKSIEDLEAKKMQNFEKYKLGKMNRQKFIDSKNLIDEEIQAIKEKIQKAKEEKEVIDNTKLTRELMEKYIDSVFCEGNEVLNIIWK

SEQ ID NO: 12217 - DNA, 50 bp, Streptococcus pyogenes; identical to SEQ ID NO: 2317
  source 1..50: mol_type = genomic DNA

SEQ ID NO: 12218 - DNA, 40 bp, Streptococcus pyogenes
  source 1..40: mol_type = genomic DNA
cctttatgaccctgctatgggatctggatcactcctttta

SEQ ID NO: 12219 - DNA, 50 bp, Streptococcus pyogenes; identical to SEQ ID NO: 11559
  source 1..50: mol_type = genomic DNA

SEQ ID NO: 12220 - DNA, 40 bp, Streptococcus pyogenes
  source 1..40: mol_type = genomic DNA
ccatcataactttgctatggtattttgctcaatcctttta

SEQ ID NO: 12221 - protein, 497 aa, Streptococcus pyogenes
MSKIALYIRLSVEDMIKTDESESIINQRAYLNDYLDKNEEFKNFTREEYVDDGYSGTNENRPAFQRMLEDVKKNNIQTIIVKDLSRFMRDYITLGDYLENIFPFLGVRFIAINDGYDSNKEKGNGTDLDIQFKGLLYDFYTKDISEKVKSSMTTLKKQGKFLAWSPPLGYMKDPNDRHKIIVDEETAWIVKKIFKLALDGISSRNIAKILNEEKIPTPSKRKSELTNLDFEYSIIRTAKKPRPTWTNGNVIDVLANENYTGTYTFNMQDKSVLNPSSFKFKPKEEWGRVENNHEAIISKEDFEKVQKIKEKNLFMKGKNTDYEWRKKSPLQGFAKCPTCNHILGCTQSKRKRQDGTIRVHTYFTCRICKCNNVKHKNSRAGSLEEQVFEAIKEKYGLEDPIKDEKVKVKPMEKSIEDLETKKMQSFEKYKLGKMNRQKFIDSKNLIDEEIQAIKEKILKAKEEKEVIDNTKLTRELMEKYIDSVFCEGNEVLNIIWK

SEQ ID NO: 12222 - DNA, 50 bp, Streptococcus pyogenes; identical to SEQ ID NO: 2317
  source 1..50: mol_type = genomic DNA

SEQ ID NO: 12223 - DNA, 40 bp, Streptococcus pyogenes; identical to SEQ ID NO: 12218
  source 1..40: mol_type = genomic DNA

SEQ ID NO: 12224 - DNA, 50 bp, Streptococcus pyogenes; identical to SEQ ID NO: 11559
  source 1..50: mol_type = genomic DNA

SEQ ID NO: 12225 - DNA, 40 bp, Streptococcus pyogenes; identical to SEQ ID NO: 12220
  source 1..40: mol_type = genomic DNA

SEQ ID NO: 12226 - protein, 539 aa, Paenibacillus ihbetae
MKIQQRTRTAIYRRLSRDDEQSGESMSIENQRILLERYAKENGFEVVDIYTDDGWSGTNFDRPDFQRMKRDIENGKIDIVLVKDLSRLGRNQIETSLCIQVFFPEHQVRFIAVSENIDTAKGEDDFMELRNLFNEWFVRDTSRKVRSGYRQRALNGDYTGAYAPYGYRKDEHDKHKLVPDENTAAIVQRIFQLAVEGYSPYKIGRLLREDRILTPRAYLAEQYQRYLKVVNTKHPYDWGATTVKIILQNRVYFGHMVSHKSTKRSFKRKGLVAVPPEEWIEVPNTHEPLVDEQTFALAQKVIRVKKRPTKEGEHQIFAGLLKCSTCGHGLSFARGGNSKTSGGKGGRGSFACNQSRTRGKAYCSFHYISYVDVYEIILKDIQRHAQTAKDQESAFVEMLAEMSQSQQKKQWGAAIKERDKLKKREIELQTVQRKLYEDNALGRISDEQYVALSRDFTAEQAQMKERLKLLEEQLGQAESKRESTTRFLELVRKYTDMKELSKPILNELIDKVVVFDAEKVNGKRVQRIDIYYRFVGLLS

SEQ ID NO: 12227 - DNA, 50 bp, Paenibacillus ihbetae
  source 1..50: mol_type = genomic DNA
ttacctagttaaaaatagaacactccggtgttgtgttttttactaggtaa

SEQ ID NO: 12228 - DNA, 40 bp, Paenibacillus ihbetae
  source 1..40: mol_type = genomic DNA
gggatcgcttgccgataaccccttgttcttcttttattta

SEQ ID NO: 12229 - DNA, 50 bp, Paenibacillus ihbetae
  source 1..50: mol_type = genomic DNA
ttacctagttaaaaatagaacactaaggtgttgtgttttttactaggtaa

SEQ ID NO: 12230 - DNA, 40 bp, Paenibacillus ihbetae
  source 1..40: mol_type = genomic DNA
gggatctcatgctgataataaattttttttttttttttta

SEQ ID NO: 12231 - protein, 472 aa, Sharpea azabuensis
MCEKNVIVGLYVRVSTTEQAKEGYSLGEQEDRLRKYADAHGWVVYRCYADPGFSGAKMERPALQMMLDDVRSGRLNKVLVYKLDRLSRRQRDTLYMIEDVFNACGCDFVSMTEQLDTGTPLGRAMIGILSSFAQLEREQIKERMRLGREARAKSGRWSGSWQPPYGYACDENRNLVVDPYSASIVRKIFDMYIAGMSFFAIAEKLNKEGYRTNYGHKFYYHFVERVLSSYELTGGVSYSGEHYEGNHEAIISRDTFDKVQGMLEKRDRHPHSFRTIHLLSGGIMVCGECGASYRFLGSNGHRYYMCGNRLDRRDNKCYNTNIKADDIEGEIISRIKSLAFDDEYFQSIVDGRSEERDVSVDVAAINEKISNIERRRKRLMDLYEVDGIDFDDLNRRIGDLAKQQKGLADERDAIIASGNSSRLSVEEALSVISTVNDVFESGTIDEKRSVISALIDAIVVYPESIEIHWSFG

SEQ ID NO: 12232 - DNA, 50 bp, Sharpea azabuensis
  source 1..50: mol_type = genomic DNA
cgttttgcttgagaaactcatcttttagtatgtgtctgtgaagtaaaaca

SEQ ID NO: 12233 - DNA, 40 bp, Sharpea azabuensis
  source 1..40: mol_type = genomic DNA
ttcttattgtacactatttttatcttgtgacaacaaaaat

SEQ ID NO: 12234 - DNA, 50 bp, Sharpea azabuensis
  source 1..50: mol_type = genomic DNA
cgttttgcttgagaaactcatctttaagtatgtgtctgtgaagtaaaaca

SEQ ID NO: 12235 - DNA, 40 bp, Sharpea azabuensis
  source 1..40: mol_type = genomic DNA
gtcttataacccactattttaaactgatgacaacaaagat

SEQ ID NO: 12236 - protein, 522 aa, Anaerobutyricum hallii
MIESKSRVAIYCRLSEEDRNKQSETDDSNSIQNQKSMLLQYSLEHGWEVYNIYSDDDYTGSDRRRPEFNRLLEDAKNRKFDIVLCKTQSRFTRELELVEKYIHGLFPIWGIRFISIVDNADTANKGNKKSRQINGLVNEWYLEDMSENIKSVLTDRRKNGHHIGAFALYGYKKDPDVKGHLIIDEEAAEVVREVFTLFSQGYGKTAIARMLNDRGIPNPTEYKRLHGLRYKQPKTKNSTLWKYFAISDMLVNEIYIGNMVQGKYGSVSYKTKQNKPRPKDEWYRVEGTHEPIIDRELWDRVQTLVAQKAKPFTVGTIGLFARKARCMNCGYTMRSSKNRGKHYLQCSNRHVAKDACIGSFISVDKLEKAVIDELNKLSAEYLDKDELEQNVQFNNDLRGQKEALETEIAAYQKKIAEYTKGIRELYLDKVKGILSELDYLDLSKDFSTQKERLEKLVIDTQKQLDVIERKMQVGDNRRQLIEQYTNLEHLDREIVEKLIDYVLVGKKDPVTKEVPIEIHWNF

SEQ ID NO: 12237 - DNA, 50 bp, Anaerobutyricum hallii
  source 1..50: mol_type = genomic DNA
tgttgtctttacacaatcgtaccatctggtgcgacctcgtaagaacaaca

SEQ ID NO: 12238 - DNA, 40 bp, Anaerobutyricum hallii
  source 1..40: mol_type = genomic DNA
agtagtacgtgctttttgttccgcagccatattttccata

SEQ ID NO: 12239 - DNA, 50 bp, Anaerobutyricum hallii
  source 1..50: mol_type = genomic DNA
tgttgtctttacacaatcgtaccagttggtgcgacctcgtaagaacaaca

SEQ ID NO: 12240 - DNA, 40 bp, Anaerobutyricum hallii
  source 1..40: mol_type = genomic DNA
agtattatgtgctttttgtgtggcagccagagtatctttg

SEQ ID NO: 12241 - protein, 506 aa, Streptococcus pneumoniae
MNRIAIYLRLSEEDYKKTDESISIVNQRDYIRSYIENENSLKDNEIEEYIDDGYSATNTNRPSFLRLIDDIKNGRVGTIIVKDMSRFSRDYILLGDYLSNILPFLKIRFIAINDNYDSINENGNGIDTDTQFKTLYYDLFSKELSEKVRGAVKQIKSQGKNTNWAAPFGYIKDPEDKYHIIIDKKTAFIVKEAFYLLLKGYSCIQVANIFNEKGYITRSERKEELKLSDYTRNLVTGSKVKKRVWTNPSISQLTSNELYTGDYVYNKYRETKIGGRKRILLPEEEWKIILNTHEAIISREVFDKVKKIKEKRSFGGYTGNKNRSIFSDKIFCKECGRHMSFRSDSRQKKNSDKIYKYRSYYCNLCKAEKTPNNIKEKDIIELIKPKLKDFKIQKTLKEERVIEHKNVKEDILKEISILNSNLQIIYENYKKKNISKDEYLKEKTFIQDKKILLESKLEELKSEKIDSRKETDIDVLDEEGLLKAYVRSLIDKIIVSRSGEIEIVEK

SEQ ID NO: 12242 - DNA, 50 bp, Streptococcus pneumoniae
  source 1..50: mol_type = genomic DNA
tatagcaattgcttgacattgtagggggataatgctataatgatgacagt

SEQ ID NO: 12243 - DNA, 40 bp, Streptococcus pneumoniae
  source 1..40: mol_type = genomic DNA
tttaggtgaaagtggaagcgggaaatctacattattaaaa

SEQ ID NO: 12244 - DNA, 50 bp, Streptococcus pneumoniae
  source 1..50: mol_type = genomic DNA
tatagcaattgcttgacattgtagcaggataatgctataatgatgacagt

SEQ ID NO: 12245 - DNA, 40 bp, Streptococcus pneumoniae
  source 1..40: mol_type = genomic DNA
tcttggtggtagtggaacccagaaatctgcatctttaaca

SEQ ID NO: 12246 - protein, 506 aa, Streptococcus pneumoniae
MNRIAIYLRLSEEDYKKTDESVSIVNQRDYIRSYIENENSLKDSEIEEYIDDGYSATNTNRPSFLRLVDDIKGGRVGTIIVKDMSRFSRDYILLGDYLSNILPFLKIRFIAINDNYDSLKEQGNGIDTDVQFKTLYYDLFSKELSEKVRSSVKQIKSQGKNTNWAAPFGYIKDPEDKYHIIIDKKTAFIVKEAFDLLLKGYSCIQIANIFNEKGYITRSERKEELKLSDYTGNLVTGSKVKKRVWTNASISQITSNELYTGDYVYNKYKETKIGGRKRILLPEEEWKVIPNTHEAIVSREVFDKVKKIKEKRSFGGYTGNKNRSIFSDKIFCKECGRHMSFRSDSRQKKNSDKIYKYRSYYCNLCKAEKTPNNIREKDIIELIKPKLKDFKIQKTLKEERVIEHKNVKEDILKEISILNSNLQIIYENYKKKNISKDEYLKEKTFIQDKKILLESKLEELKSEKIDSRKETDIDVLDEEGLLKVYVRSLIDKIIVSRSGEIEIVEK

SEQ ID NO: 12247 - DNA, 50 bp, Streptococcus pneumoniae
  source 1..50: mol_type = genomic DNA
tatagcaattgcttgacattgtagggggacaatgatataatgatgatagt

SEQ ID NO: 12248 - DNA, 40 bp, Streptococcus pneumoniae; identical to SEQ ID NO: 12243
  source 1..40: mol_type = genomic DNA

SEQ ID NO: 12249 - DNA, 50 bp, Streptococcus pneumoniae
  source 1..50: mol_type = genomic DNA
tatagcaattgcttgacattgtagcaggacaatgatataatgatgatagt

SEQ ID NO: 12250 - DNA, 40 bp, Streptococcus pneumoniae; identical to SEQ ID NO: 12245
  source 1..40: mol_type = genomic DNA

SEQ ID NO: 12251 - protein, 501 aa, Bacteroides fragilis
MSSDEQTKGCSLDYQAQTLTEYCQRNKYNIIDEPYREDYSAKDFAHRPEINKIMKYCKQHKGEVDLILFLRWNRYSRDTPEAYKNIEYFQKLGIEVNACDEHIDWKQSESKILLAVYISQAEVDNDKRSKATIDGIYESAKQGKCTNKAPRGYKNIKIDDYNKYVEIVPEEAKIISQVFADVAKGLETPTYIHKQYTRKGFKVNKNSWFDMLRNHFYIGEVRVPEHNGKPSYYIKGLHEAIIEKATFYKVQEILDGNRKQSPKLSKKIHPDLFLRKYLVCPICGYPLTGAVSTGNGGKYCYYNCSHDAKHLRCRAEEANEMFAQYVASLKPNQAVLELYKEILVDLKRERDGNSRQEADVLKLELAKTKERISKLDNMFIDGDIDKQTHNRMIEKYTKEVIQLNEKIEIMLNPNRTNIEPKLGYSINLISNIDSYIRDTPVEVKCKLIGSMFPEKIIFDKESYRTNSYNQVLDLIYQQTNELRGKEKADKPNNLILSASVP

SEQ ID NO: 12252 - DNA, 50 bp, Bacteroides fragilis
  source 1..50: mol_type = genomic DNA
ccaaataatttgattttgtccgcttcagtacccccaaccgttctgttctc

SEQ ID NO: 12253 - DNA, 40 bp, Bacteroides fragilis
  source 1..40: mol_type = genomic DNA
tttttcaactttctccgcttcagtacccagacccggggtc

SEQ ID NO: 12254 - DNA, 50 bp, Bacteroides fragilis
  source 1..50: mol_type = genomic DNA
ccaaataatttgattttgtccgctttagtacccccaaccgttctgttctc

SEQ ID NO: 12255 - DNA, 40 bp, Bacteroides fragilis
  source 1..40: mol_type = genomic DNA
ctgtgcaactttcttccctttagtactctgccctggggtc

SEQ ID NO: 12256 - protein, 608 aa, Pantoea agglomerans
MKKCFVYHRVISDQQLDGSGMVRQAELLQNYIVQSNIMADMDNPEPVIITESGGVSAFKGHNMLISSGLGSWMEEVRSGMWDGSVLIIESIDRFSRQNPFVVMGYLSDLSNHNVAIHDVMARIVINRQNSMMLPMVMMNAQRAFEESKYKSNRISTGWKKRREQAFNKGTIVTNKRPQWIDVQNEQYVLNQKAAVVREIFRLYQTGMGTPTIAQHLQRLEKESSDWKFNRDWTGESVHKVLKNRRVTGSIFISEIIRNYDDIENPVIQKKYEVDVYPVVISKEEFELVQELLRSRRPGAGKGRTRTNENGERHKSNLFSGIVRCCCGQAMFHNIVRSYRKPAKSQPFTEEYRYLRCLVERDKLCDNKPLNYDVVERFVIEHIKGLDFSHIAHAQEHNTEHDLIRIQIQNEAAHIEDYEQGIAKYKAEGKKLSFDMLSELEDARERMEVLQARAATFKKVKVDMDFLQNIDYSQIYDVNNVELRNRAENEIAKVIKKIVLRRTGKYYTITLEYVQDDIHTHALFVKEDKKTGSSLVSGVLIERISDTTAYSTPSFTIIVRENSPCIHLTDEPLSIVDYSLLLNYIDATDGADSIAIWMRHNQNFLFMSC

SEQ ID NO: 12257 - DNA, 50 bp, Pantoea agglomerans
  source 1..50: mol_type = genomic DNA
tgcttgtataatgtcgcgattattcaaatgtatgttacattattcaagca

SEQ ID NO: 12258 - DNA, 40 bp, Pantoea agglomerans
  source 1..40: mol_type = genomic DNA
ttttcgcctggtaatcatacaaataggtgccattacagca

SEQ ID NO: 12259 - DNA, 50 bp, Pantoea agglomerans
  source 1..50: mol_type = genomic DNA
tgcttgtataatgtcgcgattattgaaatgtatgttacattattcaagca

SEQ ID NO: 12260 - DNA, 40 bp, Pantoea agglomerans
  source 1..40: mol_type = genomic DNA
ttttcagcttctactcatagacagaggtgccatttcagga

SEQ ID NO: 12261 - protein, 414 aa, Pantoea dispersa
MKLLVSYVRWSTKAQDSGDSLRRQNDMIDAFYRKHSDEYFMQATHRYVDKGKSGFHQKHKADGGEFKRMLDNVLSGDIPAGSLIVMENFDRASRADIDSAIDDIRQILRKGVEILTLGDNERYDKSSLSDPIRLIKHILIAERAHQESVVKQERTTAVWKGKTAKAIETGLPMGRQTPGWIELSPDRQSFVVIEPKADIVRLIFKLRLAGHSMFAICKHLNENGIETINDRKARISKTFKPGGGGWSAVSVKCLLTSRSVLGYLPAKISTEDRKIILRDEIADYYPRIIDDQTFNAVQTLLEKGGKGRLAAGDHWLYVNIFRTMLRCKCGLTMSPSGIRKPVYQGTYRCNGMHEGRCDYGSVSRKKLDTELCTRLFSKLSQLYDSNIDQSKIIEIQRRLQTVDRELQTLTETLL

SEQ ID NO: 12262 - DNA, 50 bp, Pantoea dispersa
  source 1..50: mol_type = genomic DNA
gttcttgtttagctaagtaagatgaccagaattctggccttaccacgcac

SEQ ID NO: 12263 - DNA, 40 bp, Pantoea dispersa
  source 1..40: mol_type = genomic DNA
atacatggagtaataaagcaccagaatttttgccatcgtg

SEQ ID NO: 12264 - DNA, 50 bp, Pantoea dispersa
  source 1..50: mol_type = genomic DNA
gttcttgtttagctaagtaagatgatcagaattctggccttaccacgcac

SEQ ID NO: 12265 - DNA, 40 bp, Pantoea dispersa
  source 1..40: mol_type = genomic DNA
atacattggttaatattgtatcagaatatttgccattctg

SEQ ID NO: 12266 - protein, 553 aa, Pseudoalteromonas arctica
MNKHTTLKPLLYSYIRFSTIEQAKGQSLNRQLSFAKEVAKEKGLELDDSLSMRDMGLSAFHKTNITRGALGIFLAAVEQGKVPAGSILVLESLDRISRAAPLESQGIIAQIINADITVITAADRKEYNKETIKKNPMDLVYIILVLIRANEESETKSLRVRSALTKQCDDWLAGKRGFRVKCGKPPSWVVWNDDKKLFDFDPHNKAIMLRKLELFKKGHGGIKIAELINAEFGAGTVHHTGANVYKEVKRRSLIGELNVKVGDADYVLEGYYPPLMSKVEFDFLVADSSKRGATKHTQKFVGILSGVGVFKCGCCGKSVGSHVVYRKKCIDEVKSSHKRYGCVEARRNNNCTMSSTVQIEMVESAVVKFCQDKVNLQRILLGGSDRELINTEESALVAQLEKINDDINSLTETLLILEGTPPQAIANKISALETQARDIQTQIDTSKNKLAKIDHSFRDEVTDRWLSLTKNLVKLSNDERLAIRQLVKDTFKSISLQLNTFSGDKGGLNNVFEHLLGASNADYFELLLEFHNDKKRLLRLHKHTGELVSGYDF

SEQ ID NO: 12267 - DNA, 50 bp, Pseudoalteromonas arctica
  source 1..50: mol_type = genomic DNA
tatctaccttcattatcttttagccagcaaaaggataataatagtagata

SEQ ID NO: 12268 - DNA, 40 bp, Pseudoalteromonas arctica
  source 1..40: mol_type = genomic DNA
atccacggctattacaggccagccaaaggcagtgttgagt

SEQ ID NO: 12269 - DNA, 50 bp, Pseudoalteromonas arctica
  source 1..50: mol_type = genomic DNA
tatctaccttcattatcttttagcaggcaaaaggataataatagtagata

SEQ ID NO: 12270 - DNA, 40 bp, Pseudoalteromonas arctica
  source 1..40: mol_type = genomic DNA
atcaaaggctccttcacgcaggccaaagacagtttttagt

SEQ ID NO: 12271 - protein, 564 aa, Streptococcus suis
MNRTLTIPYYNQVDTSRLSNITVVYCRLSQDDGLNGDSNSIINQKKILSEAVQRERLENPILFVDDGYSGTNFDRPAISEALRLVENRQVSNFIVKDLSRLGRSYIKVGQLTEITFPSFDVRFIALNDGVDSHKPNETNSIFLPIKSLMDEMYAADTSKKIRAVIQAKAKAGERVTVNPPYGYLKDPDNPKNWIVDPVASEIVKRIFQEAKNGKSLTEIAKLLESEQIFKPDRYRLEIGLKPLSSSSNVETLPYYWTKETLSAILSREEYLGHTVNLRTQTKSYKDKRSIDKPKEDWLIFKDTHEAIIDQETFDIVQKMRSHKRSNQRYKNRVGHENLFAGLVFCGTCGRKHYFCPQEKNGLNHDHYKCSGYRKPIDGCENPHYIQKSALIEIVGAKLRQTIQEIQLDKDKFLEKLEWQSQVKFSKDNQRQRQQLQKDELRSKEIDTIIQKLYEDNLFGKISDDRFVKLSQSYEDEQKQLQASILDLTEKLAKQQEETQNISKFMARISKYTELPELTVEIVNELIDKIVVHKPTGTKRNRIIQIDIHYNFIGKLNNEKASQAD

SEQ ID NO: 12272 - DNA, 50 bp, Streptococcus suis; identical to SEQ ID NO: 11787
  source 1..50: mol_type = genomic DNA

SEQ ID NO: 12273 - DNA, 40 bp, Streptococcus suis
  source 1..40: mol_type = genomic DNA
tataagaaaaagcctggtaaaccagactcttactctttaa

SEQ ID NO: 12274 - DNA, 50 bp, Streptococcus suis; identical to SEQ ID NO: 11787
  source 1..50: mol_type = genomic DNA

SEQ ID NO: 12275 - DNA, 40 bp, Streptococcus suis
  source 1..40: mol_type = genomic DNA
tataaaaatctgcctggtaaacaaaagtcttattttttaa

SEQ ID NO: 12276 - protein, 489 aa, Streptococcus intermedius
MIITNKVAIYVRVSTTSQAEEGYSIDEQIAKLKSYCDIKDWTLYKVYKDAGFSGSNIKRPGLQSLIADAKNKHFDTVLVYKLDRLSRSQKDTLYLIEEVFIKQDISFFSLQENFDTSTAFGKAMIGLLAVFAQLEREQIKERMQLGKLGRAKAGKSMMWARTSYGYIYNKETSNVIINPAEAEIVKIIYAEYLAGRSITKLKDYLNEQGLNTKTRPWYYRAIHMILSNPVYAGYNQYMGQLFKGDHQPIISKEDYDRTQEELKRRQIKAAEMNNNPRPFRAKYMLSGLARCGYCGAPLRIEMTAKRKTDGGRTYRYSCMNRTAKRTIGPTVYNNGKKCESGLYYREDLEKYVLNEVAKLQHDPEAIEILIEPSKTTVNEQELKSRLNVLDTKISRLNDLYLNNLTSLEELKEKTAGILREKSILEKQLTESPTLRLKNEKEKINRIQDKADIRSLPYNDQATIVRSLIQKVDVTAEAIKIRWLINNFSD

SEQ ID NO: 12277 - DNA, 50 bp, Streptococcus intermedius
  source 1..50: mol_type = genomic DNA
ttaataattttagtgactaacatttcaatcaatgtatctaaaactctttg

SEQ ID NO: 12278 - DNA, 40 bp, Streptococcus intermedius
  source 1..40: mol_type = genomic DNA
taaaagcacaactaacatttccactaaagtaaaagcttta

SEQ ID NO: 12279 - DNA, 50 bp, Streptococcus intermedius
  source 1..50: mol_type = genomic DNA
ttaataattttagtgactaacatttaaatcaatgtatctaaaactctttg

SEQ ID NO: 12280 - DNA, 40 bp, Streptococcus intermedius
  source 1..40: mol_type = genomic DNA
caaaatcagaactaacatttacataaaaacttaagcttta

SEQ ID NO: 12281 - protein, 525 aa, Ruthenibacterium lactatiformans
MYLEISNPMDYHVALYIRLSKEDETEGPSQSVTNQKSLLKEFVQQHHLSVYDIYVDDGWSGTNFERPDFQRMIKDIEAKKVNMVITKDLSRLGRDYIMTGHYMERYFPEHRVRYISLLDGIDTGVDSTANDITPFRAIMNDMYAKDISKKIKSVKRDKQRKGQFIGGKPMYGYKMHPTEKNKIVVDEKVAPIVRRIFMMALSGMSCRKIAATLNDEKIPTPATYCGWKVGNPGPYTGLWSSERISEMLKNETYIGNMVQGRMVKISYKSKKCIKRAPEDWVIVKGTHEPLVDQETFQKVQMLVNSRKYTRSRTYDFLLKGLIFCHECGHPMAVINRKNAEGEDCLYFVCRTYQRFTKAGVCTCHSIKEETVNEAVISKIRNVCQTYLNVEYLQPIAERVLKESCKEEQCETEIRALQSQIVNLTAHLDRMYMDRINGLLSENDFQRIYSKTKTDRGMLEHRLESLRVQREQPTSTADRAKELVQRFMDSAFTSREVLVSLVERIELTENKEIIIKFKFHELETIS

SEQ ID NO: 12282 - DNA, 50 bp, Ruthenibacterium lactatiformans
  source 1..50: mol_type = genomic DNA
cgcttacattaggcgcggtgctatgtatcaggacacgactaatgtaagcg

SEQ ID NO: 12283 - DNA, 40 bp, Ruthenibacterium lactatiformans
  source 1..40: mol_type = genomic DNA
gcacatcagccgcagctatgtatcccgcatcgagaaaaaa

SEQ ID NO: 12284 - DNA, 50 bp, Ruthenibacterium lactatiformans
  source 1..50: mol_type = genomic DNA
cgcttacattaggcgcggtgctattgatcaggacacgactaatgtaagcg

SEQ ID NO: 12285 - DNA, 40 bp, Ruthenibacterium lactatiformans
  source 1..40: mol_type = genomic DNA
tcacatcaacctcagatattgcttcagcatcaaaaaaaaa

SEQ ID NO: 12286 - protein, 485 aa, Streptococcus pyogenes; identical to SEQ ID NO: 256

SEQ ID NO: 12287 - DNA, 50 bp, Streptococcus pyogenes; identical to SEQ ID NO: 247
  source 1..50: mol_type = genomic DNA

SEQ ID NO: 12288 - DNA, 40 bp, Streptococcus pyogenes
  source 1..40: mol_type = genomic DNA
cttagattttccttgtaaccaatttttaaatcaagctcca

SEQ ID NO: 12289 - DNA, 50 bp, Streptococcus pyogenes
  source 1..50: mol_type = genomic DNA
ttagcgtttttagtgtcttgcatttcaatgcaagatactaaaattcttcc

SEQ ID NO: 12290 - DNA, 40 bp, Streptococcus pyogenes
  source 1..40: mol_type = genomic DNA
atttcattttcctggtaattcatttttatattaatctaca

SEQ ID NO: 12291 - protein, 578 aa, Intestinimonas butyriciproducens
MSNDVSLDINQESNPVQTVAPPKEDNDMLRATDKITALYCRLSVEDTKEKGGKDDPSNSIQHQQIMLMEYAKSQHFPNPTFFIDDGYSGVDFSNRPGFQKMLAEIEAGHVEVVITKDLSRLGRNSSLTGLYINYTFPQYGVRYIAINDHFDTIDPNSTDNDIAGIKNWFNEFFAKDTSRKIRAVNKAKGERGERLTTNVPYGYKHDSGDPKKWVIDEEAAQVVKRIFALCMEGKGPSQIAALLEKEKVLNPTAYKQREGRKTPHQTPENEYRWHESTVAYILEYMEYTGCTVNFKTYTNSIWDKKQRENPMENRRIFYNTHPAIISLEVFDKVQEIRQQRHRRTATGKSNMFSGLVFCNDCKQKLYYSTTSYFEKRQDFFICSTHRANKDKCSGHYIRAVVLEQIVWKHIQEVVSVVTRYEAYFRSEMEQKLRMQSEESLRLYRKRLAQAEKRIGELDHLFVRIYEDNVAGKLDDERFAMMSKNYTEEQKDLKAEVKGLQQQIHEQEQQAENIEQFVQRVKRNSTLAELTPYALRELVKAVYVEAPDKSSGKRRQKVHIEYDLVGYIPVDELLKAEQA

SEQ ID NO: 12292 - DNA, 50 bp, Intestinimonas butyriciproducens
  source 1..50: mol_type = genomic DNA
actgtcttaccagcagggagcccttaggcgtgtgccgataagacagtaat

SEQ ID NO: 12293 - DNA, 40 bp, Intestinimonas butyriciproducens
  source 1..40: mol_type = genomic DNA
atacaaaaaaggagcggctttccgctccttttttgtattc

SEQ ID NO: 12294 - DNA, 50 bp, Intestinimonas butyriciproducens
  source 1..50: mol_type = genomic DNA
actgtcttaccagcagggagccctctggcgtgtgccgataagacagtaat

SEQ ID NO: 12295 - DNA, 40 bp, Intestinimonas butyriciproducens
  source 1..40: mol_type = genomic DNA
atacaaaaaagtagtgtctcttccttcctttttttttttt

SEQ ID NO: 12296 - protein, 480 aa, Clostridioides difficile
MKQNVVLLRVSTDMQDFESQKNGINKYIKENNITVHKTIEEQGVSGYKTKLEDREGLQALIEMANNEELNSVIVFNQDRIGRTLELISFMLIMKEQGVKVYSVTEGLLNDDSDTSDLMQFIKFWTANQESKKTSLRVKNGKRATIEKNAYSGGVPNFGYKVVDRKLVVNQEESEIVKLIFKNYTDYGIQKTKEYLNENNILKRGEKWTKSKLFSILYNNIYRGKKEYQGELLDFPELQIVSDQVFYKAQERAKARNTRGTSRYENRTNVLFESLLYHRCKDGVERKLNIDYVNTKEGRVHTYRCRYCKETKAKITKNFNSNRIEPILIENIKSIMNNISIESLEKRYNEEIKNDTKTITKNIDVINKNIVKKNKAIENAMKLIEKIFMEESDVDINIPTDMVKNLKIEISKLEEQLEIHYKELEQVKNTTSNAMYLLDKYKDFEYLFNNANNEKKKVILQELIEKIVITENSINIQLNLY

SEQ ID NO: 12297 - DNA, 50 bp, Clostridioides difficile
  source 1..50: mol_type = genomic DNA
taatggtcaatagtttatttcgcatcaccgaataatactgctaaccatta

SEQ ID NO: 12298 - DNA, 40 bp, Clostridioides difficile
  source 1..40: mol_type = genomic DNA
aaatgggacaccatttgaatctgttggataaattccatat

SEQ ID NO: 12299 - DNA, 50 bp, Clostridioides difficile
  source 1..50: mol_type = genomic DNA
taatggtcaatagtttatttcgcagtaccgaataatactgctaaccatta

SEQ ID NO: 12300 - DNA, 40 bp, Clostridioides difficile
  source 1..40: mol_type = genomic DNA
aagtggtacagcattggaagttgttacataaatgttatat

SEQ ID NO: 12301 - protein, 625 aa, Erwinia persicina
MKRCFVYHRVSSEQQMDGSGIQRQAELLESYLVSTGLCSEMDDPEPIILADGGISAWKGHNITHGELGQWMEQVRAGMWDDSVLVVENIDRFSRQNPFTVVGYINDLVQHGVSIHDVNARMVISRQNSVMLPIVIMNAQRAYDESKHKSIRIKAGWKARREQAFNNGSVVTQKRPAWIDVVDNQYVLNDKAAIVREIFRLYQSGIGCPTIAKLLQEKGTEWRMTPDRKWRGEAVHKILRNKRVTGTIFISEITRNYDMTGDPVTQKKYEMDVYPIIISKEEFELVGKLLSSRRPGNGRIQGGTFTKKYYDVDGKPYRDREGNVIELEVNTGKEIKKSNIFGGMFRCGMCGEPMYHNVVVSKRKSVKRGEFTEEYRYIRCLGERDKLCDNKSLKYDVVEKFLVEHIRGMDFSQIIKPNSSNPEVELVRLRIEEERRHIEDYERGINKRRAEGKKVSFDILSELEDSIARLDELEKSALVFDEIHVNTDVLANVDTNELYDVFNVELRSRVEREIGKIVDMIMLYRYGDMYIAEISYRGMAVLKHVLMIKGAAMVSQVRIERTGDDMAYYTPSFGVLVKSDGLINTYTGEEPISLIDYSMLLNYADAIESDILAIWLRHNLNFLFNR

SEQ ID NO: 12302 - DNA, 50 bp, Erwinia persicina
  source 1..50: mol_type = genomic DNA
tttttgtttaacattgcctccattcaaaggtatgctacattaaacaaaaa

SEQ ID NO: 12303 - DNA, 40 bp, Erwinia persicina
  source 1..40: mol_type = genomic DNA
ttttcgcctgataatcatacaaataagtgccattacagca

SEQ ID NO: 12304 - DNA, 50 bp, Erwinia persicina
  source 1..50: mol_type = genomic DNA
tttttgtttaacattgcctccattggaaggtatgctacattaaacaaaaa

SEQ ID NO: 12305 - DNA, 40 bp, Erwinia persicina
  source 1..40: mol_type = genomic DNA
atttcccctaatattcataggaataagttccaaaaaagaa

SEQ ID NO: 12306 - protein, 557 aa, Blautia wexlerae; identical to SEQ ID NO: 11441

SEQ ID NO: 12307 - DNA, 50 bp, Blautia wexlerae; identical to SEQ ID NO: 11442
  source 1..50: mol_type = genomic DNA

SEQ ID NO: 12308 - DNA, 40 bp, Blautia wexlerae
  source 1..40: mol_type = genomic DNA
ctggaaacttggtctttggaaatttgtaccagaataacca

SEQ ID NO: 12309 - DNA, 50 bp, Blautia wexlerae
  source 1..50: mol_type = genomic DNA
aagtatcgctatctaaccccagcaattaatgaggtgtgatagcgatagcg

SEQ ID NO: 12310 - DNA, 40 bp, Blautia wexlerae
  source 1..40: mol_type = genomic DNA
ctgaaaaatttgtctttggatatttataccaaaacatact

SEQ ID NO: 12311 - protein, 511 aa, Bacillus swezeyi
MLRAAIYIRVSTKLQEEKYSLRAQTTELNRYVEQQGWRLVDEFQDIESGGKLHKKGLNALLDIVEEGKIDVVVCIDQDRLSRLDTIAWEYLKSTLRENKVKIAEPGTIVDLDDEDQEFVSDIKNLIAKREKKSFVKRMMRGKRQRMREGKGWGQAPYEYYYDQNEEQYKLKKEWAWVIPFIDRLYLEEQLGMSSIADELNKISKTPSGIMWNEHLVHTRLTTKAYHGVQEKTFSTGEVIAVENIYPKLRTKETWEKIQIERNKRGNQYKVTSRKRNDLHLLRRTYFVCGECGRKISLAAHGTKESPRYYLKHNRKLRLADGSVCDVSINTVRVENNIVQAIKAIVTSKELAKQYINLENEKEEITQLEQNIKNNEQTIQKHTTKIEKLIDLYLDNHLTKEQLNKKQLEIENTTENLQSQLNRDKAKLETLKSDSWSYDFLSELFESINFFDSDFSPLERAMLMGNIFPEGIVYRDHIILKANVGGLNFDVKVSVDDDPFPWHYSKRNKQQK

SEQ ID NO: 12312 - DNA, 50 bp, Bacillus swezeyi
  source 1..50: mol_type = genomic DNA
aaggggttattacccctgtttatttcaataaataggggtaataaccttta

SEQ ID NO: 12313 - DNA, 40 bp, Bacillus swezeyi
  source 1..40: mol_type = genomic DNA
aagcatgacgacaagcatttcaattaatgtaaatcccttt

SEQ ID NO: 12314 - DNA, 50 bp, Bacillus swezeyi
  source 1..50: mol_type = genomic DNA
aaggggttattacccctgtttattaaaataaataggggtaataaccttta

SEQ ID NO: 12315 - DNA, 40 bp, Bacillus swezeyi
  source 1..40: mol_type = genomic DNA
aaaaatgctgacaagcactaaaatcactgtaaattccttg

SEQ ID NO: 12316 - protein, 601 aa, Rummeliibacillus stabekisii
MRVAIYIRVSTKLQEDRYSLSSQKLELTRYALEQKWTIVDIFKDVDSGGKLHKVGLEALLDCVDEGKVDVVLCVDQDRLSRLDTIEWEYLKQALRENNVKIAEPGNVTDLSNEDDEFISDIKNLIAKREKRSIVRRMMRGLRQYTREGKVWGKQPDEYHYDVNTKELTINEEYAWIIPRIDQLYLEEQMGLHRIAEYLNSVVKTSSNRKWTAVQVRNKLINPCYHGILRREFPNETIEVEGVYPPLRTKETFERIQATLQKRHMVYPSSDFHFLRNISIKCADCNHILSVRKGSTHGDSSKYYLKHAVEYVNNKCSANPSINTDRIKRPLIAALQDILKSEETAQKYFQTEYNEEDVHLIEKEVKHLKKKLLDTNSKLDNLLDLYLDGTWSKEKLDERKLSFEQEIKGLQEQLKNRENKLKLIREQRLNYNTVIQYFVIIKDMDRLLDEGDKQRLLGALFPTATYRPQTNELILHAIVNGKITLDITIAIDDKDVIYEERLVETYRKRYNETQQLLSENKWITFKELTRISPYNAKTLRKDEQLFGPYQYLMPAKGSKELAEYKRQRIVEYIDLNGKKSITRIAKDLGYSRKTVSELLNML

SEQ ID NO: 12317 - DNA, 50 bp, Rummeliibacillus stabekisii
  source 1..50: mol_type = genomic DNA
tcggttggttttgtaaataaagctagagtttgtttcataaatgcatttgt

SEQ ID NO: 12318 - DNA, 40 bp, Rummeliibacillus stabekisii
  source 1..40: mol_type = genomic DNA
aattgcaatgaacttcgccagtcttctttatatgattccg

SEQ ID NO: 12319 - DNA, 50 bp, Rummeliibacillus stabekisii
  source 1..50: mol_type = genomic DNA
tcggttggttttgtaaataaagctcaagtttgtttcataaatgcatttgt

SEQ ID NO: 12320 - DNA, 40 bp, Rummeliibacillus stabekisii
  source 1..40: mol_type = genomic DNA
aattttaatgaacttcagccatcttcttaatctgctttct

SEQ ID NO: 12321 - protein, 508 aa, Heyndrickxia oleronia
MLLNYNDDKTITDYSEYPYLVYGRVSTEKDEQVSSIENQIDICRDWIEKNNYEWKEESIVLDNGISGTVLLDRAAMQLVLEKSRKREIKMVLFKSIHRLARDMKDALEIKEILLAHGVRLVTIEEGYDSLYEGKNDMKFEMFSMFAAQYPKTLSVSISGALAAKVRRGEHIGPIPFGYAIKDKKLIINEATAPTIRQIFRWYLHDGFGFKTITRLLNEEMIKGNVCKPRKKDKWQVTSVQRIIQNPTYAGIFVYNRYTTIKINGRKKQIQNPREKWLIYEKHHPAIISKHEWETANSKEVTNKKTKISAWNEFRGLLKCSECGSNMVIVQSYRKKKDGTRTEWKYLKCSAYRRGGEHGCINHTPIRYEEFRNFVLKKILLKGRKVKVNFENNVHQQKQKEITSLKKQKTTVENMNNELIDLYLKDKLITKQEFQLKRKEYENEIKSLTDRIFLLNQEEEVKIDIESIQEAFKQLKQHDEDLHHAFSTLIDDIVVYPDGKLDFNYKFEL

SEQ ID NO: 12322 - DNA, 50 bp, Heyndrickxia oleronia
  source 1..50: mol_type = genomic DNA
cgtttgtgaaaggtacacatgacaaatgccatgcgtagtgattgcaaatg

SEQ ID NO: 12323 - DNA, 40 bp, Heyndrickxia oleronia
  source 1..40: mol_type = genomic DNA
agttcgaaatcatatttccaatgccatgcaaaagcttgga

SEQ ID NO: 12324 - DNA, 50 bp, Heyndrickxia oleronia
  source 1..50: mol_type = genomic DNA
cgtttgtgaaaggtacacatgacaattgccatgcgtagtgattgcaaatg

SEQ ID NO: 12325 - DNA, 40 bp, Heyndrickxia oleronia
  source 1..40: mol_type = genomic DNA
agttagaaatcaaatttgcattgccaggaataaaattgca

SEQ ID NO: 12326 - protein, 549 aa, Mycoplasma hominis
MSKEKIKVYLYTRVSTSIQIEGYSLEAQKSRMKAFAIYNDYEIVGEYEDAGKSGKSIEGRIQFNRMMEDIKSGKDGVSFVLVFKLSRFARNAADVLSTLQIMQDYGVNLICVEDGIDSSKDAGKLMISVLSAVAEIERENIRIQTMEGRIQKAREGKWNGGFAPYGYKLEDGKLFINEEEAIAIRTIFDQYVNTTIGANGISKYLENHGIRKIPRQNGKNPLFDAGLIRKILKNPVYNGKIAFGRRTLEKVHGTRNEYKQVEQDEYLISEGIHEAIVSDEVWQAAQVKLKSQAKKYEHVNKGKDTRTHLLSGIVKCPICGVGMFGNKCIKKKKDGTKYKDFYYYGCKHRQMIRGHKCTFRKQIREELLDDAVAEVIVKIVSNPKFASMMQEKINMKVDTSEIETEIDNYQKELRKCHSTKFKLIEEIDNLDVEDKHYKRRKQDLDDRLYRMYDKIDELESSLIDAKAKKQTIEAEKLTGDNIYKVLIYFDKLYKVMNDVERRQLITALISEIQVYEEKQPNGQWLKSITFKLPIIEENLNIGLDNDEHV

SEQ ID NO: 12327 - DNA, 50 bp, Mycoplasma hominis
  source 1..50: mol_type = genomic DNA
ggtttggacaatgatgagcacgttgagacggtagcacttttgtccaaact

SEQ ID NO: 12328 - DNA, 40 bp, Mycoplasma hominis
  source 1..40: mol_type = genomic DNA
tcctcaaacttatcatattgaaatgttgtcacttttaaaa

SEQ ID NO: 12329 - DNA, 50 bp, Mycoplasma hominis
  source 1..50: mol_type = genomic DNA
ggtttggacaatgatgagcacgttttgacggtagcacttttgtccaaact

SEQ ID NO: 12330 - DNA, 40 bp, Mycoplasma hominis
  source 1..40: mol_type = genomic DNA
tctgcattcttgtcatattttgatattgtcagtttaaaaa

SEQ ID NO: 12331 - protein, 464 aa, Clostridium niameyense
MMKDAGLKQHFITKKKFVFIADETKEPLFHKIVTKSVTRFARNTDVLSIWKELNQKGVTVFFQDINKDTANSEDSLILNLLLTLSQEESKNISERTKFGNRAIAKANKIRNNSLYGYVFDKETNSLIIKEDEAAVVRKMFDLCIQGYGYVKISQMLAEEGIYNPKGKPFAMSTIKNMIHNKKYCGYNVRNQWESRNLFSENHSHCRTKKENWIIQKNDRIEPIISEEIGNLAQEQIKLRLLHQNTGGTVERRDTSDKIICNCCGKNFYICHSRKIGSGINSYPYYICSTKKKQGKNVCDNDNVQVRKIDAFIDDLAKNYYKNIRLSNKGKLIKLQGELKKAKNRSVTEINNECEAIKSENMYHEKKLSKLIDNFLDCSDVMKTVIDKKISDLELTIKNNNNKILELERSRTNIDADKMSMEKKIKELKKELSKIDTIELTREELMDKIRYIKVDKGNKFMVEYL

SEQ ID NO: 12332 - DNA, 50 bp, Clostridium niameyense
  source 1..50: mol_type = genomic DNA
tgtggaaaggctgcgatgattggacattgaaaatatgtggttctacacaa

SEQ ID NO: 12333 - DNA, 40 bp, Clostridium niameyense
  source 1..40: mol_type = genomic DNA
tggaattgtgaggattggacaactaaaatagtataatgtt

SEQ ID NO: 12334 - DNA, 50 bp, Clostridium niameyense
  source 1..50: mol_type = genomic DNA
tgtggaaaggctgcgatgattggaaattgaaaatatgtggttctacacaa

SEQ ID NO: 12335 - DNA, 40 bp, Clostridium niameyense
  source 1..40: mol_type = genomic DNA
tggatgtgacagggtgggcaaactaaaatattataatgta

SEQ ID NO: 12336 - protein, 615 aa, Clostridioides difficile
MNQYSKITALYSRLSVGDEDRDGGESNSIQNQKIFLERYAREQKLTNIKHYIDDDESGRFFDRSAYVQMMDDVENGKVGIVIMKDMTRWGRDYLQVGNAMEVFRRNNVRFIAINNGIDSAEPSTLEFAPFINIMSEWYARDISKKVKTGIKTKGTSGKPIATEAPYGYMKDPDNKDFWIIDEEAAKIVRLIFRLFIDGKNRNQIAVYLKNEQILTPTFYLKQHDRGTAKSRQLNEENRYNWNKATLTHILTRQEYCGDVVNFKTAKHYRDKHSSYVDKSQWQIIENVHEPIIDRATFENVQRILADAPVKRPNGDGYIHPLSGLLYCKDCGTKMHIRTIRKSDGNHYVTYCSEYAKGKAKHPKCHSPHRVDVDIVMQNIAEVLRKIAQYSLSNKAGFEALVKNSLVKGQTEEMKKQQKRIPQITHRLEQIEKVMDKLYEDNALGTIEPDRYEQLSQKYAEEYYPLKKELEEIQSHLSERENQSQRAKKFIRLVESYCDFAELTPTAINEFISKIVVHERDVKGARYAVQRVEVYFNYIGKFENELTEQMEPTEQECRRMREEIEEAKKEKNRAYHRAYYKKYRAKNLEKNREYERMKAREYRARKKAQAALQPAQ

SEQ ID NO: 12337 - DNA, 50 bp, Clostridioides difficile
  source 1..50: mol_type = genomic DNA
aataacacttgacaaaacgcatcatggagcgcataataacaactgtaagg

SEQ ID NO: 12338 - DNA, 40 bp, Clostridioides difficile
  source 1..40: mol_type = genomic DNA
agaatactatacttgccattggagtaaaaagcacgattca

SEQ ID NO: 12339 - DNA, 50 bp, Clostridioides difficile
  source 1..50: mol_type = genomic DNA
aataacacttgacaaaacgcatcaaagagcgcataataacaactgtaagg

SEQ ID NO: 12340 - DNA, 40 bp, Clostridioides difficile
  source 1..40: mol_type = genomic DNA
agaatattatttttgtcaaaagagtaaaaagaaagatgta

SEQ ID NO: 12341 - protein, 444 aa, Faecalibacterium prausnitzii
MMDYYLEFLFPEKRVRYIAVAENEDTEKGLSDFVPFKNLFNEWFAKDTSRKVKAAFKAKFATGQRIGAYAPIGYRKHPEIKNKLIIDEETRWIVEKIFDLAIHGRGAASITRILIAEKVPTPGFINFQRDGTFANIYAGAPEEKSYAWTIAQVKSIMKDETYIGHTIHYRETNISFKNKRRVRKPQSEWVRVENTQEPIISEQVFRQVQEQIANRRRKCKDGTTQIFSGLVKCADCGWSLSYGENRQNSKPYGHYHCSKYGQGTRQCSMHYIRYDVLYAYVLSRLQYWSGLVQHDEERLLKQLLNATDKGQAAARKKQAAELKKAEKRKAEVDTLFARMYEDWAAGRITEYNFSMLSGKYQSEQAELDEKIEQLQSAIATESQNAVDAEKWIALMKECVNPTELTAELLNMLIEKIVVHEAVKGEDGSREQEVEIFYRFIGKID

SEQ ID NO: 12342 - DNA, 50 bp, Faecalibacterium prausnitzii; identical to SEQ ID NO: 4067
  source 1..50: mol_type = genomic DNA

SEQ ID NO: 12343 - DNA, 40 bp, Faecalibacterium prausnitzii
  source 1..40: mol_type = genomic DNA
ggtctcgaagtgggagggcggaatgtccatccccgacttg

SEQ ID NO: 12344 - DNA, 50 bp, Faecalibacterium prausnitzii; identical to SEQ ID NO: 4069
  source 1..50: mol_type = genomic DNA

SEQ ID NO: 12345 - DNA, 40 bp, Faecalibacterium prausnitzii
  source 1..40: mol_type = genomic DNA
ggacttggagtgggaggtccaggtgttcagccctgacttg

SEQ ID NO: 12346 - protein, 521 aa, Vibrio coralliilyticus
MRYVAYLRVSSHNQVETGDSIDGQRNKIINWAKLGNHHIVAWYVDEAKSAYQGPRAEFSRMLDDLEQGLILADGVIVYSLSRFSRNLLVQLQATKTLEKHGISLVSAIESFPENPEDQYVMVTMLGVMNEHQSRQNGKVVSDRLMDTARKGFFTGGIPPYGYKSIEVAGDTSNIRRKLEIVQEEADIVRHIFELAEKGHYGKGIGIKNMLNILNEQGLTYRGKRWSKSTLSRVLNNPVYYGERLFGKKSKKDTVVSPAPAILSKEQFDRTRESILARGVNMPNSKSVRSSSLLTGILRCAVCGGSMVVTAGKSGKYKYYQCSLQVQRDTKLCSSKRISKPKLEKEVREKLLPQVFSNEHITNVYSQARDLLKEKSAASRDKMLHTTNAINRAKVQAKTLVDLLASGELQPNATVNNHLSELNSTILNLEATLKQQTTLSRLPVKNVGEKQLTNFVRCISEHIRSSTDEQLKQLLLSTFKEIKVQPAKKLFATGANINILRIATNAKTGTDFSVPVFGTIWR

SEQ ID NO: 12347 - DNA, 50 bp, Vibrio coralliilyticus
  source 1..50: mol_type = genomic DNA
ttcccgttttcggtacaatatggcggggagagtgggacgaatatgggtac

SEQ ID NO: 12348 - DNA, 40 bp, Vibrio coralliilyticus
  source 1..40: mol_type = genomic DNA
gttttttatcgaaagtggcggagagatagggatttgaacc

SEQ ID NO: 12349 - DNA, 50 bp, Vibrio coralliilyticus
  source 1..50: mol_type = genomic DNA
ttcccgttttcggtacaatatggcccggagagtgggacgaatatgggtac

SEQ ID NO: 12350 - DNA, 40 bp, Vibrio coralliilyticus
  source 1..40: mol_type = genomic DNA
ggttttcatccaagatggcccagagaaagggatcagagcc

SEQ ID NO: 12351 - protein, 521 aa, Vibrio coralliilyticus
MRYVAYLRVSSHNQVETGDSIDGQRNKIINWAKLGNHHIVAWYVDEAKSAYQGPRAEFSRMLDDLEQGLILADGVIVYSLSRFSRNLLVQLQATKTLEKLGISLVSAIESFPENPEDQYVMVTMLGVMNEHQSRQNGKVVSDRLMDTARKGFFTGGIPPYGYKSIEVAGDTSNIRRKLEIVQEEADVVRHIFELAEKGNYGKGIGIKNILNILNGQGLTYRGKRWSKSTLSRVLNNPVYYGERLFGKKSKKDTVVSPAPAILSKEQFDRTRESILARGVNMPNSKSVRSSSLLTGILRCAVCGGSMVVTAGKSGKYKYYQCSLQVQRDTKLCSSKRISKPKLEKEVREKLLPQVFSNEHITNVYSQARDLLKEKSAASRDKILHTTNAINRAKVQAKTLVDLLASGELQPNATVNSHLSELNSTILNLEATLKQQTTLSRLPVKNVGEKQLTNFVRCISEHIRSSTDEQLKQLLLSTFKEIKVQPAKKLFATGANINILRIATNAKTGTDFSVPVFGTIWR

SEQ ID NO: 12352 - DNA, 50 bp, Vibrio coralliilyticus; identical to SEQ ID NO: 12347
  source 1..50: mol_type = genomic DNA

SEQ ID NO: 12353 - DNA, 40 bp, Vibrio coralliilyticus; identical to SEQ ID NO: 12348
  source 1..40: mol_type = genomic DNA

SEQ ID NO: 12354 - DNA, 50 bp, Vibrio coralliilyticus; identical to SEQ ID NO: 12349
  source 1..50: mol_type = genomic DNA

SEQ ID NO: 12355 - DNA, 40 bp, Vibrio coralliilyticus; identical to SEQ ID NO: 12350
  source 1..40: mol_type = genomic DNA

SEQ ID NO: 12356 - protein, 530 aa, Blautia massiliensis; identical to SEQ ID NO: 1636

SEQ ID NO: 12357 - DNA, 50 bp, Blautia massiliensis; identical to SEQ ID NO: 1637
  source 1..50: mol_type = genomic DNA

SEQ ID NO: 12358 - DNA, 40 bp, Blautia massiliensis
  source 1..40: mol_type = genomic DNA
tgggaataattatggttctcacagaggggattcccttctg

SEQ ID NO: 12359 - DNA, 50 bp, Blautia massiliensis
  source 1..50: mol_type = genomic DNA
attttcccctagttataatgaacaggtgaaccttataattaagggaaaac

SEQ ID NO: 12360 - DNA, 40 bp, Blautia massiliensis
  source 1..40: mol_type = genomic DNA
tggttaaaatcaaggtgctggcagagctgcttcccttctg

SEQ ID NO: 12361 - protein, 521 aa, Vibrio owensii
MNYVAYLRVSSYNQKELGDSIDGQRQSIIDWVQAKGGNILRWYTDDGVSAFKGKRNQFELMLHELENDIVKADGLIVYSLSRFSRNLLRQLEAKKLLEKKGITLVSATEALPTNQEDNFIMVSLLGLMNEHYSIQNGKVVTDRLRDTARKGYFTGGPVPYGYCSITVSGVTSKCRKKLQIFEEEADLVKQIFSLSEKGVNGKPLGVKSIAEMLNKKLQYRRGTKWNRNSVSRLLRNTAYIGDFVYNSGGREPIIVKIPAIIDRNQFDNVQDGLKSRDIFSAESRRLRSHCLLTGLLKCQVCGGSMVVTSGKSGKYSYYQCSKQVRHAPDTCASKRIRRDIVERVVKQKFIGELLKEDHLKKIHTRTRLRIKDANRTLVSDKNRLSKRKSNLETRYSRLIMMVADGELAPDERINKNLSEISAQIDALEHELARLSVRINFPVKNFGDARLQDFAVAVQEYLMDADDEKIKQLMLSTVTSVKVVEGAKKLIFEGSNMAVLYLIANAKTGTEFSVPVFVTKWR

SEQ ID NO: 12362 - DNA, 50 bp, Vibrio owensii
  source 1..50: mol_type = genomic DNA
tctcggttcccgttttcgtcacaaagtggcgggcagcatgggacgagtat

SEQ ID NO: 12363 - DNA, 40 bp, Vibrio owensii
  source 1..40: mol_type = genomic DNA
agcgggctttttactggaatgtggcggagagatagggatt

SEQ ID NO: 12364 - DNA, 50 bp, Vibrio owensii
  source 1..50: mol_type = genomic DNA
tctcggttcccgttttcgtcacaaaatggcgggcagcatgggacgagtat

SEQ ID NO: 12365 - DNA, 40 bp, Vibrio owensii
  source 1..40: mol_type = genomic DNA
agctggcttagtacaggataagtgcggagagacagggata

SEQ ID NO: 12366 - protein, 506 aa, Flavobacterium johnsoniae
MKKIADLYVRVSTDEQADRGYSQRNQEEMLTKYCDINSIEIRNIIYEDHSAKTFNRPQWKKLLLNLKKLKNKSELVLFTKWDRFSRNAGDAYQMISILRKLGVEPQAIEQPLDLSIPENKMMLAFYLAAPEVENDRRALNTFHGMRRARKEGRYMGYAPVGYVNRVKEDGTKYITFDQPEASILKWAFEELSKGIFNTEQVLYMAKEKGLKAGKNHFWRAIRNPLYCGKIAVPKYKDEDLRYVTGQHEALISQTLFYKVQDVLDGRSRTYLPKAVALKPFPLRGFFICPDCGKILTGSISKGRHKYYPYYHCSAGCRYRINSEKANEIFTNNLKEYIPIPEIKNVYAKVLSECYKEQTKEVFEEKDKIIAQLKDYEMRITHARDLLSTKQIDASDYRDMKSDYCDIINRLELKLSAINEDAYDIEELLKTGIENLLKLNEYYDNGDWTDSRDLIGSIYPENFTISENEFRTTRINEVVWLIYYINKQIQSNKKGTKKNISSLSQVV

SEQ ID NO: 12367 - DNA, 50 bp, Flavobacterium johnsoniae
  source 1..50: mol_type = genomic DNA
aagaatatttcttctttgtcccaagtagtagccctaacgggacaattctc

SEQ ID NO: 12368 - DNA, 40 bp, Flavobacterium johnsoniae
  source 1..40: mol_type = genomic DNA
gttgaagtggtgtttttacttagtagcgggaacaggactc

SEQ ID NO: 12369 - DNA, 50 bp, Flavobacterium johnsoniae
  source 1..50: mol_type = genomic DNA
aagaatatttcttctttgtcccaaagagtagccctaacgggacaattctc

SEQ ID NO: 12370 - DNA, 40 bp, Flavobacterium johnsoniae
  source 1..40: mol_type = genomic DNA
gttgtagtggtgtttttacagacagccaggcaaaggtctc

SEQ ID NO: 12371 - protein, 523 aa, Blautia massiliensis
MELLNVCIYLRKSRADREAEARGEGETLARHERILLDLAKKRGYNVGAIYKEIVSGETISARPVMQQVLHEVEAGMWDGVLVVEVERLARGDTIDQGVVSRAFQYSDTMIITPSKTYDPNNEFDEEYFEFGLFMSRREYKTIKRRLNAGRISSVKEGKYCGNKPPYGYKRVKLQREKGWTLEPVPEQAEVVKMIFSWYAGYGCEQIGMAKIVRKLNDTGVATMYKKPWTVASLSKMLSNPVYIGMVRWNARKTVKSVKDGVITRSRPLAKDYLLCPGRHPAIISEELYNAAQHIRKKNPPRPVGVRNTVKNPLAGIVYCSKCGRAMVRRPYQKSGQEDTLLCPYTSCPTVSSKLSLVEESLLDGLRELVDGYKLNGDVSESDTNDMISSKEILIAEKHAEIKKLNDQKLKQYDLLEQGIYSTEIFLERSKATAAALEACSAAIERLQEELERDRLILEQRSSFIPRCEDLLAHYWDLDIPTRNRILRELIDKVLYTKDTKNAFLEGDKITFLLDIFPKIQENI

SEQ ID NO: 12372 - DNA, 50 bp, Blautia massiliensis
  source 1..50: mol_type = genomic DNA
taatgataacatccatgtaccagttcgttagcgcatggatgttataaatg

SEQ ID NO: 12373 - DNA, 40 bp, Blautia massiliensis
  source 1..40: mol_type = genomic DNA
gatttccaaatgtgccagttcttctgttcccacatcattg

SEQ ID NO: 12374 - DNA, 50 bp, Blautia massiliensis
  source 1..50: mol_type = genomic DNA
taatgataacatccatgtaccagttggttagcgcatggatgttataaatg

SEQ ID NO: 12375 - DNA, 40 bp, Blautia massiliensis
  source 1..40: mol_type = genomic DNA
gaatgcaaaatgtgttatttgttctgtgcccacagctttg

SEQ ID NO: 12376 - protein, 524 aa, Streptomyces hygroscopicus
MAMPTPVLNLHASTDRYTASYGRVSLDEQKIGQGVKSQHEENEEFGEENNTPVNRRYEDIGISAFSGVERPGYLDLLADIAAGRIAIVIVWHADRLTRDVGEGHEFIKLCLKHNVRLFSQQRGGEYSFKRANGRADFITDINTANKESGVKSERVALARKRQARNGEFGGGKRRYGWGVETGRYRSVCLNPKADIDERVYEDRPILDMSKHRPDERDEIRHWRDEVLSGVTMNHLLRDIANRGVLTLSEKDDCPVKRNGKPVEHPKWSKATIIGILTNPRTAGHAVYRGEIVKWNAYPAIITEDERQALITLFSDPARKTSPGNTPKWLGSLLYECLMCNDGSNQRVDTSTSGELIYLCRSCGKGRQSVLLVNEYVEKVLIERLSRPDIVDLISTGPDIDIDALRTEQAVLQQRKTGAADLYSEGKIDAAQLASITAGIDRKLSKNMAELTSAVGESPLAPFALDHERAEETWRGLSLGRKREVIKTLCTVKLDKAPPRPRGPRAKKTELDTSTVHIIPKKVTE

SEQ ID NO: 12377 - DNA, 50 bp, Streptomyces hygroscopicus
  source 1..50: mol_type = genomic DNA
tgaaggctcagaccgtgggtggacttccccacgcacggtctgagccctca

SEQ ID NO: 12378 - DNA, 40 bp, Streptomyces hygroscopicus
  source 1..40: mol_type = genomic DNA
cagccgcagcagggtggacttgccggccccgttctccccc

SEQ ID NO: 12379 - DNA, 50 bp, Streptomyces hygroscopicus; identical to SEQ ID NO: 12377
  source 1..50: mol_type = genomic DNA

SEQ ID NO: 12380 - DNA, 40 bp, Streptomyces hygroscopicus
  source 1..40: mol_type = genomic DNA
cagcttcagcatggtagacttcccagccccattctctcca

SEQ ID NO: 12381 - protein, 481 aa, Streptococcus gallolyticus
MNTINKVAIYVRVSTTNQAEEGYSIEEQTDKLKAYCSIKDWNVYNVYVDAGFSGSNTQRPALQKLIKDVPKKKFDTVLVYKLDRLSRSQKDTLYLIEEVFNRNDIAFLSLLENFDTSTPFGKAMIGILSVFAQLEREQIKERMQLGKIGRAKSGKSMMWAKVAYGYTYHVGTGEMTVNQSEAVVVRKVFTSYLNGRSITKLRDDLNQKYPKTPAWSYRTIRQMLDNPVYCGYNKYKGVIYLGNHEAIISEDVYNQVQGEIKIRQIKAYAQNKNPRPFQSKYMLSGIGQCGYCKAPLKSLLRNTKKDGTRTVRYECHQRRPKKIRGVTTYNDNKKCNSGIYSKDDLEAYVLESISKLQTDSDYIDELFDNEPEKLDREAINKEIETLSNKISKLNDLYINNLITLDDLKNQSSTFNDKIEILKDELANDPALKHQENKQKMLKILDTKDVFEMDYEEQKMLVRALIDKVQVTSDSIKILWKI

SEQ ID NO: 12382 - DNA, 50 bp, Streptococcus gallolyticus
  source 1..50: mol_type = genomic DNA
tttgagtgtttttagtatcattcatctcaatcaaagatactaaaaatact

SEQ ID NO: 12383 - DNA, 40 bp, Streptococcus gallolyticus
  source 1..40: mol_type = genomic DNA
ataagaagcacaatcaacatttccacaagtgtgaaccctt

SEQ ID NO: 12384 - DNA, 50 bp, Streptococcus gallolyticus
  source 1..50: mol_type = genomic DNA
tttgagtgtttttagtatcattcatttcaatcaaagatactaaaaatact

SEQ ID NO: 12385 - DNA, 40 bp, Streptococcus gallolyticus
  source 1..40: mol_type = genomic DNA
ataacaagaaaaattcacatttctacaagtttgaatcatt

SEQ ID NO: 12386 - protein, 522 aa, Blautia wexlerae
MMESKSRVAIYCRLSEEDRNKQSETDDSNSIQNQKSMLLQYSLEHGWEVYNIYSDDDYTGSDRRRPEFNRLLEDAKNQKFDIVLCKTQSRFTRELELVEKYIHGLFPLWGIRFISIVDNADTANKGNKKSRQINGLVNEWYLEDMSENIKSVLTDRRKNGYHIGAFALYGYKKDPDLKGHLIIDEEAAEVVREVFTLFSQGYGKTAIARMLNDRGIPNPTEYKRLHGLRYKQPKTKNNTLWKYFNISDMLVNEMYIGNMVQGKYGSVSYKTKQNKPRPKDQWYRVEGTHEPIIERELWDRVQAMVAQKAKPFIVGTIGLFARKARCMNCGYTMRSSKNHGKHYLQCSCRHISKDACIGSFISVDKLEKAVIDELNKLSSEYLDKDELEQNVQFNSDLREKKEALESEITAYQKKIAEYTKGIRELYLDKVKGILSELDYLDLSKDFSAQKERLEKLVIDTQKQLDVIERKMQIGDNRRQLIEQYTNLEHLDRETIEKLIDYISVGKKDPVTKEVPIEIHWNF

SEQ ID NO: 12387 - DNA, 50 bp, Blautia wexlerae
  source 1..50: mol_type = genomic DNA
tgttgtctttacacaatcgtaccatctggtgcgacttcgtaagaacaaca

SEQ ID NO: 12388 - DNA, 40 bp, Blautia wexlerae
  source 1..40: mol_type = genomic DNA
acaaccgcaagacctctggtctgctgccattttttcgtaa

SEQ ID NO: 12389 - DNA, 50 bp, Blautia wexlerae
  source 1..50: mol_type = genomic DNA
tgttgtctttacacaatcgtaccacttggtgcgacttcgtaagaacaaca

SEQ ID NO: 12390 - DNA, 40 bp, Blautia wexlerae
  source 1..40: mol_type = genomic DNA
ccaactgaaagacatcttgcttgcttccaattcttggtaa

SEQ ID NO: 12391 - protein, 502 aa, Coprococcus comes
MEFIREDCIYARQSVDRKDSISIESQIDFCKYELKGGSCRVFKDKGYSGKNTDRPEFQKLLGEIRKGKVRRVIVYKLDRISRSILDFATMMELFQEYDVEFVSSTEKFDTSTPMGRAMLNICIVFAQLERETIQKRVTDAYYSRCLKGFHMSGQAPYGYQLEPTVVEGIRTKKMVADPIAADHVRLMFEMYAEPETSFGDITRYFEEHDIKIYGKSMFRTFLSQLLRNPVYAQADLELYEFFKSQGAAIVNDASDFAGTNGCYLYQGRDVKEDKDRCLKDQILVIAPHEALISSDTWLKCRKKLMANTTFQQGRKPKNTWLAGKIKCGHCGYALKATHVPNSTGYFRCTKRTENKGCPGCGKIRKEEFEQFIFSTMQEKFKDFQILHGREEKVNPKLTAYQVELAQVEAEIEKLLDTLTGANATLLAYANKKIEELDTRRQTISKAIAELSVETISPQQIKKLSYYLDNWDSIDFDDKRKAADGLISTIKATSDHVQIEWKI

SEQ ID NO: 12392 - DNA, 50 bp, Coprococcus comes; identical to SEQ ID NO: 2062
  source 1..50: mol_type = genomic DNA

SEQ ID NO: 12393 - DNA, 40 bp, Coprococcus comes
  source 1..40: mol_type = genomic DNA
tttgtttatataacaacgttttctttacaatatcacttgt

SEQ ID NO: 12394 - DNA, 50 bp, Coprococcus comes; identical to SEQ ID NO: 3239
  source 1..50: mol_type = genomic DNA

SEQ ID NO: 12395 - DNA, 40 bp, Coprococcus comes
  source 1..40: mol_type = genomic DNA
tctgtttatcaaacagcctaatctttgcaaaagcacttgc

SEQ ID NO: 12396 - protein, 479 aa, Geobacillus subterraneus
MAVGIYIRVSTEEQAKEGYSISAQREKLKAYCEIQDWKDYRFYVDEGISAKNLNRPQLQLMLKHIQEGIIDTVLVYRLDRLTRSVKDLYKLLELFEKHGCKFKSATEVYDTGTAMGRMFITIVAAMAQWERENLGERLRVGFQEKARQGKYAANKRPFGYNLDPKTGKLTINEEEAQVFRTIVDLYLKKGYGANRICKWLNERGIKTRDGNTWNDKPLIQMLKNPLYAGTIRWGLNHDQPTIVENAAPAIIDKKTFDEIQRTIERRRGQHPRNVGNDYIFSALMRCPECGSSMGGHKVYFKSPVKGKVVYKNYRCIWKNTGQCKKGKDISEKKVEKAFLDYIETIDFSSDIEKATADVELLKKKNEAEELKKELDKIEARKKKWQYAWANEMMTDDEFRQRMNEEREREEKIKAQLDEIGESTEEEVTKEELAEALRDIRKNWEQLADEEKKSLVQMVVKRMHIEFEGDDVRIKDIEFY

SEQ ID NO: 12397 - DNA, 50 bp, Geobacillus subterraneus
  source 1..50: mol_type = genomic DNA
ttatgcggtatcataacctttcagccttcaaaggatatgatacaacataa

SEQ ID NO: 12398 - DNA, 40 bp, Geobacillus subterraneus
  source 1..40: mol_type = genomic DNA
cttggttccctctttcctcccccggtagctactgccataa

SEQ ID NO: 12399 - DNA, 50 bp, Geobacillus subterraneus
  source 1..50: mol_type = genomic DNA
ttatgcggtatcataacctttcagtattcaaaggatatgatacaacataa

SEQ ID NO: 12400 - DNA, 40 bp, Geobacillus subterraneus
  source 1..40: mol_type = genomic DNA
cttgggtcctttgttcccctacaggtagctacttctgtaa

SEQ ID NO: 12401 - protein, 537 aa, Faecalicoccus pleomorphus; identical to SEQ ID NO: 11881

SEQ ID NO: 12402 - DNA, 50 bp, Faecalicoccus pleomorphus; identical to SEQ ID NO: 1657
  source 1..50: mol_type = genomic DNA

SEQ ID NO: 12403 - DNA, 40 bp, Faecalicoccus pleomorphus
  source 1..40: mol_type = genomic DNA
tatatcaagatgggaaaaaggaaaaggtttaccggatatt

SEQ ID NO: 12404 - DNA, 50 bp, Faecalicoccus pleomorphus
  source 1..50: mol_type = genomic DNA
tcatatctttaactaagggaaagcgaagtttcccaaacaaaaggatatta

SEQ ID NO: 12405 - DNA, 40 bp, Faecalicoccus pleomorphus
  source 1..40: mol_type = genomic DNA
tacaacaagtagacaaaaagaaaaaggtatacaggagatt

SEQ ID NO: 12406 - protein, 540 aa, Faecalitalea cylindroides
MKQPYNTTIYNTALYLRLSRDDELQGESGSIQTQRMMLRQYAAEHGLTVVDEYIDDGWSGTNFERPSFQRMIDDIEDGKINCVVTKDLSRLGRNYILTGQYTEIYFPSKGVRYIAINDNVDTINGESELAPFLNILNEMHARQTSKKVKAAMHTRFANGAHYGAYAPLGYVKDPDKKGHLLIDPETRWIVEKIFDLAVHGRGAASITRILVEEKVPTPGWLNYERYGTFANIYAGAPAEKAYAWTIAQVKSILKEETYIGHSIHNKQSNISFKNKKKVRKPQEEWYRVENTHEAIISEEVFQKVQELIASRRRKRRNGTTQIFAGLIKCADCGWSLAYGENKQNKNPYGYYHCSKNGQGLRQCSMHYIRYDVLYAYVLARLQYWSMLAQKDEDKLLKRLLNASDRERNSAKKKQAAELKKAEKRKAEVDGLFAKMYEDWSAGRITEYNFNMLSEKYQNEQKELETKIRQLHEMMEAAVQTAADAEKWIALMKHYVNPVELTAELLNTLIEKITVHEAVKGEDGSREQEVEIYYRFIGKID

SEQ ID NO: 12407 - DNA, 50 bp, Faecalitalea cylindroides; identical to SEQ ID NO: 3657
  source 1..50: mol_type = genomic DNA

SEQ ID NO: 12408 - DNA, 40 bp, Faecalitalea cylindroides
  source 1..40: mol_type = genomic DNA
aatttctaaatgggaaacaggaaatgggttgcctgaggta

SEQ ID NO: 12409 - DNA, 50 bp, Faecalitalea cylindroides
  source 1..50: mol_type = genomic DNA
caatatctttaattaagggaaacgaaagtttcccatagttaaagatacca

SEQ ID NO: 12410 - DNA, 40 bp, Faecalitalea cylindroides
  source 1..40: mol_type = genomic DNA
aatttggaagtggtaatgaaaaagtggggtgcatgaggta

SEQ ID NO: 12411 - protein, 583 aa, Eubacterium callanderi; identical to SEQ ID NO: 10156

SEQ ID NO: 12412 - DNA, 50 bp, Eubacterium callanderi
  source 1..50: mol_type = genomic DNA
ctaaatagtaccttatcactattaagtattggcttaacagtgataaggaa

SEQ ID NO: 12413 - DNA, 40 bp, Eubacterium callanderi
  source 1..40: mol_type = genomic DNA
catcaaaaaagccctgaaaagccttgtcttttcagggctt

SEQ ID NO: 12414 - DNA, 50 bp, Eubacterium callanderi
  source 1..50: mol_type = genomic DNA
ctaaatagtaccttatcactattatctattggcttaacagtgataaggaa

SEQ ID NO: 12415 - DNA, 40 bp, Eubacterium callanderi
  source 1..40: mol_type = genomic DNA
cgtcaggaagggcctgaaatcagtggtcttttcagggctg

SEQ ID NO: 12416 - protein, 589 aa, Enterobacter sp HK169
MSAHVTILRNTVLPVKFNTMNRPRLYSYIRYSSERQGKGSSIERQKSYIAEMAKQIATEYDLEIFEEYQDLGVSAYKGKNVQEGALSDFIDQVESGLIPKGSFLLIESLDRFSRQNAMQAVNLFTSLLLNGITVITGIDKQVYRQTEVNTETLQQLMFSVMLFSRANEESSTKSHRTIASALSKIRRHQERKPGDPVVAIKELGSDKWWTDSSTGYVNPHPVLFPIAKKIIQLKQDGWSNRMILQHLKNNYDGPVIGNKKSKGIWNMQHCSRILEPAIYGRKVITVNNAEYVLDDYYPAIISKDEYEALKLQVGNKGFAPNRESNPEIPLLSGIGILHCAHCSCYMVKAKSTLKNHPHAYRYQCASRDLHQDCNKWGFRASTLERTILQLIADRIFLQTKYQPSGLEGKIADIQSQIENYVLAIGSAKSPEIINSLTSQIDQLEQEKQSLIVEKRLYDESIVQMNTEGWDKFRKFDIDDALNPLRTKIRANIKTVIMRVDCSRIDKKHNLFTITYRDQHKQRIVIENNSGWKKGKIYVEAQTINDIQILESEGLILHDHIDILINRDKFMTEAKKRLDHPRTLIDELTE

SEQ ID NO: 12417 - DNA, 50 bp, Enterobacter sp HK169
  source 1..50: mol_type = genomic DNA
aattatacccattacacttcagtgaacactaaagtaaaatacacctcatt

SEQ ID NO: 12418 - DNA, 40 bp, Enterobacter sp HK169
  source 1..40: mol_type = genomic DNA
gctgggcgtgaccatcggcaacaccgacggcaacgtgatc

SEQ ID NO: 12419 - DNA, 50 bp, Enterobacter sp HK169
  source 1..50: mol_type = genomic DNA
aattatacccattacacttcagtgtccactaaagtaaaatacacctcatt

SEQ ID NO: 12420 - DNA, 40 bp, Enterobacter sp HK169
  source 1..40: mol_type = genomic DNA
gctggccgtgaccctcccctccatcgcctgcatcctgatc

SEQ ID NO: 12421 - protein, 589 aa, Enterobacter asburiae
MSAHVTILRNTVLPVKFNTMNRPRLYSYIRYSSERQGKGSSIERQKSYIAEMAKQIATEYDLEIFEEYQDLGVSAYKGKNVQEGALSDFIAQVESGLIPKGSFLLIESLDRFSRQNAMQAVNLFTSLLLNGITVITGIDKQVYRQTEVNTETLQQLMFSVMLFSRANEESSTKSHRTIASALSKIRRHQERKPGDPVVAIKELGSDKWWTDSSTGYVNPHPVLFPIAKKIIQLKQDGWSNRMILQHLKNNYDGPVIGNKKSKGIWNMQHCSRILEPAIYGRKVITVNNAEYVLDDYYPAIISKDEYEALKLQVGNKGFAPNRESNPEIPLLSGIGILHCAHCSCYMVKAKSTLKNHPHAYRYQCASRDLHQDCNKWGFRASTLERTILQLIADRIFLQTKYQPSGLEGKIADIQSQIENYVLAIGSAKSPAIINSLTSQIDQLEQEKQSLIVEKRLYDESIVQMNTEGWDKFRKFDIDDALNPLRTKIRANIKTVIMRVDCSRIDKKHNLFTITYRDQHKQRIVIENNSGWKKGKIYVEAQTINDIQILESEGLILHDHIDILINRDKFMTEAKKRLEHPRTLLDELTE

SEQ ID NO: 12422 - DNA, 50 bp, Enterobacter asburiae
  source 1..50: mol_type = genomic DNA
aattatacctattacacttcagtgaacactaaagtaaaatacacctcatt

SEQ ID NO: 12423 - DNA, 40 bp, Enterobacter asburiae; identical to SEQ ID NO: 12418
  source 1..40: mol_type = genomic DNA

SEQ ID NO: 12424 - DNA, 50 bp, Enterobacter asburiae
  source 1..50: mol_type = genomic DNA
aattatacctattacacttcagtgtccactaaagtaaaatacacctcatt

SEQ ID NO: 12425 - DNA, 40 bp, Enterobacter asburiae; identical to SEQ ID NO: 12420
  source 1..40: mol_type = genomic DNA

SEQ ID NO: 12426 - protein, 589 aa, Enterobacter asburiae
MSAHVTILRNTVLPVKFNTMNRPRLYSYIRYSSERQGKGSSIERQKSYIAEMAKQIATEYDLEIFEEYQDLGVSAYKGKNVQEGALSDFIDQVESGLIPKGSFLLIESLDRFSRQNAMQAVNLFTSLLLNGITVITGIDKQVYRQTEVNTETLQQLMFSVMLFSRANEESSTKSHRTIASALSKIRRHQERKPGDPVVAIKELGSDKWWTDSSTGYVNPHPVLFPIAKKIIQLKQDGWSNRMILQHLKNNYDGPVIGNKKSKGIWNMQHCSRILEPAIYGRKVITVNNAEYILDDYYPAIISKDEYEALKLQVGNKGFAPNRESNPEIPLLSGIGILHCAHCSCYMVKAKSTLKNHPHAYRYQCASRDLHQDCNKWGFRASTLERTILQLIADRIFLQTKYQPSGLEGKIADIQSQIENYVLAIGSAKSPEIINSLTSQIDQLEQEKQSLIVEKRLYDESIVQMNTEGWDKFRKFDIDDALNPLRTKIRANIKTVIMRVDCSRIDKKHNLFTITYRDQHKQRIVIENNSGWKKGKIYVEAQTINDIQILESEGLILHDHIDILINRDKFMTEAKKRLDHPRTLIDELTE

SEQ ID NO: 12427 - DNA, 50 bp, Enterobacter asburiae; identical to SEQ ID NO: 12417
  source 1..50: mol_type = genomic DNA

SEQ ID NO: 12428 - DNA, 40 bp, Enterobacter asburiae; identical to SEQ ID NO: 12418
  source 1..40: mol_type = genomic DNA

SEQ ID NO: 12429 - DNA, 50 bp, Enterobacter asburiae; identical to SEQ ID NO: 12419
  source 1..50: mol_type = genomic DNA

SEQ ID NO: 12430 - DNA, 40 bp, Enterobacter asburiae; identical to SEQ ID NO: 12420
  source 1..40: mol_type = genomic DNA

SEQ ID NO: 12431 - protein, 554 aa, Pseudoflavonifractor phocaeensis
MWQYDTIKGKFIPGELPADGAKITACYDRLSQEDEQEGDSGSVVNQRDFLRKYCVEHHFLNVRHFSDDGYTGTNFDRPGFQEMMDLVEQGRVSAVIVKDHSRLGRNRLLVGALMERFTEDYGVRYIAVTDNIDSAKGLDDMTAVRELFNEFYPRDTSKKIRAVFTSKGNSGQRLCTQVPYGYKGDKYGWEVDEEAAQVVQEIFSLCMAGLGPMQIAKRLKTAGVLTPTAYKLEKGLSVTHKPTADPCGWDHRAVVKILERMEYLGCTVNFKTRKKSYKSKKTLYLPKEEWKVFPDTHPAIIDQETWKRVQELRKHKRRPTKAGKRGLFSGLAYCADCMSKLYFSTHKGSTEDQDHYVCANYKSNTGSCTIHYIREKVLSALVLAHLQATLAYVQADEDAFTRLVMEKDAQEQRRDLARKKAELTKAEKRGMELDGLFQRVYEDHALGKLTEERYNRLSRSYEAEQRELEARVEELRRDLEKGQEEAVNVAQFVALVKKYTEVRELTPTIVNEFIKMVIVHAPSKVNGRRFQAVQVVYNLVGEVTIPDTQNRETA

SEQ ID NO: 12432 - DNA, 50 bp, Pseudoflavonifractor phocaeensis
  source 1..50: mol_type = genomic DNA
atacttccttatgggacatgaccctctgcccgtgtcccataaggaaaccc

SEQ ID NO: 12433 - DNA, 40 bp, Pseudoflavonifractor phocaeensis
  source 1..40: mol_type = genomic DNA
atgcagaggcgcccgcgcatccgcgcgggcgccttttttt

SEQ ID NO: 12434 - DNA, 50 bp, Pseudoflavonifractor phocaeensis
  source 1..50: mol_type = genomic DNA
atacttccttatgggacatgaccccttgcccgtgtcccataaggaaaccc

SEQ ID NO: 12435 - DNA, 40 bp, Pseudoflavonifractor phocaeensis
  source 1..40: mol_type = genomic DNA
ctgcagacgcgcccgggcactggcgaggactcctgttttg

SEQ ID NO: 12436 - protein, 501 aa, Bacillus altitudinis
MSLDKIQRVAIYLRKSRNKDGEESEETLSNHKKRLLDIAKKNNWRYEVFAEVGNSMDKNRPMYQEMLSKLQENLFDAVLSVNLARVTRDDAETPRFMSLLRQEDILFITDSERIYNLEVQEDWQALKFTGFVNNWEYENIKAQLRKGKIDSAKQGKWSNGTPNYGYIYNRFERTLEIDEDKAKAVKLAFQLVIDGVGVDEIAITLNKLGYRTNKNNTFYGAAITRMIRSSIYKGTIESNKTKGRNIYQGKLRPKEEWIIINNAHPSIVDEKTWSLANEALDERQALSPVLKKRMHGLSGLLRCAFCGRTHTIALKDAERNYRVFQPCRTKDPFGVKCVNKGIKYDTVMGILIESIEQKKNEIIKELNNLKSNTSPLLKTKEIKQKNLESQIKKCRKALDILQLQLEEELIDLISFKERRKQRLLELESFEKELKSISVKKEKDAINEKTSYAALLDYFLKNWQDLNDSDLNIAFRKIITQLTWERHINKKEPGKIEIIWKS

SEQ ID NO: 12437 - DNA, 50 bp, Bacillus altitudinis
  source 1..50: mol_type = genomic DNA
tgggtagctaaatgaacatgtcactggtcacatgtttatttagctacctt

SEQ ID NO: 12438 - DNA, 40 bp, Bacillus altitudinis
  source 1..40: mol_type = genomic DNA
cggctatgccacttgccactggtgccacgtcatggcacac

SEQ ID NO: 12439 - DNA, 50 bp, Bacillus altitudinis
  source 1..50: mol_type = genomic DNA
tgggtagctaaatgaacatgtcaccagtcacatgtttatttagctacctt

SEQ ID NO: 12440 - DNA, 40 bp, Bacillus altitudinis
  source 1..40: mol_type = genomic DNA
aggataggccaccagccaccagtgccgcgacatggcagag

SEQ ID NO: 12441 - protein, 534 aa, Lactonifactor longoviformis
MNELALYLRLSVEDGDLVDESNSIKNQRSLVLEYVAKSGFSNYKLQEYIDDGFSGKNFNRPGVQELFKNVKQGIVKVIIVKDLSRFGRNYLEVGDYIEKIFPALEVRFIAINNGFDSNDYLGTTPGIDTNFLNLVNDYYSEENAYKLRKDFWRKRQRGEFIAALAPLGYEKSINNHNRLVMDEYAAAIIYNCFTLTRDLGSYEKAAREMQRLGYPTPQLYKMSQGVDFKWRYNDSQKKWSGGIVRRIVNNREYLGCIVHHTRAVIEVGSKKTKHINYPDWEVVPGHHKAIITEELYDAAHKSIEENKKKKGVHEQRRMGEMHSPIKGLVKCGNCRHNLTRRPRMNPTYYCKYRYSQQNTECCKGNIREDELLPIIYESVNKQILLLGEVRRMIEKLDSDKKEEDRINKNEITKLQREIATLKNQRLQIYEELMDGSLSNSEFIERKGKISLKIADIEERIAAYETMSTDSNTSQLYGFFKSLEPYQTGAETVISEEVIRLVINAVYVYNDKRIEIAYNFTDKFREIAELSKKLY

SEQ ID NO: 12442 - DNA, 50 bp, Lactonifactor longoviformis
  source 1..50: mol_type = genomic DNA
tgcgtcagacacttgacacctgcaggtgcgcgtgttataatactgacagg

SEQ ID NO: 12443 - DNA, 40 bp, Lactonifactor longoviformis
  source 1..40: mol_type = genomic DNA
ctgggcagctacacctgcaggtctcaaggccatggatgag

SEQ ID NO: 12444 - DNA, 50 bp, Lactonifactor longoviformis
  source 1..50: mol_type = genomic DNA
tgcgtcagacacttgacacctgcagttgcgcgtgttataatactgacagg

SEQ ID NO: 12445 - DNA, 40 bp, Lactonifactor longoviformis
  source 1..40: mol_type = genomic DNA
ctgcccagctacacatgctgttcccgaggccttggaagat

SEQ ID NO: 12446 - protein, 549 aa, Haemophilus ducreyi; identical to SEQ ID NO: 12326

SEQ ID NO: 12447 - DNA, 50 bp, Haemophilus ducreyi
  source 1..50: mol_type = genomic DNA
ggtttggacaatgatgagcacgttgagacggtagcgttattgtccaaact

SEQ ID NO: 12448 - DNA, 40 bp, Haemophilus ducreyi
  source 1..40: mol_type = genomic DNA
tccacatacggggcatttagaatccatttcaatgtttata

SEQ ID NO: 12449 - DNA, 50 bp, Haemophilus ducreyi
  source 1..50: mol_type = genomic DNA
ggtttggacaatgatgagcacgttccgacggtagcgttattgtccaaact

SEQ ID NO: 12450 - DNA, 40 bp, Haemophilus ducreyi
  source 1..40: mol_type = genomic DNA
tacatgtatgtgtcatttaccatccatatcaatttttaaa

SEQ ID NO: 12451 - protein, 625 aa, Clostridium fessum
MRKNEKITALYERLSRDDFGKDDDQQRESNSISNQKAMLEEFAARQGFTNIVHFTDDGISGTCFDRPGFLAMMKEVEAGNVEYLCIKDMSRMGRDYLKVGQIMEILRQRGVRLIAINDGVDSARGDDDFTPFRNIMNEYYARDTSRKIRSTFQSKGKSGKHLTGTVIYGYLWNEARDQWLVDPEAAEVVKRIFAMTIDGYGPYQIASRLKEEKVLIPSAYLAQHGEGVNKNKTFKDVYSWGSSTICNILEKREYLGHTINFKTRKHFKDKKSHYVPEDEWTIFENTHEPIIDQQTFDLVQKIRGNVRRYPDGWGEAAPLTGLLYCADCGGKMYVHRTNNGKRISQYTCSQYTKVPCGTLCKTQHRINEDVVLSLVSEMLKAIAEYAKHDRAEFVRVVQEAQSSQQTTEVRKQRTRLAAAKQRVSELEVLLCKIYEDNILGKLSDSRYATLDAQYEKEQSELTAEISALEKAIRSYEKHEKDADRFIALIDKYENFDKLTIAMLNEFIEKILVHERDRKGSIQTTQEVEIYFNFVGRFVPPAFGEVELTPEELEEIRKREERKDRLHQNYLKRKANGKQKEYEERTKAKKKAEIEARKQAIRTEDIARGVFIPVSSLPQLGPRKGA

SEQ ID NO: 12452 - DNA, 50 bp, Clostridium fessum; identical to SEQ ID NO: 262
  source 1..50: mol_type = genomic DNA

SEQ ID NO: 12453 - DNA, 40 bp, Clostridium fessum
  source 1..40: mol_type = genomic DNA
agaaatacaagctggccagcggcaagacagctaaaagcat

SEQ ID NO: 12454 - DNA, 50 bp, Clostridium fessum
  source 1..50: mol_type = genomic DNA
aaaaagtccttgacttttcgtctcatgtgttgtatgctctaaaagacttc

SEQ ID NO: 12455 - DNA, 40 bp, Clostridium fessum
  source 1..40: mol_type = genomic DNA
agaaaaacatgctagccagatacaaaagagcttaaaatat

SEQ ID NO: 12456 - protein, 550 aa, Clostridium cadaveris
MTAYTNKPEQITALYARLSQEDALDGDSNSIVNQKAVLSKYAADNGFTNPVFFIDDGVSGVTFDRPNFNRMIAEIEAGNVGTVIVKDMSRLGRDYLKVGYYTEIFFVERDVRYIAINDGVDSAKGDNDFTPFRNLFNDFYAKDTSKKVRAIKKAQGMAGEHLTKPPYGYKVDPADKKKWIVDEEAAAVVKRIFDLCIAGKGPMQIAKILKLDKVLTTKAYYAKQKGKLLPDNPYNWNENSIVGILERMDYCGHTVNFKSYSKSHKLKKRIPTTKEQQAIFRNTHEAIVEEAVFERVQELRANKRRPTKAERQGLFSGLVYCADCGSKLHFATCKSFNGSQDHYRCAKYKSNTGDCTAHFIREETLKAIVRQRIFDVTARFIENIMDFREMVYQQQFAEAEKDMKRKRREVEQARKRITELDRIFKRIYEDDINGTISHERFLKLSAEYEAEQKELTEKIATEQQEVDTYEQSKMDFDSFAAIIRKYVGITELTPTIVNEFIKKVVVHAPEKIDGKRFQKVDIVFNFVGEIHLPDKPQTEQKEANKQEKTA

SEQ ID NO: 12457 - DNA, 50 bp, Clostridium cadaveris
  source 1..50: mol_type = genomic DNA
atatttccttgtaacctaaaacccttagttttacggtgataaggaagtag

SEQ ID NO: 12458 - DNA, 40 bp, Clostridium cadaveris
  source 1..40: mol_type = genomic DNA
aaaaaaagctcacttacccttaattgtttagggtaagtga

SEQ ID NO: 12459 - DNA, 50 bp, Clostridium cadaveris
  source 1..50: mol_type = genomic DNA
atatttccttgtaacctaaaacccgaagttttacggtgataaggaagtag

SEQ ID NO: 12460 - DNA, 40 bp, Clostridium cadaveris
  source 1..40: mol_type = genomic DNA
aaaaaaaactcacctagcagaaattgttttaactcagtga

SEQ ID NO: 12461 - protein, 608 aa, Ezakiella massiliensis
MRNFEKITALYERLSRDDELQGESNSIINQKKILEEYASKNNLSNIIHFTDDGISGTQFDRPGFMAMMNGVNQGNIGCIIVKDMSRLGRDYLKVGQCMEILRQKGVRLIAINDNVDSFYREDDFTPFRNIMNEWYARDTSRKIQSTFRSKGESGKHTASTPPYGYIKDEKDKNKWIVDEKAAEIVRRIFNLTMQGNGPYRIAKILESEKVDIPAYHQQKLGYGLYQSKNFEHPYRWCSSTIASILKKQEYLGHTVNFKTRKHFKDKKSKYVSEDNWLIFENTHEPIIDQETFDNVQRIRGNVKRYPDGWGEYHPLTGLMYCADCGSKMYVHRTSNYKNIPYYTCSAYTKTPCGMLCPSAHRIKAEVVLNLIQDTLKDIKKYLDEDNEAFICSIQNEMEEKEKIEIEKKKVRLTESQNRLRELERLMCRIYEDMILNKIPNSRYEILNNQYETEQITLSKEIKDLEQQVSRYEKETDRARKFISLISRYENFDELTTTMINEFVEKIIVHERDRKGSQTSKQKIEIYFNFIGNYELPQAELSEEKKQKLEEEERKIEERKDKLHQNYLKRKASGKQKEYEDKYKARREQKKQEKLKVLKREGIPARDFQ

SEQ ID NO: 12462 - DNA, 50 bp, Ezakiella massiliensis; identical to SEQ ID NO: 9697
  source 1..50: mol_type = genomic DNA

SEQ ID NO: 12463 - DNA, 40 bp, Ezakiella massiliensis
  source 1..40: mol_type = genomic DNA
agaaatacaaactagcagcaggaaaaactgccaaatcaat

SEQ ID NO: 12464 - DNA, 50 bp, Ezakiella massiliensis
  source 1..50: mol_type = genomic DNA
agaaagtccttgacaagttgttacttgagtaatagaattaaggagaacac

SEQ ID NO: 12465 - DNA, 40 bp, Ezakiella massiliensis
  source 1..40: mol_type = genomic DNA
aatcatataaattaacaacttgaaaaactgacaaaacaat

SEQ ID NO: 12466 - protein, 510 aa, Candidatus Gallimonas merdae
MKTAVIYARYSSDSQTEQSIEGQVRVCKQFAEKNDLLVVDQYIDRATTGMNDNRAAFQQMLRDSKRRQWSVVIVYKLDRFARNKYESVVNRKKLTDNGVELVSAMENIPDTPEGKLFLAVIEGFNEYFSEDLKQKVNRGLRESWLKGNATGGRDIFGWDLKDKKYHINEAEAEVVREIFRKYAQGYKAQTIADDLKEKNFRRKNGKFITHKFVYKVLHDKRYTGVVTHKGEDYDKVFPAIISKELWMQVNAINEENKNAPGRKKEMFDYILSGKLICGKCKHRMVGESGTSKTGEIHYYYSCLSKRRKQENCDCKAVKKQILEDYVIQATVAMLRRNSIITQIAETVVKVHEKMMQDDSGLQILLQKRDDAKKAADNIVKAIEQGIITDFTKDRLNGLQAELNELEIEINKAKQKSYAHLSVEEVEKFLLSKVFEDPDDIKVRKLLVNTFVREVIWYGDRMVITYNFQEQFSTERFSKSYVEDIEKQVGECSRSASSFPLSSYKVTQSAP

SEQ ID NO: 12467 - DNA, 50 bp, Candidatus Gallimonas merdae
  source 1..50: mol_type = genomic DNA
ttcgtacaaagtcacccaatcggcgccagcaaaaggcgaggtcttgcgac

SEQ ID NO: 12468 - DNA, 40 bp, Candidatus Gallimonas merdae
  source 1..40: mol_type = genomic DNA
ttcaaatccctttctctgcgccaaacgatgagcatacgaa

SEQ ID NO: 12469 - DNA, 50 bp, Candidatus Gallimonas merdae
  source 1..50: mol_type = genomic DNA
ttcgtacaaagtcacccaatcggcatcagcaaaaggcgaggtcttgcgac

SEQ ID NO: 12470 - DNA, 40 bp, Candidatus Gallimonas merdae
  source 1..40: mol_type = genomic DNA
ttgaaatccctttctgtcaatcaaatgatgtggataggag

SEQ ID NO: 12471 - protein, 540 aa, Roseburia hominis
MKQPYNTTIYNTALYMRLSRDDELQGESGSIQTQRMMLRQYAAEHGLNVIDEYIDDGWSGTNFDRPDFQRMIDDIEDGKINCVVTKDLSRLGRNYILTGQYTEIYFPSKGVRYIAVNDNVDTINGENELAPFLNILNEMHARQTSKKVKAAMRTRFANGAHYGAYAPLGYVKDPDKKGHLLVDPETRWIIEKIFDLAVHGRGAASITRILVEEKVPTPGWLNFQRYGTFANIYAGAPEEKAYAWTIAQVKSILKEETYIGHSVHNKQTNISFKNKKKVRKPKEEWYRVENTHEAIISEDVFRQVQEQICNRRRRQKNGTTQIFSGLVKCADCGWSLAYGVNSQNKNPYAHFHCSKYGQGLHQCSMHYIRYDVLYAYVLSRLQYWSVLAQQDGDKLLKRLLNASDKERNTARKRQTAELKKAEKRKAEVDTLFAKMYEDWSAGRITEYNFNMLSEKYQGEQRELDAKIERLHEAMEAAAQTAVDAEKWIGLMKQYVNPTELTAELLNTLIEKILIHEAVKSEDGSREQEVEIFYRFIGKIE

SEQ ID NO: 12472 - DNA, 50 bp, Roseburia hominis; identical to SEQ ID NO: 9162
  source 1..50: mol_type = genomic DNA

SEQ ID NO: 12473 - DNA, 40 bp, Roseburia hominis
  source 1..40: mol_type = genomic DNA
tgtctcaaagtgggaacgtggtgttggctttcctgatatc

SEQ ID NO: 12474 - DNA, 50 bp, Roseburia hominis
  source 1..50: mol_type = genomic DNA
caatatctttaactaagggaaacttcgggttcacttagataaagatacca

SEQ ID NO: 12475 - DNA, 40 bp, Roseburia hominis
  source 1..40: mol_type = genomic DNA
tgtttcaaagtgggagtgatctgatcgcttttattatatc

SEQ ID NO: 12476 - protein, 540 aa, Roseburia inulinivorans
MKQPYNTTIYNTALYMRLSRDDENYGDSVSIETQRTILQQYAKEQGLHVVGEYVDDGWSGTNFERPDFQRMMDDMEAGKVNCIVTKDLSRFGREHVMMDYYLEFLFPEKRVRYIAVAENEDTEKGLSDFVPFKNLFNEWFAKDTSRKVKAAFKAKFATGQRIGAYAPIGYRKHPEIKNKLIIDEETRWIVEKIFDLAIHGRGAASITRILIAEKVPTPGFINFQRDGTFANIYAGAPEEKSYAWTIAQVKSIMKDETYIGHTIHYRETNISFKNKRRVRKPQSEWVRVENTQEPIISEQVFRQVQEQIANRRRKCKDGTTQIFSGLVKCADCGWSLSYGENRQNSKPYGHYHCSKYGQGTRQCSMHYIRYDVLYAYVLSRLQYWSGLVQHDEERLLKQLLNATDKGQAAARKKQAAELKKAEKRKAEVDTLFARMYEDWAAGRITEYNFSMLSGKYQSEQAELDEKIEQLQSAIATESQNAVDAEKWIALMKECVNPTELTAELLNMLIEKIVVHEAVKGEDGSREQEVEIFYRFIGKID

SEQ ID NO: 12477 - DNA, 50 bp, Roseburia inulinivorans
  source 1..50: mol_type = genomic DNA
caatatctttaactatgtgataccggggattcacttagataaagatacca

SEQ ID NO: 12478 - DNA, 40 bp, Roseburia inulinivorans; identical to SEQ ID NO: 12473
  source 1..40: mol_type = genomic DNA

SEQ ID NO: 12479 - DNA, 50 bp, Roseburia inulinivorans
  source 1..50: mol_type = genomic DNA
caatatctttaactatgtgatacctcggattcacttagataaagatacca

SEQ ID NO: 12480 - DNA, 40 bp, Roseburia inulinivorans; identical to SEQ ID NO: 12475
  source 1..40: mol_type = genomic DNA

SEQ ID NO: 12481 - protein, 596 aa, Mycobacteroides chelonae
MSTRHTSADLLQGYTKTAPAGDGADLAVTLLRVSTKKQLYTAIDIDADGNSIATQRDVTTAKADALGAAIAREFIEPGNSAKTVDQRPIFKELLGYLHEYPAVRYVIVYMRSRAFRNHFDAALVQSQLAKLDVRLVSAKEDFGEGAAAVAMEGMVDIMNGFQNTLQGLDVEAKMGRKARAGGTVSLAKIGYLNIRAEFGGKLVNTIGLDPERAPLLRRAWQLYASGEYTIARLEATLADLGLTSRPTQTIPPGRPVSSSTLQKMLRDPYYAGFVRYKDELYTGRHEALVSQALFDQVQDVLDARSRDGQRDRIHMHYLKNTLFCERCRRKGENSRLIFTKVKGHNGSYYEYFLCRGHQEGHCDLPHQPVHLVEDAIVDYYATLGLPETFITDVRERLESTVTDNQASTRELHASLNRKLAAIDTKESRLIDLAADDLMPRDKIRQKLNELKQERARLEAGLTSTNEQLSIGAQVLRDALHLVEDPQRLYGDAPNDVRRHLNSAFYERFYLDDLVVADADKTALFDDLHEAARAHDNARIRRTRPTSTNGAKNRKNSPKMARNPRNAGVPSGVTGLDHLNLAALSDPSSSKTSLVGV

SEQ ID NO: 12482 - DNA, 50 bp, Mycobacteroides chelonae
  source 1..50: mol_type = genomic DNA
cgagtaagaccagcctggtcggggtgctcggctcatactcaaaatatcag

SEQ ID NO: 12483 - DNA, 40 bp, Mycobacteroides chelonae
  source 1..40: mol_type = genomic DNA
cctctcagctcagtcggggtggcgggattcgaacccacga

SEQ ID NO: 12484 - DNA, 50 bp, Mycobacteroides chelonae
  source 1..50: mol_type = genomic DNA
cgagtaagaccagcctggtcggggagctcggctcatactcaaaatatcag

SEQ ID NO: 12485 - DNA, 40 bp, Mycobacteroides chelonae
  source 1..40: mol_type = genomic DNA
cctctcagctaagtcctggagttgggattggagcccaggc

SEQ ID NO: 12486 - protein, 596 aa, Mycobacteroides abscessus
MSTRHTSADLLQGYTKTAPAGDGADLAVTLLRVSTKKQLYTAIDIDADGNSIATQRDVTALKADALGATITREFIEPGNSGKTVDQRPVFKELLGYLHEHPEVRYVIVYMRSRAFRNHFDAALVQIQLAKIGVRLVSAKEDFGQGAAAVAMEGMVDIMNGFQNTLQGLDVQAKMGRKARAGGTVSLAKIGYLNIRAEFKGKLVNTVGLDPERAPLLRKAWELYASGEYTITRLEATMADLGLTSRPTKTIPPGRPVSSSTLQKMLRDPYYAGFVRYKDELYTGRHEALVSQALFDQVQDVLDARSREGQRDRIHMHYLKNTLFCERCRRNGENSRLIYTKVKGHNGSYYEYFLCRGRQEGHCDLPHQPVHLVEEAIVDYYATLGLPETFITEVRERLESTVQDNQTSTRELHASLTRKLAAIDTKESRLIDLAADDLMPRDKIRQKLNELKQERARIEAGLTSTDEQLSVGAQVLRDALHLVEDPQQLYRDAPNNVRRHLNSAFYERFYLDDLVVADADKTPLFDDLHEAADAHHSARIRRTRPTGVNSAKSPEKGPEMARNPRNAGVPSGVTGLDHPNLVTVLTVPSSSTASLVG

SEQ ID NO: 12487 - DNA, 50 bp, Mycobacteroides abscessus
  source 1..50: mol_type = genomic DNA
cgagtacggccagcctggtcggggtcctcggctcatattcaaaatatcag

SEQ ID NO: 12488 - DNA, 40 bp, Mycobacteroides abscessus; identical to SEQ ID NO: 12483
  source 1..40: mol_type = genomic DNA

SEQ ID NO: 12489 - DNA, 50 bp, Mycobacteroides abscessus
  source 1..50: mol_type = genomic DNA
cgagtacggccagcctggtcggggagctcggctcatattcaaaatatcag

SEQ ID NO: 12490 - DNA, 40 bp, Mycobacteroides abscessus; identical to SEQ ID NO: 12485
  source 1..40: mol_type = genomic DNA

SEQ ID NO: 12491 - protein, 596 aa, Mycobacteroides abscessus
MSTRTTSADMLLGYTKRAVAGDGVDLAVTLLRVSTKKQLYTAIDIDADGNSIATQRDVTALKADALGARVDREFIEPGHSGKTVDQRPVFKELLGYLHEHPEVRYVIVYMRSRAFRNHFDAALVQIQLAKIGVRLVSAKEDFGQGAAAVAMEGMVDIMNGFQNTLQGLDVQAKMGRKARAGGTVSLAKIGYLNVRAEFKGKLVNTVGLDPERAPLLRKAWELYASGEYTITRLEATMADLGLTSRPTKTIPPGRPVSSSTLQKMLRDPYYAGFVHYKGELYTGRHEALVSQALFDQVQDVLDARSRDGQRDRIHMHYLKNTLFCERCRRNGENSRLIYTKVKGHNGSYYEYFLCRGRQEGHCDLPHQPVHLVEDAIVDYYATLGLPETFITEVRERLESTVQDNQASTRELHASLTRKLAAIDTKESRLIDLAADDLMPRDKIRQKLNELKQERARIEAGLTSTNEQLSIGAQVLRDALHLVEDPHRLYSDAPNNVRRHLNSAFYERFYLDDLVVADADKTPLFDDLHEAAHAHHSARIRRTRPTGANSAKTSEKGPQMARNPRNAGVPSGATGLDHPNLATVLTVPSSSTTSLVG

SEQ ID NO: 12492 - DNA, 50 bp, Mycobacteroides abscessus
  source 1..50: mol_type = genomic DNA
cgagtacgaccagcctggtcggggtcctcggctcatattcaaaatatcag

SEQ ID NO: 12493 - DNA, 40 bp, Mycobacteroides abscessus; identical to SEQ ID NO: 12483
  source 1..40: mol_type = genomic DNA

SEQ ID NO: 12494 - DNA, 50 bp, Mycobacteroides abscessus
  source 1..50: mol_type = genomic DNA
cgagtacgaccagcctggtcggggagctcggctcatattcaaaatatcag

SEQ ID NO: 12495 - DNA, 40 bp, Mycobacteroides abscessus; identical to SEQ ID NO: 12485
  source 1..40: mol_type = genomic DNA

SEQ ID NO: 12496 - protein, 596 aa, Mycobacteroides abscessus
MSTRTTSADMLLGYTKRAPAGDGVDLAVTLLRVSTKKQLYTAIDIDADGNSIATQRDVTALKADALGASVAREFIEPGHSAKTVDQRPVFKELLRYLHEHPAVRYVIVYMRSRAFRNHFDAALVQSQLAKLDVRLISAKEDFGEGAAAVAMEGMVDIMNGFQNTLQGLDVQAKMGRKARAGGTVSLAKIGYLNIRAEFDGKLVNTVGLDPDRAPLLRKAWELYATGEYTIARLEATMADLGLTSRPTRTVPPGKPVSSSTLQKMLRDPYYAGFVRYKGELYPGRHEALVSQALFDQVQDVLDARSREGQRDRIHMHYLKNTLFCERCRRNGENSRLIYTKVKGHNGSYYEYFLCRGRQEGYCDLPHQPVHLVEEAIVDYYATLGLPETFITEVRERLESTVTDNQASARELHASLTRKLATIDTKESRLIDLAADDLMPRDKIRQKLNELKQERARIEAGLTSTNEQLSIGAQVLRDALHLVEDPQQLYRDAPNNVRRHLNSAFYERFYLDDLVVADADKTPLFDDLHEAADAHHSARIRRTRPTGVNSAKSPEKGPEMARNPRNAGVPSGVTGLDHPNLVTVLTVPSSSTASLVG

SEQ ID NO: 12497 - DNA, 50 bp, Mycobacteroides abscessus; identical to SEQ ID NO: 12487
  source 1..50: mol_type = genomic DNA

SEQ ID NO: 12498 - DNA, 40 bp, Mycobacteroides abscessus; identical to SEQ ID NO: 12483
  source 1..40: mol_type = genomic DNA

SEQ ID NO: 12499 - DNA, 50 bp, Mycobacteroides abscessus; identical to SEQ ID NO: 12489
  source 1..50: mol_type = genomic DNA

SEQ ID NO: 12500 - DNA, 40 bp, Mycobacteroides abscessus; identical to SEQ ID NO: 12485
  source 1..40: mol_type = genomic DNA

SEQ ID NO: 12501 - protein, 596 aa, Mycobacteroides abscessus
MSTRHTSADLLQGYTKTAPAGDGADLAVTLLRVSTKKQLYTAIDIDADGNSIATQRDVTALKADALGATITREFIEPGNSGKTVDQRPVFKELLGYLHEHPEVRYVIVYMRSRAFRNHFDAALVQIQLAKIGVRLVSAKEDFGQGAAAVAMEGMVDIMNGFQNTLQGLDVQAKMGRKARAGGTVSLAKIGYLNIRAEFKGKLVNTVGLDPERAPLLRKAWELYATGEYTIARLEATLADLGLTSRPTRTVPPGKPVSSSTLQKMLRDPYYAGFVRYKGELYPGRHEALVSQALFDQVQDVLDARSREGQRDRIHMHYLKNTLFCERCRRNGESSRLIYTKVRGQNGGYYEYFLCRGRQEGYCDLPHQPVHLVEEAIVDYYATLGLPETFIIEVRERLESTVQDNQARTRELHASLTRKLAAIDTKESRLIDLAADDLMPRDKIRQKLNELKQERARIEAGLTSTDEQLSVGAQVLRDALHLVEDPQQLYRDAPNNVRRHLNSAFYERFYLDDLVVADADKTPLFDDLHEAADAHHSARIRRTRPTGVNSAKSPEKGPEMARNPRNAGVPSGVTGLDHPNLATVLTVPSSSTTSLVG

SEQ ID NO: 12502 - DNA, 50 bp, Mycobacteroides abscessus; identical to SEQ ID NO: 12492
  source 1..50: mol_type = genomic DNA

SEQ ID NO: 12503 - DNA, 40 bp, Mycobacteroides abscessus; identical to SEQ ID NO: 12483
  source 1..40: mol_type = genomic DNA

SEQ ID NO: 12504 - DNA, 50 bp, Mycobacteroides abscessus; identical to SEQ ID NO: 12494
  source 1..50: mol_type = genomic DNA

SEQ ID NO: 12505 - DNA, 40 bp, Mycobacteroides abscessus; identical to SEQ ID NO: 12485
  source 1..40: mol_type = genomic DNA

SEQ ID NO: 12506 - protein, 476 aa, Fusobacterium ulcerans
MQTLQAKIAVKYSRVSTNKQDLRGSKDGQEAEIDKFAIANNFTIISSFTDTDHGDIAKRKGLSSMKEYLRLNQAVKYVLVYHSDRFTRSFQDGMRDLFFLEDLGIKLISVLEGEIVADGTFNSLPSLVRLIGAQEDKAKIIKKTTDASYKYAKTNRYLGGNILPWFKLESGYVYGKKCKVIVKNEATWEYYRGFFLAMIKYKNILRAAKEYNLNSFTVAEWLTKPELIGYRTYGKKGKIDQYHNKGRRKNYQTTEEKIFPAILTEEEFLVLNEMRKYNRAKYNKDIYTYLYSNLSYHSCGGKLEGERIKKKDSFVYYYKCNCCKKRFNQKKIETAIAENILNNPGLQIINDINFRLADIYDEIKNINNMIEEENSSEKRILSLVSKNVVGVEAAEEELLKIKKQKNFLKKLLEEKIKLIEEENKKEITEDHISLLKNLLEYSQEDDDDFRGKLKEIINLIVRKIEVSSLDKINIIF

SEQ ID NO: 12507 - DNA, 50 bp, Fusobacterium ulcerans
  source 1..50: mol_type = genomic DNA
agttagggttaatcgatggcgcacccaactatgacttttttaccctaaca

SEQ ID NO: 12508 - DNA, 40 bp, Fusobacterium ulcerans
  source 1..40: mol_type = genomic DNA
ttatttttaaatggcgcacccaagaggagtcgaaccccta

SEQ ID NO: 12509 - DNA, 50 bp, Fusobacterium ulcerans
  source 1..50: mol_type = genomic DNA
agttagggttaatcgatggcgcacctaactatgacttttttaccctaaca

SEQ ID NO: 12510 - DNA, 40 bp, Fusobacterium ulcerans
  source 1..40: mol_type = genomic DNA
ttatgaataaatggagcatctaagaatagtcgaactgcta

SEQ ID NO: 12511 - protein, 628 aa, Ruminococcus callidus
MRKNEKITALYERLSRDDFGKDDDQQRESNSISNQKAMLEEFAARQGFTNIVHFTDDGISGTCFDRPGFLAMMKEVEAGNVEYLCIKDMSRMGRDYLKVGQIMEILRQRGVRLIAINDGVDSARGDDDFTPFRNIMNEYYARDTSRKIRSTFQSKGKSGKHLTGTVIYGYLWNEARDQWLVDPEAADVVKRIFTMTIEGYGPYQIASKLKEEKVLIPSAYLAQHGEGVNKNKTFKDVYGWGSSTICNLLEKREYLGHTINFKTRKHFKDKKSHYVPEDEWTIFENTHEAIIDQQTFDLVQKIRGNVRRYPDGWGEAAPLTGLLYCADCGGKMYVHRTNNGKRISQYTCSQYSKVPVGKLCMTQHRINEDVVLSLVSEMLKAIAEYAKHDRAEFVRVVQEAQSSQQTAEVKKQRTRLATAKQRVSELEVLLCKIYEDNILGKLSDSRYATLDAQYEKEQSELTAEISALEKAVKSYEKHEKDADRFIALIDKYENFDKLTIAMLNEFIEKILVHERDRKGSIQTTQEVEIYFNFVGRFVPPAFGEVELTPEELEEIRKREERKDRFHQNYLKRKASGAQKRYEDKIKGRKKAEIEAKKAAIRAEDIAKGVFVPVSSLPQREPMKGVQTA

SEQ ID NO: 12512 - DNA, 50 bp, Ruminococcus callidus; identical to SEQ ID NO: 57
  source 1..50: mol_type = genomic DNA

SEQ ID NO: 12513 - DNA, 40 bp, Ruminococcus callidus
  source 1..40: mol_type = genomic DNA
agcatataaactggctgctggtaagactgcaaaatccatt

SEQ ID NO: 12514 - DNA, 50 bp, Ruminococcus callidus
  source 1..50: mol_type = genomic DNA
aaaagtccttgacttttcgtctctattgttgtatgctctaaaagacttct

SEQ ID NO: 12515 - DNA, 40 bp, Ruminococcus callidus
  source 1..40: mol_type = genomic DNA
agcatatacaaagtttactattaatactgctaaatccaat

SEQ ID NO: 12516 - protein, 481 aa, Streptococcus gallolyticus; identical to SEQ ID NO: 12381

SEQ ID NO: 12517 - DNA, 50 bp, Streptococcus gallolyticus
  source 1..50: mol_type = genomic DNA
tgagtgtttttagtatcattcatttcaatcaaagatactaaaaatactca

SEQ ID NO: 12518 - DNA, 40 bp, Streptococcus gallolyticus
  source 1..40: mol_type = genomic DNA
aagaagcacaatcaacatctccacaagtgtgaaccctttt

SEQ ID NO: 12519 - DNA, 50 bp, Streptococcus gallolyticus
  source 1..50: mol_type = genomic DNA
tgagtgtttttagtatcattcattggaatcaaagatactaaaaatactca

SEQ ID NO: 12520 - DNA, 40 bp, Streptococcus gallolyticus
  source 1..40: mol_type = genomic DNA
aagaaccacaatcaatgttggcactaatttgagcccttgt

SEQ ID NO: 12521 - protein, 479 aa, Streptococcus gallolyticus
MSRKVAIYVRVSTTNQAEEGYSIDGQLDSLTKYCEVMGWSVYQKYIDAGFSGGKLERPDILKLIKDAKRGVFDTVLVYKLDRLSRNVQDTLYLVKEVFNKNEVHFVSLQENLDTSSAMGNLFLTLLSAIAEFEREQIKERMQLGKIGRAKSGKSMMWAKVAYGYTYHVGTGEMTVNQSEAIAVREVFNSYLNGRSISKLRDDLNEEFPKTPAWSYRTIRQMLDNPVYCGYNKYKGVIYPGNHEAIISEDVYNKVQEEIKLRQIKTYAQNNNPRPFQSKYMLSGIGQCGYCKAPLKSLLRNTKKDGTRTVRYECHQRRPKKIRGVTTYNDNKKCNSGIYSKDDLEAYVLESISKLQTDSDYIDELFDTEPEKLDREAINKEIESLSNKVSKLNDLYINNLITLDDLKNQSSTFNAKIEKLKDELANDPAIKHQENKQKMLKILDTKDVLKMDYEEQKILVRALINKVQVTSDSIKILWKI

SEQ ID NO: 12522 - DNA, 50 bp, Streptococcus gallolyticus
  source 1..50: mol_type = genomic DNA
tgagtgtttttagtatcgttcatttcaatcaaagaaactaaaaatactca

SEQ ID NO: 12523 - DNA, 40 bp, Streptococcus gallolyticus; identical to SEQ ID NO: 12518
  source 1..40: mol_type = genomic DNA

SEQ ID NO: 12524 - DNA, 50 bp, Streptococcus gallolyticus
  source 1..50: mol_type = genomic DNA
tgagtgtttttagtatcgttcattggaatcaaagaaactaaaaatactca

SEQ ID NO: 12525 - DNA, 40 bp, Streptococcus gallolyticus; identical to SEQ ID NO: 12520
  source 1..40: mol_type = genomic DNA

SEQ ID NO: 12526 - protein, 625 aa, Roseburia inulinivorans; identical to SEQ ID NO: 10336

SEQ ID NO: 12527 - DNA, 50 bp, Roseburia inulinivorans; identical to SEQ ID NO: 57
  source 1..50: mol_type = genomic DNA

SEQ ID NO: 12528 - DNA, 40 bp, Roseburia inulinivorans
  source 1..40: mol_type = genomic DNA
aaaatacagatcagacaccggaaggggatgaccagacttc

SEQ ID NO: 12529 - DNA, 50 bp, Roseburia inulinivorans; identical to SEQ ID NO: 3749
  source 1..50: mol_type = genomic DNA

SEQ ID NO: 12530 - DNA, 40 bp, Roseburia inulinivorans
  source 1..40: mol_type = genomic DNA
aaaatacacttcagacacagtaaggggaacatcacacacc

SEQ ID NO: 12531 - protein, 548 aa, Catenibacterium sp co 0103; identical to SEQ ID NO: 3731

SEQ ID NO: 12532 - DNA, 50 bp, Catenibacterium sp co 0103; identical to SEQ ID NO: 277
  source 1..50: mol_type = genomic DNA

SEQ ID NO: 12533 - DNA, 40 bp, Catenibacterium sp co 0103
  source 1..40: mol_type = genomic DNA
ttactaaaccttttaaaccttctgttttatatgcgaaatg

SEQ ID NO: 12534 - DNA, 50 bp, Catenibacterium sp co 0103
  source 1..50: mol_type = genomic DNA
atagttacttgtcactattaagccaaggcttaacagtgataaggaactaa

SEQ ID NO: 12535 - DNA, 40 bp, Catenibacterium sp co 0103
  source 1..40: mol_type = genomic DNA
ttaaaaagatttttaaagcaactattttaaatgagaaatg

SEQ ID NO: 12536 - protein, 580 aa, Blautia luti
MEFSKLTRVAIYIRVSTTMQAENGESLNVQRTQLTTYAQMMLNALPENIVIFEDAGYSGKNMDRPKFQDMMSQIRAGKFSHLLVWKIDRISRNLLDFSMMYKELKELGVTFVSKNEQFDTSTAMGEAMLKIILVFAELERNMTSERVTHTMIAMAQSGRWNGGRVPFGYTYRTEGEKKEKQIFEIDKGEAALVQEIFDLYEQERSIVREAKILNDRNAISRYGHEWSPVTVHLVVRNIFYVGDYRYNALREGDRSKPKPESEWIIVKDHHPAIISREQFARVQAILKANKRYRKDMAPTSSRERVHIFGGLLFCGNCGKPLNNSVSNKKADGWQYSNYPCPTRRRSSNKCTGKSTSDPVVGEFVFNYILNMLNAQKGFKDIQTPAQLQDRLLFGDAFHNVISIDSDGLNSFFNLLSSGNISGAIYGKDVAVSKPKTAKVDPELVRLRKEKKRLERALDRLLNTYIMSDRPISENEYIRKRTDLETLLSDVNDKLGIAQSEEVQMALTDSEFLTKASQFIIGQKLSSRLYINYKNLAQSVDPSVLKTFVVSVIDNIVIYNGKVKSIVFRNGLAATFEYSSI

SEQ ID NO: 12537 - DNA, 50 bp, Blautia luti
  source 1..50: mol_type = genomic DNA
ttggtctacaaaatgatcatcgcatccggtatgattctttttacaatcaa

SEQ ID NO: 12538 - DNA, 40 bp, Blautia luti
  source 1..40: mol_type = genomic DNA
tcagataatgatcatggcatcgccgaaagagaaaaatctg

SEQ ID NO: 12539 - DNA, 50 bp, Blautia luti
  source 1..50: mol_type = genomic DNA
ttggtctacaaaatgatcatcgcaagcggtatgattctttttacaatcaa

SEQ ID NO: 12540 - DNA, 40 bp, Blautia luti
  source 1..40: mol_type = genomic DNA
ttagatcaacattagggcgaggccgagagggaaaaatctg

SEQ ID NO: 12541 - protein, 638 aa, Bacteroides thetaiotaomicron
MKAAFLIRCSTKNQDLSRQTRDLARLAKSMGYEYDLDNLVYGEKITGKDDVTKKNRDSIDRLLKAAKEQRFDVVLVAEVSRMSRDPASGRVYVRLLINMGIPVYFKDIDTWTIDPETGKKIRDAETVIGGAFDAAWKYLKSMKTQIASARRNQLDNNCISVGKPYIGYKWLGGKDKTTKTQWIVDEIAAEAVIATFNEYLKEGATLKSTALVINALYGEKVKTKFTVSRMEQILSYDTYYTGIKKINLTDPDTEEIEVFDVKVPILITKELFEAAAVKRSTNRVKGEPYPKQTVHLLSKLIKCSYCGYSMTPRAKGSDKTQDGRGANGAYRIINGKKAMSWLCMSGINNATICPNRTSIANEKLEPIIWELVKKELIAFANLNNDERLQKVEELESKIEYQNLNIQNYEKEIQKLRKRLSTAYQFSLNAAEMAGDDEDIKAMTMEEFNKTAKVIRKEITTFENSIEQAKADIYKLTNLKTFYSQPTLPKDVIEKAEANPTEQRNLVKELIEKIIPYKITTFRKKQRESGRKACNQWITVKNGAVLLEIYTINGIYYIFYNANGREATRYAYYMSGVFARYQNSIKKFEAYEEGEYFVISNANMVMETEEIDELVTVNEFVKIAKANEWVLEYPYKPES

SEQ ID NO: 12542 - DNA, 50 bp, Bacteroides thetaiotaomicron
  source 1..50: mol_type = genomic DNA
ctatgaaagtattttttgtgctattcgtaatttaaaaaatacttgcatag

SEQ ID NO: 12543 - DNA, 40 bp, Bacteroides thetaiotaomicron
  source 1..40: mol_type = genomic DNA
tctgttgaattcgggtaattcgtccagaaataaaactccg

SEQ ID NO: 12544 - DNA, 50 bp, Bacteroides thetaiotaomicron
  source 1..50: mol_type = genomic DNA
ctatgaaagtattttttgtgctataagtaatttaaaaaatacttgcatag

SEQ ID NO: 12545 - DNA, 40 bp, Bacteroides thetaiotaomicron; identical to SEQ ID NO: 2420
  source 1..40: mol_type = genomic DNA

SEQ ID NO: 12546 - protein, 520 aa, Clostridium botulinum
MIAIYCRVSTEDQQERKTIENQIDFAQKYCDLHELSIFKIYKEDGVSGTIPLEDRPEGKQLIEDAKNNKFDTLLLYKLDRLGRSARITLNSIHTLEELNVQIKSMTEPFDTSSPSGRFMITMLAGVADLERSTILERMWLGANRAAKEGKWLGGIVPYGYFVNEDKYLEINNNAIPGINLSEADIIKLIFNLTVENHYSTVKICDYLNSLNIPTSYKKNNRQLNKGKRKVNVSGIWRPTTISRILRNKTYKGIHEYGKNSTKKREIITRKVPRIVSEDTWNKAQQVIEDNKLEANRNHKRSYLLKGIIKCGICGKTFVGATFRGDLGYYVCNGKLAYRDGCTAKNININYIETMIWEDIVNFINNPGKTLDMLKENFQHKSDDKKDLLNQKHLLENNLANKESEKHSILDLFRKGIITSSDVELQLSKINNECTSIKTNLSELTTQLNNIKTITNYNKVEEMLKKMKSTINKSQLSFNDKRQIIKTLVDKIIVNTVVENRTKKANIDIRYSFIKVGNHTD

SEQ ID NO: 12547 - DNA, 50 bp, Clostridium botulinum
  source 1..50: mol_type = genomic DNA
tatcaaagtaggaaatcacacggacatccatgtgaacaacaacttaggta

SEQ ID NO: 12548 - DNA, 40 bp, Clostridium botulinum
  source 1..40: mol_type = genomic DNA
accaaaattgccacacggacatggatttgtcgaaaaaacc

SEQ ID NO: 12549 - DNA, 50 bp, Clostridium botulinum
  source 1..50: mol_type = genomic DNA
tatcaaagtaggaaatcacacggatctccatgtgaacaacaacttaggta

SEQ ID NO: 12550 - DNA, 40 bp, Clostridium botulinum
  source 1..40: mol_type = genomic DNA
acccaaacttccacacagatcaggatttctgaaagaaacc

SEQ ID NO: 12551 - protein, 506 aa, Megamonas rupellensis
MFENNLKTAAIYARVSTTRQAEEGFSLPSQIDACVRKAKELGISNIIKYVDNASGTTLDRPALTIMRKAIREKKIDIIICYDQDRLSRNLGQQLVLTEEIEKYCQKLIFICGDYHNSPNGRLFYAIKGAIAEYEREKIIERCIRGKKEKYKKGKTSNSHLFGYQYNPITELYEINTDEAVIVRRIFKLYINGMSSRQILRQFQIENIPKYFQGKNVGWNDPSAIMRILKNDSYTGVFHAWKHNSHNSLKKAPKQRYKDTSEWINVPIPAIISEEEFILANQIIKENTDRSTRNEKRIHLLSKIAYCTCGRKIYVRPNNNKDYYYCSSKSYKKRNEIDIPFCPIAKYMPADKIDNIFWDTLTKICISEDTLQKYINRQQEDSNINEIQQQLLDLKTLLQKKQTEQVSILEWYSNQLIDEDVAKLKLLKLKNIITELKSQQQILSNKLNNKNKPQKIYDIFKQERKITLEEKRNLIRKIVDRVYLKRTDPAISSNKYDIEVDLFIIFK

SEQ ID NO: 12552 - DNA, 50 bp, Megamonas rupellensis
  source 1..50: mol_type = genomic DNA
ttcatttgtatgtgtgttactttgaacatcgcctcacaaacacaacggca

SEQ ID NO: 12553 - DNA, 40 bp, Megamonas rupellensis
  source 1..40: mol_type = genomic DNA
aacataatgtgtaactttaaacattgcttctgctacacca

SEQ ID NO: 12554 - DNA, 50 bp, Megamonas rupellensis
  source 1..50: mol_type = genomic DNA
ttcatttgtatgtgtgttactttgtccatcgcctcacaaacacaacggca

SEQ ID NO: 12555 - DNA, 40 bp, Megamonas rupellensis
  source 1..40: mol_type = genomic DNA
aactaaatgtttaagtttatcgaatgcttttgctgcatca

SEQ ID NO: 12556 - protein, 497 aa, Staphylococcus aureus
MSKIALYIRLSVEDMIKTDESESIINQRAYLNDYLDKNEEFKNFTREEYVDDGYSGTNENRPAFQRMLEDVKKNNIQTIIVKDLSRFMRDYITLGDYLENIFPFLGVRFIAINDGYDSDKEKGNGTDLDIQFKGLLYDFYTKDISEKVKSSMTTLKKQGKFLAWSPPLGYMKDPNDKHKIIVDEETAWIVKKIFKLALDGISSRNIAKILNEEKIPTPSKRKSELTNLDFEYSIIRTAKKPRPTWTNGNVIDVLANENYTGTYTFNMQDKSVLNPSSFKFKPKEEWGRVENNHEAIISKEDFEKVQKIKEKNLFMKGKNTDYEWRKKSPLQGFAKCPTCNHILGCTQSKRKRQDGTIRVHTYFTCRICKCNNVKHKNSRAGSLEEHVFEAIKEKYGLEDPIKDEKVKVKPMEKSIEDLEAKKMQNFEKYKLGKMNRQKFIDSKNLIDEDIQAIKEKIQKAKEEKEVIDNTKLTRELMEKYIDSVICEGNEVLNIIWK

SEQ ID NO: 12557 - DNA, 50 bp, Staphylococcus aureus; identical to SEQ ID NO: 2317
  source 1..50: mol_type = genomic DNA

SEQ ID NO: 12558 - DNA, 40 bp, Staphylococcus aureus
  source 1..40: mol_type = genomic DNA
cgtgtatgacccaacatgtggttcaggttcactgttgtta

SEQ ID NO: 12559 - DNA, 50 bp, Staphylococcus aureus
  source 1..50: mol_type = genomic DNA
tttgtcataagcttgacatgagaggagtttcgtgtcataatagtgataga

SEQ ID NO: 12560 - DNA, 40 bp, Staphylococcus aureus
  source 1..40: mol_type = genomic DNA
agggtatgacctaaaacgtgaccctgtttcactgttgtta

SEQ ID NO: 12561 - protein, 618 aa, Anaerofustis stercorihominis; identical to SEQ ID NO: 11111

SEQ ID NO: 12562 - DNA, 50 bp, Anaerofustis stercorihominis; identical to SEQ ID NO: 11112
  source 1..50: mol_type = genomic DNA

SEQ ID NO: 12563 - DNA, 40 bp, Anaerofustis stercorihominis
  source 1..40: mol_type = genomic DNA
tgtttgtatttgttctacagaatatgatctgtagttagta

SEQ ID NO: 12564 - DNA, 50 bp, Anaerofustis stercorihominis; identical to SEQ ID NO: 11469
  source 1..50: mol_type = genomic DNA

SEQ ID NO: 12565 - DNA, 40 bp, Anaerofustis stercorihominis
  source 1..40: mol_type = genomic DNA
tttatgtatttattatataatatatgatatatagtttata

SEQ ID NO: 12566 - protein, 550 aa, Streptococcus agalactiae; identical to SEQ ID NO: 1606

SEQ ID NO: 12567 - DNA, 50 bp, Streptococcus agalactiae
  source 1..50: mol_type = genomic DNA
ttaaatccctaagtgaatgcccctaaaaggagtgttcagtaagggattaa

SEQ ID NO: 12568 - DNA, 40 bp, Streptococcus agalactiae
  source 1..40: mol_type = genomic DNA
acattaaaaaacacgctctaaagagacgtgtttttttcta

SEQ ID NO: 12569 - DNA, 50 bp, Streptococcus agalactiae
  source 1..50: mol_type = genomic DNA
ttaaatccctaagtgaatgcccctgaaaggagtgttcagtaagggattaa

SEQ ID NO: 12570 - DNA, 40 bp, Streptococcus agalactiae
  source 1..40: mol_type = genomic DNA
acaatataaaacactctctgaagagttgactttttttcag

SEQ ID NO: 12571 - protein, 550 aa, Streptococcus agalactiae
MNKLNRQPSYTLDNVGKITALYCRLSKDDELQGDSNSIINQKSMLKKYAEDNHFNNLMFFVDDGYSGTNFQRPDWLKLTALIDEGKIGTIIVKDMSRLGRDYLQVGMYTEMVFPNADIRFIAINNGVDSNNQSDNDMTPFINIFNEFYAKDTSRKIKAVFKAKGQSGKPLCINPPYGYLKDPEDKNHWIVDEEAASVVREIFRLCVNGYGPSQIANELIKRNIPTPSEHFFSLGIKIPSAKSEIKGVWNQKTISNMLEKQEYLGHTVNFKTRKKSYKCKKTLLNPKEDWLIFKNTHEAIIDQETFDIVQRIRDGRRVRANLGEMPVLSGMLFCADCGNKLYQVRGKDWSHDKEYFVCATYRKQKGKCSSHQIRNIQIEAILLHELRMITSFAKQHEEEFVGLVMKKSEKELTQKLKSSNRELEQAKARISKLDTIVQHLYEDNLDGKISDERFKSMSKSYDKEQAELKSKIESLEAFISKEQEECLNVDSFLKLVRQYTDIQELNAEIIRTFVDKIYVEKSEKVAGTRTKKQTIWIQWNYIGAVDIPLHK

SEQ ID NO: 12572 - DNA, 50 bp, Streptococcus agalactiae; identical to SEQ ID NO: 12567
  source 1..50: mol_type = genomic DNA

SEQ ID NO: 12573 - DNA, 40 bp, Streptococcus agalactiae; identical to SEQ ID NO: 12568
  source 1..40: mol_type = genomic DNA

SEQ ID NO: 12574 - DNA, 50 bp, Streptococcus agalactiae; identical to SEQ ID NO: 12569
  source 1..50: mol_type = genomic DNA

SEQ ID NO: 12575 - DNA, 40 bp, Streptococcus agalactiae; identical to SEQ ID NO: 12570
  source 1..40: mol_type = genomic DNA

SEQ ID NO: 12576 - protein, 552 aa, Paenibacillus polymyxa
MVTLRGSEKLNKEMFLALIDLVKVIIYVRVSTDDQAKHGYSLESQIERCAEHQKQKYNADDDEILVIVEEGESGDNPDRPALNYLLYLVEEGMGRVVYVLHPDRLSRFLHLQTNVSMRIWNAGCDLQFVEFDLDKDNPESMLMYNIQGSISQYNKAKILANSKRGKRQKAKKGKLNGGKRFYGYIYDKETSNLSVNEFEKEIYLRMVSMLLEEDCSCSDIARQLAEDNVAAPSGNYWYQSTVTRILRNELYTGISYYGKTEVIQTQGKKKQVKRKQEDWIPVAVPAYITNETYLDIQKKIDSLSKVKSGRPTQSYLLKGLSRCGRCGAAASSGITSVTKRGILKYYTCNNKSKKEFEVGTGRVRKKCRGRNWRVDHIDNFVWEYILSLIYDPVPYIETIIKKKTNISNNEVINKRLKKLEKAMKEQEFAKERYIDLYACGMIKSKEDLEKKTKPIEEKIKDMSSQISILNEEKKLYENKNNEIDQMKTMLEHYSKIIDPENVPFEMKRKLVKALIHSVTLNDNMTIDVVLKVSDSIGAISSVNKHRNQSTSQ

SEQ ID NO: 12577 - DNA, 50 bp, Paenibacillus polymyxa
  source 1..50: mol_type = genomic DNA
aacatagaaaccaaagcactagccaacacaagagtttgggtttttatgtt

SEQ ID NO: 12578 - DNA, 40 bp, Paenibacillus polymyxa
  source 1..40: mol_type = genomic DNA
agcaattgatactttggtaaaagccatggaggatcataaa

SEQ ID NO: 12579 - DNA, 50 bp, Paenibacillus polymyxa
  source 1..50: mol_type = genomic DNA
aacatagaaaccaaagcactagccgacacaagagtttgggtttttatgtt

SEQ ID NO: 12580 - DNA, 40 bp, Paenibacillus polymyxa
  source 1..40: mol_type = genomic DNA
tgcaattgatactttggctgaaaccatgaagcattatgat

SEQ ID NO: 12581 - protein, 518 aa, Mycolicibacterium fortuitum
MTSARLRALVGARVSVLQGPQKVSHIAQIEAATNWAESQGYDVVGTIEDLGVSASVSPFDRPDLGPWLDTQREGDWDALVFSKLDRLFRSTRDCVKFAEWAEEHRKILVFSEDGLTLNYRNPDKGSIEQMMAELFVYLGSFFAQLELNRFKARAKDSHRVLRGMDRWASGVPPLGFRVVDHPSGKGKGLDTDPVGKAILEDMAAKLVDGWSFIRIAQDLNQRKIPTNLDKARMAKGKEPYSNPWNVGTVIESLTSERTQGLKMTKTGKKFTTVLDEDGEPIRMAPPTFDADTWRQIQEAAAKRQQNRRTPTETANPMLGVGFCGVCGASLAQQFSRKRKANGDQVEYRYYRCGRTPVNCKGVFMRADEADQALAEGFLFSHGAEPVTRRRFIAGEDHTEDLEKTNRTIESLREDRALGLFTTPEDEARYRQQMTALVAKRDRLAAEPRRAAQWVVEETGQTFAEVWEDSDQRQLLADAGVRFVLSSKTDWSIETLNMRPDHPVFLEPPDDVLGVGGTA

SEQ ID NO: 12582 - DNA, 50 bp, Mycolicibacterium fortuitum
  source 1..50: mol_type = genomic DNA
cttctcataggtgcattgctcgatcaccccagcagtgtacattggaaacc

SEQ ID NO: 12583 - DNA, 40 bp, Mycolicibacterium fortuitum
  source 1..40: mol_type = genomic DNA
ggtggggatgttgttggatcagcagattccgatggagacg

SEQ ID NO: 12584 - DNA, 50 bp, Mycolicibacterium fortuitum
  source 1..50: mol_type = genomic DNA
cttctcataggtgcattgctcgatctccccagcagtgtacattggaaacc

SEQ ID NO: 12585 - DNA, 40 bp, Mycolicibacterium fortuitum
  source 1..40: mol_type = genomic DNA
ggtggatatgtggatagctctgaagatttcgatggaaacg

SEQ ID NO: 12586 - protein, 526 aa, Paraclostridium bifermentans
MKIAIYSRKSVFTGKGESIENQIQLCSDYAKSHFGASQSDIFVYEDEGFSGKNLDRPEFQKLLHDAKNKKFDILICYRLDRVSRNIADFSSLIEDLQRYNISFVSIREQFDTSTPMGRAMMFIASVFAQLERETIAERVRDNMLELAKSGRWLGGTAPLGFNSENISYIDDELKERKMSKLIPNKEELEIIQLIYRKYLELGSITQVVAFMYTTNFTGKRNKEFSASTISKILRNPIYVKSDESVLNYLKNKGINVSGDPNGCGILTYNKKSKGVKQDKSEWIAAVCNSKGIINGNDWLLVQQLLDKNKDNTKSLRLGTSKKGLLTGIIRCSKCGSPMRVTYGRNYHYYTCTKKVNSKGVACDNKNVKGPDIEKVIIESIMDIDTNMLLANLNDGESSTSSREKDITDIQAKIKSKKIQLNSLFERMVDFDDELSDLFKEKINELGKEIKELNKKYSDLVNEVDNNKRDFRNVELVINAVNEFKSYFNCIEDFHKRKFMLGVIVDKINWDGEKQEVDIEFWGSKKK

SEQ ID NO: 12587 - DNA, 50 bp, Paraclostridium bifermentans
  source 1..50: mol_type = genomic DNA
tgtcgcaatacatacaatcatgcatgacctcggttgttagtattgcaact

SEQ ID NO: 12588 - DNA, 40 bp, Paraclostridium bifermentans
  source 1..40: mol_type = genomic DNA
tggtgccattaattttgcatgacccgtatctattagaatt

SEQ ID NO: 12589 - DNA, 50 bp, Paraclostridium bifermentans
  source 1..50: mol_type = genomic DNA
tgtcgcaatacatacaatcatgcaccacctcggttgttagtattgcaact

SEQ ID NO: 12590 - DNA, 40 bp, Paraclostridium bifermentans
  source 1..40: mol_type = genomic DNA
tcttgccattacttttgcaccaacctaatataatagaaat

SEQ ID NO: 12591 - protein, 612 aa, Streptococcus agalactiae
MIEYHNKITALYSRLSVGDEDRDGGESNSIVNQKAFLERYAREKKLINIRHYIDDDESGRFFDRSAYTQMISDVEQGKIGIVIMKDMTRWGRDYLQVGNAMEIFRRNNIRFIAINNGIDSIDQNTLEFAPFINIMSEWYARDISKKVKTGIKTKGADGKPVATEAPYGYIKDPENKDYWIVDKEAAEVVKLIFRLFMEGKNRNQIAVYLKEKEILTPTFYMKQQGRGTAKNKPLNEENRYNWNKATLTRILKRQEYCGDVVNFKTEKHYRDKRNHYVDKSKWQITENVHEPIIDRTTFENVERMLKNAPVKRPNGDGEIHALSGLMYCKDCGTKMHIRTIHKNGRVQHVTYCSEYAKGKAKHPKCNSPHRIDVDEVMENIAEVLRKIAQYSLENKAEFEKLVKESLYKEQTEEVKKNQKRMPQITDRMEQIERVMNKLYEDNALGNLDTERYEQLSRKYAEEYYTLKAEKEEIKERLSECENANQRAKKFIRLAESYSNFEELTPTIINEFISKIAVHERDVKRAKYVVQRIEVYFNYIGKFENELTKQIEPTEQEMIQMREEIEEARREKSRAYHRAYSKAYRAKNLEKCREYEKLKAREYRAKKKLQATT

SEQ ID NO: 12592 - DNA, 50 bp, Streptococcus agalactiae; identical to SEQ ID NO: 3477
  source 1..50: mol_type = genomic DNA

SEQ ID NO: 12593 - DNA, 40 bp, Streptococcus agalactiae
  source 1..40: mol_type = genomic DNA
agagtatggatctgcaagatggggagaaagtaaggatatt

SEQ ID NO: 12594 - DNA, 50 bp, Streptococcus agalactiae
  source 1..50: mol_type = genomic DNA
aaaggtacttgacaaaacgcttccttggttgcataatattaactgaacag

SEQ ID NO: 12595 - DNA, 40 bp, Streptococcus agalactiae
  source 1..40: mol_type = genomic DNA
agagtaagactctgtgtgtttgggagaaagtaaggaaaat

SEQ ID NO: 12596 - protein, 612 aa, Streptococcus agalactiae
MIEYHNKITALYSRLSVGDEDRDGGESNSIVNQKAFLERYAREKKLINIRHYIDDDESGRFFDRSAYTQMISDVEQGKIGIVIMKDMTRWGRDYLQVGNAMEIFRRNNVRFIAINNGIDSIDQNTLEFAPFINIMSEWYARDISKKVKTGIKTKGANGKPVATEAPYGYIKDPENKDYWIVDKEAAEVVKLIFRLFMEGKNRNQIAVYLKEKEILTPTFYMKQQGRGTAKNKPLNEENRYNWNKATITRILKRQEYCGDVVNFKTEKHYRDKRNHYVDKSKWKITENVHEPIIDRTTFENVERMLKNAPVKRPNGDGEIHALSGLMYCKDCGTKMHIRTIHKNKKVQHVTYCSEYAKGKAKHPKCNSPHRIDVDEVMENIAEVLRKIAQYSLENKAEFEKLVKKSLYKEQTEEVKKNQKRMPQITDRMEQIERVMNKLYEDNALGNMDTERYEQLSRKYAEEYYTLKAEKEEIKERLSECENANQRAKKFIILAESYSNFEELTPTIINEFISKIVVHERDVKRAKYVVQRIEVYFNYIGKFENELTKQIEPTKEEMLQMREEIEEAKKEKARAYRRAYYKEYRAKNLEKCREYEKLKAREYRAKKKLQRAT

SEQ ID NO: 12597 - DNA, 50 bp, Streptococcus agalactiae; identical to SEQ ID NO: 10217
  source 1..50: mol_type = genomic DNA

SEQ ID NO: 12598 - DNA, 40 bp, Streptococcus agalactiae; identical to SEQ ID NO: 12593
  source 1..40: mol_type = genomic DNA

SEQ ID NO: 12599 - DNA, 50 bp, Streptococcus agalactiae
  source 1..50: mol_type = genomic DNA
aaagatatttgacaaaacgcttccttggttgcataatattaactgaacag

SEQ ID NO: 12600 - DNA, 40 bp, Streptococcus agalactiae; identical to SEQ ID NO: 12595
  source 1..40: mol_type = genomic DNA

SEQ ID NO: 12601 - protein, 612 aa, Streptococcus agalactiae
MIEYHNKITALYSRLSVGDEDRDGGESNSIVNQKAFLERYAREKKLINIRHYIDDDESGRFFDRSAYTQMISDVEQGKIGIVIMKDMTRWGRDYLQVGNAMEIFRRNNVRFIAINNGIDSIDQNTLEFAPFINIMSEWYARDISKKVKTGIKTKGANGKPVATEAPYGYIKDPENKDYWIVDKEAAEVVKLIFRLFMEGKNRNQIAVYLKEKEILTPTFYMKQQGRGTAKNKPLNEENRYNWNKATITRILKRQEYCGDVVNFKTEKHYRDKRNHYVDKSKWKITENVHEPIIDRTTFENVERMLKNAPVKRPNGDGEIHALSGLMYCKDCRTKMHIRTIHKNKKVQHVTYCSEYAKGKAKHPKCNSPHRIDVDEVMENIAEVLRKIAQYSLENKAEFEKLVKKSLYKEQTEEVKKNQKRMPQITDRMEQIERVMNKLYEDNALGNMDTERYEQLSRKYAEEYYTLKAEKEEIKERLSECENANQRAKKFIILAESYSNFEELTPTIINEFISKIVVHERDVKRAKYVVQRIEVYFNYIGKFENELTKQIEPTKEEMLQMREEIEEAKKEKARAYRRAYYKEYRAKNLEKCREYEKLKAREYRAKKKLQRAT

SEQ ID NO: 12602 - DNA, 50 bp, Streptococcus agalactiae; identical to SEQ ID NO: 10217
  source 1..50: mol_type = genomic DNA

SEQ ID NO: 12603 - DNA, 40 bp, Streptococcus agalactiae; identical to SEQ ID NO: 12593
  source 1..40: mol_type = genomic DNA

SEQ ID NO: 12604 - DNA, 50 bp, Streptococcus agalactiae; identical to SEQ ID NO: 12599
  source 1..50: mol_type = genomic DNA

SEQ ID NO: 12605 - DNA, 40 bp, Streptococcus agalactiae; identical to SEQ ID NO: 12595
  source 1..40: mol_type = genomic DNA

SEQ ID NO: 12606 - protein, 552 aa, Anaerostipes hadrus
MQRQQEEITALYCRLSQDDGREGESNSIVNQKEYLFKYAKEHGFPNPTYYVDDGYTGTNFNRPSFKKMSEDIDKGLVTTVIVKDLSRFGRNYIEVGSYSEIIYPEAGVRFIAIMDNVDTGSLESNEFAAFTNLFNEWYPKSTSKKVKEVKKAKGLAGEHLGAPPYGYLRNPDDNTRWLVDEEAAAVVRRIFFLCMQGNGMSAIATILWEEKVLTPSAYKASKGVGVARVSENPYCWEPSAVAAILENVAYIGCTESFKSTRLGFKSKKRIPTAKEMRAYIENAHTPIIDREVWDKVQMIRENKRRPTNSGITSMFSGLLYCADCGAKLSLATANRYTHFRCSQYKRTSRTQNCTQHYIREDALNQLVLKQLQHFLSYLQQFERVFIRQQIDTTLAERRYELSAKQKQIEKDEKRMDELDRLFRKIYEDNVNGKLNDERFCKLSDGYEAEQEQLKQEIESLTAEVSEADMETTNVSKLIAVTKKYTRIDELTPEILNAFVDKIVIHEREKKDGKRTQQIDIYYSYVGIVDIPTDEEMREMEREYMQRTTRQTA

SEQ ID NO: 12607 - DNA, 50 bp, Anaerostipes hadrus
  source 1..50: mol_type = genomic DNA
ttttatccctatctggtttaactcatgtatgaaaccagataaggagaaaa

SEQ ID NO: 12608 - DNA, 40 bp, Anaerostipes hadrus
  source 1..40: mol_type = genomic DNA
tattcttatcataccacacatgatcggcaatttgttaaaa

SEQ ID NO: 12609 - DNA, 50 bp, Anaerostipes hadrus
  source 1..50: mol_type = genomic DNA
ttttatccctatctggtttaactcaagtatgaaaccagataaggagaaaa

SEQ ID NO: 12610 - DNA, 40 bp, Anaerostipes hadrus
  source 1..40: mol_type = genomic DNA
tattcttcccagaccacacaagcttgggaaatagttaata

SEQ ID NO: 12611 - protein, 549 aa, Peptostreptococcaceae bacterium oral taxon 929
MKNKKAYVYTRVSTSMQIDGYSLDAQEERIKQYAKAYGIEIIETYKDAGKSGTSISGRNEFIAMLNDIEAEKDKVDYVMVFKLSRFGRNAADVLQSLQVMENHNVNLICVDDSLDSSKDSGKLVITILSAVAEMERENILSQTMEGRKQKAREGKWNGGFAPIGYSLDNGELVVNEDEAKAVRMIFDLYANSDMGANGVSKYLVSLGINKPIRQNGKNPYFSASLIRQILDNPVYNGKIAYGRRKTIKDKTTGKIKLEKSDHYIIAQGNHEALIDDELWNTVQEKRKSQAKKYEKINRGKDERVHILSNLIKCPYCGAGLYGNKSRKRNKNKEGEHYKDYYYYGCKHRQMMNGHKCTFNKQIRAELIEKEVETIITQVVSNPTFAKKIEEKINIQIDTKEIDEVINKHLAKIRQLTGTKASLINQIDSLNFEDKHYDRKYTDLNLRLDAIYDQLEYAEMQLNDSRKRKEAILEEKITSDNIYKILVNFNSLYTVLSDIDKKRLLNEMIEEIQIYDEKTEKDTWIKSVVFKLPLIDNEIDFGLDNKDNVE

SEQ ID NO: 12612 - DNA, 50 bp, Peptostreptococcaceae bacterium oral taxon 929
  source 1..50: mol_type = genomic DNA
ggtttggacaataaagataatgtcgagacggtagctctgttgtccaaact

SEQ ID NO: 12613 - DNA, 40 bp, Peptostreptococcaceae bacterium oral taxon 929
  source 1..40: mol_type = genomic DNA
tccaaagacaagtcatgtggagactatagcattgatgtca

SEQ ID NO: 12614 - DNA, 50 bp, Peptostreptococcaceae bacterium oral taxon 929
  source 1..50: mol_type = genomic DNA
ggtttggacaataaagataatgtctagacggtagctctgttgtccaaact

SEQ ID NO: 12615 - DNA, 40 bp, Peptostreptococcaceae bacterium oral taxon 929
  source 1..40: mol_type = genomic DNA
tacaaagccaagtccagagtagaataaagcattgatttga

SEQ ID NO: 12616 - protein, 528 aa, Methylophaga thiooxydans
MQEKIMTMKNKRAAIYARFSSDRQNDKSCRDQIDLASMWAQHNGFEIVNSYQDAAISGASTHNRPALAKLMRDAELGKFDTVICEALDRLSRDQADLAQIRKTLAFHNVTIHTVQDGEVGTIHIGIKGLMGELYLADLAQKTKRGLQAVVNDGRQAGGKSYGYDSIGGGELVINEKQAVVIERIFNEYSHNKTPREIARDLNADNIPSPRGGKWNASTINGSRQRQNGILQNHLYIGKTVWNRQRFIKDPSTGKRVSRANPPEEWVYHDAPDLRIIEDELWHAVTNLKTSKSQSQYKRARKPKHVFSGMIKCGCCGASYTIFTTDRLMCAGNRERGDCDNKRTITRQHIEKRVLSALHAHLAEPELIVEYVKAYQDERRRLQKSERGDFQKKKKQINSLTIEIDRGVDLLLKGLAPDSLALKIKQMEVEKKHLEEELAQQQQRIEPVIIHPAAAEKYKNIVASLQSHMENIEEGLSRDDIFREVRKMVDKIVITPTPGNVGIEVHGQLAALLNIQDDPICMGSMVAGA

SEQ ID NO: 12617 - DNA, 50 bp, Methylophaga thiooxydans
  source 1..50: mol_type = genomic DNA
ttgtatgggatcgatggtagcgggggcttgcaacaagcaataccatacat

SEQ ID NO: 12618 - DNA, 40 bp, Methylophaga thiooxydans
  source 1..40: mol_type = genomic DNA
aatctaagttggtagcgggggctggatttgaaccaacgac

SEQ ID NO: 12619 - DNA, 50 bp, Methylophaga thiooxydans
  source 1..50: mol_type = genomic DNA
ttgtatgggatcgatggtagcgggagcttgcaacaagcaataccatacat

SEQ ID NO: 12620 - DNA, 40 bp, Methylophaga thiooxydans
  source 1..40: mol_type = genomic DNA
aatttaagttggtaacagaagtaggaattaaaccaaagac

SEQ ID NO: 12621 - protein, 509 aa, Virgibacillus massiliensis
MRIAIYYRVSTKLQEKKFSLPAQKEELRSYAHKENWTIINEFKDVESGGKLKKDGLNALLDLVEEGGIDAVLCIEQDRLSRLDTVSWEYLKDTLRENKVKIAEPGVLIDLDNEDDVFISDIKNLIAQRDKRNVVKKMMRGKRQRLREGKGWGVPPFEYRYNKESETYEAKKDWKWTIPFIDNLYLNEQLGMKLISDKLNEISPTPTGKKWNEHLVHTRLSSKAFHGISEKSFVNGELISANVYEPLRSEETYNQIQEERAKRGKQFSVAGRKNSTNIHMLKRSQLTCGHCGRKILIETHGLKTKPLYYAKHGRKMSIKDGHVCDISINTVRFDSNIIQALKEVLTSEELAKKYIDIEYDEQEINKLKAEIKDHEKTITDLKGSADRLLDIYLSGDLKKDKYVQKEKEIAAKIEFQEVALNKLNRKLTAIDSSSFTYESLYQYMEIAKNIETELTALQRAQLMGTLFPKGIVYKEKLILITEIFKGIPIEITVPIKDDPYTWHHKKKFNV

SEQ ID NO: 12622 - DNA, 50 bp, Virgibacillus massiliensis
  source 1..50: mol_type = genomic DNA
taagggtgttaccccctattaatcgaaatgagtataggcaattacccatt

SEQ ID NO: 12623 - DNA, 40 bp, Virgibacillus massiliensis
  source 1..40: mol_type = genomic DNA
tcgtgggtttactttaatcgaaatgttaattgtgctgatg

SEQ ID NO: 12624 - DNA, 50 bp, Virgibacillus massiliensis
  source 1..50: mol_type = genomic DNA
taagggtgttaccccctattaatcagaatgagtataggcaattacccatt

SEQ ID NO: 12625 - DNA, 40 bp, Virgibacillus massiliensis
  source 1..40: mol_type = genomic DNA
tagtgtctccagtttattcagaatgttaattttgctgata

SEQ ID NO: 12626 - protein, 571 aa, Peptostreptococcus anaerobius
MDNNSDIRVAIYIRVSTLYQIDKDSLPMQREDLTNYCKYIFNTEDYEIFEDAGYSGKNTGRPAYQEMMLKIRKKQFTHLLVWKIDRISRNLLDFSNMYEELNKYNVTFISKNEQFDTSSAMGEAMLKIILVFAELERKLTSERVSSTMISRATKGLWNGANVPLGYKWNEEKKYPSPDEKEAKVVQYIYSTYIQCKSCSKVSKILNEEDIPTKRGGKWTSKTVNDILRNPFYKGTYRYNYKESARGKKKDESEWIVIDNNHEAIIDKAIWQLANETLDTNAGLVGRRYVGKIHTHIFSRKLVCSKCKSGYNASKDTMRENGYTPSKYVCSGKVRKFICDAKLVSDVVLGPFVLTLIKNIILAGNMCIDTTDELEDILLDGSPFEDVLSINQEDLEMLYVALYKVPTQKSNITYSHIKDKQPKSLEDQENEYVKKRIEKFKKEKTKYINALERLEELYMFSEEGISKVDYVIKKKEYESKLNNSEENLKQFYRMNDTEKNIQDMTFILNYENIIFNRAMNDNNELDFKMLMTNVNNKVVKDLIDMVIKNIYMNDKAVDIIEFQNGLALHFNY

SEQ ID NO: 12627 - DNA, 50 bp, Peptostreptococcus anaerobius
  source 1..50: mol_type = genomic DNA
gttgaggcaacatacggacatccgaatgtcaggcagaaatacgattttcg

SEQ ID NO: 12628 - DNA, 40 bp, Peptostreptococcus anaerobius
  source 1..40: mol_type = genomic DNA
ctcattcatttgacatccaaatgtttgcatgataaaagat

SEQ ID NO: 12629 - DNA, 50 bp, Peptostreptococcus anaerobius
  source 1..50: mol_type = genomic DNA
gttgaggcaacatacggacatccgcctgtcaggcagaaatacgattttcg

SEQ ID NO: 12630 - DNA, 40 bp, Peptostreptococcus anaerobius
  source 1..40: mol_type = genomic DNA
ctcattcatttccaagatgcctgttagcatgataaaaaat

SEQ ID NO: 12631 - protein, 617 aa, Aerococcus urinae
MRNFEKITALYERLSRDDELQGESNSIINQKKILEEYASKNNLSNIIHFTDDGISGTQFDRPGFMEMMNGVNTGNIGCIIVKDMSRLGRDYLKVGQCMEILRQKGVRLIAINDNVDSFYREDDFTPFRNIMNEWYARDTSRKIQSTFRSKGESGKHTASTPPYGYIKDEKDKDKWIVDEKAAEIVRRIFNLTMDGAGPYKIAKILEADKIDIPAYHQKKLGYGLHQSKNFEYPYRWCSSTIASILKKKEYLGHTVNFKTRKHFKDKKSKYVSEDNWLIFENTHEAIIDQETFDNVQRIRGNVKRYPDGWGEYHPLTGLMYCADCGSKMYVHRTNNYKNIPYYVCSNYKKVPCGTLCPSAHRIKAEVVLNLIQETLKDIKNYLDEDNEAFTRSIQNEMEEKEKAHIEKKKIRLTESQNRLQELERLMCRIYEDMILNKIPNNRYEILNNQYETEQLTLSKEIKDLELVISRYEKETDKARKFISLISRYENFDNLTNTMINEFVKKIIIHERDRKGSQTSKQKIEIYFNFIGNYEVPKEELSEEERSKLEEEERKINERRDRLHQNYLKRKANGKQQEYEERYKERREQKKQEKLKVLKRAGILMKDYKNKESFKESV

SEQ ID NO: 12632 - DNA, 50 bp, Aerococcus urinae; identical to SEQ ID NO: 9697
  source 1..50: mol_type = genomic DNA

SEQ ID NO: 12633 - DNA, 40 bp, Aerococcus urinae
  source 1..40: mol_type = genomic DNA
agaaatacaagttggcagcaggaaaaactgctaaatcaat

SEQ ID NO: 12634 - DNA, 50 bp, Aerococcus urinae; identical to SEQ ID NO: 12464
  source 1..50: mol_type = genomic DNA

SEQ ID NO: 12635 - DNA, 40 bp, Aerococcus urinae
  source 1..40: mol_type = genomic DNA
agaaaaacaagtcattatcttgaaaaactggtaaataact

SEQ ID NO: 12636 - protein, 501 aa, Clostridium algidicarnis
MKGVCIYLRKSRADEELEKSLGEGETLSKHRKALLKFAKDKKINIVEIKEEIVSGESLFFRPKMLELLKEVEDKKYSGVLVMDMQRLGRGDMQDQGLILKTFKDSHTLIVTPQKTYDLHNDFDEEYSEFEAFMSRKELKMINRRMQGGRVRSIEEGNYISPTPPYGYDIHFINKNRTLKVNKDESEIVKLILNMYLEGNGAGIIANHLNSLGCKTKFGNSFSSSSVLFILKNPVYIGKVTWKKKEIKKSKDIDKLTDTRTRDIDEWIIADGKHEAIIKEDIFNKATEILKGRYHVPYKLTNGMANPLAGIVICSVCGNKMVLRKSRGVDRILCNKSCGNKSVRYDYLENAMLTALDDYLKEYKINIKNNKPNNNVKAYEVQLEVNRNELENLNNQKLKLFDLLERGIYDDDTFLERTKNLDDRIKSIKDNVNKLVSAVEKDSKTATKKDIIKFENTIQAYKVATNIQLKNTLIKNILHKVEFKKEKHQRDNNFTIEIYPRV

SEQ ID NO: 12637 - DNA, 50 bp, Clostridium algidicarnis
  source 1..50: mol_type = genomic DNA
aacatacaacatgcttaacgctattcattgccttctacatgttatatact

SEQ ID NO: 12638 - DNA, 40 bp, Clostridium algidicarnis
  source 1..40: mol_type = genomic DNA
aacatccattagtgatatttcattgccttccttatcaata

SEQ ID NO: 12639 - DNA, 50 bp, Clostridium algidicarnis
  source 1..50: mol_type = genomic DNA
aacatacaacatgcttaacgctattaattgccttctacatgttatatact

SEQ ID NO: 12640 - DNA, 40 bp, Clostridium algidicarnis
  source 1..40: mol_type = genomic DNA
atcatccaatagtgatttttaattgacatctttttaaaaa

SEQ ID NO: 12641 - protein, 501 aa, Clostridium algidicarnis
MKGVCIYLRKSRADEELEKSLGEGETLSKHRKALLKFAKDKKINIVEIKEEIVSGESLFFRPKMLELLKEVEDKKYSGVLVMDMQRLGRGDMQDQGLILKTFKDSHTLIITPQKTYDLHNDFDEEYSEFEAFMSRKELKMINRRMQGGRVRSIEEGNYISPTPPYGYDIHFINKNRTLKVNKDESEIVKLIFNMYLEGNGAGIIANHLNSLGCKTKFGNSFSSSSVLFILKNPVYIGKVTWKKKEIKKSKDIDKLTDTRTRDIDEWIIADGKHEAIIKEDIFNKATEILKGRYHVPYKLTNGMANPLAGIVICSVCGNKMVLRKSRGVDRILCNKSCGNKSVRYDYLENAMLTALDDYLKEYKINIKNNKPNNNIKAYEVQLEVNRNELENLNNQKLKLFDLLERGIYDDDTFLERTKNLDDRIKSIKDNVNKLVSAVEKDSKTATKKDIIKFENTIQAYKVATNIQLKNTLIKNILHKVEFKKEKHQRDNNFTIEIYPRV

SEQ ID NO: 12642 - DNA, 50 bp, Clostridium algidicarnis; identical to SEQ ID NO: 12637
  source 1..50: mol_type = genomic DNA

SEQ ID NO: 12643 - DNA, 40 bp, Clostridium algidicarnis; identical to SEQ ID NO: 12638
  source 1..40: mol_type = genomic DNA

SEQ ID NO: 12644 - DNA, 50 bp, Clostridium algidicarnis; identical to SEQ ID NO: 12639
  source 1..50: mol_type = genomic DNA

SEQ ID NO: 12645 - DNA, 40 bp, Clostridium algidicarnis; identical to SEQ ID NO: 12640
  source 1..40: mol_type = genomic DNA

SEQ ID NO: 12646 - protein, 501 aa, Clostridium algidicarnis
MKGVCIYLRKSRADEELEKSLGEGETLSKHRKALLKFAKDKKINIVEIKEEIVSGESLFFRPKMLELLKEVEDKKYSGVLVMDMQRLGRGDMQDQGLILKTFKDSHTLIITPQKTYDLHNDFDEEYSEFEAFMSRKELKMINRRMQGGRVRSIEEGNYISPTPPYGYDIHFINKNRTLKVNKEESEIIKLIFNMYLQGNGAGIIANHLNTLGCKTKFDNNFSAASILFILKNPIYIGKVTWKKKEIKKSKDVDKLTDTRTRDIDEWIIADGKHEAIIKEDIFNKATEILKGRYHVPYKLTNGMANPLAGIVICSVCGNKMVLRKLRGVDRILCNKSCGNKSVRYDYLENAMLTALDDYLKEYKINIKNNKPNNNVKAYEVQLEVNKNELENLNNQKLKLFDLLERGIYDDDTFLERTKNLDDRIKSIKDNVNKLVSAVEKNSKTATKKDIIKFENTIQAYKVATNIQLKNTLIKNILHKVEFKKEKHQRDNNFTIEIYPRV

SEQ ID NO: 12647 - DNA, 50 bp, Clostridium algidicarnis
  source 1..50: mol_type = genomic DNA
aacgtacaacatgcttaacgctattcattgccttctacatgttatatact

SEQ ID NO: 12648 - DNA, 40 bp, Clostridium algidicarnis; identical to SEQ ID NO: 12638
  source 1..40: mol_type = genomic DNA

SEQ ID NO: 12649 - DNA, 50 bp, Clostridium algidicarnis
  source 1..50: mol_type = genomic DNA
aacgtacaacatgcttaacgctattaattgccttctacatgttatatact

SEQ ID NO: 12650 - DNA, 40 bp, Clostridium algidicarnis; identical to SEQ ID NO: 12640
  source 1..40: mol_type = genomic DNA

SEQ ID NO: 12651 - protein, 576 aa, Enterocloster clostridioformis
MVTNEKSYVNMEPCTMGLSADQHVKEDVMLDQQKITILYCRLSNEDAMDGESNSIQNQRELLTRYAQDHGYTNIKVLVDDGYTGTNFNRPAVKEGLELVKQGEVGCWIVKDMSRFGRDYLTVGQYTEIIFPSYDVRFIAVNDGVDSNRGDNEGITAIRNLFNEWYPRDTSKKVRVSLRQRGTSGKHMGKPPYGYRRDPEDKEQWIPDEDAAPVVKRIFDLTVAGKGPSQIARILERDGVLTARALYAKRKGKPLPDQPYHWGEQSIVGILERMEYTGCVCNFKTYSKSYKLKKRIPNKQEDMFILPDTQEAIVSREQWDRVQELRQNKRRPTKAERQGFFAGLLYCADCGSKLHFATSKSFEGKQDHYVCAKYKSGRGTCSAHYIREEVLRDAVLERIRAVNEYIREDAESFQEEWLQCRRADQERGIREDKKRLAQAKKRLADLDVLISRCYEDSVLGNLSMERYKKMSADYEAEQERLKLEIEVTEEWVQQQEEMDTNLDSFIALTEKYVDVPELTQTIVNEYIKKIVVFPPDKSDGKRRQKIKIYFNFLDEFEIPALEQSVTLEQTYGRRKTA

SEQ ID NO: 12652 - DNA, 50 bp, Enterocloster clostridioformis
  source 1..50: mol_type = genomic DNA
atagttacttgtcactattagtccttggctttatagtgataaggaacaag

SEQ ID NO: 12653 - DNA, 40 bp, Enterocloster clostridioformis
  source 1..40: mol_type = genomic DNA
acaaaaaccgcgaaaaccattgattttacgtggttttcac

SEQ ID NO: 12654 - DNA, 50 bp, Enterocloster clostridioformis
  source 1..50: mol_type = genomic DNA
atagttacttgtcactattagtccgaggctttatagtgataaggaacaag

SEQ ID NO: 12655 - DNA, 40 bp, Enterocloster clostridioformis
  source 1..40: mol_type = genomic DNA
aaaaaaacagctaacaccagacattttaggtgctttccat

SEQ ID NO: 12656 - protein, 482 aa, Corynebacterium aurimucosum
MRVLGRIRLSKSTEESTSLERQKELIQSWATDNGHEVVAWAEDVDVSGSVSPFDAPALGPYLQHPGDKEWDTLVAWKLDRLARNSINMHRLFGWIQDHDKQLVCISDNLDLTTWVGRMVASVIAGVAEGELEAIRERVTASKKKLRAQGRWAGGTPPYGYRVAERDNGGGYELEIDPEAYEILREIVERFINGDSANAIVEDLNRRGVTSPRDRMNGTNTGIQWSSQAVRRMLGSRTLLGWTTHEGRPVLDPEGKPILKAPPVVTNEEYEQLQATLQGRRWAKVAKDRTSPLLGVLECWHCGARMYHRRARNKASGGYYCSAGCKQYSVNDNTIHSMVEELFFEELGDFEVLEKVTVFASDVSRELEEAQETYQELASFITSTTNATARATLFQQLSTLEARINELEAQDQQEETTEYHGTGITYQQRWQELDTEQRRQLMISSGLRVRAQQLNRGTRHGPGMLQTEFIVPPDLRERLRIPA

SEQ ID NO: 12657 - DNA, 50 bp, Corynebacterium aurimucosum
  source 1..50: mol_type = genomic DNA
caaacacaatcgtgaactacagccgtctctgtggttcgtgatagtgtcta

SEQ ID NO: 12658 - DNA, 40 bp, Corynebacterium aurimucosum
  source 1..40: mol_type = genomic DNA
tatctatgccacggcagccgtagccgtctttcctttcctc

SEQ ID NO: 12659 - DNA, 50 bp, Corynebacterium aurimucosum
  source 1..50: mol_type = genomic DNA
caaacacaatcgtgaactacagccccctctgtggttcgtgatagtgtcta

SEQ ID NO: 12660 - DNA, 40 bp, Corynebacterium aurimucosum
  source 1..40: mol_type = genomic DNA
tgactatgcctcagccaccccaggcttctttccattcctc

SEQ ID NO: 12661 - protein, 662 aa, Corynebacterium matruchotii
MTTPTDPLVTMAASLEPKRAISYIRVSTHGQASRGDAAEGFSIPAQREANKRKASQLGALIIKEFIDRGESARSAKRPELQNMLGYIKEHPEVDYVIVHKLDRLARNRVDDVDINRVFDECNVRLISTSENIDQTPGSMLLHGIMSAIAEFYSRNLGHEVTKGMSQKAKNGGTNGRATLGYVNKRGKNGDGKDTAWVEIDPERGPHITEAFRLYATGDWTVAKLAAHLEAAGLTSRATSRHPSRPLGKNQLLGILRNPYYRGVVVYQGAEYPGKHPALIDTETWLLVQSVLTSHYHGERNRTHNHHLKTTVRCGLCGNRLTIQNSTNRHDTTYAYFVCRYRSRHQPKCGFHAALIDAVDEQVAGIYKTIRITTGQRQHIEKHLLAELDRIYAQQAAASKNLTNQRERLKAEQAKLLQAHYADAIPLELMKQEQQRITRQICTIDKEIAGYTANRQQVEDHLAQALDLLEDCHKLYQHAPAHLKKMLNNVFFEQVLINPPEANGLDGAGGTGQMIANDRELVASDGWAALHDGELVGVSTGEQFGNSIESARSEKAYSHLNSQADSSSVQAVPHINPPFDVLGNPVLQAEIFNSGQNADLATGTDRTQPDDKYPEQAQNLELSLQAASTNLNNLLQTPDTTKQKSPPEKHHSDEGLDMRIMVG

SEQ ID NO: 12662 - DNA, 50 bp, Corynebacterium matruchotii
  source 1..50: mol_type = genomic DNA
ggtttggatatgcggattatggtgggcctcaacaaccttgattcgaacct

SEQ ID NO: 12663 - DNA, 40 bp, Corynebacterium matruchotii
  source 1..40: mol_type = genomic DNA
ggtgagggttatcattgtgggccctgtggggttcgaaccc

SEQ ID NO: 12664 - DNA, 50 bp, Corynebacterium matruchotii
  source 1..50: mol_type = genomic DNA
ggtttggatatgcggattatggtgtacctcaacaaccttgattcgaacct

SEQ ID NO: 12665 - DNA, 40 bp, Corynebacterium matruchotii
  source 1..40: mol_type = genomic DNA
ggagaggggtaccatagtgtagaatgtgggcttagaaccc

SEQ ID NO: 12666 - protein, 556 aa, Clostridium scindens
MVKMENKRQPYIDAALGEKITALYCRLSRDDELQGDSNSIINQKAILKKYADDNGFTNTQFFVDDGYSGTNFERPDFQRLMALVDEGAVGIIIVKDMSRLGRDYLKVGYYTEMVFPESDIRFIAINNGVDSASQQDSDFTPFLNIINEWYAKDTSKKIRAVFKAKGQAGKPLCTNTPYGYKKDPEDKNHWIVDEDAAVVVKEIFHLCISGYGPTQIAKELKKRKVLTPVDYAKSNGRNAPAVKQTDDLYKWTTSTVVHILERQEYLGNTVNFKTHRKSYKLKKQIKNDKDEWQIFEGTHEAIIDKETFDIVQRIRDGRRRFTPMGEMPTLSGMVYCADCGSKMYQVRARGWEHEKEHLVCSTYRKRGKSNCTSHQIRNVVIEQLLLDDLRRVTAYAREHEAEFIQLVTNTSEKALNRELRSSQKEYEQAKARITALDKIIQRLYEDNVVGKISDERFAKMSATYEAEQKALESRIAELDEFITTAKEKSLNAEYFLQLVQKYTDIKELDAEIIREFVEKIIVFKAEKVDGHRMQRIQIIYNCIGAVEIPSKHEKTA

SEQ ID NO: 12667 - DNA, 50 bp, Clostridium scindens
  source 1..50: mol_type = genomic DNA
ataaatccctaagacgcaccaccaaaagggagtgcaacttagggatttga

SEQ ID NO: 12668 - DNA, 40 bp, Clostridium scindens
  source 1..40: mol_type = genomic DNA
tctttgcaaacgactccccaatggcagttcctttttttct

SEQ ID NO: 12669 - DNA, 50 bp, Clostridium scindens
  source 1..50: mol_type = genomic DNA
ataaatccctaagacgcaccaccagtagggagtgcaacttagggatttga

SEQ ID NO: 12670 - DNA, 40 bp, Clostridium scindens
  source 1..40: mol_type = genomic DNA
tctttacaaacaactcccagttagtatttcccaattttct

SEQ ID NO: 12671 - protein, 542 aa, Vibrio hyugaensis
MKTAYSYIRFSSSRQADGDSIRRQTELARAYAEEHELDLQDVSISDFGVSAFRGSNATEGALGAFLKLVDEQKIDSDCYLLVESFDRLSRQAVEDALALLLQVVNRGITLVTLSDNHVYKRGELDMTMLILSIVTMSRANEESEIKSQRTSAAWSKARIDALNGIKVKNSRLPDWLSWNEDKTDFVVNQPAKATIQRMFELSAGGSGIEIIAKTLNSEGLKTFKQFKEWRSSGVSKLLRNRAIVGEFQFYRKDAKGNRVAVGEPIAGYYPEVVSKQLFLTVQQGMDLRNRRGSGNRAGQFTNLFTGLIRCGECGSAVVTSSQTTKTPQGYLKCTMRCESKARMNYKYTEPQVLSALGSLQSVIEKYRTPISDETASIELDVRALDEKVTTFESLLDNAFTPKLAERLQEAELQLANAKALLESERQRVSAEQSREQIVLGLEPLESTDDRRAFNSKLRTVIDRIEMIEHPHEKGSALVYFINDCPVMEQHFTKLKGAHGTSSEVYELHSDDVPSHLGRTTSKKPLEFIIEESGDVLSFMPAQ

SEQ ID NO: 12672 - DNA, 50 bp, Vibrio hyugaensis
  source 1..50: mol_type = genomic DNA
ttgtacggaagtgtctaaaaagcgtcgcaatttgcgggggttccgtacat

SEQ ID NO: 12673 - DNA, 40 bp, Vibrio hyugaensis
  source 1..40: mol_type = genomic DNA
tttggcttttttaattgtgtcgcaatttgggatgccgaac

SEQ ID NO: 12674 - DNA, 50 bp, Vibrio hyugaensis
  source 1..50: mol_type = genomic DNA
ttgtacggaagtgtctaaaaagcgtggcaatttgcgggggttccgtacat

SEQ ID NO: 12675 - DNA, 40 bp, Vibrio hyugaensis
  source 1..40: mol_type = genomic DNA
tatggcttttttaatggtttgccaaatttagatgcagaaa

SEQ ID NO: 12676 - protein, 503 aa, Eubacterium limosum
MNNRIDVIYARQSVDKKDSISIESQIEFCKYELKGGNCKEYTDKGYSGKNTDRPKFQELVRDIKRGLIAKVVVYKLDRISRSILDFANMMELFQQYNVEFVSSTEKFDTSTPMGRAMLNICIVFAQLERETIQKRVTDAYYSRSQRGFKMGGKAPYGFHTEPIKMEGINTKKLVVNPEEAANIRMMFEMYTDPATSYGDITRYFAEQGILFYGKELIRPTLAQMLRNPVYVKADFDVYEFFKSQGTVLVNDAADFTGMNGCYLYQGRDVKPDKLHNLKDQMLVLAPHEGIVPSETWLACRKKLMNNMKIQSARKATHTWLAGKIKCGNCGYALMSIVNRVGRQYLRCTKRLDNKSCVGCGKIYTSELETVVYQQMVKKLESHKTLTGRKKAAKANPKIAALQVELAHVDGEIEKLVDSLTGANNVLLSYVNVKIAELDGRKQELVKRIADLTVEAISPEQVSQISGYLDTWDSVSFDDKRRVVDLMITTIAATSDSLNITWKI

SEQ ID NO: 12677 - DNA, 50 bp, Eubacterium limosum
  source 1..50: mol_type = genomic DNA
ccgccctcaactggcttaagccataaatgaggaccacccgtcaaacgggt

SEQ ID NO: 12678 - DNA, 40 bp, Eubacterium limosum
  source 1..40: mol_type = genomic DNA
ttataacataaagaaaaacaataaaaaaccgccgcattgc

SEQ ID NO: 12679 - DNA, 50 bp, Eubacterium limosum; identical to SEQ ID NO: 12677
  source 1..50: mol_type = genomic DNA

SEQ ID NO: 12680 - DNA, 40 bp, Eubacterium limosum
  source 1..40: mol_type = genomic DNA
tcaaaacaaaaaacaaaacaaaaaaaaaccggcgcagtgg

SEQ ID NO: 12681 - protein, 528 aa, Ligilactobacillus salivarius
MAKVRIIPAQVKQGNRNRQIEETEAKLKVAAYCRVSTLYEDQASSYETQVAHYKEYITKNPKWELAGIYADDGISGTDTKKRNQFNQMIDDAKQGKIDLIVTKSISRFARNTIDCLQYIRELKELHVAVFFEKENINTMDAKGEVLITIMASLAQQESESISRNIKIGLQYRYQRGQVIVNTARFLGYDKDDDGNLVINPEQAKVVKRIFYECLTGKSAIEIARELTKEGLKNGIGRTKWHSSGIIKILRNEKYIGDALLQKTYTVDFLTKKRVKNDGQVPQYYVENNHPAIISRALFYQVQKLLDMRREGFTTEGGHHHGYTNAYCFSSIVFCGRCKDIYTRCVWYRPKIGEVEKVNVWRCYSRLHWNHKGKRCMGRTITEADLEEASLKAMNELIQQHQLADKQIAANILKVTKGTTGPSLDDLDQQLEDQQLLLLSMSTHNKNVEQLTEQVQALRKQREQLIQQEIDHDIKRSYLKNIQSFFQTYQGGLTKFDEKLVRLLIEKITIFKSKIEFTFKDGEVITIKA

SEQ ID NO: 12682 - DNA, 50 bp, Ligilactobacillus salivarius
  source 1..50: mol_type = genomic DNA
tttcgcagttcaagcaccgttacgctctcaacatgtggcgtccgactcat

SEQ ID NO: 12683 - DNA, 40 bp, Ligilactobacillus salivarius
  source 1..40: mol_type = genomic DNA
atgctccaacacagtaacactctcaacatgcgttgtttgt

SEQ ID NO: 12684 - DNA, 50 bp, Ligilactobacillus salivarius
  source 1..50: mol_type = genomic DNA
tttcgcagttcaagcaccgttacggcctcaacatgtggcgtccgactcat

SEQ ID NO: 12685 - DNA, 40 bp, Ligilactobacillus salivarius
  source 1..40: mol_type = genomic DNA
attctcacacacagtatatgcctcaacctgccttgtttat

SEQ ID NO: 12686 - protein, 540 aa, Roseburia intestinalis
MKQPYNTTIYNTALYLRLSRDDELQGESGSIQTQRMMLRQYAAEHGLTVVDEYIDDGWSGTNFERPSFQRMIDDIEDGKINCVVTKDLSRLGRNYILTGQYTEIYFPSKGVRYIAINDNVDTINGESELAPFLNILNEMHARQTSKKVKAAMHTRFANGAHYGAYAPLGYVKDPDKKGHLLIDPETRWIVEKIFDLAVHGRGAASITRILVEEKVPTPGWLNYERYGTFANIYAGAPAEKAYAWTIAQVKSILKEETYIGHSVHNKQSNISFKNKKKVRKPQEEWYRVENTHEAIISEEVFQKVQELIASRRRKRRNGTTQIFAGLIKCADCGWSLAYGENKQNKNPYGYYHCSKNGQGLRQCSMHYIRYDVLYAYVLARLQYWSMLAQKDEDKLLKRLLNVSDRERNSAKKKQAAELKKAEKRKAEVDGLFAKMYEDWSAGRITEYNFNMLSEKYQNEQKELETKIRQLHEMMEAAVQTAADAEKWIALMKQYVNPVELTAELLNTLIEKITVHEAVKGEDGSREQEVEIYYRFIGKID

SEQ ID NO: 12687 - DNA, 50 bp, Roseburia intestinalis; identical to SEQ ID NO: 3657
  source 1..50: mol_type = genomic DNA

SEQ ID NO: 12688 - DNA, 40 bp, Roseburia intestinalis
  source 1..40: mol_type = genomic DNA
agtttccaaatgggaacgtgggatttgtttaccagatgtg

SEQ ID NO: 12689 - DNA, 50 bp, Roseburia intestinalis
  source 1..50: mol_type = genomic DNA
caatatctttaattaagggaaacggtagtttcccatagttaaagatacca

SEQ ID NO: 12690 - DNA, 40 bp, Roseburia intestinalis
  source 1..40: mol_type = genomic DNA
tttttaaaaatgggaacaagtgattactataccagatgtg

SEQ ID NO: 12691 - protein, 537 aa, Roseburia intestinalis; identical to SEQ ID NO: 1706

SEQ ID NO: 12692 - DNA, 50 bp, Roseburia intestinalis; identical to SEQ ID NO: 1707
  source 1..50: mol_type = genomic DNA

SEQ ID NO: 12693 - DNA, 40 bp, Roseburia intestinalis; identical to SEQ ID NO: 12688
  source 1..40: mol_type = genomic DNA

SEQ ID NO: 12694 - DNA, 50 bp, Roseburia intestinalis
  source 1..50: mol_type = genomic DNA
tcatatctttaactaagggaaactgtagtttccccaacaaaaggatatta

SEQ ID NO: 12695 - DNA, 40 bp, Roseburia intestinalis; identical to SEQ ID NO: 12690
  source 1..40: mol_type = genomic DNA

SEQ ID NO: 12696 - protein, 608 aa, Streptococcus anginosus
MRDFEKITALYERLSRDDELQGESNSIVNQKKILEEYASKNNLSNIIHFTDDGISGTQFDRPGFMAMMNGVNQGNIGCIIVKDMSRLGRDYLKVGQCMEILRQKGVRLIAINDNVDSFYREDDFTPFRNIMNEWYARDTSRKIQSTFKSKGESGKHTASSPPYGYIKDEKDKDKWIVDEKAAEIVRRIFNLTMQGNGPYRIAKILESEKVDIPAYHQQKLGYGLYQSKNFEYPYRWCSSTIASILKKQEYLGHTVNFKTRKHFKDKKSKYVSEDNWLIFENTHEPIIDQETFDNVQRIRGNVKRYPDGWGEYHPLTGLMYCADCGSKMYVHRTSNYKNIPYYVCSNYKKVPCGTLCSSAHRIKAEAVLTLIQETLKDIKKYLDEDNEVFIRSIQNEMEEKEKIEIEKKLTRLIDSKGRLQELERLMCRIYEDMILNKIPNSRYEILNNQYEMEQITLSKEIKDLELAISRYEKETDRARKFISLINRYENFEELTTTTINEFVEKIIVHERDRKGSQTSKQKIEIYFNFIGNYELPQMKLSEEEKQKLEEEERKINERKDKLHQNYLKRKASGKQKEYEDKYKARREQRKQEKLKALKRVGIPARDFQ

SEQ ID NO: 12697 - DNA, 50 bp, Streptococcus anginosus; identical to SEQ ID NO: 62
  source 1..50: mol_type = genomic DNA

SEQ ID NO: 12698 - DNA, 40 bp, Streptococcus anginosus
  source 1..40: mol_type = genomic DNA
aaatataaacttgctgccggaaaaacagcaaaatctattc

SEQ ID NO: 12699 - DNA, 50 bp, Streptococcus anginosus; identical to SEQ ID NO: 62
  source 1..50: mol_type = genomic DNA

SEQ ID NO: 12700 - DNA, 40 bp, Streptococcus anginosus
  source 1..40: mol_type = genomic DNA
taatataaactagaaggctgaaaaatatcaaaatctattt

SEQ ID NO: 12701 - protein, 580 aa, Cronobacter sakazakii
MKKCYLYVRVSSDQQIQGDGLDRQESMLINYFKDNAAAQDFDPQYEVIRDEGRSAFKAEHLQENAGLGKFFKQVKEGLIQPGSVLIVESLDRFSRENPFRCVEYISHLDKKQIELHDVDKRLIISRRHSNSLTFATMIAERAYEESRLKSYRIRKGWDKRRRMAKEEGQYMIKNCPPWISIVNKKYELNDNSKIIRDIFELYLSGIRSFNISKMMNDSGRLINGKLWTGTKICRVLRNVRCKGDYITNITDRNFDDDTIKVTSDILKIYPAVVSDDEFREVQRRLEGHNYSGRIRNDLKKTLFSYVVKCSYCGSALSMSTTGKYTYLKCSNSRENNGCFASMLPYMPFEKAMLKHIKDIDIAAVLNNTERTFNEIDKIKSEIVELEKNIDEYVQGIAKRKKQGQLIPFAMLDEQSQAEDKLKALKESLSTKLESASITHVEFSDDVHDVKNIEERARLEVELKKVIKRIDILSESKKKFIIADVQYYNDDHIKHVLLLNKKNGTINAVGEISQKNGWRIYSFSENNRLIFRVESNGDIWTVQARNDQSIEDIRTYMTMMVGREPDGFDYHLNENFIEWIE

SEQ ID NO: 12702 - DNA, 50 bp, Cronobacter sakazakii; identical to SEQ ID NO: 11592
  source 1..50: mol_type = genomic DNA

SEQ ID NO: 12703 - DNA, 40 bp, Cronobacter sakazakii
  source 1..40: mol_type = genomic DNA
tttgatggtgtcgcagtttttaatgccgtacatcacgacc

SEQ ID NO: 12704 - DNA, 50 bp, Cronobacter sakazakii
  source 1..50: mol_type = genomic DNA
attttgtctaatgttcaatgtattccgataccatagagcttatacaaact

SEQ ID NO: 12705 - DNA, 40 bp, Cronobacter sakazakii
  source 1..40: mol_type = genomic DNA
cttgattctgtggcagcttccaatgcctttcatcacatcc

SEQ ID NO: 12706 - protein, 564 aa, Streptococcus suis
MNRTLTISDYRQVDTSRLSDITVVYCRLSQDDGLDGDSNSIINQKNILFEVVTREKLPNPVLFVDDGFSGTNFDRPAISEALRLVENGQVSNFIVKDLSRLGRSYIKVGQLTEITFPSFDVRFIALNDGIDSNKPNETNSIFLPIKSLMDEMYAADTSKKIRAVIQAKARAGERVTVNPPYGYLKDPNNPKNWIIDPVASKVVKRIFQEAKSGKSANEIGKLLEIEHIEKPDVYRIKNGRKPLSGVKNSNYSPYYWSRETITRLLGREEYLGHTVNLRKRSKSYKDKRQINNPKEDWLIFKNTHEAIIDQETFDIVQKMRSHKRSNQRYKNRLGHENLFAGLVFCGTCGRKHYFCPQEKNGLNHDHYKCSGYRRPIDGCENPHYIQKSALAEIVSYKLRQTIFEAQLDRENFLKKLEQQSQAQFSKDNKRQRQQLQKDEQRFKEIDRIIQQLYEDNLLGKISDERFVKLSQTYEEEQKQLQTSISDLTEKLAKQQEDSLNISKFMTRISKYTQVSELTVEMVNELIDKIVIHKPTGTKRNRIIQIDIYYNFIGKLTNEKASQTD

SEQ ID NO: 12707 - DNA, 50 bp, Streptococcus suis
  source 1..50: mol_type = genomic DNA
aaactgctaggtgtcagctcggctataagcagtgtgacgcttagcagtct

SEQ ID NO: 12708 - DNA, 40 bp, Streptococcus suis
  source 1..40: mol_type = genomic DNA
atgaagaaattgcccacctatatcggagtgattatttttg

SEQ ID NO: 12709 - DNA, 50 bp, Streptococcus suis
  source 1..50: mol_type = genomic DNA
aaactgctaggtgtcagctcggctacaagcagtgtgacgcttagcagtct

SEQ ID NO: 12710 - DNA, 40 bp, Streptococcus suis
  source 1..40: mol_type = genomic DNA
atgatgaatttagcctccaacatcagagtgattttttctg

SEQ ID NO: 12711 - protein, 458 aa, Staphylococcus aureus; identical to SEQ ID NO: 11826

SEQ ID NO: 12712 - DNA, 50 bp, Staphylococcus aureus
  source 1..50: mol_type = genomic DNA
cttttgtgcggaactacgaacagtttataaatacgaagtgtacaaacttc

SEQ ID NO: 12713 - DNA, 40 bp, Staphylococcus aureus
  source 1..40: mol_type = genomic DNA
aaaatgtatggaggcacttgtatcaacataggatgtatac

SEQ ID NO: 12714 - DNA, 50 bp, Staphylococcus aureus
  source 1..50: mol_type = genomic DNA
cttttgtgcggaactacgaacagtatataaatacgaagtgtacaaacttc

SEQ ID NO: 12715 - DNA, 40 bp, Staphylococcus aureus
  source 1..40: mol_type = genomic DNA
aaaatgaaaaaactatcttatatcaacataggatgaatac

SEQ ID NO: 12716 - protein, 553 aa, Clostridium beijerinckii
MKKSAIYVRVSTTHQIDKDSLPLQKNDMINYSKFILGIEEYEIFEDAGFSGKNTDRPAFQEMFKRIKQGEFSHLLVWKIDRISRNLLDFCSMYDELKRYNCTFISKNEQFDTSAAMGEAMLKIILVFAELERKLTGERVTSVMLDRASKGLWNGAPIPLGYKWDKNIKFPVIDDEEKNTVEIIYGTYLKSESSSAVTKLLNTSGIKTKKDGRWTTKTICDVIRNPFYKGTYRYNYRVPGHGKIKDENEWIIIPNNHDAIISEELWNNCNKIMDLNANKNSARFRRTSKVHIFAGLLECGECNNSFYAKSDKTSLDGYTPSLYTCSGRYNHLGCSQKTISDTIIGNFTLNFISNMIKISKSKKKMNSEELESKLLKGNCFKDIVGIEEIKDIYNSIFHSQSNTFKPAKKSDFNSPITNIDSNSLESELKKQQRALDRLEDLYLFEDNDMSKKDYFLKKNKITDKIKVLNKKINETQSIDASVYNFKFFLDVTTLELSTKLIEGNIKVKELIQNVGRELIKDFINNLIDKIVVKDRQVLSLQFKNGLNVTFIYNS

SEQ ID NO: 12717 - DNA, 50 bp, Clostridium beijerinckii
  source 1..50: mol_type = genomic DNA
ttcttctttacttctaccaacggacaaccgaatgtagaaataaagaagaa

SEQ ID NO: 12718 - DNA, 40 bp, Clostridium beijerinckii
  source 1..40: mol_type = genomic DNA
atcttcttcattcatttgacaaccataagtttgtataaag

SEQ ID NO: 12719 - DNA, 50 bp, Clostridium beijerinckii
  source 1..50: mol_type = genomic DNA
ttcttctttacttctaccaacggagaaccgaatgtagaaataaagaagaa

SEQ ID NO: 12720 - DNA, 40 bp, Clostridium beijerinckii
  source 1..40: mol_type = genomic DNA
ataatattacttcatttgtgaaccataagtttacctaaag

SEQ ID NO: 12721 - protein, 511 aa, Evansella clarkii
MRCAKYIRVSTHLQEKKFSLAAQQLELEEYAKKQGWKIIGEFKDVETGGKLNKKGLSKMLDLVEDGRIDVVLCIDQDRLSRLDTVAWEYLKSTLRDNNVKIAEPGTITDLGDEDQEFISDIKNLIARREKKSIVKRMMRGKRQRLREGKPWGKPPIGYTYNKETSTFHIDEKWAWVIPMIDRLYLEEQLGMKTIAHKLNEVSRTPRGTLWNETLVFRRLVSKAFHGVMEKKFSNGETIEIENIYPPLRTKETYERIQEERKKRGTIYKATSRRRENLNILRRTLVTCGLCGRKLSLQQNSPWHDPNYYLKHGRKQMGLKEEAVCDISVNTKRFEPNLIKAIKDILTDESFAMKYINLETTPDDLTELKQKTSIAKKNMQAVQEKIDRLLDLYLDGKFSKEQLDQRQKQLEIQLNQLEEEYKQATAKLEAYKRKEWNYETIYAYLEIAKDFDTDLTHLERAQLLGSLFPKAILYKEKIVLIGTINEELPLEIEIPIELDRYLWHHSKKKKGV

SEQ ID NO: 12722 - DNA, 50 bp, Evansella clarkii
  source 1..50: mol_type = genomic DNA
tttatgttcttgccccccttcatttcaatgactaggggtattaacatata

SEQ ID NO: 12723 - DNA, 40 bp, Evansella clarkii
  source 1..40: mol_type = genomic DNA
aacaaggacaatcatcatttcaattaaggtaaaccctttt

SEQ ID NO: 12724 - DNA, 50 bp, Evansella clarkii; identical to SEQ ID NO: 12722
  source 1..50: mol_type = genomic DNA

SEQ ID NO: 12725 - DNA, 40 bp, Evansella clarkii
  source 1..40: mol_type = genomic DNA
aacaatgccactcctcatttcatctaaggtaaattctgtt

SEQ ID NO: 12726 - protein, 500 aa, Bacillus amyloliquefaciens
MIAIYVRVSTEEQAIKGSSIDSQIEACIKKAGTKDVLKYADEGFSGELLERPALNRLREDASKGLISQVICYDPDRLSRKLMNQLIIDDELRKRNIPLIFVNGEYANSPEGQLFFAMRGAISEFEKAKIKERTSSGRLQKMKKGMIIKDSKLYGYKFVKEKRTLEIFEEEAKIIRMIFNYFTDHKSPFFGRVNGIALHLTQMGVKTKRGAKVWHRQVVRQILMNSSYKGEHRQYKYDTEGSYVSKQAGNKSIIKIRPEEEQITVAIPAIVPAEQWVYAQELLGQSKRKHLNISPHNYLLSGLVRCGKCGNTMTGKKRKSHGKDYYVYTCRKNYSGAKDRGCGKEMSENKLNRHVWDEIFKFITNPQKYASFKEIEQSNHLSDELELIQKEIEKTKKGRKRLLTLISLSDDDDLDIDEIKAQIIELQKKQNRLTEKCSEIQSKMKVLDDTSSSENALKRAIDYFQSIGADNLTLEDKKTIVNFIVKEVTVVDSDTVYIETY

SEQ ID NO: 12727 - DNA, 50 bp, Bacillus amyloliquefaciens
  source 1..50: mol_type = genomic DNA
caccccccttttgtaattacaatctcattattaattacaaaaggggggtg

SEQ ID NO: 12728 - DNA, 40 bp, Bacillus amyloliquefaciens
  source 1..40: mol_type = genomic DNA
gcgcaggtgcattaaaatctcattttcaatacatcgtgcg

SEQ ID NO: 12729 - DNA, 50 bp, Bacillus amyloliquefaciens
  source 1..50: mol_type = genomic DNA
caccccccttttgtaattacaatcagattattaattacaaaaggggggtg

SEQ ID NO: 12730 - DNA, 40 bp, Bacillus amyloliquefaciens
  source 1..40: mol_type = genomic DNA
aagcaggtgagttacaatcagatcttcaatacttcatgct

SEQ ID NO: 12731 - protein, 500 aa, Bacillus amyloliquefaciens
MIAIYVRVSTEEQAIKGSSIDSQIEACIKKAGTKDVLKYADEGFSGELLERPALNRLREDASKGLISQVICYDPDRLSRKLMNQLIIDDELRKRNIPLIFVNGEYANSPEGQLFFAMRGAISEFEKAKIKERTSSGRLQKIKKGMIIKDSKLYGYKFVKEKRTLEIFEEEAKIIRMIFNYFTDHKSPFFGRVNGIALHLTQMGVKTKKDAKVWHRQVVRQILMNSSYKGEHKQYKYDTEGSYVSKQAGNKSIIKIRPEEEQITIAIPAIIPTEQWDYAQELLGQSKRKHLSISPHNYLLSGLVRCGKCGNTMTGKKRKSHGKDYYVYTCRKNYSGAKDRGCGKEMSENKLNRHVWSEIFNFITNPEKYSAFKEVEQSNHLYDELELIQKEIEKTKKGRKRLLTLISLSDDDDLDIDEVKVQIIELQKKQNQLTGKCNEIQSKMKVLDDTSSSENALKRAVDYFQSIGAENLTLEDKQTIVNFIVKEVLVVDSDTVYIETY

SEQ ID NO: 12732 - DNA, 50 bp, Bacillus amyloliquefaciens; identical to SEQ ID NO: 12727
  source 1..50: mol_type = genomic DNA

SEQ ID NO: 12733 - DNA, 40 bp, Bacillus amyloliquefaciens; identical to SEQ ID NO: 12728
  source 1..40: mol_type = genomic DNA

SEQ ID NO: 12734 - DNA, 50 bp, Bacillus amyloliquefaciens; identical to SEQ ID NO: 12729
  source 1..50: mol_type = genomic DNA

SEQ ID NO: 12735 - DNA, 40 bp, Bacillus amyloliquefaciens; identical to SEQ ID NO: 12730
  source 1..40: mol_type = genomic DNA

SEQ ID NO: 12736 - protein, 501 aa, Bacillus amyloliquefaciens
MVIAIYVRVSTEEQAIKGSSIDSQIEACIKKAGTKDVLKYADEGFSGELLERPALNRLREDASKGLISQVICYDPDRLSRKLMNQLIIDDELRKRNIPLIFVNGEYANSPEGQLFFAMRGAISEFEKAKIKERTSSGRLQKMKKGMIIKDSKLYGYKFVKEKRTLEIFEEEAKIIRMIFNYFTDHKSPFFGRVNGIALHLTQMGVKTKKGAKVWHRQVVRQILMNSSYKGEHKQYKYDTEGSYVSKQAGNKSIIKIRPEEEQITVAIPAIVPAEQWDYAQELLGQSKRKHLSISPHNYLLSGLVRCGKCGNTMTGKKRKSHGKDYYVYTCRKNYSGAKDRGCGKEMSENKLNRHVWGEIFKFITNPQKYASFKEIEQSNHLSDELELIQKEIEKTKKGRKRLLTLISLSDDDDLDIDEIKAQIIELQKKQNQLTEKCNEIQSKMKVLDDTSSSENALKRAIDYFQSIGADNLTLEDKKTIVNFIVKEVTIVDSDTIYIETY

SEQ ID NO: 12737 - DNA, 50 bp, Bacillus amyloliquefaciens; identical to SEQ ID NO: 12727
  source 1..50: mol_type = genomic DNA

SEQ ID NO: 12738 - DNA, 40 bp, Bacillus amyloliquefaciens; identical to SEQ ID NO: 12728
  source 1..40: mol_type = genomic DNA

SEQ ID NO: 12739 - DNA, 50 bp, Bacillus amyloliquefaciens; identical to SEQ ID NO: 12729
  source 1..50: mol_type = genomic DNA

SEQ ID NO: 12740 - DNA, 40 bp, Bacillus amyloliquefaciens; identical to SEQ ID NO: 12730
  source 1..40: mol_type = genomic DNA

SEQ ID NO: 12741 - protein, 571 aa, Streptococcus anginosus; identical to SEQ ID NO: 12626

SEQ ID NO: 12742 - DNA, 50 bp, Streptococcus anginosus
  source 1..50: mol_type = genomic DNA
tgaggcaacatacggacatccgaatgtcaggcagaaatacgattttcgtt

SEQ ID NO: 12743 - DNA, 40 bp, Streptococcus anginosus
  source 1..40: mol_type = genomic DNA
cattcatttgacatccaaatgtttgcatgataaaagattt

SEQ ID NO: 12744 - DNA, 50 bp, Streptococcus anginosus
  source 1..50: mol_type = genomic DNA
tgaggcaacatacggacatccgaacatcaggcagaaatacgattttcgtt

SEQ ID NO: 12745 - DNA, 40 bp, Streptococcus anginosus
  source 1..40: mol_type = genomic DNA
cgttcatttgacatgggaacactttcttgagaagagattt

SEQ ID NO: 12746 - protein, 559 aa, Enterococcus faecium; identical to SEQ ID NO: 11456

SEQ ID NO: 12747 - DNA, 50 bp, Enterococcus faecium; identical to SEQ ID NO: 11457
  source 1..50: mol_type = genomic DNA

SEQ ID NO: 12748 - DNA, 40 bp, Enterococcus faecium
  source 1..40: mol_type = genomic DNA
taacaaaaatacctgccacaagagacaatttctcttgtgg

SEQ ID NO: 12749 - DNA, 50 bp, Enterococcus faecium
  source 1..50: mol_type = genomic DNA
caccttccttacggagggtgcccccagggagacacttcgtaaggaagttg

SEQ ID NO: 12750 - DNA, 40 bp, Enterococcus faecium
  source 1..40: mol_type = genomic DNA
taacaaacatacttgccaccacccaaaagttttcttgtgt

SEQ ID NO: 12751 - protein, 513 aa, Ruminococcus bromii
MQENKQNLRFTALYCRLSSDDELKGDSNSIIHQKQILQDYALKHSLTPTEIYVDDGFTGTNFDRPDFKRLLSDVENDLVKTVIVKDLSRLGRNYLKVGYYTEVLFPEKGVRFISIADNLDTSVNDELNDFIPFKNIMNEWYAKDLARKQRAVVKSKGNSGIRLATRPLYGYKKAENGDWLIDEPTAAVVQKIFDLYLKGYGPASIANYLFANKVKIPSTIGLPKLNPEQNPYRWSKDTVAKILTCQDYCGDMINFKRSDVDSLVIFHDRQEPIISREIFAEAQKLRLDRKPVRHDYSEPVLFSDLLLCADCKSRMYAQRRYHGTTSYSCSKARKTQGCTSHYINEIKLIDCVKSDINKLIKNKGIVIKLAKEKMHIDTKTAQCANSQNLKNAKKRILQIDTILKNLYEDKVLGNINLATFKKLESDYLREQSELNKVIFEQSKIKVNLENRSKSICGFLKKLESYNNPVSELSRDLLIDLIDKIEICEATKNGNERSQQVHIYYKEIGKINLE

SEQ ID NO: 12752 - DNA, 50 bp, Ruminococcus bromii
  source 1..50: mol_type = genomic DNA
tttgtacccaaacagtaacgccctaaagtcgttacgctgagggtacaaaa

SEQ ID NO: 12753 - DNA, 40 bp, Ruminococcus bromii
  source 1..40: mol_type = genomic DNA
tgtctgaaataacgagcaaaaggaagtgcatttatgcaca

SEQ ID NO: 12754 - DNA, 50 bp, Ruminococcus bromii
  source 1..50: mol_type = genomic DNA
tttgtacccaaacagtaacgccctcaagtcgttacgctgagggtacaaaa

SEQ ID NO: 12755 - DNA, 40 bp, Ruminococcus bromii
  source 1..40: mol_type = genomic DNA
tgtcagaaattagcagcaccaggaagagaatttatgtgca

SEQ ID NO: 12756 - protein, 605 aa, Vibrio cholerae
MRWLGMIHPKEQLDAYIYSRVSKDVQVQGDGIRRQIDGAIRFVESKNKENLQNGLPTYSIADEFITDRGLSAYKGFNTAANGGLGAFLEAARKGEIKRGSLLVVEAVDRISRMPADESRKTFSLFKEYGIDVAIVKFGIIIKHSESTTLENDLLITAAIHLAHMESQQKSNRINDYFENKRMKEKEGGEKRTSICPSWMKLSEDKRSFELIPDRARVMKRIINMKLDGLGCHRIASALNSEGVPYFNGKTWSTEIVRKYCKMIQLYGAFQRVKHVRTNAGTKKQPWGDIEQNYYPAIIDEQTFLRLKKSFKRSGGRQTGAFSNLFSNLLFCPQCGSSMSYYKPNRGRKKVRCRKQIDNQGCTQRALNYEEIETRLVKALAGLDYAKINDSSFTDLSAELSSLEANIAELNENVEVVTKQLMENTNPRLYSILTEKLTKLDDEIHSEKAKFDELSILHRNYDTTIINSLKLDNNEDRERYNNFVKQFVKYIICTDEEQGGSLRVVFKADAIGELPFSFSDEKNDKAVSEVFTANRSISDTQAVRLINLDKSSSMYLPLLKEITDVKQPNDLSDSRELIRYMHAVRMAVKRNPSKWKEIAEQAKLRY

SEQ ID NO: 12757 - DNA, 50 bp, Vibrio cholerae
  source 1..50: mol_type = genomic DNA
tgcgatactaatagtaacccaaccaatgaagaattagtaatagtatcgca

SEQ ID NO: 12758 - DNA, 40 bp, Vibrio cholerae
  source 1..40: mol_type = genomic DNA
agccatggtgatcccgaccaacgaagaattcgtgattgcc

SEQ ID NO: 12759 - DNA, 50 bp, Vibrio cholerae; identical to SEQ ID NO: 12757
  source 1..50: mol_type = genomic DNA

SEQ ID NO: 12760 - DNA, 40 bp, Vibrio cholerae
  source 1..40: mol_type = genomic DNA
agccatggtgatgcagcccaattgagcattggtgattggc

SEQ ID NO: 12761 - protein, 600 aa, Vibrio cholerae
MSYAKEQVNAYIYSRVSKDVQVHGDGIRRQIEGAIRFVEKINQDNIQKGIPTYKIADEFITDKGLSAYKGFNTAANGGLGAFLEAARKGEIKRGSLLVVEAVDRISRMPADESRKTFSLFKQYGIDVAIVKFGIIIKHSESTTLENDLLITAAIHLAYMESQQKSNRINDYFDKKRLREKEGGEKRTSICPLWMKLSEDKKSFELIPDRARVMSRIIDMKLNGIGCHRIASTLNKEGVPYFNGKTWSTTIVTKYCKMIQLYGAFQPVKHVRTDSGTQKKPWGDVLQNYYPAVIDEQTFLRLKNSFKRTGGRQTGAYSNLFSGLLCCPECGSGMSYFKPNRGKQKIRCRKQIDKQGCFQRALDYEEIENRLVKALAGLDYAKINNNSFASLSEELSSLEANIAELRENIEAVSAQLMENSNPRLYDILIEKLTKLDDEICIEQDKFNELSTLQSNYDASIINSLQLDSNEDRARYNHFVKQFVKYIICTDKKQGGPLRVVFKADTVGELPFNFDDEKNDKAVSEVFTANRSISDTETVRLINLDKSSGMYLSTLKDITDVKQPNDLSDSRELIRYMHAVRMAVRRNPNKWKGIAAQAKLRY

SEQ ID NO: 12762 - DNA, 50 bp, Vibrio cholerae
  source 1..50: mol_type = genomic DNA
tgcgatactaatagatatccaaccaatgaagagtacgtgatagtatcgca

SEQ ID NO: 12763 - DNA, 40 bp, Vibrio cholerae; identical to SEQ ID NO: 12758
  source 1..40: mol_type = genomic DNA

SEQ ID NO: 12764 - DNA, 50 bp, Vibrio cholerae; identical to SEQ ID NO: 12762
  source 1..50: mol_type = genomic DNA

SEQ ID NO: 12765 - DNA, 40 bp, Vibrio cholerae; identical to SEQ ID NO: 12760
  source 1..40: mol_type = genomic DNA

SEQ ID NO: 12766 - protein, 605 aa, Vibrio cholerae
MRWLGMIHPKEQLDAYIYSRVSKDVQVQGDGIRRQIDGAIRFVESKNKENLQNGLPTYSIADEFITDRGLSAYKGFNTAANGSLGAFLEAARKGEIKRGSLLVVEAVDRISRMPADESRKTFSLFKEYGIDVAIVKFGIIIKHSESTTLENDLLITAAIHLAHMESQQKSNRINDYFENKRMKEKEGGEKRTSICPSWMKLSEDKRSFELIPDRARVMKRIINMKLDGLGCHRIASALNSEGVPYFNGKTWSTEIVRKYCKMIQLYGAFQRVKHVRTNAGTKKQPWGDIEQNYYPAIIDEQTFLRLKKSFKRSGGRQTGAFSNLFSNLLICPQCGSSMSYYKPNRGRKKVRCRKQIDNQGCTQRSLNYEEIETRLVKALAGLDYAKINDSSFTDLSAELSSLEANIAELNENVEVVTKQLMENTNPRLYSILTEKLTKLDDEIHSEKAKFDELSILHRNYDTTIINSLKLDNNEDRERYNNFVKQFVKYIICTDEEQGGSLRVVFKADAIGELPFSFSDEKNDKAVSEVFTANRSISDTQAVRLINLDKSSSMYLPLLKEITDVKQPNDLSDSRELIRYMHAVRMAVKRNPSKWKEIAEQAKLRY

SEQ ID NO: 12767 - DNA, 50 bp, Vibrio cholerae
  source 1..50: mol_type = genomic DNA
tgcgatactaatagtaacccaaccaatgaagagttagtaatagtatcgca

SEQ ID NO: 12768 - DNA, 40 bp, Vibrio cholerae; identical to SEQ ID NO: 12758
  source 1..40: mol_type = genomic DNA

SEQ ID NO: 12769 - DNA, 50 bp, Vibrio cholerae; identical to SEQ ID NO: 12767
  source 1..50: mol_type = genomic DNA

SEQ ID NO: 12770 - DNA, 40 bp, Vibrio cholerae; identical to SEQ ID NO: 12760
  source 1..40: mol_type = genomic DNA

SEQ ID NO: 12771 - protein, 454 aa, Listeria grandensis
MKAAIYIRVSTDEQTKKFSIPAQERMARAFCESKGWDVYKVYTDGGYSGKNLKRPAMQEMLGEVDKFDAVIVYRLDRLSRSQIDTMTLIETYFLRNNIDFISLTETLDTTSPGGRAMIGVLAAFAQMERENTRERSIMGRIQRVRSGLRDSPVKRRNFGYDIVDGKLYINESEAAIIREVCDRFEVLQSIGKLQQEQKSQGREVITRSRIMNYLTNDLYIGYVHYLDEVHTKGIHDPIISEEQHYRIKAILESIKQAPNVNQKHRSLLSGLVICAVCGNPYHHASKGTRRHANGEMVEYRYYTCKKNRRKPELEGCENLTYHAIKLESIVLNRINSYSVEARTDEKMKDLVNTKEKIGTLAKKKERLFELYMDGSYEKGDLDPLMSEINAEIKRLEDLNTKQSEALYKTEVSKLLLENQAIDLEHFEFPEKQQFLRSVINKIVVDGERVKVYWL

SEQ ID NO: 12772 - DNA, 50 bp, Listeria grandensis
  source 1..50: mol_type = genomic DNA
tttagtccctcatgtagttatgaagggatataactacatgagggactaat

SEQ ID NO: 12773 - DNA, 40 bp, Listeria grandensis
  source 1..40: mol_type = genomic DNA
ttttggatctagctatgaaggtagaaaagaagggacacgc

SEQ ID NO: 12774 - DNA, 50 bp, Listeria grandensis
  source 1..50: mol_type = genomic DNA
tttagtccctcatgtagttatgaaatgatataactacatgagggactaat

SEQ ID NO: 12775 - DNA, 40 bp, Listeria grandensis
  source 1..40: mol_type = genomic DNA
ttttggagatagctatgaaataagaatagaaaaggcaaac

SEQ ID NO: 12776 - protein, 490 aa, Bacillus anthracis
MKRLGSYAIYVRVSTDRDEQVSSVENQIDICRNWLERNGFKWDEKNVFKDEGISGTLFVNRPAIQLLLEKAKAKEIDMVVFKSISRLARDLKDSLEIREVFLAHNVRIISVEEGYDSVKAGKNDMAFELWSLFSAQYSRTLSSSITAALAVKVRRGEHIGKVPYGYNRENQKLVIHDEEAAVVRMIYSWYTDGWGYKKITNELNRLGIKSKTKRNWQMTSVQRIVRNPIYKGTFILNQYTSVKVGGKKKQIRNPKEKWFVFPNHHPEIVDEEIWNQANQENVNTHKTKITAWNEFRNLAKCAVCGSNMVIVQSHLKKKSGERTEWKYLKCSQYRRAGKHGCVNHVPIQYDDFRQFILDLLVEKGESIILKLRNNVEEGRDTKVKKLHHLVNTNEQKKKSLLDLYLEELIDKEEFEKKRNDLEIEIKKASNELFILKQNDSVAVDIKTIKEAFEQLQQRECDLYHVFQTLIQEIVIHQNGMVDITYTFENK

SEQ ID NO: 12777 - DNA, 50 bp, Bacillus anthracis
  source 1..50: mol_type = genomic DNA
tatttgcaaacactacacatctcaaatgtgatgtgtagtgattacaaata

SEQ ID NO: 12778 - DNA, 40 bp, Bacillus anthracis; identical to SEQ ID NO: 8483
  source 1..40: mol_type = genomic DNA

SEQ ID NO: 12779 - DNA, 50 bp, Bacillus anthracis
  source 1..50: mol_type = genomic DNA
tatttgcaaacactacacatctcagctgtgatgtgtagtgattacaaata

SEQ ID NO: 12780 - DNA, 40 bp, Bacillus anthracis
  source 1..40: mol_type = genomic DNA
agctaggaaccacttttcagcctcaatggaaaatctagag

SEQ ID NO: 12781 - protein, 484 aa, Bacillus thuringiensis
MKYAVYVRVSTDRDEQVSSVENQIDVCRYWLDQHGYDWDENSIYFDDGITGTVLLERHAMQLILEKAKKRELQMVLFKSIHRLARDLKDALEIKEILIANGIRLVTIEEGYDSHYEGKNDMKFEMFAMFASQYPKTLSVSISAALSAKVRRGEHTGGRLPFGYSDHDKKYVINEEEAEIVREIYDMYSKGIGYIGIAKILNERGIPSKTGGKWQMSSVQRIIKNPIYKGDYILNQYTTVKISGRKKQIKNPEEKWTIFKNHHPAIVSEEQWELVNRPRSAKKRRPALWNEFRGIIFCAHCGSAMQVVYSAKKKKDGTKEEWRYLKCSRYKRYGGDECVCHVPIQYNQFRNFILEELEQEEKEVKAKVESQEPTIHKEKIDKIKRNIRKVKERKEKLVDLYMDNLIEKDEFSERRAELEQKIKEQELHLLSMEEVKLTNAVQKKYQEAFSLLKQEKNLYDAFREIIKRIDIFQNGDVRITYVLDA

SEQ ID NO: 12782 - DNA, 50 bp, Bacillus thuringiensis
  source 1..50: mol_type = genomic DNA
aactagttacaattatacatctcaaatgaaatgtataattgtaactagtg

SEQ ID NO: 12783 - DNA, 40 bp, Bacillus thuringiensis; identical to SEQ ID NO: 8483
  source 1..40: mol_type = genomic DNA

SEQ ID NO: 12784 - DNA, 50 bp, Bacillus thuringiensis
  source 1..50: mol_type = genomic DNA
aactagttacaattatacatctcagctgaaatgtataattgtaactagtg

SEQ ID NO: 12785 - DNA, 40 bp, Bacillus thuringiensis; identical to SEQ ID NO: 12780
  source 1..40: mol_type = genomic DNA

SEQ ID NO: 12786 - protein, 484 aa, Bacillus thuringiensis
MKYAVYVRVSTDRDEQVSSVENQIDVCRYWLDQHGYDWDENSIYFDDGITGTVLLERHAMQLILEKAKKRELQMVLFKSIHRLARDLKDALEIKEILIANGIRLVTIEEGYDSHYEGKNDMKFEMFAMFASQYPKTLSVSISAALSAKVRRGEHTGGRLPFGYSDREKKYVINEEEAEIVREIYDMYSKGIGYIGIAKILNERGIPSKTGGKWQMSSVQRIIKNPIYKGDYILNQYTTVKISGRKKQIKNPEEKWTIFKNHHPAIVSENQWELVNKPRSAKKRRPALWNEFRGIMFCAHCGSAMQVVYSAKKKKDGTKEEWRYLKCSRYKRYGSDECVRHAPIQYHEFREFILDNLKEKEKQLETEFNLNEETSSAEKKNKLQREIQRIEEKRKKLIDLYMEELIEKEEFLSRRNELEKTIKEKEVQFVSMEDKSEVKRTQDEFRKAFALLDESKNLYEEFKRIIDRIEIFENGDIKIVYRIEM

SEQ ID NO: 12787 - DNA, 50 bp, Bacillus thuringiensis
  source 1..50: mol_type = genomic DNA
tactatctacaattatgcataacaaatgaaatgtataattataactagta

SEQ ID NO: 12788 - DNA, 40 bp, Bacillus thuringiensis
  source 1..40: mol_type = genomic DNA
agttcgtaaccacatctcaaacgcaatgcaaaagctaggg

SEQ ID NO: 12789 - DNA, 50 bp, Bacillus thuringiensis
  source 1..50: mol_type = genomic DNA
tactatctacaattatgcataacagctgaaatgtataattataactagta

SEQ ID NO: 12790 - DNA, 40 bp, Bacillus thuringiensis; identical to SEQ ID NO: 12780
  source 1..40: mol_type = genomic DNA

SEQ ID NO: 12791 - protein, 484 aa, Bacillus cereus
MKYAVYVRVSTDRDEQVSSVENQIDVCRYWLDQHGYDWDENSIYFDDGITGTVLLERHAMQLILEKAKKRELQMVLFKSIHRLARDLKDALEIKEILIANGIRLVTIEEGYDSHYEGKNDMKFEMFAMFASQYPKTLSVSISAALSAKVRRGEHTGGRLPFGYSDREKKYVINEEEAEIVREIYDMYSKGIGYIGIAKILNERGIPSKTGGKWQMSSVQRIIKNPIYKGDYILNQYTTVKISGRKKQIKNPEEKWTIFKKHHPAIVSEEQWELVNKPRSAKKRRPALWNEFRGIMFCAHCGSAMQVVYSAKKKKDGTKEEWRYLKCSRYKRYGSDECVRHAPIQYHEFREFILENLKEKEKQLETEFNLNEESSNAEKKNKLQREIQRIEEKRKKLIDLYMEELIEKEEFLSRRNELEKTIKEKEVQFVSMEDKSEVKRTQDEFRKAFALLDESKNLYEEFKRIIDRIEIFENGDIKIVYRIEM

SEQ ID NO: 12792 - DNA, 50 bp, Bacillus cereus
  source 1..50: mol_type = genomic DNA
cactatctacaattatgcataacaaatgaaatgtataattgtaactagtg

SEQ ID NO: 12793 - DNA, 40 bp, Bacillus cereus; identical to SEQ ID NO: 8483
  source 1..40: mol_type = genomic DNA

SEQ ID NO: 12794 - DNA, 50 bp, Bacillus cereus
  source 1..50: mol_type = genomic DNA
cactatctacaattatgcataacagctgaaatgtataattgtaactagtg

SEQ ID NO: 12795 - DNA, 40 bp, Bacillus cereus; identical to SEQ ID NO: 12780
  source 1..40: mol_type = genomic DNA

SEQ ID NO: 12796 - protein, 491 aa, Bacillus cereus
MIALQPYAVYVRVSTDRDEQVSSVENQVDICRNWLERNGFIWDESCVYKDEGISGTLFIARPAIQLILEKAKQKKIDTVIFKSISRLARDLKDSLEIREVFLAHGVRIISVEEGYDSNKAGKNDMAFELWSLFSAQYSRTLSSSISAALAAKVRRGEHIGKVPYGYDRVEQKLVIKDEEAEVVRQIYKWYNDGWGFKKISNELNKLGIKPKNNNVWQLTSVQRLIRNTIYKGTFILNQYTNVKVGGKKKQIRNPPEKWIIFENHHPAIVDKEIWDKANGEHVQSRKVRITPWNEFRYLAKCSECGSNMIIVQSHRKKKSGERTEWKYLKCSRYRRAGRHGCVNHIPIQYGDFREFILNLLMKKGESVLLNLRPNVENEQVRKEKKLQQILKQNEQRKKNLLELYLDGLIKKSEFEKKRKEIEEVIVETTNELFLINKAETVQISIKTIKEAFEELKNQNQDLFDVFQTLIEEIVIHPDGTIDITYTFEEPR

SEQ ID NO: 12797 - DNA, 50 bp, Bacillus cereus
  source 1..50: mol_type = genomic DNA
tgtttgcaaaagctatacatcacaaatgtgatgtgtagtgattgcaaacc

SEQ ID NO: 12798 - DNA, 40 bp, Bacillus cereus; identical to SEQ ID NO: 12788
  source 1..40: mol_type = genomic DNA

SEQ ID NO: 12799 - DNA, 50 bp, Bacillus cereus
  source 1..50: mol_type = genomic DNA
tgtttgcaaaagctatacatcacagctgtgatgtgtagtgattgcaaacc

SEQ ID NO: 12800 - DNA, 40 bp, Bacillus cereus; identical to SEQ ID NO: 12780
  source 1..40: mol_type = genomic DNA

SEQ ID NO: 12801 - protein, 484 aa, Bacillus paranthracis
MKYAVYVRVSTDRDEQVSSVENQIDVCRYWLDQHGYDWDENSIYFDDGITGTVLLERHAMQLILEKAKKRELQMVLFKSIHRLARDLKDALEIKEILIANGIRLVTIEEGYDSHYEGKNDMKFEMFAMFASQYPKTLSVSISAALSAKVRRGEHTGGRLPFGYSDRDKKYVINEEEAEIVREIYDMYSKGIGYIGIAKILNERGIPSKTGGKWQMSSVQRIIKNPIYKGDYILNQYTTVKISGRKKQIKNPEEKWTIFKNHHPAIVSEKQWELVNKPRSAKKRRPALWNEFRGIMFCAHCGSAMQVIYSAKKKKDGTKEEWRYLKCSRYKRYGRDECVRHAPIQYHEFREFILENLKEKEKQLETEFNLNEETSSAEKKNKLQREIQRIEEKRKKLIDLYMEELIEKEEFLSRRKELEKTIKEKEVQFVSMEDKSEVKRTQDEFRKAFSLLDESKNLYEEFKRIIDRIEIFENGDIKIVYRIEM

SEQ ID NO: 12802 - DNA, 50 bp, Bacillus paranthracis
  source 1..50: mol_type = genomic DNA
tactagttacaattacacattacaaatgaaatgtataattgtaactagta

SEQ ID NO: 12803 - DNA, 40 bp, Bacillus paranthracis; identical to SEQ ID NO: 8483
  source 1..40: mol_type = genomic DNA

SEQ ID NO: 12804 - DNA, 50 bp, Bacillus paranthracis
  source 1..50: mol_type = genomic DNA
tactagttacaattacacattacagctgaaatgtataattgtaactagta

SEQ ID NO: 12805 - DNA, 40 bp, Bacillus paranthracis; identical to SEQ ID NO: 12780
  source 1..40: mol_type = genomic DNA

SEQ ID NO: 12806 - protein, 528 aa, Klebsiella oxytoca
MKVPVWSYARVSTLNQIDGFGIQRQVNTINQFIQCIVLDHRLPYTLDVNNITQMVSEGNSAFRGKNWNPKTKLGQYRKMVMDGVIPDSILIVENIDRLTRLDPFQAVEIISGLINRGTTILEIETGMTYSRYIPESITVLTMQINRANGESKRKSIMMKKSHENRYGNVSKVRPRWFDVVEIDGIKQYRQNDTATAIQRMFNDYVNGIGPAQIVRTYGKSDNGKQWTLVTVLRVLSDKRVADDPRYPPIIDKSLYEKVQSMKINQSSGSTHQKNMFNIFSGMSRCPICKQSIIVKRNSHGGLFTVCLGKRTHKTCEARSMAYNAIERPLLNAIKGLDFSTVYNREESNVLTLRDQWIRNERDIAAFRERLAKASRHEKFAILDELEAISKEQDELSIRLKSVDAPHDVQLDFNDDKLDLDVEYRIELNHRMKKLIQSIDIVRVDVSKSTYTVYCSIKYWTDFMSHFVIIDVESKRTGTGGTNTLTTSLRSVSSINRDGTISGNPDMEALDYWESIINQATSLALKNVR

SEQ ID NO: 12807 - DNA, 50 bp, Klebsiella oxytoca
  source 1..50: mol_type = genomic DNA
cggtgtacatacttgacagactaggaacagctatgatagtatgtacaccc

SEQ ID NO: 12808 - DNA, 40 bp, Klebsiella oxytoca
  source 1..40: mol_type = genomic DNA
cggccccatcaacagcagtgaacagtcggtggtcccgccg

SEQ ID NO: 12809 - DNA, 50 bp, Klebsiella oxytoca
  source 1..50: mol_type = genomic DNA
cggtgtacatacttgacagactaggcacagctatgatagtatgtacaccc

SEQ ID NO: 12810 - DNA, 40 bp, Klebsiella oxytoca
  source 1..40: mol_type = genomic DNA
cagccccaccaacatcagagcaaaggcagtggtccagcca

SEQ ID NO: 12811 - protein, 565 aa, Eubacterium rectale; identical to SEQ ID NO: 3921

SEQ ID NO: 12812 - DNA, 50 bp, Eubacterium rectale
  source 1..50: mol_type = genomic DNA
acagacggagaggagatttaaaatgggacaggaaatagcaggtggaagtg

SEQ ID NO: 12813 - DNA, 40 bp, Eubacterium rectale
  source 1..40: mol_type = genomic DNA
agttgttgatagcatatctggagcagatagcaatatattt

SEQ ID NO: 12814 - DNA, 50 bp, Eubacterium rectale
  source 1..50: mol_type = genomic DNA
acagacggagaggagatttaaaattagacaggaaatagcaggtggaagtg

SEQ ID NO: 12815 - DNA, 40 bp, Eubacterium rectale
  source 1..40: mol_type = genomic DNA
aatttttgagagcatatcttaagcattttgcaacattctt

SEQ ID NO: 12816 - protein, 505 aa, Paraclostridium bifermentans
MRCAIYLRKSRADEEAENKGEFETLSRHRSTLLKVAKEQQLNIVEIKEELVSGESIQYRPKMLELLDEVKQGLYDAVLVMDIDRLGRGNMQDQGLILETFKKSKTKIITPRKTYDLTNEFDEEYSEFEAFMARKELKLITRRMQRGRIKSVEDGKFIASKPPYGYKFVFNESGNKSMVIDQDKADVVKLIFNLYINGNGANKVANHLNALGLKTTTGRTWYDKGVRDIIKNKVYCGYVVWNRVERTKEYYRNRPAGEVLESKGIHEPIISEETWNKAQKMLKGNAISPTAVFKEITNPLAGLVVCKCCGHTMIARSASTTKTGYEKFLRCVNCSDNRGIKLDIVEEEIINNLNQFVINYKADFNGIEYSNSNNDNLASLNKILRTFENEASTLVSQKENLHNLLEQGVYDIDTYLDRSKVLSDKIEKNKTNINNIKNEILNEEESSLLIEGTIPLIEHVLELYYTETSFAQRNKLLKSIIDKVIYYRKPGSKKSKVEITIHPKIE

SEQ ID NO: 12817 - DNA, 50 bp, Paraclostridium bifermentans
  source 1..50: mol_type = genomic DNA
aactgacataaacaaaccgataaccaataatcagtttctttatatcagtt

SEQ ID NO: 12818 - DNA, 40 bp, Paraclostridium bifermentans
  source 1..40: mol_type = genomic DNA
aaacgtccgtacagatattcaattcaacgttttatcaggt

SEQ ID NO: 12819 - DNA, 50 bp, Paraclostridium bifermentans
  source 1..50: mol_type = genomic DNA
aactgacataaacaaaccgataacttataatcagtttctttatatcagtt

SEQ ID NO: 12820 - DNA, 40 bp, Paraclostridium bifermentans; identical to SEQ ID NO: 2490
  source 1..40: mol_type = genomic DNA

SEQ ID NO: 12821 - protein, 583 aa, Ruthenibacterium lactatiformans
MTQTQIHATISPCTPILSADPTVKEDAMLDQQKITILYCRLSNEDTLDGESNSIQNQKEFLTRYAAEHGYTNLKILVDDGYTGTNFDRPGVQEGFALVKQGLVGCWLVKDLSRFGRDYLTVGQYTDIIFPSYDVRFIAVNDGVDSERGDSDGFAAIRNLFNEWYPRDTSKKVRVVFRQKGTSGKHLGKPPYGYRTDPADKDHWIIDEDAAPVVKRIFDLAIDGKGPEQIARILEQDKALTTKALYAKQSENHPDPKKRKKMPERPYHWIGQSVVGILERMEYTGCTCNFKTYSKSYKLKKRIPNAIEDMCIFPDTQKAIVSQAQWDRVRELRKNKRRPTKAQRQGLFSGLLFCPDCGNKLHFATCKSFDGKQDHYVCSSYKSGRGTCSAHYIREDVLRELVLERIRAVNAYIRQDVEGFQEEWLQCRRSDQERSIREDRKRVEQARKRLADLDVLLSRLYEDFVLGDLSKERYKKMTADYEAEQERLKLEIEVTEEWLEMQETMSADVDAFVALTQKYVDVPELTPTIVNEYIKKIEVFAPDKSSGKRVQKVKIYFNFVDDVEIPVISEPVVAKSTPGRRKTA

SEQ ID NO: 12822 - DNA, 50 bp, Ruthenibacterium lactatiformans
  source 1..50: mol_type = genomic DNA
atagtaccttatcactatcaagccttggcttaacagtgataaggaactaa

SEQ ID NO: 12823 - DNA, 40 bp, Ruthenibacterium lactatiformans
  source 1..40: mol_type = genomic DNA
ggataaaaccagtaaacccttcatcgtgcagttctttcgt

SEQ ID NO: 12824 - DNA, 50 bp, Ruthenibacterium lactatiformans
  source 1..50: mol_type = genomic DNA
atagtaccttatcactatcaagcctcggcttaacagtgataaggaactaa

SEQ ID NO: 12825 - DNA, 40 bp, Ruthenibacterium lactatiformans
  source 1..40: mol_type = genomic DNA
gaataaaaccagcattccctcctacttgctggtctttcgt

SEQ ID NO: 12826 - protein, 645 aa, Lysinibacillus fusiformis
MKGAMSLKKAALYVRVSTLHQIDKDSLPFQRQELENYAKYALNIEEVEIFEDAGYSAKNTDRPKYQEMMKRIRSGEFTHLLVWKIDRISRNLKDFSEMYEELKDCKVTFVSKNEQFDTSTAMGEAMLKIILVFAELERKLTAERVFSIMLSRAEKGLWNGATVPFGYVWSEEEKFPVIDPDESKIIQYIFNSYESLRSTLKVAYRLHEEKIATKRNGQWTAKTVRDILRNPFYIGTYRYNMRESGGSRRLKNKEEWVVVDNNHPGIIEKEQFDRVNKLLSDNYRGLTDVQRADIHKHIFSKMLYCGKCNSLLTAGLDAARKDGYRPSRYTCVTSGGAKRCSNYVSDIIIGPFIFNYVSNLIRLQERITPKHSLRDMERALLRGNSFIDVVGVDNESLKETHFALTGNMSGQGQEYSLNAKAEIETPNIEIERLQREKTKFVRALKRLEDLYYFGEEEDAISQKEYIFKKRDLQERLEELDDEINLLKQKNDDKTSDVFIDYAQHFLITKEMQQARQVDYRELSEIVGREALSDFMQTIIDNIVVIDKRVQSITFKNGITHTFAYRSLLQSKSSAPTKKQYKNYEGPVLEYLKENGPASRSDLQKATNITRDGIFTLLSELIEREIIIKTGQSTATRYHYNEKQNN

SEQ ID NO: 12827 - DNA, 50 bp, Lysinibacillus fusiformis; identical to SEQ ID NO: 2492
  source 1..50: mol_type = genomic DNA

SEQ ID NO: 12828 - DNA, 40 bp, Lysinibacillus fusiformis
  source 1..40: mol_type = genomic DNA
gagtttccatactctaggttgtaaagtaaaccactacgaa

SEQ ID NO: 12829 - DNA, 50 bp, Lysinibacillus fusiformis; identical to SEQ ID NO: 2494
  source 1..50: mol_type = genomic DNA

SEQ ID NO: 12830 - DNA, 40 bp, Lysinibacillus fusiformis; identical to SEQ ID NO: 2495
  source 1..40: mol_type = genomic DNA

SEQ ID NO: 12831 - protein, 645 aa, Lysinibacillus fusiformis
MKGAMSLKKAALYVRVSTLHQIDKDSLPFQRQELENYAKYALNIEEVEIFEDAGYSAKNTDRPKYQEMMKRIRSGEFTHLLVWKIDRISRNLKDFSEMYEELKDCKVTFVSKNEQFDTSTAMGEAMLKIILVFAELERKLTAERVFSIMLSRAEKGLWNGATVPFGYVWSEEEKFPVIDPDESKIIQYIFNSYESLRSTLKVAYRLHEEKIATKRNGQWTAKTVRDILRNPFYIGTYRYNMRESGGSRRLKNKEEWIVVDNNHPGIIEKEQFDRVNKLLSDNYRGLTDVQRADIHKHIFSKMLYCGKCNSLLTAGLDAARKDGYRPSRYTCVTSGGAKRCSNYVSDIIIGPFIFNYVSNLIRLQERITPKHSLRDMERALLRGNSFIDVVGVDNESLKETHFALTGNMSGQGQEYSLNAKAEIEIPNIEIERLQREKAKFVRALKRLEDLYYFGEEEDAISQKEYIFKKRDLQERLEELDDEINLLKQKNDDKTSDVFIDYAQHFLITKEMQQARQVDYRELSEIVGREALSDFMQTIINNIVVIDKRVQSITFKNGITHTFAYRSLLQSKSSAPTKKQYKNYEGPVIEYLKENGPASRSDLQKATNITRDGIFTLLSELIEREIIIKTGQSTATRYHYNEKQNN

SEQ ID NO: 12832 - DNA, 50 bp, Lysinibacillus fusiformis
  source 1..50: mol_type = genomic DNA
accgtatctctatatacgttaggttgtggagtagtaaacaatgatatgat

SEQ ID NO: 12833 - DNA, 40 bp, Lysinibacillus fusiformis; identical to SEQ ID NO: 12828
  source 1..40: mol_type = genomic DNA

SEQ ID NO: 12834 - DNA, 50 bp, Lysinibacillus fusiformis
  source 1..50: mol_type = genomic DNA
accgtatctctatatacgttaggtcttggagtagtaaacaatgatatgat

SEQ ID NO: 12835 - DNA, 40 bp, Lysinibacillus fusiformis; identical to SEQ ID NO: 2495
  source 1..40: mol_type = genomic DNA

SEQ ID NO: 12836 - protein, 503 aa, Clostridium beijerinckii
MNKICIYLRKSRADEELEKTLGEGETLYKHRKTLLKFAKDNNLNIVEIKEEIVSGDSLFNRPKMLELLQEVENKKYTGVLVMDIDRLGRGGMKDQGIILDAFKESNTKIITPIKTYDLNDEFDEEMTEFKTFFSRRELKTINRRMQGGRVRSVEDGNYIATNAPLGYDIDYIKKSRTLKINEDEAEIIKLIFKLYTEGDGAGTISSYLNSLGYKTKANNSFGPTSIIAILKNPVYIGKITWKKKEYKKSKDPNKVKDCRTRDKKEWIVANGKHHALIDEDTFNRANDILNEKYHIPYKLSNPPTNPLAGLIICGVCKNKMVMRKTRGIPRILCTHKCGNRSVRFDYFEKELLQSLENYLYNYKFSIENETDDNNKDMYTKHLTLLNKELNTLNTQSLNIFDAYERNVYTEDVFIERIKNINSRKESIEIEINKINDLINQENKKMNSNDIVIFENIIKGYKNTNDIKLKNELFKNIILKIVYNKAKDQKDDDFTIDLYPKLLR

SEQ ID NO: 12837 - DNA, 50 bp, Clostridium beijerinckii
  source 1..50: mol_type = genomic DNA
tacatacaacatatccaacgcaattcatttcattgtatatgttgtatgta

SEQ ID NO: 12838 - DNA, 40 bp, Clostridium beijerinckii
  source 1..40: mol_type = genomic DNA
tatatccataagacaaaattcatttccttctttatcgact

SEQ ID NO: 12839 - DNA, 50 bp, Clostridium beijerinckii
  source 1..50: mol_type = genomic DNA
tacatacaacatatccaacgcaatgaatttcattgtatatgttgtatgta

SEQ ID NO: 12840 - DNA, 40 bp, Clostridium beijerinckii
  source 1..40: mol_type = genomic DNA
cagaaccatgagccaaaatgaacttccttctttataaatt

SEQ ID NO: 12841 - protein, 502 aa, Intestinibacter bartlettii
MNTCIYLRKSRADEEAEKQGEFETLHRHKTTLLKIAKEKCLNVVDIKEELESGESIKDRPRMIELLKEVEDNQYDAVLVMDIDRLGRGNMQDQGLILDTFKNSNTEIITPRKTYNLNNEFDEEYSEFEAFMARKELKLINRRLQRGRIKSIEEGKYISPDPPYGYKFKYDDRGKKYLIIDEYQAEAVRLIFSMYLDMYGSNKIANKLNELGYKTNNHIQFKNKAVKDILTNITYCGYVKWKTVDRKNHNRVRPKDEQIIVKGNHEAIIDEITFNRAQEIRKNRYIPPTFEKKEVSNPLAGVLICGKCGHNLIQAVDSRCPKDDIRRFYIKCKHCDNKSSRFDYIEKAILNSLEDWLNEYKIKVSLEDDRTEIDKLKFESKAIKRELKNTENQQNKLYDFLERGIYSEEIFLERSVLLSNKIKSLKEELSRVNIEIISSKENTLARKQLIPTLETTLENYYKSDNAKEKNILLKTVLDKVVYTKEKNQKNDNFSIELYPKLPK

SEQ ID NO: 12842 - DNA, 50 bp, Intestinibacter bartlettii
  source 1..50: mol_type = genomic DNA
tactgttactattaaacatctaactggttatggggttaatagtaacagta

SEQ ID NO: 12843 - DNA, 40 bp, Intestinibacter bartlettii
  source 1..40: mol_type = genomic DNA
tgttgttacaccagctaactggttaccaggtaacccagtc

SEQ ID NO: 12844 - DNA, 50 bp, Intestinibacter bartlettii
  source 1..50: mol_type = genomic DNA
tactgttactattaaacatctaactagttatggggttaatagtaacagta

SEQ ID NO: 12845 - DNA, 40 bp, Intestinibacter bartlettii
  source 1..40: mol_type = genomic DNA
taatgtttcaccaactatctaggtaccctgtgacccagtc

SEQ ID NO: 12846 - protein, 503 aa, Enterocloster bolteae
MNNRIDAIYARQSVDKKDSISIESQIELCKYELKGGNCKEYKDKGYSGKNTERPQFQQLMRDIESGLVRKVVVYKLDRISRSILDFAKMMDFFQKYEVEFVSSTEKFDTSTPMGRAMLNICIVFAQLERETIQKRVQDAWYSRCQRGFKMGGKTPYGFRTEPYVMDGVRTKKLVIEPTEAAFVRQMYEMYADPQVSLHDITKKLTADGMRTYHGRPLSRATLSVILRNPIYVMADLDIYEFYKSQGTDIYNDAADFAGTNGCYYYQGKGNTEDKHKHLQGQTLVLAPHEGFIPSELWLKCRKKLLASHTYQPARKARNTWMAGKIKCGKCGYALMSAHSNGILYMRCTVHADSKACPGCGCVKLHELEAVVYGAMVKKLKDFKTLTGRNKAAKISPKLTAKRLELAQVESEIEKLLDTLTGASPVLLSYANSKIEELDARRQSIANEIAKLSADAVPMEKMESISGYLDDWENVSFEDKRQVVDALITVIRATNEKVEIEWKI

SEQ ID NO: 12847 - DNA, 50 bp, Enterocloster bolteae
  source 1..50: mol_type = genomic DNA
ttttgtgctcttgtctataatagtgaaacattatggacaaggacacaaaa

SEQ ID NO: 12848 - DNA, 40 bp, Enterocloster bolteae
  source 1..40: mol_type = genomic DNA
tcaagcaggaaactggccggaacttccggcgaaactgaaa

SEQ ID NO: 12849 - DNA, 50 bp, Enterocloster bolteae
  source 1..50: mol_type = genomic DNA
ttttgtgctcttgtctataatagtcaaacattatggacaaggacacaaaa

SEQ ID NO: 12850 - DNA, 40 bp, Enterocloster bolteae
  source 1..40: mol_type = genomic DNA
tcacccaggaaaccggccgcaaatgcgggcggacctgaag

SEQ ID NO: 12851 - protein, 481 aa, Streptococcus uberis
MITTNKVAIYVRVSTTNQAEEGYSIDEQKDKLTSYCNIKDWSIYNVYTDGGFSGSNTERPALEQLIKDAKKKAFDTVLVYKLDRLSRSQKDTLYLIEDVFIKNDIAFLSLQENFDTSTPFGKAMIGLLSVFAQLEREQIKERMQLGKLGRAKSGKPMMWAKAAYGYNYNKERSELIVNELEAIVVREIYHLYLEGMSITKIRDRINDKYPKKPAWHYRIIRGILDNPVYCGYNQYLNQIYPGNHEPIISEEVYNKTQKELKIRQRTAAEYFNPRPFQAKYMLSGIAQCGYCYAPLKIIMGMVRKDGTRYIRYECYQRHPRKTKGVTVYNNNEKCHSGAYEKHVLESYVLQEISKLQNDVSYIDELFSDPDTASIDRESYQKQIDSLTNKLKRLNDLYIDDRITLEELKEKSLEFTTTRAHLETELENDPAIKQQEKKEHMRQVLKAEDILSIDYEQQKILVKALINKVQVTAEAIVIKWKI

SEQ ID NO: 12852 - DNA, 50 bp, Streptococcus uberis
  source 1..50: mol_type = genomic DNA
taaagaattttactatccttcatttcaatgaacgtaactaaaattcacga

SEQ ID NO: 12853 - DNA, 40 bp, Streptococcus uberis
  source 1..40: mol_type = genomic DNA
cagaaggaccattagcatttctaaaagtgtgaaagctttt

SEQ ID NO: 12854 - DNA, 50 bp, Streptococcus uberis
  source 1..50: mol_type = genomic DNA
taaagaattttactatccttcattttaatgaacgtaactaaaattcacga

SEQ ID NO: 12855 - DNA, 40 bp, Streptococcus uberis
  source 1..40: mol_type = genomic DNA
ctgaaagaacttgagcactttttaaagtgtgaaatatttt

SEQ ID NO: 12856 - protein, 481 aa, Streptococcus uberis
MITTNKVAIYVRVSTTNQAEEGYSIDEQKDKLTSYCNIKDWSIYNVYTDGGFSGSNTERPALEQLIKDAKKKAFDTVLVYKLDRLSRSQKDTLYLIEDVFIKNDIAFLSLQENFDTSTPFGKAMIGLLSVFAQLEREQIKERMQLGKLGRAKSGKPMMWAKAAYGYNYNKERSELIVNELEAIVVREIYHLYLQGMSITKIRDRINDKYPKKPAWHYRIIRGILDNPVYCGYNQYLNQIYPGNHEPIISEEVYNKTQKELKIRQRTAAEYFNPRPFQAKYMLSGIAQCGYCYAPLKIIMGMVRKDGTRYIRYECYQRHPRKTKGVTVYNNNEKCHSGAYEKHVLESYVLQEISKLQNDVSYIDELFSDPDTASIDRESYQKQIDSLTNKLKRLNDLYIDDRITLEELKEKALEFTTTRAHLETELENDPAIKQQEKKEHMRQVLKAEDILSIDYEQQKILVKALINKVQVTAEAIVIKWKI

SEQ ID NO: 12857 - DNA, 50 bp, Streptococcus uberis
  source 1..50: mol_type = genomic DNA
taaagaattttactatccttcatttcaatgatcgtaactaaaattcacga

SEQ ID NO: 12858 - DNA, 40 bp, Streptococcus uberis; identical to SEQ ID NO: 12853
  source 1..40: mol_type = genomic DNA

SEQ ID NO: 12859 - DNA, 50 bp, Streptococcus uberis
  source 1..50: mol_type = genomic DNA
taaagaattttactatccttcattttaatgatcgtaactaaaattcacga

SEQ ID NO: 12860 - DNA, 40 bp, Streptococcus uberis; identical to SEQ ID NO: 12855
  source 1..40: mol_type = genomic DNA

SEQ ID NO: 12861 - protein, 404 aa, Mycobacterium tuberculosis
MLADITAGKIAAVVAWDLDRLHRRPIELEAFMSLADEKRLALATVAGDVDLATPQGRLVARLKGSVAAHETEHKKARQRRAARQKAERGHPNWSKAFGYLPGPNGPEPDPRTAPLVKQAYADILAGASLGDVCRQWNDAGAFTITGRPWTTTTLSKFLRKPRNAGLRAYKGARYGPVDRDAIVGKAQWSPLVDEATFWAAQAVLDAPGRAPGRKSVRRHLLTGLAGCGKCGNHLAGSYRTDGQVVYVCKACHGVAILADNIEPILYHIVAERLAMPDAVDLLRREIHDAAEAETIRLELETLYGELDRLAVERAEGLLTARQVKISTDIVNAKITKLQARQQDQERLRVFDGIPLGTPQVAGMIAELSPDRFRAVLDVLAEVVVQPVGKSGRIFNPERVQVNWR

SEQ ID NO: 12862 - DNA, 50 bp, Mycobacterium tuberculosis
  source 1..50: mol_type = genomic DNA
gaatgttcttcagcagtccacggccaaccgtggacctgtgagatacacta

SEQ ID NO: 12863 - DNA, 40 bp, Mycobacterium tuberculosis
  source 1..40: mol_type = genomic DNA
accccacctcgaccacggccaaccccgcaccaacaccttc

SEQ ID NO: 12864 - DNA, 50 bp, Mycobacterium tuberculosis
  source 1..50: mol_type = genomic DNA
gaatgttcttcagcagtccacggcacaccgtggacctgtgagatacacta

SEQ ID NO: 12865 - DNA, 40 bp, Mycobacterium tuberculosis
  source 1..40: mol_type = genomic DNA
acccctgctcgcccacggcacacgcagccccaactcccgc

SEQ ID NO: 12866 - protein, 459 aa, Lachnospira eligens
MSTTHFYSHYPTIEYKTCALYVRCSKEEQAKFGDTIEAQIEDLKAFAKLHHLKIYAIYVDEGHTARKKYNKRKEFMRMLQDVELHKFEYIIFTKLDRWFRNIADFYKIQEILDNNGVTWLTALERYEMETTNGKLNVNIRLSVAQDEADRDSDRIKDVFRLKVKKGEAITGSLPIGLMVGENGKVDIDPDTVQIAYDMFDYFETHNSKRGTLLYLIDKYNRYFCYETIARALRNPLYKGEYRGNPDYCPKIIDPARFDRIQVLGKRNVKVRKNNRYYVFSGLAQCKECGHALVANTTVQKKYNREYTQYRCNYYSNSHLCTHSHGMNEKVIEKYLLDNIKPELEKYVTAYDVKQNAPTKKADPNKIKTKMQRLKELYINELIDLDDYRIEYEQYKQELDKLTSTAAPEVKDLSAIRSFLALDLQSIYDSLTPQERRTLWSSIIDKIIISDGGDIEIVFL

SEQ ID NO: 12867 - DNA, 50 bp, Lachnospira eligens
  source 1..50: mol_type = genomic DNA
tgttgtactatctcatacgctcctgtaggtgcgttatagttagtacaaca

SEQ ID NO: 12868 - DNA, 40 bp, Lachnospira eligens
  source 1..40: mol_type = genomic DNA
aacactgtctagattaccagtaggctcatcagctagtatt

SEQ ID NO: 12869 - DNA, 50 bp, Lachnospira eligens
  source 1..50: mol_type = genomic DNA
tgttgtactatctcatacgctcctgaaggtgcgttatagttagtacaaca

SEQ ID NO: 12870 - DNA, 40 bp, Lachnospira eligens
  source 1..40: mol_type = genomic DNA
agcacattctggatagccagaaggcttatcagctagtgat

SEQ ID NO: 12871 - protein, 463 aa, Anaerostipes hadrus
MRRKTTAPVEKILLRVAIYIRVSTDKQVKDGDSMRDQLATGQKYIDSHENMILVDTYIDDGISGQKLKRDDFQRLIDDVRAGRIDLIIFTRLDRWFRNLRHYLNTQDILDKHGVSWTAIEQPYFDTSTPHGRAFVNNSMIWAELEAQNDSDRILGVFDDKVDNGEVLSGSTPLGYKIVNKHLVPDDDAPTAVAIFQYYRKTGNLSMTLRYMESEFGLVRSAASLKNMLTNTKYIGEFRDNKNYCPAIIDRDLFFDVQRLLKINIKSGKKHDYIFSGLVVCDDCDHIMSGCQQRAGGRVRADGTRIVYKYSVYRCRQGVNLHRCPNRKLVFETTLEKMLLERIRPELENYIAEYEVANLPALRTDAKRRSVEGKMQKLKDLYLNDLITMDEFKLDREKLLMQLEKINAEDSRPVKDLSYLKNFLKMDFESVYDSLSIPERRELWRSIVKEIRVDHDKNIHIIFL

SEQ ID NO: 12872 - DNA, 50 bp, Anaerostipes hadrus
  source 1..50: mol_type = genomic DNA
tatactactaactgaacccctccggtcggtaggttcaatttagtagtatg

SEQ ID NO: 12873 - DNA, 40 bp, Anaerostipes hadrus; identical to SEQ ID NO: 12868
  source 1..40: mol_type = genomic DNA

SEQ ID NO: 12874 - DNA, 50 bp, Anaerostipes hadrus
  source 1..50: mol_type = genomic DNA
tatactactaactgaacccctccggacggtaggttcaatttagtagtatg

SEQ ID NO: 12875 - DNA, 40 bp, Anaerostipes hadrus; identical to SEQ ID NO: 12870
  source 1..40: mol_type = genomic DNA

SEQ ID NO: 12876 - protein, 569 aa, Aeromonas sp ASNIH7
MSRLVKAYSYIRFSTPKQAQGDSYRRQIQQAIDYCAKHKLELDEKAIEDFGVSGFRGSNWTDGALGRFIEAVKSGAIAKGSYLLVESMDRLSRQTVLKAFTQFIEILNAGIVVVTLSDGEIFRTTDDGKNCDFAKLIISIVYMARANDESEMKSRRSRAAWSNGRKEARESNKVMTNSRLPTWLTREGERIVPIPERAAIVNEMFEMAKSGCGYEQIAKAFLEKGYKTFGKEADWRPAGIQAVIKSQAVIGVFQPHVIENGERVPDGEPILGYYPTIVSPALFEEVQHLIGTRSKHSGSYRKGTYSNLFSGVLRCQCGELLRYHNKGKAGNPRNYLVCPKQNITGCNLPNMLYDKVAPQLLQAVSLLTAVMRQRGAASEKTLALKDELAILQRKLELEAKKRNKAAQSMLELDDDAVFRELFTQCKANCQALEVQIHQLEDDIMGRELSEKTLGKMIVPDDLKNTEQRQRFNSQLKAAVKEISIIRTGDSVAAVFKDLDGQFMLEQAFKPKLAGSSIRDISGEELLRTTAEEPYIDADWVKAESNEFESIHHKSDSEFDDDFEDLKASK

SEQ ID NO: 12877 - DNA, 50 bp, Aeromonas sp ASNIH7
  source 1..50: mol_type = genomic DNA
tgtggtttttttataaaaaatgcctcgcagtttttgggagaaatgccgta

SEQ ID NO: 12878 - DNA, 40 bp, Aeromonas sp ASNIH7
  source 1..40: mol_type = genomic DNA
gcgggccttcttgatggtgtcgcagttcttgatgccatag

SEQ ID NO: 12879 - DNA, 50 bp, Aeromonas sp ASNIH7
  source 1..50: mol_type = genomic DNA
tgtggtttttttataaaaaatgccttgcagtttttgggagaaatgccgta

SEQ ID NO: 12880 - DNA, 40 bp, Aeromonas sp ASNIH7
  source 1..40: mol_type = genomic DNA
ggtggcctttttgttgttgttgttgttgttgatgccattg

SEQ ID NO: 12881 - protein, 571 aa, Aeromonas sp ASNIH5
MSRPPKAYSYIRFSTTKQAQGDSYRRQIQQAIDYCTEHNLQLDEKAIEDFGVSAFRGSNRIDGALGRFIEAVKGGAIEKGSYLLVESMDRLSRQTILKALSQFIEILNAGIVIVTLSDGEIFRVTDDGKNFDFAKLIISIVYMARANDESEMKSLRSRAAWSNGRKAARESKKVMKNARLPSWLTREGERIVPIPERTAIVSEMFEMAQSGCGYEQIAKVFLEKGYKTFGKEADWRPAGIQAVIKSRAVIGEFQPHVIENGERVPDGEPILGYYPTIVSPAVFEEVQHLIGKRSKHSGSYRKGTYSNLFSGVLRCQCGESLRYGNKGRAGSPRYYLMCPKHNTHGCSMPHLLYSKVEPQLLQAVSLLTVVMEQRKTTTEKMMALKDELATLRRELELEVKRRKKAAQSMLDNDNDADFRELFIQCKANCQALEEQISQLENELMSRELSEKTLSQNLSSEDLDSTDQRQRFNGQLKAVLREIQFSYDGYDLAAVFKDIDGEFMLEQAFEPKLVGSTVRDRDGMTLIKTIAEAPYIDANWVKDEIDEYESFQKESDSEFDDDFEDLSSEESK

SEQ ID NO: 12882 - DNA, 50 bp, Aeromonas sp ASNIH5
  source 1..50: mol_type = genomic DNA
tgcggctcttacaacaaaaacagctcgcagtttttaggggaaatgccgta

SEQ ID NO: 12883 - DNA, 40 bp, Aeromonas sp ASNIH5; identical to SEQ ID NO: 12878
  source 1..40: mol_type = genomic DNA

SEQ ID NO: 12884 - DNA, 50 bp, Aeromonas sp ASNIH5
  source 1..50: mol_type = genomic DNA
tgcggctcttacaacaaaaacagcttgcagtttttaggggaaatgccgta

SEQ ID NO: 12885 - DNA, 40 bp, Aeromonas sp ASNIH5; identical to SEQ ID NO: 12880
  source 1..40: mol_type = genomic DNA

SEQ ID NO: 12886 - protein, 567 aa, Aeromonas sp ASNIH1
MSHPPKAYSYIRFSTPKQAQGDSYRRQIAKAKEYCAEHNLTLVEETIDDHGISAYRGANMTEGALGRFLEAVKSGAIEQGSYLLVESVDRLSRQAVEEALGQFLGLINAGVVVVTLDDKAVYRKGQVETQNLLLSIMFMVRANNESEVKSDRSRKAWENGRKQARENNKVMKNSRLPSWLQWEEGQIVPIAERAAIVNEMFEMAKSGCGYEQIAKAFRSKGYKTFGKVTDWRPAGIQAVIKSRAVIGEFQPHIIEQGERIPDGEPIIGYYPAIVSRSLFKDVHHIISQRNNHSGSYRKGLFNNLFSGVLRCQCGEPLRFNNKGKAGSPRNYLICPMRQVAGCKLPNLLHEKIELQLLQAASLLSEVMKQRRPEDAKTVALKEELAELQMQLEIGIKKRKKAAESMVDNDDDADFREIFLSHKANCQALEEHIAQLESEIMDRELSQKTLGRLIQPKDLKSTEQRQQFNAQLKAVLQEIRLHYDGFDLAAVFKDIDGSIVLEQAFKPKLAGSSVRDLSGEELLRTTSEEPYIDAAWVKGEIEEYDLHRKDVSSGLDDEFDDLSLQESK

SEQ ID NO: 12887 - DNA, 50 bp, Aeromonas sp ASNIH1
  source 1..50: mol_type = genomic DNA
tatggttctttcatctttaactgctcgcagttcttgggggaaatgccgta

SEQ ID NO: 12888 - DNA, 40 bp, Aeromonas sp ASNIH1; identical to SEQ ID NO: 12878
  source 1..40: mol_type = genomic DNA

SEQ ID NO: 12889 - DNA, 50 bp, Aeromonas sp ASNIH1
  source 1..50: mol_type = genomic DNA
tatggttctttcatctttaactgcttgcagttcttgggggaaatgccgta

SEQ ID NO: 12890 - DNA, 40 bp, Aeromonas sp ASNIH1; identical to SEQ ID NO: 12880
  source 1..40: mol_type = genomic DNA

SEQ ID NO: 12891 - protein, 570 aa, Aeromonas sp ASNIH1
MSRPPKAYSYIRFSTPKQAQGDSYRRQLQKATDYCAEHNLQLDEKTIDDFGLSAYRGANMAIGALGRFFDAVKSGKIEQGSYLLVESVDRLSRQTVEDALIQFLAIISAGIVIVTLDDKAVYRKGQVETQNLLLSIVFMARANNESETKSGRSRDAWENGREQARENNKVMKNSRLPSWLKLEEGKIRPIPERAAIVNEMFELAKTGCGYEQIAKIFLEKGYKTFGKEADWRPAGIQAVIKSQTVIGVFQPHKLDIDSGERVPEGDPILGYYPTIVSPALFEEVQHLISKRNKHSGSYRKGTFNNLFSGVLRCQCGESLRYQNKGRAGSPRNYLVCPKQNTAGCKLPNMLYSRVEPQLLQAIFLLNNVMKQRVEIEDKTIALKNTLAELRVQLEAETQKRKKAAQLVLENDNDADFRVLFEQCKKKTQALEEQVQQAERELFSRELSAKTLKYIIKPDELKTTEQRQLFNSQLKMALKEIRFRFDGGYLWAEYKDLDGGLMLTQVFENKLAGSSIYDGSRYCVRKTQPNAPYGVDPSVMQQEMENDIRNSQKNDDGTDPDFEDLSSEYSQ

SEQ ID NO: 12892 - DNA, 50 bp, Aeromonas sp ASNIH1
  source 1..50: mol_type = genomic DNA
tgtggtctattcaataaaaacagctcgcagttcttgggagaaatgccgta

SEQ ID NO: 12893 - DNA, 40 bp, Aeromonas sp ASNIH1; identical to SEQ ID NO: 12878
  source 1..40: mol_type = genomic DNA

SEQ ID NO: 12894 - DNA, 50 bp, Aeromonas sp ASNIH1
  source 1..50: mol_type = genomic DNA
tgtggtctattcaataaaaacagcttgcagttcttgggagaaatgccgta

SEQ ID NO: 12895 - DNA, 40 bp, Aeromonas sp ASNIH1; identical to SEQ ID NO: 12880
  source 1..40: mol_type = genomic DNA

SEQ ID NO: 12896 - protein, 571 aa, Aeromonas media; identical to SEQ ID NO: 12881

SEQ ID NO: 12897 - DNA, 50 bp, Aeromonas media
  source 1..50: mol_type = genomic DNA
ctcggctgttccactaataacggctcgcagtttttaggggaaatgccgta

SEQ ID NO: 12898 - DNA, 40 bp, Aeromonas media; identical to SEQ ID NO: 12878
  source 1..40: mol_type = genomic DNA

SEQ ID NO: 12899 - DNA, 50 bp, Aeromonas media
  source 1..50: mol_type = genomic DNA
ctcggctgttccactaataacggcttgcagtttttaggggaaatgccgta

SEQ ID NO: 12900 - DNA, 40 bp, Aeromonas media; identical to SEQ ID NO: 12880
  source 1..40: mol_type = genomic DNA

SEQ ID NO: 12901 - protein, 567 aa, Aeromonas rivipollensis
MSRPPKAYSYIRFSTPKQAQGDSYRRQLQKATDYCAEHNLQLVDKTIDDFGTSAFRGANMTEGALGRFFDAVKSGQIEQGSYLLVESVDRLSRQAVVAALSQFLALISAGIVIVTLDDKAVYCSGKVETQNLLLSIMFMVRANNESETKSERSREAWDKGRKQARDNNQVMKNSRLPSWLKWEEGKIMPIPERAAVVNEMFELAKSGCGYEQIAKIFLEKGYKTFGKEADWRPAGIQAVIKSESVIGVFQPHEIKDGKRIPEGGPIWGYYPTIVSPALFEEVRHLISKRNNHSGSYRKGTYNNLFSGVLRCQCGELLRYQNKGRAGSPRNYLVCPKQNIIGCKLPNMLYDKVEPQLLQAISILSKVMQQRVGENEKVLAIKENLATLRAQLDVETRKKNKAAQSILDFDDDATFRKEFAKSKANCEALEEQLHEIESDLLSRELSERTILKLLKPEDLSSTNQRQLFNSQLKTAVKYIKFSYDGYDLAAVFKDLDDKFMLEQSFKPKLVGSSIRDISGEELLRTTAEAPYIDANWVKEEIDEYESFQKGSGSEFDDDFEDLSSEELK

SEQ ID NO: 12902 - DNA, 50 bp, Aeromonas rivipollensis
  source 1..50: mol_type = genomic DNA
ttcggcccttccaacaaaaacagctcgcagtttttaggggaaatgccgta

SEQ ID NO: 12903 - DNA, 40 bp, Aeromonas rivipollensis; identical to SEQ ID NO: 12878
  source 1..40: mol_type = genomic DNA

SEQ ID NO: 12904 - DNA, 50 bp, Aeromonas rivipollensis
  source 1..50: mol_type = genomic DNA
ttcggcccttccaacaaaaacagcttgcagtttttaggggaaatgccgta

SEQ ID NO: 12905 - DNA, 40 bp, Aeromonas rivipollensis; identical to SEQ ID NO: 12880
  source 1..40: mol_type = genomic DNA

SEQ ID NO: 12906 - protein, 568 aa, Aeromonas hydrophila
MSRPVKAYSYIRFSTPKQAQGDSYRRQLQQAMDYCAEHNLQLDDKTIDDFGTSAFRGANMSEGALGRFVDAVKHGEIEQGSYLLVESVDRLSRQAVEEALEQFLAIVRAGIVIVTLSDKQVFRRGQVDFTKLIVSIVYMARANDESEMKSRRSRAAWSNGREQARKNNKVIANSRLPSWLTRDGEQIIPIPERVAIVNEMFEMAKSGCGYEQIAKVFLEKGYKTFGKEADWRPAGIQAVIKSQAVIGVFQPHVIENGHRVPADEPILGYYPTIVSPALFEEVQHLISKRNKHSGSYRKGTFNNLFSGVLRCQCGESLRYQNKGRAGSPRNYLVCPKQNTAGCKLPNMLYDKVEPQLLQAVFLLNKVMKQRVEGEDKTIALRTMLAELRVQLEVETQKRKKAAQLVLDNDNDADYRVLFEQCKKKTQALEEQIQRAESDLMSRELSVKTLKYFVDPEDLRSTEQRQRFNGQLKTALKEIRFRFDGGYLWAEYMDIDGSRVLTQTFEDKLAGSSIYDGSSYLVRKTQTEAPYDVDPSVMQKEMDDYIRNLQKNDDGTDPDFEDLSSEYSK

SEQ ID NO: 12907 - DNA, 50 bp, Aeromonas hydrophila
  source 1..50: mol_type = genomic DNA
tgcggttcttctgacaaaaatagctcgcagtttttgggagaaatgccgta

SEQ ID NO: 12908 - DNA, 40 bp, Aeromonas hydrophila
  source 1..40: mol_type = genomic DNA
gcgggcttttttgatggtgtcgcagttcttgatgccatag

SEQ ID NO: 12909 - DNA, 50 bp, Aeromonas hydrophila
  source 1..50: mol_type = genomic DNA
tgcggttcttctgacaaaaatagcttgcagtttttgggagaaatgccgta

SEQ ID NO: 12910 - DNA, 40 bp, Aeromonas hydrophila; identical to SEQ ID NO: 12880
  source 1..40: mol_type = genomic DNA

SEQ ID NO: 12911 - protein, 558 aa, Phocaeicola dorei
MKRVIGYIRVSTDNQDLERQRVLIRKYCENKGYSLLRIEEDYAISGTVSNRNGLNSILNITNSVADMVVVSELSRLSRQDDIFETLTQIHTIIRNVDLVILDEPDKVYEAGKTIILSDFLMLAIKAYGAADERKKIVSRMTTGKDSKVQAFPLMLTDSNIPTGFKAVPNPNYIKGATPKMLLVEDEERMQLVRDIFNYVANGLSLGKTAEKLNMLGYRTARNKPFYEQSIRTIINDSIYNGVRYWKGMKLELPVKFISDEIWNLAHKKVQENKNYSGEAQKHYNPLKGIIKCPCGQTSMYGRTSSCITYRCLDRIKMGIKSPCTNVGIKAETLIYAVWKDVRLRTLDETYQAKSNEKIAEIEAENIKLTQNIKEKDSEIAKLQSDLKTVIDNVMASTNITIVKALNGKADSIDSQIKSIEAKKKAIDEEIASNNRRIADEIKSQSRKELDTLSLEGKGEMFRELLSKVVYYSVSLNSGFIVITYKNDLETIIAYHNRNKPFLWALPTTFRFNKVKRTVIVPTLPEQPKMTSFVLERITEKEYTFKQLQESFNLEEWKI

SEQ ID NO: 12912 - DNA, 50 bp, Phocaeicola dorei
  source 1..50: mol_type = genomic DNA
aggtacaactttgaaaagtcaaacaatgttaagttgttaaagttataccc

SEQ ID NO: 12913 - DNA, 40 bp, Phocaeicola dorei; identical to SEQ ID NO: 4118
  source 1..40: mol_type = genomic DNA

SEQ ID NO: 12914 - DNA, 50 bp, Phocaeicola dorei
  source 1..50: mol_type = genomic DNA
aggtacaactttgaaaagtcaaaccctgttaagttgttaaagttataccc

SEQ ID NO: 12915 - DNA, 40 bp, Phocaeicola dorei
  source 1..40: mol_type = genomic DNA
ggtcatccatcactaacaaccagtctatttaaatttgtcc

SEQ ID NO: 12916 - protein, 535 aa, Angelakisella massiliensis
MKQPYNTALYMRLSRDDENYGDSVSIETQRTILQQYAKEHGLSVYGEYVDDGWSGTNFERPSFQRMMDDVEAGKVNCIVTKDLSRFGREHVMMDYYLEFVFPEKQIRYIAVAENEDTEKGLSDFVPFKNLFNEWFAKDTSRKVKTALRAKFAAGERTFAYAPLGYIRHPEIKNTLAIDEETRWIIEKIFDLALHGAGAAKITKTLIAEKVPTAGWLNYQRYGTFANIYANAPEEKSYAWTIAQVKSILQDETYIGNSVHNKQTNISYKNKKKVRKPKEEWIRVENTHEAIISRDVFEQVQKQIASRRRQQKDATTQIFAGLVKCADCGWSMRFGTNRQNKTPYSHFTCSQYGQMGTQCSAHYIRYDTLYVYVLSRIQYWSHRAQLSEEKLLQQILKNGDRERMTAAKRQESELQRAEKRKAEVDGKFVRMYEDWSAGRITEYNFNLLTKKYQAEQLELEEKISRLQAELSAEQQTALDAEKWVALIKQYANPTELTAELLNTLIEKIVIHEATKGADGMRDQEIEIYYRFIGKID

SEQ ID NO: 12917 - DNA, 50 bp, Angelakisella massiliensis
  source 1..50: mol_type = genomic DNA
ccatatccttaactatgggaaacagaagtttcacatagttaaggatacca

SEQ ID NO: 12918 - DNA, 40 bp, Angelakisella massiliensis
  source 1..40: mol_type = genomic DNA
catatccaactgggagaacgaaaaaacttatccggatatt

SEQ ID NO: 12919 - DNA, 50 bp, Angelakisella massiliensis
  source 1..50: mol_type = genomic DNA
ccatatccttaactatgggaaacattagtttcacatagttaaggatacca

SEQ ID NO: 12920 - DNA, 40 bp, Angelakisella massiliensis
  source 1..40: mol_type = genomic DNA
catattcatttaggagatcttaaagactgatcctcatatt

SEQ ID NO: 12921 - protein, 557 aa, Roseburia inulinivorans; identical to SEQ ID NO: 11441

SEQ ID NO: 12922 - DNA, 50 bp, Roseburia inulinivorans
  source 1..50: mol_type = genomic DNA
aagtatcgctatctaacctcagcaaataatgaggtgtgatagcgatagcg

SEQ ID NO: 12923 - DNA, 40 bp, Roseburia inulinivorans
  source 1..40: mol_type = genomic DNA
tatatattcatgatgacaaaacggccgcccagtgtagaag

SEQ ID NO: 12924 - DNA, 50 bp, Roseburia inulinivorans; identical to SEQ ID NO: 12922
  source 1..50: mol_type = genomic DNA

SEQ ID NO: 12925 - DNA, 40 bp, Roseburia inulinivorans
  source 1..40: mol_type = genomic DNA
tataaattcaagattacaaaaatgccaccaagtagagaag

SEQ ID NO: 12926 - protein, 474 aa, Paenibacillus massiliensis
MQHIAIYIRVSTDEQAEHGYSIEIQKQKLEAFCISQGWDYYKFYIDDGFTGTKMERPALKRMIRHIEEGNVSTVLVHKLDRLSRKQKDVLHLLEDVFDKNNVTFKSSTEPFDTASSFGKATIGILAVFAQLERDMIVERMTLGRRQRVDAGKWYGGRIPFGYIWNKEIEMLEIVPEEAMIIKQIYKLYLQGHSRLSIAEWATSRTNKRTIDHNIVMEILKRPVYSGKFKNSGRIVQGKHEAIIPQEMWDAVQRETEKRKEGQTPLGEYLLTGLLKCGVCGGPIVHVKRVTKRSGKTYAYELYACKKQHVRVKDRTGTCTLGYPRRELVEKYVIQQIKSLGTNPKKVNDLLRGDDDSSDAKRHIDTISDSLKKIDVSLENLYDAIESGDIKASSVRSRIKKLEEQRESLENDLDEMLDNSTRKHDKKIFIDTITQIGLAWDYFDEDEKKAAIRKIVNYVTLTGKTSDPKIDWLLA

SEQ ID NO: 12927 - DNA, 50 bp, Paenibacillus massiliensis
  source 1..50: mol_type = genomic DNA
tcttcattcaggtggttgttcgctaaaacaaaatacaaatcaaatgaaaa

SEQ ID NO: 12928 - DNA, 40 bp, Paenibacillus massiliensis
  source 1..40: mol_type = genomic DNA
taaccactggagcttcggcaaaaattttcaaaaaatgaaa

SEQ ID NO: 12929 - DNA, 50 bp, Paenibacillus massiliensis
  source 1..50: mol_type = genomic DNA
tcttcattcaggtggttgttcgcttaaacaaaatacaaatcaaatgaaaa

SEQ ID NO: 12930 - DNA, 40 bp, Paenibacillus massiliensis
  source 1..40: mol_type = genomic DNA
aaatcacagaagcttcgtgtaacaatttcaaataatgaaa

SEQ ID NO: 12931 - protein, 520 aa, Anaerostipes hadrus
MSDQKLIIGYYRLSMEDDSEGESNSIINQRKLVKDYISNIPELASMPFQEFYDDGYSGSSMERPAIKQVLELARENKVQCIVVKDFSRFARNYIEMGTYLEQIFPFLGVRFISISDRYDSKDYIGKSSDIEVQFKGLIADFYVKDQSVKVKSAVSTRRGKGEYCCGSAPYGYRINPENKKELVIVEDEAEVIRRVFELTNQRYSKMEICRLFNEEGVLTPLQSMSRRQKSDSKKAASRGLQWTSDMIRKIVDDKTYIGCMVYGKTKIPDPGTGKEVPVPRNQWKVMENHHEPIVSKEIFEKAQSLQIRYTKKSKFDRETTLLGGYVKCGNCRRSLTSSSPVHGHILYSCAYSKGKEDTGCFAGKADNKMLEHIVLAEIKAYLRQNISQEQMQQSMRKQHTDSIEAYELESTDCEKRQEQIKLQNRQNYEKYHEGQMNQKQFMEAKKQLEEERERLQKRIQELEELINGEKEILMKKNVPVEQMLMYLGYEKLTREMLEEYVQGIYVYDDGRVEVEWKSLA

SEQ ID NO: 12932 - DNA, 50 bp, Anaerostipes hadrus
  source 1..50: mol_type = genomic DNA
tgtagcaatgacttgacatcctcgggggaggacgttataataaggttaca

SEQ ID NO: 12933 - DNA, 40 bp, Anaerostipes hadrus
  source 1..40: mol_type = genomic DNA
gaatggggagttggggtatgggaggttgtgtattgttcaa

SEQ ID NO: 12934 - DNA, 50 bp, Anaerostipes hadrus; identical to SEQ ID NO: 12932
  source 1..50: mol_type = genomic DNA

SEQ ID NO: 12935 - DNA, 40 bp, Anaerostipes hadrus
  source 1..40: mol_type = genomic DNA
gaaagggtaattgggggatgggaggatgtgagttggttaa

SEQ ID NO: 12936 - protein, 520 aa, Mediterraneibacter faecis; identical to SEQ ID NO: 12931

SEQ ID NO: 12937 - DNA, 50 bp, Mediterraneibacter faecis; identical to SEQ ID NO: 12932
  source 1..50: mol_type = genomic DNA

SEQ ID NO: 12938 - DNA, 40 bp, Mediterraneibacter faecis
  source 1..40: mol_type = genomic DNA
gaatgggaagttggggtatgggaggttgtgtattgttcaa

SEQ ID NO: 12939 - DNA, 50 bp, Mediterraneibacter faecis; identical to SEQ ID NO: 12932
  source 1..50: mol_type = genomic DNA

SEQ ID NO: 12940 - DNA, 40 bp, Mediterraneibacter faecis; identical to SEQ ID NO: 12935
  source 1..40: mol_type = genomic DNA

SEQ ID NO: 12941 - protein, 524 aa, Ruminococcus torques
MPVTECIAVYIRLSSEDNDVDGSIKAESNSVSAQRMLINEFIKKQDEFTNCPVVEYVDDGYSGTNFNRPGFQRMVEDAKAGRIKSIVIKDFSRFGRDYLEVGNYLEKILPVLGIRIISINDGFDSINSSGFTGGMSVALKNMLNAMYSRDLSRKVRSAMKTHAKNGEYMPAFPKYGYIKDPEDKHHLVIDPEAAEIVKLIFTMAADGKTKGQIAKHLNETHVLTCREYMCRKGIKMHRENEKEKKLWSVTTISDMLKNEVYLGKIIWNKKRVARTGSNKLVSNDKEEWIVVENAHEPIISDELFQKANEKAFTNQKRVLTKRGVACPIFFCPTCGRRLGFTSRETGYRCMQAHISGLSGCAESKMDRKEAEETVLDAARNMAQLISENLEKKKSEWHKTILKEENIATLESEKKRLSSRKMKLYSDYRSEVLDKEGYMEELEKTTSRISEITLQIAELENEIAVAKKKCDEATEKEMEVNEIAALQDFDKIQLSKIIEKVFIYEPGRMEISWKMDDIFYKEEKA

SEQ ID NO: 12942 - DNA, 50 bp, Ruminococcus torques; identical to SEQ ID NO: 10887
  source 1..50: mol_type = genomic DNA

SEQ ID NO: 12943 - DNA, 40 bp, Ruminococcus torques
  source 1..40: mol_type = genomic DNA
gaccggaatcagagttggagaattagtaaatctgaacatt

SEQ ID NO: 12944 - DNA, 50 bp, Ruminococcus torques
  source 1..50: mol_type = genomic DNA
tttagacttatattgacaaaagcaattgatgatgataaaataagactaaa

SEQ ID NO: 12945 - DNA, 40 bp, Ruminococcus torques
  source 1..40: mol_type = genomic DNA
gaccagaaacattataggaatagtagtaattatgaacatt

SEQ ID NO: 12946 - protein, 518 aa, Sphingobium yanoikuyae
MRTILYARYSSELQNALSTVDQIASLRERADREGWTIIDTFADEEISGRAGIGEMQRPGLNAMLNRVERGDVDQVLAEATDRIARHSGDAHAVREHLEHFGARLFTLADGHVDEITGTIKGLMDSRFLKDLADRIRRGQRGQHGRGFNAGGLAYGYNVVKKIGEDGEIVRGILEVNEEEAAIVRRIFDETLAGVSSRAIVKALNEEGIPSPSGKLWATNVIHGDRVRANGILRNNLYRGVMVYGRTRRAYHPKTRRYVARVNPVSEWRFVDVPHLRIVSDAQWKAIEAHYAAFDGDVRTKKRHPKRLLSGLGKCGVCGGTWTVISPAKWGCSTAKNKQACSNTRTISTALYEQRTMGQLKQILLNPDAIQLFVERYNVGIRKRLAEATTNRAPLERKAADLRGRISRLVDAIADGAGEFQEVKDRLRTARADLADTEHQLKALDDAAPIALPDDLADRYRIYIAQLDDALATEGAARERAASAIRELIDTLTLTPNKTGRGVEIQLTGHMANIINLAK

SEQ ID NO: 12947 - DNA, 50 bp, Sphingobium yanoikuyae
  source 1..50: mol_type = genomic DNA
aggtatcttcccgtccaacgcgttcctccgctaccaacggtaagatacct

SEQ ID NO: 12948 - DNA, 40 bp, Sphingobium yanoikuyae
  source 1..40: mol_type = genomic DNA
gtcgggggttcaagtccctcctccgctaccatttccaaga

SEQ ID NO: 12949 - DNA, 50 bp, Sphingobium yanoikuyae; identical to SEQ ID NO: 12947
  source 1..50: mol_type = genomic DNA

SEQ ID NO: 12950 - DNA, 40 bp, Sphingobium yanoikuyae
  source 1..40: mol_type = genomic DNA
gtccctggttcatttccctcctcccctcccattttcagga

SEQ ID NO: 12951 - protein, 557 aa, Sphingobium yanoikuyae
MTATAIYGRYSTELQSETSLIDQERFNRRFIERMDWQGPVVVYSDRAISGASRLNRPGFLKMLEDMKAGRIGRIVVENLSRLTRDLEDSSHLMKQAKFRSVKIYCANENGAELTKMNAAINALMAEQAREQGAEMIRRGMTGVVLAGKSAGGRSYGYRSLPRLDIEKGKGGRIEIVPHEADIVREIFIRYIAGESPKAIAADLNRRGVPSPRASLKGKNGFNTGLWSDSTINDNRARGTGILHNALYAGRRNWNRVGMPKNPDTARRVSRANHESDWISVKIDDTLLIVSDEVFAAAQTRKEERRFKQIKRQAQRPKRLFSGLLRCGCCGLSVNSAGWDKNDRLRVKCSGKTSRGVCGDPVGCYIEDIENVVMSALRKHLAAPMMRQAYIDEYMAERHRFASSAGNDHEAIAKQLAALTAQMDRARKWAREGITDEADFERDYPPLVAERAALEAKLSATAAPAAAPSFHPVAVARFTSALDGLTDVLCEDGSQPSAQMIRAVVDRIVVTPLAEKPSNPFERRQISVEILGGLDALLSRKAGRSSTTTLVGEGGGSG

SEQ ID NO: 12952 - DNA, 50 bp, Sphingobium yanoikuyae
  source 1..50: mol_type = genomic DNA
gttggggaaggtggtggtagcggaggtccgagttcatcaagctccctgac

SEQ ID NO: 12953 - DNA, 40 bp, Sphingobium yanoikuyae
  source 1..40: mol_type = genomic DNA
tcatggaaatggtagcggaggagggacttgaacccccgac

SEQ ID NO: 12954 - DNA, 50 bp, Sphingobium yanoikuyae; identical to SEQ ID NO: 12952
  source 1..50: mol_type = genomic DNA

SEQ ID NO: 12955 - DNA, 40 bp, Sphingobium yanoikuyae
  source 1..40: mol_type = genomic DNA
tcctgaaaatgggaggggaggagggaaatgaaccagggac

SEQ ID NO: 12956 - protein, 537 aa, Faecalibacillus intestinalis
MKQQIYNTALYLRLSRDDELQGESSSITTQRSMLRLYAKEHHLNVIDEYIDDGWSGTNFDRPSFQRMIEDIEAGKINCVVTKDLSRLGRNYIMTGQYTELYFPSHNVRYIAIDDGVDSEKGESEIAPFKNIINEWVARDTSRKVKSAFKTKFAEGAHYGAYAPLGYKKHPDIKGKLLVDDETKWIIEKIFSLAYQGYGSAKITKQLRAEKVPTASWLNFTRYGTFAHIFEGKPESKRYEWTIAHVKAILKSEVYIGNSVHNMQSTVSFKSKKKVRKHESEWFRVENTHEPIIDKEVFYRVQEQIKSRRRQTKEKATPIFAGLVKCADCGWSMRFGTNKTNKTPYSYYACSYYGQFGKGNCSMHYIRYDVLYQAVLERLQYWAKAVQQDEEKVLNKIQKAGNAERIREKKKKASTLKKAENRQNEIDRLFAKMYEDRACEKITERNFVMLSSKYQKEQIELEQQITSLREELSKMEQDMIGAEKWIELIKEYSVPKELTAPLLNAMIEKILIHEATTNEDNERIQEIEIYYRFIGRVE

SEQ ID NO: 12957 - DNA, 50 bp, Faecalibacillus intestinalis; identical to SEQ ID NO: 402
  source 1..50: mol_type = genomic DNA

SEQ ID NO: 12958 - DNA, 40 bp, Faecalibacillus intestinalis
  source 1..40: mol_type = genomic DNA
tgtttcaaaatgggagtcaggtcaatcgatgcctgatacc

SEQ ID NO: 12959 - DNA, 50 bp, Faecalibacillus intestinalis
  source 1..50: mol_type = genomic DNA
taatatttttaactaagggaaaccattgtttcccaaacaaaaagatatta

SEQ ID NO: 12960 - DNA, 40 bp, Faecalibacillus intestinalis
  source 1..40: mol_type = genomic DNA
tctttcaaaatgggagtcaatcctctcaaatcctgacact

SEQ ID NO: 12961 - protein, 480 aa, Streptococcus pyogenes
MKSTNKVAIYVRVSTTNQAEEGYSIDEQKAKLTSYCDIKDWNIYEIYTDGGFSGSNTERPALEQLIRDAERKKFDTVLVYKLDRLSRSQKDTLYLIEDIFIKNGIEFLSLQENFDTSTPFGKAMIGLLSVFAQLEREQIKERMQLGKLGRAKAGKSMMWGRTSYGYDYQKETGSLTINPAQSLVVKYIFERYLAGRSITKLRDDLNEKYPKEISWNYRTVRGILSNPVYCGYNQYKGQLFPGEHTPIISEDVYKRTQEELKIRQRIAAEKTNPRPFQAKYMLSGLAQCGYCHAPLKLIMGGIRKDGTRFIRYECYQRHPRKTAGVTVYNNNQKCHSGAYDKDELEKYIITEISKLQHDQSYIEQLFSTQSNTIDRESYQKQIEELTKKLSRLNDLYIDDRITLDELQKRSSEFMTMRTALEEELKNDPEKQGQERRNNIKQVLDCEDIASIDYDGQKTIARALIDKVQVTSERIVINWRI

SEQ ID NO: 12962 - DNA, 50 bp, Streptococcus pyogenes
  source 1..50: mol_type = genomic DNA
taaagaattttactatccttcatttcaatcgacgtcactaaaattctttt

SEQ ID NO: 12963 - DNA, 40 bp, Streptococcus pyogenes
  source 1..40: mol_type = genomic DNA
caaaaatactacaacctactcaaataaagtgggttgaaca

SEQ ID NO: 12964 - DNA, 50 bp, Streptococcus pyogenes
  source 1..50: mol_type = genomic DNA
taaagaattttactatccttcattctaatcgacgtcactaaaattctttt

SEQ ID NO: 12965 - DNA, 40 bp, Streptococcus pyogenes
  source 1..40: mol_type = genomic DNA
caaaaataaaacatataacctaaatatagtggtttgcaca

SEQ ID NO: 12966 - protein, 572 aa, Hydrogeniiclostidium mannosilyticum
MKGQDNRKYAIYSRKSKFTGKGESIENQIELCRQHIKLHHENVTEEDILIFEDEGFSGGNVNRPQFQAMMKQIRANQIQAVVCYRLDRISRNVGDFAKLKDEFDYYNVEFTSIRDDFDTTSPSGRAMMMMVSVFAQLERETTAERIRDNMHELAKSGRWLGGTTPTGYKSTQIVGSVTVDGKERKAYKLDIIKEEAEIIKLIFSKFIETNSLTKTDTYLLQNNITTKNGKNFTRFSIRSILQNPVYMIADQNAWEYFDSLGVEIYAEQSEFDGKHGIMAYNKTIQKSGKSNQMRDMDEWIVAVGKHKGLIAGADWVKVQDLLHQNRSKSYRKPKSNVALLSGLLYCGNCGSFMRPKLSQRTNAQGEKIYSYLCETKERSRCQLCNSKNPNGNELDKMICQQIKRISENSSDFIKNLESVQRKLEGNREEYDQQLNALKKELQENEQQIANLVDTLAKTPNTPAFDYITEQINTLHEKNEKIKNRINELESLTKNHLYSSEEFDRTKELLKSFGQSFDTMGVEQKRMALRAFIRRIVWDGKNVHVVLFGDTESEIDYTNLTEENSEPNRGDSE

SEQ ID NO: 12967 - DNA, 50 bp, Hydrogeniiclostidium mannosilyticum
  source 1..50: mol_type = genomic DNA
cagagccaaaccgaggggatagcgaaaccaatcccctcataacggctctt

SEQ ID NO: 12968 - DNA, 40 bp, Hydrogeniiclostidium mannosilyticum
  source 1..40: mol_type = genomic DNA
tgccgcaagatgcattgaaaatgaagtactgatgtttttc

SEQ ID NO: 12969 - DNA, 50 bp, Hydrogeniiclostidium mannosilyticum
  source 1..50: mol_type = genomic DNA
cagagccaaaccgaggggatagcgtcaccaatcccctcataacggctctt

SEQ ID NO: 12970 - DNA, 40 bp, Hydrogeniiclostidium mannosilyticum
  source 1..40: mol_type = genomic DNA
tgcctcaactggcatttaatctgaaaaactgatattattc

SEQ ID NO: 12971 - protein, 522 aa, Catenibacterium mitsuokai; identical to SEQ ID NO: 2571

SEQ ID NO: 12972 - DNA, 50 bp, Catenibacterium mitsuokai
  source 1..50: mol_type = genomic DNA
tgttgtctttatacaatcgcaccctctgcggcgacttcgtaagaacaaca

SEQ ID NO: 12973 - DNA, 40 bp, Catenibacterium mitsuokai
  source 1..40: mol_type = genomic DNA
tatgtaaaagagttcttcttcactaaagccttcttctact

SEQ ID NO: 12974 - DNA, 50 bp, Catenibacterium mitsuokai
  source 1..50: mol_type = genomic DNA
tgttgtctttatacaatcgcacccaatgcggcgacttcgtaagaacaaca

SEQ ID NO: 12975 - DNA, 40 bp, Catenibacterium mitsuokai
  source 1..40: mol_type = genomic DNA
tatgtaaaagaaaggttctaaaatatagcgttcttcagct

SEQ ID NO: 12976 - protein, 551 aa, Streptosporangium roseum
MRVLAVKRISRDTEQSSALARQEVQLSKAIREGHHTVAGWVEDATVSGAVNLDKRPSLGQWLTAPLIHEWDGMMVTEQDRITRDDLHWAAFVGWVLENGKTIVVLDDPSFDITTPNGRLIASVKAAQAANYRNSVRTKKLNQLEWYREERLWSGGSWPFGYRAIRVLHREALRWRLGIDPVTGPLIREAYDRLVNKGHSIRMIVLDWNARGILTARDYQRHVKALEGGEQAEAAVKGTQWSNTVLRVVLTNPALMGYAVYKGEIQKKAGLPVQWADPILTLEEFEKLQEVLARRGGANRNITPRTTDWAGIFYCACGSVYYSNSAPRKLKDGSVRRHDYYLCKTRQVGTRCAYVTSWPLEILRTHLEDAFLSNAGDLEIMTRTYIPGSDRSADIRQLQEALENLTGNLIHLKPGSAGATAVLKAMEEHEAALAELEALPVIPSRWQESGTGETFRQFWERNPSWEVRCDFLRKTGVRLYVAGNPKAPDLDLFLPDDLQQRIINAVSDTVEPGALEAAGRQADDAMAERRASDAALREAAMEATRGTRDLTR

SEQ ID NO: 12977 - DNA, 50 bp, Streptosporangium roseum
  source 1..50: mol_type = genomic DNA
cgtttggaatccctaacatccgacacgtcggacttgcgatagcccaaacc

SEQ ID NO: 12978 - DNA, 40 bp, Streptosporangium roseum
  source 1..40: mol_type = genomic DNA
catccggctgcactccgacacctcgggcgtcaccctgacc

SEQ ID NO: 12979 - DNA, 50 bp, Streptosporangium roseum
  source 1..50: mol_type = genomic DNA
cgtttggaatccctaacatccgactcgtcggacttgcgatagcccaaacc

SEQ ID NO: 12980 - DNA, 40 bp, Streptosporangium roseum
  source 1..40: mol_type = genomic DNA
catcccgctgcaccctgactcctggggctgcaccgtaagc

SEQ ID NO: 12981 - protein, 661 aa, Vibrio splendidus
MFSFDKNLYKGICIPYARFSTKSQSKVGKKSLERQLGEARRYAEQNNLFINEDLIFADKGVSGRSLSGNLAKAFKKGQMQVMLAMLDDVPAEERQFVFITFHNFDRFSRMSPDDAQAYFNLILQKGFNIITTIDNQLYTRNNKSLSSMIISIIKMTTAWQESEVKSIYVKDALARKKEIVDYLYNHPSQKGKHKHIGVVQPSIPRWIKQENITYEYVDQNGLKKVDTFKRFTLHEQKAKIVQYIFELRLSGLGHTRISQRLNEEGIPVFDQGKFKEAKHWHGYAIQNILVNEKVLGHLVLKSYKEEEFLCEESKTFKKRKVSVDSTGKLHNYYPAAVTEDMFIRANNVQLNKKSKPKPIGRIGERTNIFARIMVCSCGGSLQYHRTVKKFKNHERIKEYLRCLNAQFKNKCNCSGINYTELEESFFRFVNHLDFRSICAVGAGSVDNKIQSIEMQISESETVFNKLKLTKQGLEKTFNSAIEKGMDATFVLNSISQNDEQQKEVKSKIEDLGLHIKKLELSKQNTVDEIIDMQAYSKDLKKADMDTKIKMRKKINDFLSSHIEHMEVCSNDYQRFVIVCFGDNIIRTYAYSDNFASDLMFNSIKVNFEGLNATQSKFLFVNYLKIIRESLKGERGAVSRLDMLNDLKQAKELYYNNLGIEL

SEQ ID NO: 12982 - DNA, 50 bp, Vibrio splendidus
  source 1..50: mol_type = genomic DNA
ggttgtgtaaaggtgtgtgcatccttagataagaaccatattacgaaacc

SEQ ID NO: 12983 - DNA, 40 bp, Vibrio splendidus
  source 1..40: mol_type = genomic DNA
agatgacattttgatatccttcattgtgaagaatcccaaa

SEQ ID NO: 12984 - DNA, 50 bp, Vibrio splendidus
  source 1..50: mol_type = genomic DNA
ggttgtgtaaaggtgtgtgcatccctagataagaaccatattacgaaacc

SEQ ID NO: 12985 - DNA, 40 bp, Vibrio splendidus
  source 1..40: mol_type = genomic DNA
agatcatattttcatatctctcactgtgacaaaccccaca

SEQ ID NO: 12986 - protein, 549 aa, Mycoplasma hominis
MSKEKIKVYLYTRVSTSIQIEGYSLEAQKSRMKAFAIYNDYEIVGEYEDAGKSGKSIEGRIQFNRMMEDIKSGKDGVSFVLVFKLSRFARNAADVLSTLQIMQDYGVNLICVEDGIDSSKDAGKLMISVLSAVAEIERENIRIQTMEGRIQKAREGKWNGGFAPYGYKLEDGKLFINEEEAIAIRTIFDQYVNTTIGANGISKYLENHEIRKIPRQNGKNPLFDAGLIRKILKNPVYNGKIAFGRRTLEKVHGTRNEYKQVEQDEYLISEGIHEAIVSDEVWQAAQVKLKSQAKKYEHVNKGKDTRTHLLSGIVKCPICGVGMFGNKCIKKKKDGTKYKDFYYYGCKHRQMIRGHKCTFRKQIREELLDDAVAEVIVKIVSNPKFASMMQEKINMKVDTSEIETEIDNYQKELRKCHSTKFKLIEEIDNLDVEDKHYKRRKQDLDDRLYRMYDKIDELESSLIDAKAKKQTIEAEKLTGDNIYKVLIYFDKLYKVMNDVERRQLITALIFEIQVYEEKQPNGQWLKSITFKLPIIEENLNIGLDNDEHV

SEQ ID NO: 12987 - DNA, 50 bp, Mycoplasma hominis; identical to SEQ ID NO: 12327
  source 1..50: mol_type = genomic DNA

SEQ ID NO: 12988 - DNA, 40 bp, Mycoplasma hominis
  source 1..40: mol_type = genomic DNA
tcctcaaacttatcatattgaaatgttgtcgcttttaaaa

SEQ ID NO: 12989 - DNA, 50 bp, Mycoplasma hominis
  source 1..50: mol_type = genomic DNA
ggtttggacaatgatgagcacgttaggacggtagcacttttgtccaaact

SEQ ID NO: 12990 - DNA, 40 bp, Mycoplasma hominis
  source 1..40: mol_type = genomic DNA
tactaaaaatgaccattttagaatgttgttgctgttaaca

SEQ ID NO: 12991 - protein, 549 aa, Mycoplasma hominis
MSKEKIKVYLYTRVSTSIQIEGYSLEAQESRMKAFAIYNDYEIVGEYEDAGKSGKSIEGRIQFNRMMEDIKSGKDGVSFVLVFKLSRFARNAADVLSTLQIMQDYGVNLICVEDGIDSSKDAGKLMISVLSAVAEIERENIRIQTMEGRIQKAREGKWNGGFAPYGYKLEDGKLFINEEEAIAIRTIFDQYVNTTIGANGISKYLENHGIRKIPRQNGKNPLFDAGLIRKILKNPVYNGKIAFGRRTLEKVHGTRNEYKQVEQDEYLISEGIHEAIVSDEVWQAAQVKLKSQAKKYEHVNKGKDTRTHLLSGIVKCPICGVGMFGNKCIKKKKDGTKYKDFYYYGCKHRQMIRGHKCTFRKQIREELLDDAVAEVIVKIVSNPKFASMMQEKINMKVDTSEIETEIDNYQKELRKCHSTKFKLIEEIDNLDVEDKHYKRRKQDLDDRLYRMYDKIDELESSLIDAKAKKQTIEAEKLTGDNIYKVLIYFDKLYKVMNDVERRQLITALISEIQVYEEKQPNGQWLKSITFKLPIIEENLNIGLDNDEHV

SEQ ID NO: 12992 - DNA, 50 bp, Mycoplasma hominis; identical to SEQ ID NO: 12327
  source 1..50: mol_type = genomic DNA

SEQ ID NO: 12993 - DNA, 40 bp, Mycoplasma hominis; identical to SEQ ID NO: 12988
  source 1..40: mol_type = genomic DNA

SEQ ID NO: 12994 - DNA, 50 bp, Mycoplasma hominis; identical to SEQ ID NO: 12989
  source 1..50: mol_type = genomic DNA

SEQ ID NO: 12995 - DNA, 40 bp, Mycoplasma hominis; identical to SEQ ID NO: 12990
  source 1..40: mol_type = genomic DNA

SEQ ID NO: 12996 - protein, 484 aa, Mycoplasma hominis
MMEDIKSGKDGVSFVLVFKLSRFARNAADVLSTLQIMQDYGVNLICVEDGIDSSKDAGKLMISVLSAVAEIERENIRIQTMEGRIQKAREGKWNGGFAPYGYKLEDGKLFINEEEAIAIRTIFDQYVNTTIGANGISKYLENHGIRKIPRQNGKNPLFDAGLIRKILKNPVYNGKIAFGRRTLEKVHGTRNEYKQVEQDEYLISEGIHEAIVSDEVWQAAQVKLKSQAKKYEHVNKGKDTRTHLLSGIVKCPICGVGMFGNKCIKKKKDGTKYKDFYYYGCKHRQMIRGHKCTFRKQIREELLDDAVAEVIVKIVSNPKFASMMQEKINMKVDTSEIETEIDNYQKELRKCHSTKFKLIEEIDNLDVEDKHYKRRKQDLDDRLYRMYDKIDELESSLIDAKAKKQTIEAEKLTGDNIYKVLIYFDKLYKVMNDVERRQLITALISEIQVYEEKQPNGQWLKSITFKLPIIEENLNIGLDNDEHV

SEQ ID NO: 12997 - DNA, 50 bp, Mycoplasma hominis; identical to SEQ ID NO: 12327
  source 1..50: mol_type = genomic DNA

SEQ ID NO: 12998 - DNA, 40 bp, Mycoplasma hominis; identical to SEQ ID NO: 12988
  source 1..40: mol_type = genomic DNA

SEQ ID NO: 12999 - DNA, 50 bp, Mycoplasma hominis; identical to SEQ ID NO: 12989
  source 1..50: mol_type = genomic DNA

SEQ ID NO: 13000 - DNA, 40 bp, Mycoplasma hominis; identical to SEQ ID NO: 12990
  source 1..40: mol_type = genomic DNA

SEQ ID NO: 13001 - protein, 481 aa, Streptococcus agalactiae; identical to SEQ ID NO: 391

SEQ ID NO: 13002 - DNA, 50 bp, Streptococcus agalactiae
  source 1..50: mol_type = genomic DNA
aaagaaatttactatccttgatttctaaaagcgtatctaaaactctcatt

SEQ ID NO: 13003 - DNA, 40 bp, Streptococcus agalactiae
  source 1..40: mol_type = genomic DNA
accaatgctaccaaacattctaaaagtgtaaatgctttaa

SEQ ID NO: 13004 - DNA, 50 bp, Streptococcus agalactiae
  source 1..50: mol_type = genomic DNA
aaagaaatttactatccttgatttaaaaaagcgtatctaaaactctcatt

SEQ ID NO: 13005 - DNA, 40 bp, Streptococcus agalactiae
  source 1..40: mol_type = genomic DNA
accaaaaatataaaaaattaaaaaattcttaatgctttaa

SEQ ID NO: 13006 - protein, 522 aa, Agrobacterium tumefaciens
MKRAVIYARYSTDLQNDKSVEDQIRLCEAHAQRIGAQIVKTFHDRAKSGASMFGRAGLSQLMQEAEKGTFEILISESPDRVSRDIADLAHIHKTLKFRGIEMNCVNGGVMDTMQIGMYGVVGQMQREEGAKKVKRGMVGVVRSGRNAGGKAYGYEPVPGRPGELAIVEEQAAIIRRIFEQFAAGVSARSIAGALNDENVPPPRGSKWNASTINGNGARGYGILRNPIYDGRIVWNRVRMVKDPSTGRRVSRVNDASEHETIEAPHLRIVDEKLFAAVQKRKEDATEFALPLVRSRRILSGLLRCRSCGGGMSIVGSDRSGPRVMCSTHRESRTCDNDARYYIEKIEQKVLSTLRMQFADSDMIKAYVDTYEEERRRTSADLKRNRASIERQLEEAKNAITRVVEKLARGLIEDEDAAAILPVLREERDKLVADLVKMEKPTNIIELFPLAVRRFKENLEKLTEILSAAGEIPDADAVLTFREVIASVIVDPRKAGEDYVVEIKGYLSSLIQPELSAVVVVAG

SEQ ID NO: 13007 - DNA, 50 bp, Agrobacterium tumefaciens
  source 1..50: mol_type = genomic DNA
cagcccgaattgtcggctgttgttgtggtagcgggagaccgttcgggttt

SEQ ID NO: 13008 - DNA, 40 bp, Agrobacterium tumefaciens
  source 1..40: mol_type = genomic DNA
atttttcatatgaaggaaagtggtagcgggagagggactt

SEQ ID NO: 13009 - DNA, 50 bp, Agrobacterium tumefaciens
  source 1..50: mol_type = genomic DNA
cagcccgaattgtcggctgttgttagggtagcgggagaccgttcgggttt

SEQ ID NO: 13010 - DNA, 40 bp, Agrobacterium tumefaciens
  source 1..40: mol_type = genomic DNA
aatttgaaaatgaaaaaaaagggtagggggagagggagat

SEQ ID NO: 13011 - protein, 474 aa, Bacillus amyloliquefaciens
MNLMDENTQKNVGIYVRVSTEEQAKEGYSISAQKEKLKAYCVSQGWESYKFYIDEGKSAKDIHRPSLELMLRHIEQGIIDTVLVYRLDRLTRSVRDLYSLLDYFDKYQAIFRSATEVYDTGSATGRLFITLVAAMAQWERENLGERVKMGQVEKARQGQFSAPAPFGFTKEGESLVKNTEEGEVLLDMIDKIKKGYSLRELADYLDESDAIPKRGYKWHIASILVILKNPVLYGGFRWAGEILEGAFEGYISKKEFEQLQKMLHDRQNFKRRETSSVFIFQAKIICPNCGSRLTCERSIYFRKKDNKNVESNHYRCQACALNKKPAIGISEKKLEKALIEYMQNANFKREPKIPQERQQDYDKLHQKIISIEKQRKKYQKAWSMELMTDQEFEQLMAETKEALQKATAKLEQSDLQSIEKPLDIERAKELAKMFRENWSVLTGEEKRQVVQELIKHIEFEKKDNKARVLDIHFY

SEQ ID NO: 13012 - DNA, 50 bp, Bacillus amyloliquefaciens; identical to SEQ ID NO: 397
  source 1..50: mol_type = genomic DNA

SEQ ID NO: 13013 - DNA, 40 bp, Bacillus amyloliquefaciens; identical to SEQ ID NO: 4183
  source 1..40: mol_type = genomic DNA

SEQ ID NO: 13014 - DNA, 50 bp, Bacillus amyloliquefaciens; identical to SEQ ID NO: 397
  source 1..50: mol_type = genomic DNA

SEQ ID NO: 13015 - DNA, 40 bp, Bacillus amyloliquefaciens
  source 1..40: mol_type = genomic DNA
cttgttattaaaatataaacaaacacaatgatgatgtgtt

SEQ ID NO: 13016 - protein, 474 aa, Bacillus velezensis; identical to SEQ ID NO: 4181

SEQ ID NO: 13017 - DNA, 50 bp, Bacillus velezensis
  source 1..50: mol_type = genomic DNA
attagggtttatgtaaagtataagcatgtaaacttaacataaatacaaat

SEQ ID NO: 13018 - DNA, 40 bp, Bacillus velezensis; identical to SEQ ID NO: 4183
  source 1..40: mol_type = genomic DNA

SEQ ID NO: 13019 - DNA, 50 bp, Bacillus velezensis; identical to SEQ ID NO: 13017
  source 1..50: mol_type = genomic DNA

SEQ ID NO: 13020 - DNA, 40 bp, Bacillus velezensis; identical to SEQ ID NO: 13015
  source 1..40: mol_type = genomic DNA

SEQ ID NO: 13021 - protein, 592 aa, Streptococcus mitis
MSNNVEIIKANPLVTRRNDNSGSLSRRVAAYCRVSSDSDDQKNSYDSQVRHYREYISQHPDWILVDIYADEGISGTQVGKRQDFQRLISDCLDGKIDYIITKAIARFARNTLDTLKYVRLLKDKQIGVFFEEENIDTLTMDGELLLTILSSVAQQEVENTSAHVKKGLKMKMQRGELIGFQGCLGYDYNQDTKSISINEKEAKIVRYIFERYIDGIGGRAIARELDELGYKTPRGLDHWQDTTVLGIIKNEKYKGDILMGKTFTVDPISKRRLINFGEEDKYYIKNNHDAIISPEIFTQAQEIRLRRSGNKKTIANTKGKRERYSRMYPFSSRLECGFCGTVLSRRSWHSSSEYKKIIWHCTTSIKRGKKHCTHSKGIEEKAIENAFLQSYQQLFYENNNLTEDFLEIIKEELTDDTLKVELNKIVSKLNSLYKKEEKLVSMNLDGKISDSVYEDKFNQIQIEKEKLLEEKVNLEVTLKSEVDIKSRLENFKEILTSQKTLTEFDKDIFESIVEKIIVGGINSDGEIDPAMLTIIFKTGDSSTKDAKSYKSKRKNAKIENDKLCFNTVTDDEKKCTNKENNARGVCKLVGET

SEQ ID NO: 13022 - DNA, 50 bp, Streptococcus mitis
  source 1..50: mol_type = genomic DNA
ccaaaccttttgagtcccgcagacgcatcacgtggagtgtgtagtgttgc

SEQ ID NO: 13023 - DNA, 40 bp, Streptococcus mitis
  source 1..40: mol_type = genomic DNA
ttgatttattccctcaaactcatcatgttgaggcggtatc

SEQ ID NO: 13024 - DNA, 50 bp, Streptococcus mitis
  source 1..50: mol_type = genomic DNA
ccaaaccttttgagtcccgcagactcatcacgtggagtgtgtagtgttgc

SEQ ID NO: 13025 - DNA, 40 bp, Streptococcus mitis
  source 1..40: mol_type = genomic DNA
ttgaattctctcttgaaactcatcatgatgaggctgtacc

SEQ ID NO: 13026 - protein, 550 aa, Bacillus badius
MNRQSTFSTIRKSTLAFEEAKLTALYCRLSRDDELAGDSNSIVNQKAILKKYAEDNGFRNIEFYVDDGVSGTTFDRPDFNRMIADVETGRIGTIIIKDMSRFGRDYLKVGYYTEIMFPEADVRFIAINNGIDSANQADSDFTPFLNIINEWYAKDTSKKIRAVFKSKGQSGKPLCTNPPYGYIKDPKDKLHWIIDEKAAEVVRDIFRLCMAGFGPTQIAKQLEKRCIDTPTVHLRKMGINTPARPPENPYAWSARTVADILAKMEYLGHTVNFKTSKKSYKSKVKILNNPEDWLVFKNTHEAIIDEGTWETVQKIRDGKRRPSRLGEMGMLSGMMFCADCGAKLYQVRGKGWTHDKEYFVCATYRKKKGMCSSHQIRNVVVEQLLLEDLRRVTSFAKDHEQEFIRIVMNNSEKELAKELRQSQKEYEQAQARIADIDKIIRKLYEDNVMGKIPEERFYKMSAEYETEQKALEERITELKHTIDTVNEQSLNTDRFLALVKKYTEITELDAEIIREFIDKIIVFKAEKVDGRRTQRIQIFYNCIGAIDLPN

SEQ ID NO: 13027 - DNA, 50 bp, Bacillus badius
  source 1..50: mol_type = genomic DNA
ataaatccctatctgaccgctccaaacgaagcgttcacttagggattgaa

SEQ ID NO: 13028 - DNA, 40 bp, Bacillus badius
  source 1..40: mol_type = genomic DNA
actgaaaggaagctccaataaagagctccttcttttttat

SEQ ID NO: 13029 - DNA, 50 bp, Bacillus badius
  source 1..50: mol_type = genomic DNA
ataaatccctatctgaccgctccatgcgaagcgttcacttagggattgaa

SEQ ID NO: 13030 - DNA, 40 bp, Bacillus badius
  source 1..40: mol_type = genomic DNA
actgaaaagcagatcctcttgggaactccttcttttataa

SEQ ID NO: 13031 - protein, 482 aa, Laceyella sacchari
MRAAMYLRKSRADHEAEMRGEGDTFDRHRKTLTELAKSKGYKIIRTYEEVVSGDSIEKRPQMKRLLHDVRNRMYDAVLVMAIDRLGRGALEDQGVILKAFKESATLVVTPFMTHDLNDEVCEEHTEFQAFMARREFKLINRRLQMGRLAAAREGRFISPTAPYGYRKINKNELEIVEEEAKIVKMIFDWYIDEHIGAIKIAKRLNSMGILSPKGGKWASSFVLQILKNPVYIGKVKWGGIEADGTHSPIIDSERFELVQNNRKKQLTPKHSTDLKNPLAGLVFCGKCGRAMSIKYGNTQTYLYCRGRATGTGCPTKNVRLDHLEQMVLYELKGWLKDYQLNPKITRQQENKLEELSFRLEMIQKEMKQLKKQLNNVFNLYERGKYTDEIFEERSTALNKQLNELRETYGETEAEYLKVNESVEANRTVIPKLTHVLDIYDRLRPLQKNILLKELVEKIVVKKEFLRAPIQMVVYPRLLKGGD

SEQ ID NO: 13032 - DNA, 50 bp, Laceyella sacchari
  source 1..50: mol_type = genomic DNA
aagtgtaacgtgttatgttcttacgaataagcgcgtaactcgtaacactt

SEQ ID NO: 13033 - DNA, 40 bp, Laceyella sacchari
  source 1..40: mol_type = genomic DNA
aagtgtaacacacgatctagaatttcacatgttacacttt

SEQ ID NO: 13034 - DNA, 50 bp, Laceyella sacchari
  source 1..50: mol_type = genomic DNA
aagtgtaacgtgttatgttcttacatataagcgcgtaactcgtaacactt

SEQ ID NO: 13035 - DNA, 40 bp, Laceyella sacchari
  source 1..40: mol_type = genomic DNA
aggtataacacacaaactaatatttgacaaaatagacttt

SEQ ID NO: 13036 - protein, 537 aa, Faecalibacillus intestinalis
MKQQIYNTALYLRLSRDDELQGESSSITTQRSMLRLYAKEHHLNVIDEYIDDGWSGTNFERPSFQRMIEDIEAGKINCVVIKDLSRLGRNYIMTGQYTELYFPSHNVRYIAIDDGVDSEKGESEIAPFKNIINEWVARDTSRKVKSAFKTKFAEGAYYGAYAPLGYKKHPDIKGKLLVDEETKWIVEKIFSLAYQGYGSAKITKILREEKVPTASWLNFTRYGTFAHIFEGKPESKRYEWTIAHVKAILKSEVYIGNSVHNRQSTVSFKSKKKVRKPESEWFRVENTHEPIIDKEVFYRVQEQIKLRRRQTKEKATPIFAGLVKCADCGWSMRFATNKANKTPYSYYACSYYGQFGKGTCSMHYIRYDVLYQAVLERLQYWAKAVQQDEEKVLNKIQKAGNAERIREKKKKAGALKKAENRQNEIDRLFTKMYEDRACEKITERNFIMLSGKYQKEQIELEQQITNLREELSKMEQDMIGAEKWIELIKEYSIPKELTAPLLNAMIEKILIHEATTNEENERIQEIEIYYRFIGKVD

SEQ ID NO: 13037 - DNA, 50 bp, Faecalibacillus intestinalis; identical to SEQ ID NO: 1657
  source 1..50: mol_type = genomic DNA

SEQ ID NO: 13038 - DNA, 40 bp, Faecalibacillus intestinalis
  source 1..40: mol_type = genomic DNA
aattagtaaatgggaaacagggagaggctatcctgatatt

SEQ ID NO: 13039 - DNA, 50 bp, Faecalibacillus intestinalis
  source 1..50: mol_type = genomic DNA
tcatatctttaactaagggaaagcagagtttcccaaacaaaaggatatta

SEQ ID NO: 13040 - DNA, 40 bp, Faecalibacillus intestinalis
  source 1..40: mol_type = genomic DNA
cattaatcaaagggaaaaaaggattggctatactaatatt

SEQ ID NO: 13041 - protein, 556 aa, Blautia faecis
MAMMNEMEYKTIGSALAGGYRAAVYCRLSKDDDLQGESASIANQRDMLEKYCEKQGWEVVAVYQDDGFTGLNMERPDLQRMLRAIERRQINLVITKDLSRLGRNYLQTGHLIEDFFPRNGVRYIAMNDGIDTLRDNNDIAPFKNILNEMYSKDISKKVHSSYLLKAQKGQFTGCLAPFGYRKDPEDKNHLLIDEETAPIVRLIFGYALNGHGPNYIRRRLEEEKIPCPTWWNRERGLRNTRTKWEKKDPENGRYMWDFSVIKDLLMNPVYTGAIASQKKDYRFKIGTIGEKKPEDWIVVEGQHEPLIDRMSFDIVQNKLKSRQRPGQTNEISLFAGLIKCGECGKSLTVRYTNAKHPQQIYSCKTYNAFGKNHCTQHRIDYDTLYSHVLRKIRECARAALMDGKAVADRLTNTCEAEQREQREAMERSLTRDEERIEVLDKMVMRLYEDMIAGRISEQNFNTMLEKTQTEQTELKTKVSEGRKRLSDEVQLANDAKQWVEAIQEYANITELDAATLNRLIKEIVVHERIDEDKTRHISIEIHFNLKPIPEVEQVTA

SEQ ID NO: 13042 - DNA, 50 bp, Blautia faecis
  source 1..50: mol_type = genomic DNA
ttttacacctaattggggataaaacagttcatggctaattagttggaaca

SEQ ID NO: 13043 - DNA, 40 bp, Blautia faecis
  source 1..40: mol_type = genomic DNA
caagtctcagggcatgaaacagctgatggctggcggcgtg

SEQ ID NO: 13044 - DNA, 50 bp, Blautia faecis
  source 1..50: mol_type = genomic DNA
ttttacacctaattggggataaaattgttcatggctaattagttggaaca

SEQ ID NO: 13045 - DNA, 40 bp, Blautia faecis
  source 1..40: mol_type = genomic DNA
ctattagcagggcaggaaattgctgggggctggccacgtg

SEQ ID NO: 13046 - protein, 622 aa, Streptomyces cacaoi
MTSVATPERPWGEPAPGMPWAASAAPQSASQATVPVAWLGRTSTEDSQDPTLSLPRQLRNARAALPPGWMIVAHFYDVESGRKDLDVRGQGVAHERFAIPIPRDGGIADLLAEAESPDRRFAAVICESIERVARRTYYGTKIEHELEQCGVALCAADEPISADGKGKRATPTLTRRVKQAVSEWYVLQMLELSWDGFIEHTQQGWNVGKPPYGYNAQRVPHPVPARREQGATKHRLVPDPERGPVVTEIFRLRVLKRLSFRQIADCLNHDPATYPPPQPNRTDTASGRWTAAGVRSILENPKYTGYQVWNRKARKSRGNRANPVSEWIWSPKPTHEPLITRAMFDAAWPAHRAHPGSRKEEAARAGRSTAREYTLRSYVRCVLCGRRMFGKYSKGRCYYACQPKKDHHADAAWYATHPKAIWISERVLLEAVHTFFEDRIFGPRRADLLAAQLSQALPERGAPVADIGALRREGERLARGQRRLMEQLAGEDDGDPETAAEFRKSIRKQFDRLERQRRDVAAKITEAEAAATATPGADGTDALGLLDMLPHLNTRMADLPATVQRALYDAFHLQVRYDHRDRGAEVRVTVAAPLLGEITGIAERAAATSPGADQPFSVRPRQ

SEQ ID NO: 13047 - DNA, 50 bp, Streptomyces cacaoi
  source 1..50: mol_type = genomic DNA
accagcccttcagtgtgcgcccccggcaggagccacccgcaagggctggt

SEQ ID NO: 13048 - DNA, 40 bp, Streptomyces cacaoi
  source 1..40: mol_type = genomic DNA
ggcggtcggtggcgcccccggcaggactcgaacctgcggc

SEQ ID NO: 13049 - DNA, 50 bp, Streptomyces cacaoi; identical to SEQ ID NO: 13047
  source 1..50: mol_type = genomic DNA

SEQ ID NO: 13050 - DNA, 40 bp, Streptomyces cacaoi
  source 1..40: mol_type = genomic DNA
cccggtgcgtgggacgcccggcaggacccgaacccgcggc

SEQ ID NO: 13051 - protein, 486 aa, Nonomuraea sp ATCC 55076
MPPEKPQLRAAIYDRVSKDKRRDARSVEEQKVANVTHCDRHGWAVAEIFTDNDKSASRYARGGRPDWERLLEALAGGAFDVLVMWEPSRGGRELQGWSTLLNLCQEQGVLIHITSHDHTYDVRKPRDRRSLAEDGVDSEYESGKISERIRRGTRARAAEGRPHGPARYGYRRVYDPATGALVGQVIEPDEAAVVREMADWVKSGVTLEGIARRLNGRGTPAPRAEHWQAGPIKRMLLHPSYLGYRVHNGERIKSEEWFPPILDEHVHYMLVARLTNPERGGPRPSAVKHLLSGIALCGICGTKLKTAPRAGVVRYTCRSLDGEGRIVTHLTRGKARVDAYVESVTIAVLQQPDALAAMLDGQESTKLSEALARLEKERAELDAFYAKAEAGELSAEGLVRVEAARLPKIRAIEGEVRDIQSVQFMPHVPHLTEDGPEHVPARWRGLDLAQQREVIASLFTVEILPIGSGRKRFADEESVRVTPRRA

SEQ ID NO: 13052 - DNA, 50 bp, Nonomuraea sp ATCC 55076
  source 1..50: mol_type = genomic DNA
tggtgtgtttaacggacgccgacatgagatctgattgcgtagacactcca

SEQ ID NO: 13053 - DNA, 40 bp, Nonomuraea sp ATCC 55076
  source 1..40: mol_type = genomic DNA
gggccagccgacggggtcgtgggtgccggtgggggagccg

SEQ ID NO: 13054 - DNA, 50 bp, Nonomuraea sp ATCC 55076
  source 1..50: mol_type = genomic DNA
tggtgtgtttaacggacgccgacataagatctgattgcgtagacactcca

SEQ ID NO: 13055 - DNA, 40 bp, Nonomuraea sp ATCC 55076
  source 1..40: mol_type = genomic DNA
gcgcgagcggacgcgggagtaggggcgggtgggggcgccg

SEQ ID NO: 13056 - protein, 501 aa, Mycobacterium sp EPa45
MATASKERAVLYARISVDKSGEEIGVTRQLHDMRQLAMDRGYEVVAEIIENDISASKGLHRSGYDEVWRLVTTGQVDHVVAWQTSRLVRSRADRAKVIDTFGKHNVDIIAFKGPSLELRTAYGRGMADLMTSFDTMEGEVKAERVSAAIADLARRGKAWGFCPYGWDRIGKGIHAQHVVNEGEAAIVRELVGRLLAGESLNELYRDMNARGVPAPGHAQWMKLPSELREQREAKGRRPPTQSWAKSTVRTLVVRDANAAIRARNSDGTEVPGDWPKIVDRDKHDRVVALLASPDRRSHTGPRPGARKHLLTNGIGKCGVCGEVLRVARRNGRRDPTIIYTCNGKRGCVGRTKDLVDLVVASAVVERLSRPDALDWALGDDDEARKASDRVDEIQGKLDAAADSHALDKIPLRSLERITARLVPELLAAQKARDTATRSVDIETLRKLAGPDAAAQWDDMPVSAKRAVLDTLGVTVSILPRKLHGPGFEPETVAVTFGGRAE

SEQ ID NO: 13057 - DNA, 50 bp, Mycobacterium sp EPa45
  source 1..50: mol_type = genomic DNA
agtacccccttgtaacagggtagacagctcgtctatccttagagggtggc

SEQ ID NO: 13058 - DNA, 40 bp, Mycobacterium sp EPa45
  source 1..40: mol_type = genomic DNA
caggtcggcgcatgccaggcaactcgtcacaccggggatc

SEQ ID NO: 13059 - DNA, 50 bp, Mycobacterium sp EPa45
  source 1..50: mol_type = genomic DNA
agtacccccttgtaacagggtagagagctcgtctatccttagagggtggc

SEQ ID NO: 13060 - DNA, 40 bp, Mycobacterium sp EPa45
  source 1..40: mol_type = genomic DNA
caggtcggggcatggctgggaactcgcctctccagagagc

SEQ ID NO: 13061 - protein, 458 aa, Staphylococcus aureus; identical to SEQ ID NO: 11826

SEQ ID NO: 13062 - DNA, 50 bp, Staphylococcus aureus; identical to SEQ ID NO: 12712
  source 1..50: mol_type = genomic DNA

SEQ ID NO: 13063 - DNA, 40 bp, Staphylococcus aureus
  source 1..40: mol_type = genomic DNA
aaaatgtatggcggcacttgtatcaatataggatgtatac

SEQ ID NO: 13064 - DNA, 50 bp, Staphylococcus aureus
  source 1..50: mol_type = genomic DNA
cttttgtgcggaactacgaacagttcataaatacgaagtgtacaaacttc

SEQ ID NO: 13065 - DNA, 40 bp, Staphylococcus aureus
  source 1..40: mol_type = genomic DNA
aaactgtcatccagcactttcatcaataaaggatgaatcc

SEQ ID NO: 13066 - protein, 458 aa, Staphylococcus aureus
MKVAIYTRVSTLEQKEKGHSIEEQERKLRAYSDINDWTIQGVYVDAGYSGAKTDRPELNRLKENLSKIDLVLVYKLDRLTRNVKDLLDLLEIFERENVSFRSATEVYDTSTAMGRLFVTLVGAMAEWERETIRERAMMGKQAAIRKGMILTPPPFYYDRVDNKYIPNKYKDVVVWAYEEVKKGNSAKGIARKLNASDIPPPNGIQWEDRTITRALRSPLSKGHYFWGDIFIENSHEPIITDEMYNEIKERLNERVNAKTITHTSVFRGKLICPNCNGRLCLNTSYRKLKRGDVIHKNYYCNNCKVNKSGAFSFTEKEALKVFYDYLSKLDLSKYKAKEKEDKKIVTIDINKVMEQRKRYHKLYANGMMQEEELFELIKETDEKISEYEKQKERVPKKRLDVSKIKNFKNILLDSWNAFTLEDKEDFIKMAIKSIEIEYIHVKRGKTKHSIKIKNIDFY

SEQ ID NO: 13067 - DNA, 50 bp, Staphylococcus aureus; identical to SEQ ID NO: 12712
  source 1..50: mol_type = genomic DNA

SEQ ID NO: 13068 - DNA, 40 bp, Staphylococcus aureus; identical to SEQ ID NO: 13063
  source 1..40: mol_type = genomic DNA

SEQ ID NO: 13069 - DNA, 50 bp, Staphylococcus aureus; identical to SEQ ID NO: 13064
  source 1..50: mol_type = genomic DNA

SEQ ID NO: 13070 - DNA, 40 bp, Staphylococcus aureus; identical to SEQ ID NO: 13065
  source 1..40: mol_type = genomic DNA

SEQ ID NO: 13071 - protein, 540 aa, Blautia producta; identical to SEQ ID NO: 3871

SEQ ID NO: 13072 - DNA, 50 bp, Blautia producta; identical to SEQ ID NO: 297
  source 1..50: mol_type = genomic DNA

SEQ ID NO: 13073 - DNA, 40 bp, Blautia producta
  source 1..40: mol_type = genomic DNA
tgtttctaaatgggagagcggaaaagggtatccgaatatt

SEQ ID NO: 13074 - DNA, 50 bp, Blautia producta
  source 1..50: mol_type = genomic DNA
caatatctttaactaagggaaacgtaagtttcccaaagttaaagatacca

SEQ ID NO: 13075 - DNA, 40 bp, Blautia producta
  source 1..40: mol_type = genomic DNA
tgtttctatacgggagaggtaaatatggtatacggttgtt

SEQ ID NO: 13076 - protein, 611 aa, Clostridioides difficile
MRKNEEMIAIYSRKSKFTGKGESIGNQVELCKEYIRVHYGDAAVDKVIVYEDEGFSGGNLNRPDFKKMMDAAKKRKFKAIIVYRLDRISRNISDFSTLIEELARLDISFVSIKEQFDTSTPMGRAMMYIASVFSQLERETIAERIRDNMHELAKTGRWLGGTTPTGYASEAVKSVTIDGKSKKACKLKLIPEEADIVRMIYDLYIETDSLTLTEAALIKQGIKTKNNNYFTRFSIKAILQNPVYMIADEDAYNFFIQHDTDLFSEKDAFDNKHGIMAYNRTDQEKGRATKYLPASEWIVSVGKHPGLIPGKVWVQIQESLERNKSKSFRKPRSNEALLTGLLFCSCGERMYPKLSKRKTADGKVIYTYVCKMKERSQRSVCNSKNANGNTLDMAVVEQIKMLAEDKDTFIAQLEQSRRFYTGNRMDYEQRLDDMRKEKAETEKKINSLVDSLVDMGDSPAKAHVTKRIEQLNGEYQSLEQRIQELEGLTSQHALSDIEFDLLRQLLTIFKDGIDEMTVEQKRAAIRTIVRKVVWDGVNAHVILFGVKDDEIEYPEIAAVASGNTEEEDETEELVDFSDIDYDDDDMEDERLGKTNPLSASKTHWGEDSKCY

SEQ ID NO: 13077 - DNA, 50 bp, Clostridioides difficile
  source 1..50: mol_type = genomic DNA
cattggggggaggatagcaaatgctatcctctcgcagatgcgtttatagt

SEQ ID NO: 13078 - DNA, 40 bp, Clostridioides difficile
  source 1..40: mol_type = genomic DNA
catagtacatgacaaatgctatacttattagtatatatgc

SEQ ID NO: 13079 - DNA, 50 bp, Clostridioides difficile; identical to SEQ ID NO: 13077
  source 1..50: mol_type = genomic DNA

SEQ ID NO: 13080 - DNA, 40 bp, Clostridioides difficile
  source 1..40: mol_type = genomic DNA
cataatgcataacatatgctatacatatatgtacatatgt

SEQ ID NO: 13081 - protein, 454 aa, Bacillus cytotoxicus
MIILVKAAIYIRVSTQEQVENYSIEVQRERIKAYCKAKNWDIYDEYIDGGYSGANLNRPDIQRLLKDLKNIDVVVVFKLDRLSRSQKDTLELIEEHFLKNNVDFVSITETLDTSTPFGKAMIGILSVFAQLERETIAERMRMGHIKRAENGLRGMGGDYDPTGYLRHNGRLIIKEDEAMHIKRAYDLYEQYLSITRVQEKLKEEGYQVWRFRRYRDILSNTLYIGNVTFARKTYKGQHEPIISPEQFKRVQDLLKRHKGHNAHKTKQSLLSGLITCSCCGEKFVAYSTGKSTDVKSKRYYYYICRAKRFPAEYEKKCMNKTWSRKKLEDIIINGIKDLTFKRKTTKKKENKINYDRRIKEIDKQMERLLVLFTTNTNTSRQLLEQQMEKFNLEKENLILKKEQSEQEVPLLDKTIDKAIKVFDTLEFKDKQVLVNKFVKEIYIDHENVDIIWRF

SEQ ID NO: 13082 - DNA, 50 bp, Bacillus cytotoxicus
  source 1..50: mol_type = genomic DNA
tttatgtattcatttccggctattcaagtagccagtcttgaataccgaaa

SEQ ID NO: 13083 - DNA, 40 bp, Bacillus cytotoxicus
  source 1..40: mol_type = genomic DNA
ctccgtttttccagcaccacataccgcccaaataaaaaag

SEQ ID NO: 13084 - DNA, 50 bp, Bacillus cytotoxicus
  source 1..50: mol_type = genomic DNA
tttatgtattcatttccggctattccagtagccagtcttgaataccgaaa

SEQ ID NO: 13085 - DNA, 40 bp, Bacillus cytotoxicus
  source 1..40: mol_type = genomic DNA
ctccatcctcccaacaccaccccccccccaaaaaaaaaag

SEQ ID NO: 13086 - protein, 560 aa, Burkholderia diffusa
MKASRVYSYLRFSNAKQADGSSIARQLEYATRWAAERGMTLDASLTLRDEGLSAYHQKHVKKGALGTFLRAIEDGRIPAGSVLIVEGLDRLSRAEPVLAQAQLAQIINAGITVVTASDGREYNFKSLKAQPMDLVYSLLVMIRAHEESETKSTRVKAAIRRQCEGWIAGTYRGTVAVGHDPRWITRDDKHGFVLIEKHAATIRMVIDCFKQGLGGVHIMRVPGAQELLAAAGIGVSSRVYEILRKPTLIGDKVVQIDGETYTLKGYYPPVLSDSEFAELQHLLTQRGRRPGKGVIPGIITGMRLTVCGYCGSPMASQNNLTRKRKTDGLPPDGHRRLVCTGSLATQRCHAGGCSVVPIEKALMAYCSEQMNLDRLLKGAAPTASVESKLALARERVAKTHKQLARVTEALLDDEASAPAAFTQKARELEAQLAREQTAVDALERELETLRGKGTPAAAKAWAQLAKGVEAFDPEARLQARQLVADTFSQITIYRHGFQPVAGNATIDMVLVAKNGNARLLHIDRITGEWRAGTAANLRAIQTAAGTPEIETEACPGHRAA

SEQ ID NO: 13087 - DNA, 50 bp, Burkholderia diffusa
  source 1..50: mol_type = genomic DNA
ggtcaatattgagttagtgctggcttccctacggtaacagtatctatact

SEQ ID NO: 13088 - DNA, 40 bp, Burkholderia diffusa
  source 1..40: mol_type = genomic DNA
gagccgcagcagcgtcgacttgccggcaccgctgcggccg

SEQ ID NO: 13089 - DNA, 50 bp, Burkholderia diffusa
  source 1..50: mol_type = genomic DNA
ggtcaatattgagttagtgctggcgaccctacggtaacagtatctatact

SEQ ID NO: 13090 - DNA, 40 bp, Burkholderia diffusa
  source 1..40: mol_type = genomic DNA
gcgccgcagccgcgaggaggagccgccgccgccgcgcccg

SEQ ID NO: 13091 - protein, 503 aa, Clostridium botulinum
MKMKALVEKILTDLNLKKMIKAAKNKKFNILICYRLDRISRNVADFSNTIEELQKYNIDFISIKEQFDTSTPMGRAMMNIAAVFAQLERETIAERIKDNMVELAKTGRWLGGTSPLGYKSEPIEYSNEDGKSKKMYKLTEVENEMNIVKLIYKLYLEKRGFSSVATYLCKNKYKGKNGGEFSRETARQIVINPVYCISDKTIFKWFKSKGATTYGTPDGIHGLMVYNKREGGKKDKPINEWIIAVGKHRGVISSDIWLKCQNLIQQNNAKSSPRSGTGEKFLLSGMVVCKECGSGMSSWSHFNKKTNFMERYYRCNLRNRASNRCSTKMLNAYKAEEYVANYLKELDINAIKKMYHSNKKNIIDYDAKYEVNKLNKSIEENKKIIQGIIKKIALFDDLDILGMLKNELERLKKENDEMKIKLKELKSILELEDEEEIFLSTMEENISNFKKFYDFVNITQKRILIKGLVESIVWDTGGEEKILEINLIGSNTKLPSGKVKRRE

SEQ ID NO: 13092 - DNA, 50 bp, Clostridium botulinum
  source 1..50: mol_type = genomic DNA
acctgtgtattgaaacaaggtgctgataaaaccctttcataaacacaagt

SEQ ID NO: 13093 - DNA, 40 bp, Clostridium botulinum
  source 1..40: mol_type = genomic DNA
ttcaactggacaaggtgctgataaaactatgcagcaagtc

SEQ ID NO: 13094 - DNA, 50 bp, Clostridium botulinum
  source 1..50: mol_type = genomic DNA
acctgtgtattgaaacaaggtgcttttaaaaccctttcataaacacaagt

SEQ ID NO: 13095 - DNA, 40 bp, Clostridium botulinum
  source 1..40: mol_type = genomic DNA
ataagctgcactacgtgattttaaaactatgccacaagtc

SEQ ID NO: 13096 - protein, 545 aa, Clostridium botulinum
MIAAIYSRKSKFTGKGESVENQIEMCKEYLKRNFNNIDDIEIYEDEGFSGKDTNRPKFKKMIKAAKNKKFNILICYRLDRISRNVADFSNTIEELQKYNIDFISIKEQFDTSTPMGRAMMNIAAVFAQLERETIAERIKDNMVELAKTGRWLGGTSPLGYKSEPIEYSNEDGKSKKMYKLTEVENEMNIVKLIYKLYLEKRGFSSVATYLCKNKYKGKNGGEFSRETARQIVINPVYCISDKTIFKWFKSKGATTYGTPDGIHGLMVYNKREGGKKDKPINEWIIAVGKHRGVISSDIWLKCQNLIQQNNAKSSPRSGTGEKFLLSGMVVCKECGSGMSSWSHFNKKTNFMERYYRCNLRNRASNRCSTKMLNAYKAEEYVANYLKELDINAIKKMYHSNKKNIIDYDAKYEVNKLNKSIEENKKIIQGIIKKIALFDDLDILGMLKNELERLKKENDEMKIKLKELKSILELEDEEEIFLSTMEENISNFKKFYDFVNITQKRILIKGLVESIVWDTGGEEKILEINLIGSNTKLPSGKVKRRE

SEQ ID NO: 13097 - DNA, 50 bp, Clostridium botulinum; identical to SEQ ID NO: 13092
  source 1..50: mol_type = genomic DNA

SEQ ID NO: 13098 - DNA, 40 bp, Clostridium botulinum; identical to SEQ ID NO: 13093
  source 1..40: mol_type = genomic DNA

SEQ ID NO: 13099 - DNA, 50 bp, Clostridium botulinum; identical to SEQ ID NO: 13094
  source 1..50: mol_type = genomic DNA

SEQ ID NO: 13100 - DNA, 40 bp, Clostridium botulinum; identical to SEQ ID NO: 13095
  source 1..40: mol_type = genomic DNA

SEQ ID NO: 13101 - protein, 545 aa, Clostridium botulinum
MIAAIYSRKSKFTGKGESVENQIEMCKEYLKRNFNNIDDIEIYEDEGFSGKDTNRPKFKKMIKAAKNKKFNILICYRLDRISRNVADFSNTIEELQKYNIDFISIKEQFDTSTPMGRAMMNIAAVFAQLERETIAERIKDNMVELAKTGRWLGGTSPLGYKSEPIEYSNEDGKSKKMYKLTEVENEMNIVKLIYKLYLEKRGFSSVATYLCKNKYKGKNGGEFSRETARQIVINPVYCISDKTIFKWFKSKGATTYGTPDGIHGLMVYNKREGGKKDKPINEWIIAVGKHRGVISSDIWLKCQNLIQQNNAKSSPRSGTGEKFLLSGMVVCKECGSGMSSWSHFNKKTNFMERYYRCNLRNRASNRCSTKMLNAYKAEGYVANYLKELDINAIKKMYHSNKKNIIDHDAKYEVNKLNKSIEENKKIIQGIIKKIALFDDLDILEMLKNELERLKKENDEMKIKLKELKSILELEDEEEIFLSTMEENISNFKKFYDFVNITQKRILIKGLVKSIVWDTSGEEKILEINLIGSNTKLPSGKVKRRE

SEQ ID NO: 13102 - DNA, 50 bp, Clostridium botulinum
  source 1..50: mol_type = genomic DNA
acctgtgcattagaacaaggtgctgataaaaccctttcataagcacaagt

SEQ ID NO: 13103 - DNA, 40 bp, Clostridium botulinum; identical to SEQ ID NO: 13093
  source 1..40: mol_type = genomic DNA

SEQ ID NO: 13104 - DNA, 50 bp, Clostridium botulinum
  source 1..50: mol_type = genomic DNA
acctgtgcattagaacaaggtgcttttaaaaccctttcataagcacaagt

SEQ ID NO: 13105 - DNA, 40 bp, Clostridium botulinum; identical to SEQ ID NO: 13095
  source 1..40: mol_type = genomic DNA

SEQ ID NO: 13106 - protein, 542 aa, Clostridium botulinum
MIAAIYSRKSKFTEKGESVENQIEMCKEYLKRNFKELKHIEIYEDEGFSGKDTNRPEFKKMIKDAKNKKINILICYRLDRISRNVADFSNTIEELQKHNIDFISIKEQFDTSTPMGRAMMNIAAVFAQLERETIAERIKDNMIELAKTGRWLGGTSPLGYKSEQMEYSNEDGKNKKMYKLKVVKDEINIVKLIYKLYLEKRGFSSVATYLCKNNYKGKNGGEFSRETVRQIITNPVYCISDDKIFKWFKSQGATLHGTPDSTHGLMVYNKREGGKKEKAISEWIIAIGKHNGIISSSVWLKCQSIIKENKNKISPRSGTGEKFLLSGMLICGECKSGMSSWSHFNKKINFMERYYRCNLKNRASNRCSNKMLNAYKAEEYIPKYLKQLDIEEFKTVYRENKKNTLRYDQDEAINLKKKIKENKKILQGIIKKFALIDDTDILNLLKDELDRLKKETDTLELRLRELDSIAILKDEEDVFINDIKEKLLNFKKFYDFVNIEQKRTLIKGLVTNIEWYSNNKTFEINLVGSNKKISPGKVKRRI

SEQ ID NO: 13107 - DNA, 50 bp, Clostridium botulinum
  source 1..50: mol_type = genomic DNA
tcttgtgtttttgacatggtatcagataaaactatttcaaaaacacaaga

SEQ ID NO: 13108 - DNA, 40 bp, Clostridium botulinum; identical to SEQ ID NO: 13093
  source 1..40: mol_type = genomic DNA

SEQ ID NO: 13109 - DNA, 50 bp, Clostridium botulinum
  source 1..50: mol_type = genomic DNA
tcttgtgtttttgacatggtatcatttaaaactatttcaaaaacacaaga

SEQ ID NO: 13110 - DNA, 40 bp, Clostridium botulinum; identical to SEQ ID NO: 13095
  source 1..40: mol_type = genomic DNA

SEQ ID NO: 13111 - protein, 536 aa, Clostridium symbiosum
MLRQTNQQPITALYPRLSHEDELQGESNSISNQKRILETYAKQNGFSNLRWYTDDGYSGANFQRPGFQAMLADIEAGKVGTVIVKDMSRLGRNYLQVGMYTEMVFPQKGVRFIAINDGVDSAQGDNDFAPLRNIFNEWLVRDTSKKIKAVKRSKGMSGKPITSKPVYGYLMDEDENFIIDEEAAPVVKQIYNLCLAGNGPTKIARMLTEQQIPTPGTLEYRRTGSTRRYHPGYECKWATNTVVHILENREYTGCLVNFKTEKLSYKVKHSVENPEEKQAIFENHHEPIIDTQTWERVQELRKQRKRPNRYDEVGLFSGILFCADCGSVMYQQRYQTDKRKQDCYICGNYKKRTHDCTAHFIRTDLLTAGVLSNLRKVTSYAAKHEARFMKLLIEQNEDGGKRRNAAKKKELEATEKRIAELSAIFKRLYEDSVTGRISDERFTELSADYEAEQRELKERAAAIQAELSKAQEATVNAEKFMNVVRRHTSFEELTPTLLREFVEKIVVHECSYDENKTRRQDIEIYYSFVGKVDLPE

SEQ ID NO: 13112 - DNA, 50 bp, Clostridium symbiosum
  source 1..50: mol_type = genomic DNA
ttacttctttatcgcacatcaataaatgctcatgtacggtaaagtatcac

SEQ ID NO: 13113 - DNA, 40 bp, Clostridium symbiosum
  source 1..40: mol_type = genomic DNA
gccggagaatacctgtaataaatatgctgggacaaagaca

SEQ ID NO: 13114 - DNA, 50 bp, Clostridium symbiosum
  source 1..50: mol_type = genomic DNA
ttacttctttatcgcacatcaatatatgctcatgtacggtaaagtatcac

SEQ ID NO: 13115 - DNA, 40 bp, Clostridium symbiosum
  source 1..40: mol_type = genomic DNA
gctctagaaaacctggaattaatatgctttgaaaaaaaca

SEQ ID NO: 13116 - protein, 524 aa, Clostridium haemolyticum
MIAAIYSRKSKFTGKGDSIENQIQMCKEYGIRNLNIDKFLIYEDEGFSGGNTNRPKFKELLSDIKEKKFNVLICYRLDRISRNVADFSSTLELLQCSDISFVSIKEQFDTSTPMGKAMVYIASVFAQLERETIAERVRDNMLQLAKTGRWLGGQTPLGFKSEKIVYIDEEYKERSLYKLSPIKEELEIVKYIYSTYLETHSLRKTASRLYEKKFKTKNGGDWGVSQVQNILSSPTYVKSSKKIKDFLISQGMSFAGKVNGNGIFIYNKKKGKTKHRDINEWIAAVGKHKGIIESDIWLEVQCFLNSKRFKRGRLGTGSNSLFSGLIKCGKCGCNMTIIHGGVSKGTRKHYYTCSLKRASKGIKCNNNNLTVDTTDKLIINHIKNIKIKDIKKELSYLYIKKNHTNEIQIIENAIKDEEKAIKNLTMQLSTISKSLASKPIINLLEKKTSRLEKLKNQYKQLKDNLTKTQLHLGNINNLADNLNNFKFMINKAENIEQKKMLIKSVIEDIIVTDEKIEINIKNSK

SEQ ID NO: 13117 - DNA, 50 bp, Clostridium haemolyticum
  source 1..50: mol_type = genomic DNA
atatgctttatgttttgacgaggatcaacatgataaaacgtagtacataa

SEQ ID NO: 13118 - DNA, 40 bp, Clostridium haemolyticum
  source 1..40: mol_type = genomic DNA
tgatcctgtagaaattgcttctgtgtgacctacaaataga

SEQ ID NO: 13119 - DNA, 50 bp, Clostridium haemolyticum
  source 1..50: mol_type = genomic DNA
atatgctttatgttttgacgaggaaaaacatgataaaacgtagtacataa

SEQ ID NO: 13120 - DNA, 40 bp, Clostridium haemolyticum
  source 1..40: mol_type = genomic DNA
atatcctgtacaaattgcaaatgtgtagcctaaaactaaa

SEQ ID NO: 13121 - protein, 504 aa, Mucilaginibacter mallensis
MDAIGYIRISKKDQSVHSIEYQEKNIRDYCEYNHIALNSIFVDDGASSFTFDRPDYKALEKFIKEHRGKVKYLIVLDHDRFSRNLPEALQKIEQLEKTHGIKVVATSEPLDIDTSDPSVFLLRAFKYLIANQELLTIRRRAKMSARHAQESGRYLNKAPYGYLNGRGKDGKMVLMIDETKAYIIQKIFRDYLAGVPRYLIHQELKNIGFPQSGNGAIFRILTNPLYAGLVRVVAHGKNPEKIVKGIHDPIISETQYWRVQDMLGITKRAMKSHPKAEFPLKGILQSPCCGYSMTAGWCKGKKKYYLYYRCIKHTSTNISGTLLHEQFNKLLINMSFSQELIDEIVDDVKSGLNGMQSVRDKELADVDKQLGLLSEKMENAEQKVMDDTINADTYKKWNKRFTAEKAQLMARKEELEDSLEDFINQELLVLPYLLNLPHIFEEATINQQHAILREVFKQGLTFKEGIFRTPQLHPDFTHNRLKLKQLGLLIDEQPYDDLDKISYC

SEQ ID NO: 13122 - DNA, 50 bp, Mucilaginibacter mallensis
  source 1..50: mol_type = genomic DNA
gatttagataaaatctcgtattgcggggataaagggagccgtttagaaca

SEQ ID NO: 13123 - DNA, 40 bp, Mucilaginibacter mallensis
  source 1..40: mol_type = genomic DNA
atcgaataatacttgatgcggagagttagggattcgaacc

SEQ ID NO: 13124 - DNA, 50 bp, Mucilaginibacter mallensis
  source 1..50: mol_type = genomic DNA
gatttagataaaatctcgtattgcatggataaagggagccgtttagaaca

SEQ ID NO: 13125 - DNA, 40 bp, Mucilaginibacter mallensis
  source 1..40: mol_type = genomic DNA
atctattaatacttgatgtatatatttaggtattccaatg

SEQ ID NO: 13126 - protein, 595 aa, Cronobacter sakazakii
MYAKKRYWKIVMKSYLYSRISTLQQTKGFGIDRQVQTVTDFLKYATIDSRLGYQLDVEDFEVLESDLGKSAYKGNNWKPNSSLGRFYKDVVSGRITSGVLICENVDRLVRMSNYEASNKLSTLITNGIDIIEVESGMCFSNKIPESATILNMSISRAYSESKRKSDMATKSWANRTNKLKDSGRAVSKVCPRWLTVKDGQYVLDEKQAETLLYIHQMYLEGHGNSALVRRLNAAKRLDNGKPWTTITLHRVLRDERLTGRMVMGKTRKPIPLLDDQGNKIIENGKVKTYVPVEIIDDAYPVVVPRELFNQVQAMISEKEGSKVKKTTKYMRNIFNGVSRCSSCGEALVADKNGHGKLFYVCLGKRHKKACNSVGIPYEAFERTMLENLSQMDWQRIYTGNTDMEAMNQCRVRLVAVEREIAELEGELESSDEDMVLALVRAIKKKKAVRDEIHGELNSYVKAGTDNVTFNPDLKRVLNQEEVELRQDVNVELRKIIKYMKVGRMDRTITVQLQYYTDVVSHLIFIDSKTGDLLSRSHLTNDLIYESDSVTIDLTGGTWDIKGDKFTEWDQFALEVWKEIIEQAVDQAQEILKNRI

SEQ ID NO: 13127 - DNA, 50 bp, Cronobacter sakazakii
  source 1..50: mol_type = genomic DNA
tggcggtaaacgttgatcgattgcgagcagttgtgatacaatgtacgcca

SEQ ID NO: 13128 - DNA, 40 bp, Cronobacter sakazakii
  source 1..40: mol_type = genomic DNA
cgggcccatcagcagcagcgaacagtcggtggtgccgccg

SEQ ID NO: 13129 - DNA, 50 bp, Cronobacter sakazakii
  source 1..50: mol_type = genomic DNA
tggcggtaaacgttgatcgattgcgtgcagttgtgatacaatgtacgcca

SEQ ID NO: 13130 - DNA, 40 bp, Cronobacter sakazakii
  source 1..40: mol_type = genomic DNA
cgggcccaccagcaccagcgttcattcgtgggttcccgcg

SEQ ID NO: 13131 - protein, 595 aa, Cronobacter sakazakii
MYAKKRYWKIVMKSYLYSRISTLQQTKGFGIDRQVQTVTDFLKYATIDSRLGYQLDVEDFEVLESDLGKSAYKGNNWKPNSSLGRFYKDVVSGRITSGVLICENVDRLVRMSNYEASNKLSTLITNGIDIIEVESGMCFSNKIPESATILNMSISRAYSESKRKSDMATKSWANRTNKLKDLGRAVSKVCPRWLTVKDGQYVLDEKQAETLLYIHQMYLEGHGNSALVRRLNAAKRHDNGKPWTTITLHRVLRDERLTGRMVMGKTRKPIPVLDDQGNKIIENGKFKTYVPVEIIDDAYPVVVPRELFNQVQAMISEKEGSKVKKTTKYMRNIFNGVSRCSSCGEALVADKNGHGKLFYICLGKRHKKACNSVGIPYEAFERTMLENLSQMDWQRIYTGNTDMEAMNQCRVRLVAVEREIAELEGELESSDEDMVLALVRAIKKKKSVRDEVQGELNSYVKAGTDNVTFNPDLKRVLNQEKVELRQDVNVELRKIIKYMKVGRMDRTITVQLQYYTDVVSHLLFIDSKTGELLSRSHLTNDLIYESDSVTIDLTGGTWDIKGDKFTEWDQFALEVWKEIIEQAVDQAQEILKNRI

SEQ ID NO: 13132 - DNA, 50 bp, Cronobacter sakazakii
  source 1..50: mol_type = genomic DNA
tggcggtaaacgttgatcgattgtgagcagttgtgatacaatgtacgcca

SEQ ID NO: 13133 - DNA, 40 bp, Cronobacter sakazakii; identical to SEQ ID NO: 13128
  source 1..40: mol_type = genomic DNA

SEQ ID NO: 13134 - DNA, 50 bp, Cronobacter sakazakii
  source 1..50: mol_type = genomic DNA
tggcggtaaacgttgatcgattgtgtgcagttgtgatacaatgtacgcca

SEQ ID NO: 13135 - DNA, 40 bp, Cronobacter sakazakii; identical to SEQ ID NO: 13130
  source 1..40: mol_type = genomic DNA

SEQ ID NO: 13136 - protein, 536 aa, Streptococcus anginosus
MLRQTTRNLITALYPRLSHEDELQGESNSISNQKRILETYAKQNGFSNLQWYTDDGYSGANFQRPGFQAMLADIEAGKVGTVIVKDMSRLGRNYLQVGMYTEMIFPQKGVRFIAINDGVDSAQGDNDFAPLRNIFNEWLVRDTSKKIKAVKRSKGMSGKPVTSKPVYGYFMDEDENFIIDGEAAPVVRQIYSLCLAGNGPTKIARMLTEQEIPTPGTLEYRRTGSTRRYHPGYECKWATNTVVHILENREYTGCLVNFKTEKPSYKTKHSVENPIEKQAIFENHHEPIIDTQMWERVQELRKQRKRPNRYDEVGLFSGILFCADCGSVLYQQRYQNATRKQDCYICGSYKKRTRDCTAHFIRTDLLTAGVTDNLRKVTSYAAKHEARFMKLLIEQNEDGGKRRNAARKKELEAAEKRISELSAIFKRLYEDSVTGRISDERFTELSADYEAEQKELKERAAAIRAELSKAQEATVNAEKFMNVVRKYTSFEELTPTLLREFVEKIVVHECSYDENGTRRQDIDIYYSFVGKVDLPE

SEQ ID NO: 13137 - DNA, 50 bp, Streptococcus anginosus; identical to SEQ ID NO: 3602
  source 1..50: mol_type = genomic DNA

SEQ ID NO: 13138 - DNA, 40 bp, Streptococcus anginosus
  source 1..40: mol_type = genomic DNA
aagtttcaatagctggaaaaatagacatgtaagctccttt

SEQ ID NO: 13139 - DNA, 50 bp, Streptococcus anginosus
  source 1..50: mol_type = genomic DNA
ctacttctttatcacacatcagcacatgctcatgtacggtaaggaagcaa

SEQ ID NO: 13140 - DNA, 40 bp, Streptococcus anginosus
  source 1..40: mol_type = genomic DNA
aaatttcatgaactgtgaacatagacatggaagcttcctt

SEQ ID NO: 13141 - protein, 488 aa, Adlercreutzia mucosicola
MQLVPCDNPRPGRRVASYARFSSHNQRSESIEIQEDNNLAYCAINDLDMVAMYSDEAKTGKTTSRADFQRMVADAKAGLFDFVVIYKVPRIMRNRDEMALLRITLRKYGVEILYSGEDIGKGSDGILQLGIKEVLAEWESAQLGERIVDGIQKNAERCMANGQPLYGWDIVNGYYVVNEVEAAVLRRARSMLSNGKTVAEIVRALEGHKTKRGKPITHNVLTKMLKRKQNAGVYSYAGHETEGGMPALWTMEEQRMIWKMLGDETRPRRKALGADFLLTGKLYCGKCDTPMTGTSGTGKSGTVYYYYKDKKGCGRQVRKDVIEENVADAVRAALSREATREKIADLVCEYSETEDPTPQSDVIAAEIKEIKAAYANILKAIEQGIIPPGAKERIAQLQEQEETLAEELRIAQAIEAVALDRDRVLFWLEQIAAAPDDKALIDVFVARVVLLDDDLHIVMHFEDNDGPPGAQLYDKGGGVLPRGTMLHH

SEQ ID NO: 13142 - DNA, 50 bp, Adlercreutzia mucosicola
  source 1..50: mol_type = genomic DNA
tgttctgccacgtggcaccatgctccaccataggaacattagccgaacac

SEQ ID NO: 13143 - DNA, 40 bp, Adlercreutzia mucosicola
  source 1..40: mol_type = genomic DNA
ggttcgatccccctaggctccaccataaacttcagaagcc

SEQ ID NO: 13144 - DNA, 50 bp, Adlercreutzia mucosicola
  source 1..50: mol_type = genomic DNA
tgttctgccacgtggcaccatgctgcaccataggaacattagccgaacac

SEQ ID NO: 13145 - DNA, 40 bp, Adlercreutzia mucosicola
  source 1..40: mol_type = genomic DNA
tgttttgtctccctaggctgcaacattaaatgcagaagcc

SEQ ID NO: 13146 - protein, 548 aa, Paeniclostridium sordellii
MSKRVGIYCRVSTIEQAEEGYSIDEQKIKIQEYCEKNGHQVYQIYEDRGISGKNITNRPGMKQLLEDATKNKFDLVVVWKLNRISRKLLDLLNIVELLDKHRIAFRSLTESFETETSTGRLNLSIMGAVGEFERATIAENVKMGLLARAREGRWNGGVVLGYDIVEIPNEGKKRKNTRLEINEKEANTVRRIFELYSQGYGYKAIVNRINKENYKTKRNLSFSVSSVREILQNPVYIGKIRYNVRQDWSQKRRNNINANPILSDGIHEPIIDMKTWNKVQVILKERSKKHNKIYESEFPLTGILKCPACGAGMTISRSTSKRKDGTRRINEYYSCGNWKNKGTAVCNSNSIRVDVADKYVLDKIMELINDEYILRRVIDNINKNKSTKLKPTLEQLGQINKEIEKLTDKKNKNIELFEDGILDKSELSTRVKIINGDIEKLKYREQELKQDLQLADGEPIPFEIVKEVMQRFKEVFLGMSTSQQRKQIIHLLVSKITINKEREIDSIEIQINDDVITYLMKDGLPKEQGNPSFLHLLGMNCVNLKIVI

SEQ ID NO: 13147 - DNA, 50 bp, Paeniclostridium sordellii
  source 1..50: mol_type = genomic DNA
gtgctccgtagagtacggtacggagaaccgtatcacaagtaacggagcgt

SEQ ID NO: 13148 - DNA, 40 bp, Paeniclostridium sordellii
  source 1..40: mol_type = genomic DNA
ttttagaataaataataatgaaccgtaccataagtaagtg

SEQ ID NO: 13149 - DNA, 50 bp, Paeniclostridium sordellii
  source 1..50: mol_type = genomic DNA
gtgctccgtagagtacggtacggaataccgtatcacaagtaacggagcgt

SEQ ID NO: 13150 - DNA, 40 bp, Paeniclostridium sordellii
  source 1..40: mol_type = genomic DNA
gtttagaataaataataaaatagtttagaataaataaatg

SEQ ID NO: 13151 - protein, 517 aa, Streptomyces mobaraensis
MTSRDEKISKLRGTPEGLPSVEEVRTMLAADPTLKCVVCYARISFDGRVKDAHGVEDQHRDMSEDARKFNWLVVYRYTDNDKSASKETVVRDDFEQLINDLTVGTTPEGYPIHGVMAANEDRLYRRPSDWERYLKAFTAHGDRVYHDSNGVQDLYAEGFEIKGLVGVAMSLSETRKKQRRTRNSHRSRALRGQPVAAWRPFGWQDDKVTLDPVESEAIRQAVKDVLAGASISEITRRWKEAEYRTSRGNLFQYQTVKQVLVNPRLCGYRELKGQLVRDGDDQPIVGAWEAIITPKQWYAITAKIRERGQGTGLPRGGLVHKYLLTGIMRCGNVLEDGTICNSKMIGVKANDWLKYKHAYFCKKTVDGGCNKTYKRGDKSDEHIERLVIAKLKAEAEAAREEVPEWPRADDLERAVQSRNALEQRWQKGEIDDEAFFRNLAPLEARVKQLRAEQAHHLAMKAEAEAAREDITASWGDKTLTQKRTAIKKVLHAVIAVPGGKGNKTFDVELLKPVWRTA

SEQ ID NO: 13152 - DNA, 50 bp, Streptomyces mobaraensis
  source 1..50: mol_type = genomic DNA
gtgatgcttctgctgattttcatcgagaagaacatacatagaacccccac

SEQ ID NO: 13153 - DNA, 40 bp, Streptomyces mobaraensis
  source 1..40: mol_type = genomic DNA
gtcctgagagatcttcatcgagcagaatttcgggccgcac

SEQ ID NO: 13154 - DNA, 50 bp, Streptomyces mobaraensis
  source 1..50: mol_type = genomic DNA
gtgatgcttctgctgattttcatcctgaagaacatacatagaacccccac

SEQ ID NO: 13155 - DNA, 40 bp, Streptomyces mobaraensis
  source 1..40: mol_type = genomic DNA
cacctgtgagctcatcaaactgcagaatctcgggccccac

SEQ ID NO: 13156 - protein, 509 aa, Escherichia coli
MRRAISYIRFSSERQLKGDSVRRQSKLVTDWLDKNPEFYLDSSLSFKDLGKSAFSGKHLKGGLGDFLTAIEKGLVKAGDTLLIESLDRLSRQDIDIASELLRRILRAGVDVVTLSDGEHYTKESLKDPLSLIKSILIMQRAHEESLRKSERVQAAWNRKKELISEGIKISRRCPAWLKLNDDRRTFTIIPDKVEVVKRAFDLRLQGLSFWAITRTLNDEGHLSLNQYTPKQKGWSDTAVKKLLRNRAVIGCFTPAGREEVQGYYPAIISESLFYRVQQLNTGQYGRASVSSNPLSVNLFRGIIKCSECGATIVLGGYALKRFGMYRCPNRSANRCSAKAISRKQTDATILYMLALCDRFETENTDTIDSLKLQREDLQRKISKMAELAIELDDMTIITEKLRDMKNALSKLNHDIEEETKRIKAITTGSLKDIDRTTKEGMIETQLLIKGVLKEIVIDAAKRRCKVTFHNGKAITLPITENPSDNVTEAIQSLSEVTERGLIDVDEVII

SEQ ID NO: 13157 - DNA, 50 bp, Escherichia coli; identical to SEQ ID NO: 12182
  source 1..50: mol_type = genomic DNA

SEQ ID NO: 13158 - DNA, 40 bp, Escherichia coli
  source 1..40: mol_type = genomic DNA
atggtccggtattgtcttcagcattacatttttattttcg

SEQ ID NO: 13159 - DNA, 50 bp, Escherichia coli; identical to SEQ ID NO: 12182
  source 1..50: mol_type = genomic DNA

SEQ ID NO: 13160 - DNA, 40 bp, Escherichia coli
  source 1..40: mol_type = genomic DNA
attgtgacttattgactttagcattacatttttattttta

SEQ ID NO: 13161 - protein, 509 aa, Escherichia coli
MRRAISYIRFSSERQLKGDSVRRQSKLVTDWLDKNPEFYLDSSLSFKDLGKSAFSGKHLKGGLGDFLTAIEKGLVKAGDTLLIESLDRLSRQDIDIASELLRRILRAGVDIVTLSDGEHYTRESLKDPLSLIKSILIMQRAHEESLRKSERVQAAWNRKKELISEGIKVSRRCPAWLRLNDDRRTFTIIPDKVEVVKRAFDLRLQGLSFWAITRTLNDEGHLSLNQYTPKQKGWSDTAVKKLLRNRAVIGCFTPAGREEVQGYYPAIISESLFYRVQQLNTGQYGRASVSSNPLSVNLFRGIIKCSECGATIVLGGYALKRFGMYRCPNRSANRCSAKAISRKQTDTTLLYMLALCDRFETENTDTIDSLKLQREDLQRKISKMAELAIELDDMTIITEKLRDMKNALSKLNHDIEEETKRIKAITTGSLKDIDRTTKEGMIETQLLIKGVLKEIVIDAAKRRCKVTFHNGKVIDLPITENPSEDVTEAIQSLSEVTERGLIDVDVVAI

SEQ ID NO: 13162 - DNA, 50 bp, Escherichia coli
  source 1..50: mol_type = genomic DNA
tagtgtatttagggaattaatatcagtataatgggtccctaaacacatca

SEQ ID NO: 13163 - DNA, 40 bp, Escherichia coli; identical to SEQ ID NO: 13158
  source 1..40: mol_type = genomic DNA

SEQ ID NO: 13164 - DNA, 50 bp, Escherichia coli; identical to SEQ ID NO: 13162
  source 1..50: mol_type = genomic DNA

SEQ ID NO: 13165 - DNA, 40 bp, Escherichia coli; identical to SEQ ID NO: 13160
  source 1..40: mol_type = genomic DNA

SEQ ID NO: 13166 - protein, 548 aa, Mycolicibacterium rutilum
MSLRFAFYGRVSTEDAQDPEASRSWQKRRAIDLISPHGGVLAADYFDIGQSRSLPWKRRPEASRLLADVTSRGRGFDAVVIGEPARAFYGPQFALTFPVLTHYGVGLWVPEVGGAVDPGSEAHDLVMTLFGGMSKGERARIQMRVRTAMSALAQDTTRYLGGRPPYGYQLVDAGPHPNPAKASLGQRLHRLEPDPETAPTVERIYRMYADGAGLRFIAQQLTDDGVPSPSQYDPARNRHRDPRGWSHSAIRAILDNPAYRGIRVWGKQEKYEVLLNPDDVAAGYETRMRWRDRADWIAPDRRTHEELIPDELAQAVRLRMQARRGPGRVCSRESTVPYALRGLLFCAACGRRMQGAARPGKQTTRILYRCEFGKSRSVPVDLSDHPRTVYLREDAVTARLDEWIATLADPEDLARGQDVDPAAGPGYAALQRQLSEANAKVAALITAVESGVAVEDLTAALRQRTAERDELRARVERVERPRAMCAAEISELVKELGGLSVILGAATGAERAEVYASLGLRLDYDPHLRRVTATADLSRVAGCVRGGT

SEQ ID NO: 13167 - DNA, 50 bp, Mycolicibacterium rutilum; identical to SEQ ID NO: 442
  source 1..50: mol_type = genomic DNA

SEQ ID NO: 13168 - DNA, 40 bp, Mycolicibacterium rutilum
  source 1..40: mol_type = genomic DNA
ctactgacctggtgtccgaggggggacttgaacccccacg

SEQ ID NO: 13169 - DNA, 50 bp, Mycolicibacterium rutilum
  source 1..50: mol_type = genomic DNA
agtcgtgtcgccggatgtgtccgaatggggacttgtccgtctacgacacg

SEQ ID NO: 13170 - DNA, 40 bp, Mycolicibacterium rutilum
  source 1..40: mol_type = genomic DNA
ctactaagctagagcccaaatgggaacttgaagccccact

SEQ ID NO: 13171 - protein, 555 aa, Brevibacillus thermoruber
MDQTAIFISSYGMEVLMNRVANSLDTRAAVYVRVSTTKESQKDSPEHQVGICREKARLLNIIQPDDLVYEDRDTGTSIVDRPAIKKLVADAQKGFFQVVIFASLSRFSRDTMDSLMLKRTLVDSLKIRLISIDENYDSYIDNDEFKFQIFAAVNQKQSELISLSSRRGIRQSALKGNFTGSIAPYGYRKAIIGNRKTLVPDEQEKEIVKLIFQLYTANKMGEKAIVTYLNGKNIPSPKGGNWGVTSVQRILQNEVYTGANVFSKYEVVKVHSIDDLHNRKKVLVQRDKSLWERSIQEPTHEPIIDKDLFLQAQQIREMRGGGKRGGVRNKVNVFAGFIKCKHCGSAMVSMKSNNSNRKRDGKEYRYLICSKRRRQGDAGCHNNYWLPYYEFRDELINDIADKLQSITSAQQLFETHKGLIQINTTTSEREIAEQENKINKYREALYSLRKAVLDGEIDEKQFHYEKAQFEKEIKQYESRLNELQKTLNKRDNLMELYDEVMESLEELLTLTYDEEDEFDELRLILMKLIQQILVEKDGNITIKTTFGDSLNDIFC

SEQ ID NO: 13172 - DNA, 50 bp, Brevibacillus thermoruber
  source 1..50: mol_type = genomic DNA
aggtgttattcaaaacacatgacgaatgtaacgtattttgaattacactc

SEQ ID NO: 13173 - DNA, 40 bp, Brevibacillus thermoruber
  source 1..40: mol_type = genomic DNA
cgtacgcaatcacatcagcaatgtcatgcagaaattaggt

SEQ ID NO: 13174 - DNA, 50 bp, Brevibacillus thermoruber; identical to SEQ ID NO: 13172
  source 1..50: mol_type = genomic DNA

SEQ ID NO: 13175 - DNA, 40 bp, Brevibacillus thermoruber
  source 1..40: mol_type = genomic DNA
catacacacacacatcaggaatgtcaggcagccatcaggt

SEQ ID NO: 13176 - protein, 559 aa, Clostridioides difficile
MSIDKYETLNQERKIQHTKRKVAAYCRVSTDNEDQANSFESQQRYFRQYIERNPDWELYEVFADEGISGTNTKKRKEFNRMIACAKNGDFDLIVTKEISRFARNTLDSIFYTRDLKKHGVGVIFMNDNINTLDGDAELRLAIMSSIAQEESRKTSERVKWGQKRQMEQGVVFGRSMLGYDVKDGKMYINEDGAKVVRLIFHKFVNEGKGTHVIARELREEGIKPMRVKEWQNTVILRVIRNEKYCGDLVQKKTYTPDFLSHEKKYNRGQEEFVIIKDHHEPIISRELFDKANRILDEKSLSQEGKAKHSNRYPFSGKIKCGCCGSSYVARYKTRKNGSRYKAWRCLEAARHGSPHVDKAGNQVGCSGLSIRNEDATHIMYLVTSSLKYNKEKITNNLLAIIKSIIAMDTAGTDSEKLKSQIKAIEQKRTNLIDLYTSGDITRDEFSAARAKCENEIAELQSVIDSIDKQREMIEKQQELVAEITEAMNELINGVEYEDDFYKEILDKMVVNDKDHIDVYLNLLPLKWSYTVAKSVNCPQGKSLKKAQAPEMEHFRGFST

SEQ ID NO: 13177 - DNA, 50 bp, Clostridioides difficile; identical to SEQ ID NO: 9857
  source 1..50: mol_type = genomic DNA

SEQ ID NO: 13178 - DNA, 40 bp, Clostridioides difficile
  source 1..40: mol_type = genomic DNA
gtgagctagttcttctgtaccaatatctgttaaaagtgca

SEQ ID NO: 13179 - DNA, 50 bp, Clostridioides difficile
  source 1..50: mol_type = genomic DNA
tggaacatttcaggggcttctctagtcagagaagcagcggtaatgttcca

SEQ ID NO: 13180 - DNA, 40 bp, Clostridioides difficile
  source 1..40: mol_type = genomic DNA
ctgaacttgaccttctgtagtaatttcctttaaaagttca

SEQ ID NO: 13181 - protein, 432 aa, Streptococcus oralis
MRNYEKITALYKRLSRDDELQGESNSIVNQKKILEEYASKNNLSNIIHFTDDGISGTQFDRPGFMAMMNGVNQGNIGCIIVKDMSRLGRDYLKVGQCMEILRQKGVRLIAINDNVDSFYREDDFTPFRNIMNEWYARDTSRKIQSTFRSKGESGKHTASTPRYGYIKDERDKNKWIVDEKAAEVVRRIFNMTMQGNGLYRIAKILESEKVDIPAYHQQKLGYGLYQSKNFEPPYRWCSSTIVSILKKQEYLGHTVNFKTSKHLKDKKSKYVSEDNWLIFENTHEPIIDQETFDNVQRIRGNVKRYPDGWGEYHPLTGLMYCADCGSKMYVHRTSNYKNILYYTCSAYTKTPCDTLCPSAHRIKAEAVLNLIRETLKDIKKYLDKDNEDFIRSIQNEMKEKEKIEIEKKKIRLTESQIDFRNLNDLCAEFMKI

SEQ ID NO: 13182 - DNA, 50 bp, Streptococcus oralis; identical to SEQ ID NO: 9697
  source 1..50: mol_type = genomic DNA

SEQ ID NO: 13183 - DNA, 40 bp, Streptococcus oralis
  source 1..40: mol_type = genomic DNA
aaattgactttgctgtagcaggctatctgaatctttcttt

SEQ ID NO: 13184 - DNA, 50 bp, Streptococcus oralis
  source 1..50: mol_type = genomic DNA
agaaagtccttgacaagttgttacaagagtaatagaattaaggagaacac

SEQ ID NO: 13185 - DNA, 40 bp, Streptococcus oralis
  source 1..40: mol_type = genomic DNA
aaagtgactctgcttttgcaagctatttaattctttttct

SEQ ID NO: 13186 - protein, 492 aa, Mycobacteroides chelonae
MKALIVVRLSRVTDATTSPERQLQMCQELCSQRGYEVVGTAEDLDVSGAVDPFKREHRPGLAPWLAGERDPFDVIVVYRVDRLTRSIRNLQTLVAWAEDSSKLIVSATEPHFDMTSPFAAVVIALMGTVAQMELDAISQRTSNATQYNLRAGKYRGGPPPWGYRPDDSSGEWRLIQDPDQVALIREIVRRVLDGDPLQRIAHDLTRRGVPTAKGRQEWFVTPLKRALLSEALLGYAMSKGTPIRKDDGSPVVRSEPILTRETFDQLKVELANRSKRGDPTKRSHSLLLRVIYCGVCELPVYKFNGGRDSKYPKYRCSSVNKHSKCGNRTIRATDADEAFTENLLGLFGDSERLERVWDSGSDNSAELANLTSELENATTFLGSPAYRLGTPQRAALDARLESLAARQDELSREAVQPAGWLWKTTGESFAAWWENQDTESRNIWLRSMNIQVSYDNSTGPVTWHIDWGDLKQFEEQLKFGESARRAVRQISR

SEQ ID NO: 13187 - DNA, 50 bp, Mycobacteroides chelonae
  source 1..50: mol_type = genomic DNA
agttgtaaatcctcgacattgggcagatccaaggtgatagatttacaatt

SEQ ID NO: 13188 - DNA, 40 bp, Mycobacteroides chelonae
  source 1..40: mol_type = genomic DNA
ctgcaatctgacgttgggcagatccaaggtcagggtggaa

SEQ ID NO: 13189 - DNA, 50 bp, Mycobacteroides chelonae
  source 1..50: mol_type = genomic DNA
agttgtaaatcctcgacattgggcaaatccaaggtgatagatttacaatt

SEQ ID NO: 13190 - DNA, 40 bp, Mycobacteroides chelonae
  source 1..40: mol_type = genomic DNA
ttgcaagaagacttttgggaaatccaagatcaaggtggaa

SEQ ID NO: 13191 - protein, 521 aa, Streptococcus agalactiae
MKKVITIEPAKQVTHKVELPRFTKRRVAGYARVSTDHEDQTTSYEAQMTYYTDYINSRSDWEFVKMYSDEGISGTNTKKRLGFQEMVEDALDGKIDLILTKSVSRFARNTVDSLSTVRKLKEAGVEIYFEKENIWTFDSKGELLITIMSSLAQEESRSISENVTWGRRRQLAEGQVTFSYSQVLGFKKSDTGGFEIDHEEAKIVRYIFHQVLLGNNPNKIARELTAQGIPTPQGKRQWSYGTVKRMLRNEKYKGDALLQKSFTTDFLTKSTKLNEGELPQYYVENNHEAIIKREVFDLVQVELDKLERKRQTSNIFTGRLFCGDCGSAFGSKVWHSTSKYKRTIYQCNAKYKGEHKCQTPHVTEEEIKGWFLSAINQLLSNRDEIIANTELLIDMAKDTSSLEARLDDLEHHLETIRQDIEDLVDRNARKAQNQDLYQEQYNTLVTAYQEKQKELQETRSVLEEQKSKQLSLDGFIQNFKEQDDLITDFNQELWQTSVERLDIKEDKKIFLTFKNGLRIDL

SEQ ID NO: 13192 - DNA, 50 bp, Streptococcus agalactiae
  source 1..50: mol_type = genomic DNA
tgtatgattaaattgatagcaacagaaataagaagaagttaattgataca

SEQ ID NO: 13193 - DNA, 40 bp, Streptococcus agalactiae
  source 1..40: mol_type = genomic DNA
gataaaattaattgctattgatatggatggaacgctttta

SEQ ID NO: 13194 - DNA, 50 bp, Streptococcus agalactiae
  source 1..50: mol_type = genomic DNA
tgtatgattaaattgatagcaacaataataagaagaagttaattgataca

SEQ ID NO: 13195 - DNA, 40 bp, Streptococcus agalactiae
  source 1..40: mol_type = genomic DNA
gataaaattcatttacattattatggatgggaatcatttg

SEQ ID NO: 13196 - protein, 521 aa, Streptococcus agalactiae
MKKVITIEPAKQVTHKVELPRFTKRRVAGYARVSTDHEDQTTSYEAQMTYYTDYINSRSDWEFVKMYSDEGISGTNTKKRLGFQEMVKDALDGKIDLILTKSVSRFARNTVDSLSTVRKLKEAGVEIYFEKENIWTFDSKGELLITIMSSLAQEESRSISENVTWGRRRQLAEGQVTFSYSQVLGFKKSDTGGFEIDHEEAKIVRYIFHQVLLGNNPNKIARELTAQGIPTPQGKRQWSYGTVKRMLRNEKYKGDALLQKSFTTDFLTKSTKLNEGELPQYYVENNHEAIIKREVFDLVQVELDKLERKRQTSNIFTGRLFCGDCGSAFGSKVWHSTSKYKRTIYQCNAKYKGEHKCQTPHVTEEEIKGWFLSAINQLLSNRDEIIANTELLIDMAKDTSSLEARLDDLEHHLETIRQDIEDLVDRNARKAQNQDLYQEQYNTLVTAYQEKQKELQETRSVLEEQKSKQLSLDGFIQNFKEQDDLITDFNQELWQTSVERLDIKEDKKIFLTFKNGLRIDL

SEQ ID NO: 13197 - DNA, 50 bp, Streptococcus agalactiae; identical to SEQ ID NO: 13192
  source 1..50: mol_type = genomic DNA

SEQ ID NO: 13198 - DNA, 40 bp, Streptococcus agalactiae; identical to SEQ ID NO: 13193
  source 1..40: mol_type = genomic DNA

SEQ ID NO: 13199 - DNA, 50 bp, Streptococcus agalactiae; identical to SEQ ID NO: 13194
  source 1..50: mol_type = genomic DNA

SEQ ID NO: 13200 - DNA, 40 bp, Streptococcus agalactiae; identical to SEQ ID NO: 13195
  source 1..40: mol_type = genomic DNA

SEQ ID NO: 13201 - protein, 489 aa, Streptococcus anginosus
MITTNKVAIYVRVSTTSQAEEGYSIDEQIAKLKSYCDIKDWTLYKVYKDAGFSGSNIKRPGLQSLIADAKNKHFDTVLVYKLDRLSRSQKDTLYLIEEVFNKQDIAFFSLQENFDTSTAFGKAMIGLLAVFAQLEREQIKERMQLGKLGRAKAGKAMMWAKVAYGYNYNKETGSLDINPAEAEIVKIVYAEYLAGQSITKLKDYLNENGLNTKARPWYYRAIRQILGNPVYAGYNQFSGQVFKGDHQPIVSKEDYDRTQEELKRRQLKAYELFNNPRPFRAKYMLSGLARCGYCGTPLKMSMTAKRKSDGGRTYRYSCINRTSNRTKSPTLYNGGKKCDSGLYYKEDLEKYVLDEVARLQHDPEAIKSLIEPAKTTVDEQEIKSRVNALDTKISRLNDLYLNNLITLEDLKEKTSGILREKAILEKQLTENPTNQIDAEKERIKKIQAKADIRSFPYEEQAMIVKSLINKVDVTAEAITIRWTINNFSD

SEQ ID NO: 13202 - DNA, 50 bp, Streptococcus anginosus; identical to SEQ ID NO: 2442
  source 1..50: mol_type = genomic DNA

SEQ ID NO: 13203 - DNA, 40 bp, Streptococcus anginosus; identical to SEQ ID NO: 5253
  source 1..40: mol_type = genomic DNA

SEQ ID NO: 13204 - DNA, 50 bp, Streptococcus anginosus
  source 1..50: mol_type = genomic DNA
tcaataattttagtgactaacattctaatcaatgtatctaaaattctttg

SEQ ID NO: 13205 - DNA, 40 bp, Streptococcus anginosus
  source 1..40: mol_type = genomic DNA
aataagcatgactaacattctttctaatagaaaaatttaa

SEQ ID NO: 13206 - protein, 507 aa, Faecalicatena orotica
MELYLMYLRKSRMDLDFDEVSVRETLNRHRKILEAFCRERKLNVVEVLEEVVSGESLSSRPEMLRLLELVNTGLYAGVICIDIERLSRGSSLESGYIMQVFQANNCKIVTPSKIYDLQNEADEQFTDMKFMFSRYELKTITKRLVRGRNQSASEGKFMGSIAPYGYRAYKLPGVKGNSLEIVPDEAKIVRMIYDMYGQQGIGYNTIAYQLNEMHIPSLNGSWGQTSITNILSNEVYLGKIRWRREPTKRIIRDGMVVKKRVLNNNYELYDGLHEPIITQEQWERVVSVRNSRNHSSVHSTKQLSNPFATILFCEKCGATLKRNVPGKSQKTTPWYRCPTRGCDCRAIKCHVMESSVISAMESWLHDYLIYIGSDVQSQNDHLETALGIIRSQLSDLQMQQDKICDLLEKGVYTVEMFSKRNASLVEEIRKAQTAESDLLKKCENQSQVESEAGKIIPATQHILDNYEHLSPAEKNNLWKIVLEKVSAYRTPDGELSVHIYLKLPMKK

SEQ ID NO: 13207 - DNA, 50 bp, Faecalicatena orotica
  source 1..50: mol_type = genomic DNA
attagtgctggtctgttggcccatgtataagccaatagacggtcactacg

SEQ ID NO: 13208 - DNA, 40 bp, Faecalicatena orotica
  source 1..40: mol_type = genomic DNA
tttagggattctggcacatgtcgatgcaggaaaaacaact

SEQ ID NO: 13209 - DNA, 50 bp, Faecalicatena orotica
  source 1..50: mol_type = genomic DNA
attagtgctggtctgttggcccatatataagccaatagacggtcactacg

SEQ ID NO: 13210 - DNA, 40 bp, Faecalicatena orotica
  source 1..40: mol_type = genomic DNA
tattggaattatggctcatattgatgcaggcaaaactacc

SEQ ID NO: 13211 - protein, 516 aa, Staphylococcus agnetis
MSNIMEGYYDDINTQESRIDTVAIYARKSRADEGEKDLNNHLMRLKARSELNEWSYEVYKEIGSGASIEDRPVMRQLLSDVEKGEFDAVVVVDLDRLSRGKGADLDRILGTFRNNDVKIVQESPYEVYDLTNSDHAQMLEMKMFFGNMELMQTKKRFREGRRLSRHLGKWVYGQAPFGYQIDKKTKKLVFNEKEKEAFLKMKELFFEGYNTVDIAWNLNKEGYTKRSGRPFESKSISRILKNEIYTGTTVYNKSIGSKRNKNDLYSSGLPFKRLDKSEWKRKYNTHPALVTMEEHELIVKHFQNVPHRAHSRSKVPYSLFGLCRTPKGEHYHIYTYNTKGQPTHIGIKKSKYEDKSEYISVPIKLVESVILESIKLLESELELLLEDNDNQKEVALLEKRAKKINKEIEQLEGEIDRIQEGFLAGLFNAEEAAQIKKKKNSEVDVKENELLEVNKSIDKVSNSTNLTRLDRLQNIYKMINDSSNPTKLNEIYKSIINDIVVSRTVFDEIDVQVNFL

SEQ ID NO: 13212 - DNA, 50 bp, Staphylococcus agnetis
  source 1..50: mol_type = genomic DNA
aaggcaacatagagtgagtaccatggacggtactggatttaaacacccag

SEQ ID NO: 13213 - DNA, 40 bp, Staphylococcus agnetis
  source 1..40: mol_type = genomic DNA
taggtgcaacaattaacatggacggtacagcaatcatgca

SEQ ID NO: 13214 - DNA, 50 bp, Staphylococcus agnetis
  source 1..50: mol_type = genomic DNA
aaggcaacatagagtgagtaccattaacggtactggatttaaacacccag

SEQ ID NO: 13215 - DNA, 40 bp, Staphylococcus agnetis
  source 1..40: mol_type = genomic DNA
ttgttctaacaattaacattaacggtacagcatgaattta

SEQ ID NO: 13216 - protein, 539 aa, Halobacillus litoralis
MKAAIYGRISTSGQIKGTSLNEQIKLCMKRAKDLGYSEEDVDVYREEAFSGSDVDIRPEMNELRSLTKEGVYKHVICTHPDRFSRDLTDKLIVCRELEKNNAELEFTDTEYERSPEGALFFNIMSAIAAYELELIKKRTVRGRLARVKNHKEIMPMRVPPYGYDWSDKQLTINEEEAEFVKKIYEWYVYERLTLRQIGDKLYKLGAYPKRKESQYWNASSISRVLSSEIYTGKYYYNKREGKKLRGEKTKSGNAKITRSVRDEEDWIMIEVPSIVDEALWNMAQEQRKDNRTNSGNSKHKYLLKSLLICKNCGRKWNGTTYTGKSKAGKIKYRSYRCPNKNPRKYGEDYCDCKNNSIRADILEDVVWDTLEENVLRKPDETRKRIEALGKVPDDKNDQKQLEMLKKNLASKEEQRNRIKKMFQHGVIEEEEMMKDMKAVKDDIQSIEYEISKIGNDTAKLEIKHKVAMWDKLIENFPKDLDKTPPEEAFEIKRQFLVTFVEEIIVDIDDEEGLYVKMKGLLQKISDSVNVRSSTQRFDD

SEQ ID NO: 13217 - DNA, 50 bp, Halobacillus litoralis
  source 1..50: mol_type = genomic DNA
acgtcaggtcgagtacacaacgttttgacgatgtaaacacgactcaacgt

SEQ ID NO: 13218 - DNA, 40 bp, Halobacillus litoralis
  source 1..40: mol_type = genomic DNA
ctttgtattctcgaattttttgacgatgtgtgcaacaagg

SEQ ID NO: 13219 - DNA, 50 bp, Halobacillus litoralis
  source 1..50: mol_type = genomic DNA
acgtcaggtcgagtacacaacgttccgacgatgtaaacacgactcaacgt

SEQ ID NO: 13220 - DNA, 40 bp, Halobacillus litoralis
  source 1..40: mol_type = genomic DNA
ttttttattctagaatttgccaacgttgggtggaagaagg

SEQ ID NO: 13221 - protein, 550 aa, Clostridium sporogenes
MNNKVAIYVRVSTHHQIDKDSLPLQRQDLINYSKYVLNTNKYELFEDAGYSAKNTDRPNFQNMMSKIRKNEFSHLLVWKIDRISRNLLDFCDMYEELKKYNCTFVSKNEQFDTSSAMGEAMLKIILVFAELERKLTGERVTAVMLDRATKGLWNGAPIPLGYAWDKVRKFPIIDQKEKNTIELIYNTYLKTKSTTAVRGLLNSNNIKTKRGGSWTTKTVSDIIRNPFYKGTYRYNYREPGRGKVKNENEWVLIEDNHPGIITKELWNQCNEIMDTNAQRNNAAGFRANGKVHVFAGLLECDECHNNLYSKQDKPNIDGFIPSIYVCSGRYNHLGCSQKTISDNYIGTFVFNFVSNILTTQNKVNKLDTQSFENSLLKGKFFKDIIGIDNIETIQGISYPKNILKTKNINVKSNSIELEIIKKEKVKFERAMQRLEDLYLFDDEAMSEKDYMIKKKKINEKLQELNNKLKGFDTCGDVSELNLMKEVSNFMLSKELLNMHDINYKKLVLAVGRERLKDFVKTIIDKIIIKDKKILNVKFKNGLVIKFVYKC

SEQ ID NO: 13222 - DNA, 50 bp, Clostridium sporogenes
  source 1..50: mol_type = genomic DNA
atcttcctattttctacatacggtcaaccgtatgtagaaataaagaagga

SEQ ID NO: 13223 - DNA, 40 bp, Clostridium sporogenes
  source 1..40: mol_type = genomic DNA
atcctcttcattcatctggcaaccccaggtttctatgaaa

SEQ ID NO: 13224 - DNA, 50 bp, Clostridium sporogenes
  source 1..50: mol_type = genomic DNA
atcttcctattttctacatacggtccaccgtatgtagaaataaagaagga

SEQ ID NO: 13225 - DNA, 40 bp, Clostridium sporogenes
  source 1..40: mol_type = genomic DNA
atccactcccttcaactggccaccccagctttttctgcag

SEQ ID NO: 13226 - protein, 547 aa, Streptococcus suis; identical to SEQ ID NO: 12146

SEQ ID NO: 13227 - DNA, 50 bp, Streptococcus suis; identical to SEQ ID NO: 11112
  source 1..50: mol_type = genomic DNA

SEQ ID NO: 13228 - DNA, 40 bp, Streptococcus suis
  source 1..40: mol_type = genomic DNA
agcataccaacgatccaaggaactacaacaagtgagaaca

SEQ ID NO: 13229 - DNA, 50 bp, Streptococcus suis
  source 1..50: mol_type = genomic DNA
actgtccgcaaaaaatgaccgactggtgtaggacggattttgcggacatt

SEQ ID NO: 13230 - DNA, 40 bp, Streptococcus suis
  source 1..40: mol_type = genomic DNA
aacaaacaaacaaaacaagggagaacaacaagggagaaca

SEQ ID NO: 13231 - protein, 470 aa, Dorea formicigenerans; identical to SEQ ID NO: 3156

SEQ ID NO: 13232 - DNA, 50 bp, Dorea formicigenerans; identical to SEQ ID NO: 3152
  source 1..50: mol_type = genomic DNA

SEQ ID NO: 13233 - DNA, 40 bp, Dorea formicigenerans
  source 1..40: mol_type = genomic DNA
attttcaacttacgctgtgccgatgatttccggtgaaatc

SEQ ID NO: 13234 - DNA, 50 bp, Dorea formicigenerans
  source 1..50: mol_type = genomic DNA
aaatttccactataatacattatcgtaatagagtaagataaaggaaacga

SEQ ID NO: 13235 - DNA, 40 bp, Dorea formicigenerans
  source 1..40: mol_type = genomic DNA
attttcagctgactctgtggtcattcttaccagtgaaata

SEQ ID NO: 13236 - protein, 495 aa, Aerococcus urinaeequi
MLFAYPILTQIGVEIYMRTAIYVRVSTQEQANEGYSVGEQEERLKAYCIAKGWTVYKVYTDGGFSGANTERPALKQMLIDIKNKKVNAVVVYKLDRLSRSQKDTLLLIEDEFLKNNVEFVSMSENFDTSTPFGRAMIGILSVFAQLEREQIRERMQMGLDARAREGFWHGGGYDPIGYDYIDGYLQINEYEAMQLKKVHELFQKGLPINRIQKMMGEKYTTKHGSWANHSTVRNALTQPIYTGKIEWKGELYEGKHEAIIDEDTFNKSVKRYNEISWNKGDGKNKKRPFQAKHVLTGLVYCNHCGARYFAKGNYSGRGENRKYRPYYTCYSRAKSAKNMIIDQNCKNKSYATVDLDRIIFDEINKLAFDPTLIKEIESDKPEKENNNAAIETRIKEIDKQVERLLDLYQLGTSSVDDVLTRMDKLNSEKQALTDELEVTEPEVPNLSQDEAEKLLVESSEILESDDLIKKRELVHSLIDSIEIDGDDIIINWAFV

SEQ ID NO: 13237 - DNA, 50 bp, Aerococcus urinaeequi
  source 1..50: mol_type = genomic DNA
ataaggcgacaggtcgcttcaacgtgccttgagtacactcaaaaacgtgt

SEQ ID NO: 13238 - DNA, 40 bp, Aerococcus urinaeequi
  source 1..40: mol_type = genomic DNA
tagtgtcactgtctcaacatgccaagtttgtgggaacata

SEQ ID NO: 13239 - DNA, 50 bp, Aerococcus urinaeequi
  source 1..50: mol_type = genomic DNA
ataaggcgacaggtcgcttcaacgtaccttgagtacactcaaaaacgtgt

SEQ ID NO: 13240 - DNA, 40 bp, Aerococcus urinaeequi
  source 1..40: mol_type = genomic DNA
tggagtcagggtttcaacatatgaattttgagggaacata

SEQ ID NO: 13241 - protein, 489 aa, Fusobacterium nucleatum
MKKAVGYCRYSSNNQREESIEAQMRAIEQYCKTKEIELIRFYKDEAISGTSIKDRESFLEMISDSRNGEFELVIVHKYDRFARNQYDHAIFEKKLNGNNVLLISVLEELNDSPESIILKSVLTGMNEYYSLNLSREVKKGKKENALKGIHNGGLPPLGYDLDENKRYVVNQEEAKIIRFIFSLASQGLTYSDIADILNKKGYKNKSGSNFKKTSIRDTLLNMKYIGTYFLGLKNRKGTYLKDPLIIENSHEAIVDKTIFYKVQGRFRISKNQPRKRKDNYYLLTGHCNCGLCGETYVGGYRTKNRYGTVYYGYQCKNRKNNTKLCKNRYLRKEKLEKAVISTIKNEILNNKNIEIISKDLFEILRKEFDKSEEIEKCKKEIEKLNNKSLRLLEKNLEGVILEEIFYKKNQEINQELNFLKSKLYSLQESNGKSFTEEGIKLYLYNLKNRFDEKLDRSIIEFFVKDIKIFPDNVIVTLRKLPKLHKNGDP

SEQ ID NO: 13242 - DNA, 50 bp, Fusobacterium nucleatum; identical to SEQ ID NO: 2577
  source 1..50: mol_type = genomic DNA

SEQ ID NO: 13243 - DNA, 40 bp, Fusobacterium nucleatum
  source 1..40: mol_type = genomic DNA
tataaaaaatggcgaccccgatgtggcttgaacacacaac

SEQ ID NO: 13244 - DNA, 50 bp, Fusobacterium nucleatum; identical to SEQ ID NO: 2579
  source 1..50: mol_type = genomic DNA

SEQ ID NO: 13245 - DNA, 40 bp, Fusobacterium nucleatum; identical to SEQ ID NO: 2580
  source 1..40: mol_type = genomic DNA

SEQ ID NO: 13246 - protein, 581 aa, Angelakisella massiliensis
MIERFDIAGYCRISVDEELDRDNTSIENQKAIISDFVKRQFPDSTLTFYEDRDRSGYTFEQREGYQTMRRELMAHQKDILIVKDFSRFSRRNSRGLVELEDLRDAGVRIISIGDNIDFPGGDDWLKIQFQFLINEMPVTDTSKKVRSVVRRRQQDGQWICAAPYGYIINSKQQFEVVPTEAEVVREIFRLYNDEGWGYKKIANHLTAQGIPTPRMSERMRKEAVGEECRREAKSAWAIVTVQGILDNDFYIGTLRQGKYTRAKINGKDIRRDEMEQIVIENHHQPIIDYRTFAVTRALREQRTRSNYRGTKVNDNVYSGFLECGDCGAPMFAMSRRDLKPAYTCGTYHRQGRAGCTSHHIRVDKLDEIVKGYVALVRENSAAMVERLNADLAREEEDVAETERSAANLEEVLADLQEELKATKRQRVRDIMKHPDQEAILEETYDELESDLTRRMEGIRRQLQMAVDKRNTILQVNRTAKTALEVFDDILRKEKLDRKDLQLVIEKIRVYEDHIEVQLKGDIDSLLKCGRLPEKERETTVNFKSDMANSLPTASSPLSSPSKSGQTRPAMSMQSVTIRQHR

SEQ ID NO: 13247 - DNA, 50 bp, Angelakisella massiliensis
  source 1..50: mol_type = genomic DNA
caacccgttttaatagaaggaggatttttttcatggaggggagcgggacg

SEQ ID NO: 13248 - DNA, 40 bp, Angelakisella massiliensis
  source 1..40: mol_type = genomic DNA
cattttaacaaaagaaggattttttcatgaaggcgacagg

SEQ ID NO: 13249 - DNA, 50 bp, Angelakisella massiliensis
  source 1..50: mol_type = genomic DNA
caacccgttttaatagaaggaggaaatttttcatggaggggagcgggacg

SEQ ID NO: 13250 - DNA, 40 bp, Angelakisella massiliensis
  source 1..40: mol_type = genomic DNA
gattttaacaaaaggaggaaatactcatgacagttacagt

SEQ ID NO: 13251 - protein, 537 aa, Clostridium cocleatum
MSTLNVLDSLFQTAVYIRLSREDGDKEESDSVGNQRKLLTEYIAKKKDLVLYDTYIDDGYSGTNFRRPSFQRMIEDIESGNVNCVIVKDLSRFGRDYIETGRFLERVFPDLGIRFISITDGIDSLKQVYDMLLPIKNIFNEQYARDISKKVRTAVKTKQQSGEFIGAFTSYGYKKSSTDKNKLIIDEYAANIVRRIFDMYVKGYGKQKIAVVLNNEGILCPSEYKKLNGLNYNNANKLDSTTYWSYSTINSILSKEIYIGNMVQGTRIQRMRGKQKKVPKEQWIIVENTHEPIIDMGTWQKVQTLLKRRARKLDLNKNMNIFAGFLKCGDCGRAMTKSIWRHSNGTRVYDFYCGTYRRNGKKYCTSHRIPLKVLEDIVLDDLKKIVSSVEDLKLFIQSQNLNIEKSKQMTNTEINKIKSDLERIKKLKKSVYEDYKEGLISKEEYFSYREDYLKKEELYLKQLEVLEREKDEGVTSCVFEIPWVKRLLDLKDIEVLDRDIVVEMIHRITIYEDKKIKISYNFSNELEYLFSSVYNDI

SEQ ID NO: 13252 - DNA, 50 bp, Clostridium cocleatum
  source 1..50: mol_type = genomic DNA
agtttgcgcaattgataccctggacatggtggatgttaatagcgcaaaaa

SEQ ID NO: 13253 - DNA, 40 bp, Clostridium cocleatum
  source 1..40: mol_type = genomic DNA
tgtggtgattgatccaggacatggtgggcttgataatggt

SEQ ID NO: 13254 - DNA, 50 bp, Clostridium cocleatum
  source 1..50: mol_type = genomic DNA
agtttgcgcaattgataccctggaaatggtggatgttaatagcgcaaaaa

SEQ ID NO: 13255 - DNA, 40 bp, Clostridium cocleatum
  source 1..40: mol_type = genomic DNA
ggtggtggttgttcctggtaatggtggcattgatggtggt

SEQ ID NO: 13256 - protein, 540 aa, Clostridioides difficile
MKQPYNTTIYNTALYMRLSRDDESYGDSVSIETQRTILQQYAREQGLHVVGEYVDDGWSGTNFERPSFQRMMDDVEAGKVNCIVTKDLSRFGREHVMMDYYLEFLFPEKRVRYIAVAENEDTEKGLSDFVPFKNLFNEWFAKDTSRKVKTAFKAKFAAGQRISAYAPLGYKKHPEIKNKLIIDEETRWIVEKIFDLAIHGKGAASITRILIAEKVPTPGFINFQRDGTFANIYAGAPEEKGYAWTIAQVKSIMKDETYIGHTIHYRETNISFKNKRRIRKPQSEWVRVENTQEPIISEQVFRQVQEQIASRRRERKNGTTQIFAGLIKCADCGWSLAYGENRQNSKPYGYYHCSKNGQGTRQCSMHYIRYDVLYAYVLSRLQYWSALVQHDEEQLLKRLLNANDKGQAAARKKQAAELKKAEKRKAEVDTLFARMYEDWAAGRITEYNFNMLSGKYQSEQAELEEKIEQLQSAIAAESQSAADAEKWIALMKECVNPTELTAELLNTLIEKILVHEAVKNEDGSREQEVEIFYRFIGKID

SEQ ID NO: 13257 - DNA, 50 bp, Clostridioides difficile
  source 1..50: mol_type = genomic DNA
caatatctttaagtatgtgataccggagtttcacataattaaagatacca

SEQ ID NO: 13258 - DNA, 40 bp, Clostridioides difficile; identical to SEQ ID NO: 5333
  source 1..40: mol_type = genomic DNA

SEQ ID NO: 13259 - DNA, 50 bp, Clostridioides difficile
  source 1..50: mol_type = genomic DNA
caatatctttaagtatgtgatacctgagtttcacataattaaagatacca

SEQ ID NO: 13260 - DNA, 40 bp, Clostridioides difficile
  source 1..40: mol_type = genomic DNA
ggtttgtaagtgggggagttgagattctaatccagatctg

SEQ ID NO: 13261 - protein, 540 aa, Clostridioides difficile; identical to SEQ ID NO: 12131

SEQ ID NO: 13262 - DNA, 50 bp, Clostridioides difficile; identical to SEQ ID NO: 2472
  source 1..50: mol_type = genomic DNA

SEQ ID NO: 13263 - DNA, 40 bp, Clostridioides difficile; identical to SEQ ID NO: 5333
  source 1..40: mol_type = genomic DNA

SEQ ID NO: 13264 - DNA, 50 bp, Clostridioides difficile
  source 1..50: mol_type = genomic DNA
caatatctttaattaagggagacgtgagtttcccatagttaaagatacca

SEQ ID NO: 13265 - DNA, 40 bp, Clostridioides difficile; identical to SEQ ID NO: 13260
  source 1..40: mol_type = genomic DNA

SEQ ID NO: 13266 - protein, 537 aa, Clostridioides difficile; identical to SEQ ID NO: 9196

SEQ ID NO: 13267 - DNA, 50 bp, Clostridioides difficile; identical to SEQ ID NO: 1657
  source 1..50: mol_type = genomic DNA

SEQ ID NO: 13268 - DNA, 40 bp, Clostridioides difficile; identical to SEQ ID NO: 5333
  source 1..40: mol_type = genomic DNA

SEQ ID NO: 13269 - DNA, 50 bp, Clostridioides difficile
  source 1..50: mol_type = genomic DNA
tcatatctttaactaagggaaagctgagtttcccaaacaaaaggatatta

SEQ ID NO: 13270 - DNA, 40 bp, Clostridioides difficile; identical to SEQ ID NO: 13260
  source 1..40: mol_type = genomic DNA

SEQ ID NO: 13271 - protein, 471 aa, Clostridioides difficile; identical to SEQ ID NO: 9206

SEQ ID NO: 13272 - DNA, 50 bp, Clostridioides difficile; identical to SEQ ID NO: 1657
  source 1..50: mol_type = genomic DNA

SEQ ID NO: 13273 - DNA, 40 bp, Clostridioides difficile; identical to SEQ ID NO: 5333
  source 1..40: mol_type = genomic DNA

SEQ ID NO: 13274 - DNA, 50 bp, Clostridioides difficile; identical to SEQ ID NO: 13269
  source 1..50: mol_type = genomic DNA

SEQ ID NO: 13275 - DNA, 40 bp, Clostridioides difficile; identical to SEQ ID NO: 13260
  source 1..40: mol_type = genomic DNA

SEQ ID NO: 13276 - protein, 540 aa, Clostridioides difficile
MKQPNNTTIYNTALYLRLSRDDELQGESGSIRTQRMMLREYAHEHGLNVVGEYIDDGWSGTNFDRPEFQRMIDDIEDGRINCVVTKDLSRLGRNYILTGQYTELYFPSKGVRYIAINDNVDTLNGDNELAPFLNILNEMHARQTSKKVKAAFRTRFANGAHYGAYAPLGYRKDPEQTGHLLIDPDTKWIIERIFELALHGAGAAKITRILMEEKVSTPAWVNFQRNGTFAHVFEGAEESKRYQWTIAQVKSILKDENYIGNSVHNRQSTVSFKNKKVVRKPESEWFRVENTHEAIITKEVFLQVQEQIAGRRRVCKNGQTQIFAGLIKCADCGWTLSYADNRQNKTPYGYYHCGKNGQGLGQCSMHYIRYDVLYGYVLSRLQYWSEQVHRDDEKLLQQLLNAGNKERSAVKKQRAVELKRATKRKAEVDGLFTKLYEDWSLGKITEYNFTMLSERFQTEQRELETKIRELQEALSSMEQTESDAEKWVELIKQYASPTELTTELLNTLIEKIVVHEAVKSPDGCRKQKVDIYYRFIGKID

SEQ ID NO: 13277 - DNA, 50 bp, Clostridioides difficile
  source 1..50: mol_type = genomic DNA
caataaccttaactatgggagtccggaggttcccttagttaaagatacta

SEQ ID NO: 13278 - DNA, 40 bp, Clostridioides difficile; identical to SEQ ID NO: 5333
  source 1..40: mol_type = genomic DNA

SEQ ID NO: 13279 - DNA, 50 bp, Clostridioides difficile
  source 1..50: mol_type = genomic DNA
caataaccttaactatgggagtcctgaggttcccttagttaaagatacta

SEQ ID NO: 13280 - DNA, 40 bp, Clostridioides difficile; identical to SEQ ID NO: 13260
  source 1..40: mol_type = genomic DNA

SEQ ID NO: 13281 - protein, 470 aa, Clostridioides difficile
MMDDVEAGKVNCIVTKDLSRFGREHVMMDYYLEFLFPEKRVRYIAVAENEDTEKGLSDFVPFKNLFNEWFAKDTSRKVKAAFKAKFATGQRIGAYAPIGYRKHPEIKNKLIIDEETRWIVEKIFDLAIHGRGAASITRILIEEKVPTPGFINFQRDGTFANIYAGAPEEKSYAWTIAQVKSIMKDETYIGHTIHYRETNISFKNKRRVRKPQSEWVRVENTQEPIISEQVFRQVQEQIANRRRKCKDGTTQIFSGLVKCADCGWSLSYGENRQNSKPYGHYHCSKYGQGTRQCSMHYIRYDVLYAYVLSRLQYWSGLVQHDEERLLKRLLNATDKGQAAARKKQAAELKKAEKRKAEVDTLFARMYEDWAAGCITEYNFSMLSGKYQSEQAELDTKIEQLQSAIATESQNAADAEKWIALMKECVNPTELTAELLNTLIEKIVVHEAVKGEDGSREQEVEIFYRFIGKID

SEQ ID NO: 13282 - DNA, 50 bp, Clostridioides difficile; identical to SEQ ID NO: 4067
  source 1..50: mol_type = genomic DNA

SEQ ID NO: 13283 - DNA, 40 bp, Clostridioides difficile; identical to SEQ ID NO: 5333
  source 1..40: mol_type = genomic DNA

SEQ ID NO: 13284 - DNA, 50 bp, Clostridioides difficile
  source 1..50: mol_type = genomic DNA
caatatctttaactatgtgatacctgggtttcacttagataaagatacca

SEQ ID NO: 13285 - DNA, 40 bp, Clostridioides difficile; identical to SEQ ID NO: 13260
  source 1..40: mol_type = genomic DNA

SEQ ID NO: 13286 - protein, 540 aa, Clostridioides difficile; identical to SEQ ID NO: 4066

SEQ ID NO: 13287 - DNA, 50 bp, Clostridioides difficile; identical to SEQ ID NO: 4067
  source 1..50: mol_type = genomic DNA

SEQ ID NO: 13288 - DNA, 40 bp, Clostridioides difficile; identical to SEQ ID NO: 5333
  source 1..40: mol_type = genomic DNA

SEQ ID NO: 13289 - DNA, 50 bp, Clostridioides difficile; identical to SEQ ID NO: 13284
  source 1..50: mol_type = genomic DNA

SEQ ID NO: 13290 - DNA, 40 bp, Clostridioides difficile; identical to SEQ ID NO: 13260
  source 1..40: mol_type = genomic DNA

SEQ ID NO: 13291 - protein, 540 aa, Clostridioides difficile; identical to SEQ ID NO: 9161

SEQ ID NO: 13292 - DNA, 50 bp, Clostridioides difficile
  source 1..50: mol_type = genomic DNA
caatatctttaactaagggaaacggggggttcacttagataaagatacca

SEQ ID NO: 13293 - DNA, 40 bp, Clostridioides difficile; identical to SEQ ID NO: 5333
  source 1..40: mol_type = genomic DNA

SEQ ID NO: 13294 - DNA, 50 bp, Clostridioides difficile
  source 1..50: mol_type = genomic DNA
caatatctttaactaagggaaacgtggggttcacttagataaagatacca

SEQ ID NO: 13295 - DNA, 40 bp, Clostridioides difficile; identical to SEQ ID NO: 13260
  source 1..40: mol_type = genomic DNA

SEQ ID NO: 13296 - protein, 537 aa, Clostridioides difficile; identical to SEQ ID NO: 11881

SEQ ID NO: 13297 - DNA, 50 bp, Clostridioides difficile; identical to SEQ ID NO: 11882
  source 1..50: mol_type = genomic DNA

SEQ ID NO: 13298 - DNA, 40 bp, Clostridioides difficile; identical to SEQ ID NO: 5333
  source 1..40: mol_type = genomic DNA

SEQ ID NO: 13299 - DNA, 50 bp, Clostridioides difficile
  source 1..50: mol_type = genomic DNA
tcatatctttaactaagggaaagctgtgtttcccaaacaaaaagatatta

SEQ ID NO: 13300 - DNA, 40 bp, Clostridioides difficile; identical to SEQ ID NO: 13260
  source 1..40: mol_type = genomic DNA

SEQ ID NO: 13301 - protein, 540 aa, Clostridioides difficile; identical to SEQ ID NO: 12476

SEQ ID NO: 13302 - DNA, 50 bp, Clostridioides difficile; identical to SEQ ID NO: 12477
  source 1..50: mol_type = genomic DNA

SEQ ID NO: 13303 - DNA, 40 bp, Clostridioides difficile; identical to SEQ ID NO: 5333
  source 1..40: mol_type = genomic DNA

SEQ ID NO: 13304 - DNA, 50 bp, Clostridioides difficile
  source 1..50: mol_type = genomic DNA
caatatctttaactatgtgatacctgggattcacttagataaagatacca

SEQ ID NO: 13305 - DNA, 40 bp, Clostridioides difficile; identical to SEQ ID NO: 13260
  source 1..40: mol_type = genomic DNA

SEQ ID NO: 13306 - protein, 537 aa, Clostridioides difficile; identical to SEQ ID NO: 641

SEQ ID NO: 13307 - DNA, 50 bp, Clostridioides difficile; identical to SEQ ID NO: 402
  source 1..50: mol_type = genomic DNA

SEQ ID NO: 13308 - DNA, 40 bp, Clostridioides difficile; identical to SEQ ID NO: 5333
  source 1..40: mol_type = genomic DNA

SEQ ID NO: 13309 - DNA, 50 bp, Clostridioides difficile; identical to SEQ ID NO: 404
  source 1..50: mol_type = genomic DNA

SEQ ID NO: 13310 - DNA, 40 bp, Clostridioides difficile; identical to SEQ ID NO: 13260
  source 1..40: mol_type = genomic DNA

SEQ ID NO: 13311 - protein, 540 aa, Clostridioides difficile
MKQPYNTTIYNTALYLRLSRDDELQGESGSIQTQRMMLRQYAAEHGLTVVDEYIDDGWSGTNFERPSFQRMIDDIEDGKINCVVTKDLSRLGRNYILTGQYTEIYFPSKGVRYIAINDNVDTINGESELAPFLNILNEMHARQTSKKVKAAMHTRFANGAHYGAYAPLGYVKDPDKKGHLLIDPETRWIVEKIFDLAVHGRGAASITRILVEEKVPTPGWLNYERYGTFANIYAGAPPEKAYAWTIAQVKSILKEETYIGHSVHNKQSNISFKNKKKVRKPQEEWYRVENTHEAIISEEVFQKVQELIASRRRRQKNGTTQIFSGLVKCADCGWSLAYGVNSQNKNPYAHYHCSKYGQGLRQCSMHYIRYDVLYAYVLARLQYWSMLAQKDEDKLLKRLLNASDRERNSAKKKQAAELKKAEKRKAEVDGLFAKMYEDWSAGRITEYNFNMLSEKYQNEQRELETKIRQLHETMEAAVQTAADAEKWIALMKQYVNPVELTAELLNTLIEKITVHEAVKGEDGSREQEVEIYYRFIGKID

SEQ ID NO: 13312 - DNA, 50 bp, Clostridioides difficile; identical to SEQ ID NO: 3657
  source 1..50: mol_type = genomic DNA

SEQ ID NO: 13313 - DNA, 40 bp, Clostridioides difficile; identical to SEQ ID NO: 5333
  source 1..40: mol_type = genomic DNA

SEQ ID NO: 13314 - DNA, 50 bp, Clostridioides difficile
  source 1..50: mol_type = genomic DNA
caatatctttaattaagggaaacgtgagtttcccatagttaaagatacca

SEQ ID NO: 13315 - DNA, 40 bp, Clostridioides difficile; identical to SEQ ID NO: 13260
  source 1..40: mol_type = genomic DNA

SEQ ID NO: 13316 - protein, 575 aa, Phocaeicola vulgatus
MRGAIYSRVSTLDQDYKRQTNELKEYAQYMGIEITHVFEEKESGFNDDRPEFAKLKELTKDDIDIVLVWELSRLSRRSLYLQQQIEYFTKKGICVYAKKENLRTLDEKGEEDRNTKFIIGIIAMIAEQEVATLKSRSISSKRNKIINEGNSYTYKAPYGYDYSTETKKLSINEEEAKTVRRVIELSANGYSSARIALILNAENIPTRSKTKIWTMGTINTMLSNPVYKGKAEYMLKGTEPKKGKRYKRPIDVAIVNTPAIVSAELYDLSREKMKGRAFRSKSTGVKHFQLLRGLIYCPYCKIKYTYEGGRDLYVCHDKHKKSKNKPDCFSKAIKATRIEKIVWELVKLLFSQELATGKAQEQEEPLRQEIEAHKKLLMGIEEKLNDLTAQANAIVNAAIDIKREMPNMPDLYINKIREAASLDKESKKYQYEKDRLNKLILSCEDKIKAINSLSNEKVLVDSITDDMERYELIHKVIDHMIIYGEDSAYSLVVVTFKTGQEVYIGYKSKGYQYYTIFYPSQSVWVDTKKRLGCIMTMKAPTSLEFSLETLTKEYSITDFVKMFNTPENRHYYENQ

SEQ ID NO: 13317 - DNA, 50 bp, Phocaeicola vulgatus
  source 1..50: mol_type = genomic DNA
agtagtacctactaatgttaaatagtgacaacacatttgcaggtacaact

SEQ ID NO: 13318 - DNA, 40 bp, Phocaeicola vulgatus
  source 1..40: mol_type = genomic DNA
atgatatagaacaaatgtagtggattcatggcattatgcc

SEQ ID NO: 13319 - DNA, 50 bp, Phocaeicola vulgatus
  source 1..50: mol_type = genomic DNA
agtagtacctactaatgttaaatattgacaacacatttgcaggtacaact

SEQ ID NO: 13320 - DNA, 40 bp, Phocaeicola vulgatus
  source 1..40: mol_type = genomic DNA
aaaataaataacaaatgtattattttcatgggtttatgcc

SEQ ID NO: 13321 - protein, 542 aa, Dorea phocaeensis
MIYQKGSNLFNVAIYIRLSREDGDKEESDSVGNQRKLLTEYVNKHDDFILYDVYIDDGFTGTNFNRPDFHRMIADIEDNKVNCVVVKDLSRFGRDYIDTGRYLERIFPELNVRFISVTDNIDSMKQAYDMLLPIKNIFNEQYARDISNKIQATVKSKQKAGEFIGAFTSYGYKKSPANKNKLVIDEYASEVVKRVFTMYAQGIGKQSIAKILNAEGILCPSEYKKLNGENYKNCNRLEKTSYWTYSTIKVMLQNELYIGNMVQGKKHQRMRSKQRPVEKENWIRVENTHEPIIDRQLWDKVQKLLTKKHRDIDLETNKNIFAGFIKCGDCGRAMMKNFWRRADGSKSYSFYCGTYKRSGKDYCTPHTLPFQVLNDIVLGDLKQIIRNVENLQELVKSQSFTATKIRKSTDIELTKLKAELERVKKLKKSIYEDYKDELISKEEFLSYREDYQQKEMLYSKQIETLEEKKKESVTEDVFETPWLRRLLELKDIEELDRDIIVEMIDQITVYENRKLKISYNFGNELEHLFSSVYCEDLEKKAI

SEQ ID NO: 13322 - DNA, 50 bp, Dorea phocaeensis
  source 1..50: mol_type = genomic DNA
aatttgcgtaaactacaatcagcacatggaggttgtagataacgcaagtg

SEQ ID NO: 13323 - DNA, 40 bp, Dorea phocaeensis
  source 1..40: mol_type = genomic DNA
ggtggtattggatccggggcatggaggaaatgatccggga

SEQ ID NO: 13324 - DNA, 50 bp, Dorea phocaeensis
  source 1..50: mol_type = genomic DNA
aatttgcgtaaactacaatcagcacctggaggttgtagataacgcaagtg

SEQ ID NO: 13325 - DNA, 40 bp, Dorea phocaeensis
  source 1..40: mol_type = genomic DNA
ggtggtattggagcagggacctggaggaccttaacccaga

SEQ ID NO: 13326 - protein, 592 aa, Streptococcus sanguinis
MSNNVEIIKANPLVTRRNDNSGSLSRRVAAYCRVSSDSDDQKNSYDSQVRHYREYISQHQDWNLVDIYADEGISGTQVGKRQDFQRLISDCLDGKIDYIITKAIARFARNTLDTLKYVRLLKDKQIGVFFEEENIDTLTMDGELLLTILSSVAQQEVENTSAHVKKGLKMKMQRGELIGFQGCLGYDYNQDTKSISINEKEAKIVRYIFERYIDGIGGRAIARELDELGYKTPRGLDHWQDTTVLGIIKNEKYKGDILMGKTFTVDPISKRRLINFGEEDKYYIKNNHDAIISPEIFTQAQEIRLRRSGNKKTIANTKGKRERYSRMYPFSSRLECGFCGTVLSRRSWHSSSEYKKIIWHCTTSIKRGKKYCTHSKGIEEKAIENAFLQSYQQLFYENNNLTEDFLEIIKEELTDDTLKVELNKIVSKLNSLYKKEEKLVSMNLDGKISDSVYEDKFNQIQIEKEKLLEEKVNLEVTLKSEVDIKSRLENFKEILTSQKTLTEFDKDIFESIVEKIIVGGINSDGEIDPAMLTIIFKTGDSSTKDAKSYKSKRKNAKIENDKLCFNTVTDDEKKCTNKENNACRVCKLVSET

SEQ ID NO: 13327 - DNA, 50 bp, Streptococcus sanguinis
  source 1..50: mol_type = genomic DNA
tccccaaaccttttgagttccgcagacgcaccacgtggagtgtgtagtgt

SEQ ID NO: 13328 - DNA, 40 bp, Streptococcus sanguinis
  source 1..40: mol_type = genomic DNA
ctgtagatttgtttcctcaaacgcatcatgttgaggcggt

SEQ ID NO: 13329 - DNA, 50 bp, Streptococcus sanguinis
  source 1..50: mol_type = genomic DNA
tccccaaaccttttgagttccgcatccgcaccacgtggagtgtgtagtgt

SEQ ID NO: 13330 - DNA, 40 bp, Streptococcus sanguinis
  source 1..40: mol_type = genomic DNA
ctgtagcttctttccctcatccccattctggtgaggaggt

SEQ ID NO: 13331 - protein, 402 aa, Streptococcus ruminantium
MEEGKRVSPSVPYGYFRNPKNKQELLVDKESAKVVKRIYHLVIEGYGVTQIADILTKDKVLIPSAYAEIHYPENNHSSKKRGIEDPYFWTPTTIGYILEKREYMGHTVLGKTICLDYKTKKRRKAKEDELIIFKNTHEAIIDEETWNNAQRLRKTVRRSPKYGTTSHPFTGLLICADCGGKLSYREPAEHKEKKYDCDYSFVCQHYRHRKGTCSMHYIKVKTVNEILLKSIREITDFAKEDKQEFLKVMNKLSDEKREEKYQEDKEKLEKLSSRNEELTTLITKLYEDHALGKIPVKHFDRLFNTYDTEQQDLEKQIQYFKQEIESYYQRKVDTDKFLKMIEKYTDIEELTVPMINEYIEKVVVHEAMGGRQGKDRKQQVDVYFNFIGNCQVPQKADMEKMA

SEQ ID NO: 13332 - DNA, 50 bp, Streptococcus ruminantium
  source 1..50: mol_type = genomic DNA
aacagcatacaagaaaaagtagaccatgtcaaatatgaaaagaacaggac

SEQ ID NO: 13333 - DNA, 40 bp, Streptococcus ruminantium
  source 1..40: mol_type = genomic DNA
ttggaaaggaggtaattctcatcgctcctatgaaagacaa

SEQ ID NO: 13334 - DNA, 50 bp, Streptococcus ruminantium
  source 1..50: mol_type = genomic DNA
aacagcatacaagaaaaagtagaccctgtcaaatatgaaaagaacaggac

SEQ ID NO: 13335 - DNA, 40 bp, Streptococcus ruminantium
  source 1..40: mol_type = genomic DNA
tgggaaaaaagctaattcccctctctcctcataaagacaa

SEQ ID NO: 13336 - protein, 556 aa, Flavonifractor plautii
MNQSNQIRKTALYCRLSQDDGIEGDSNSIQNQKAILQKFAEDHHFPSPCFYVDDGFSGGNFQRPAFQQMISDMENGEIGIIVTKDLSRLGRNQLHTGLYIEERFPMFGVRYIAINDNVDTDSSESNDLMPFKNLFNEWFIRDTSRKIRAVLKAKAERGEWLGTRAPYGYIRNPDTKKLEVDEEAAAIVRRIFAMCASGNGPSQIARILKKEQVLTPTMYAYTKHNMTHTGLDTQRPYHWSGDTVADMLENEIYIGNTVNMKYSTKSYKDKRRVEHSREECLVFENTHPALVTQEVWDIVQRVRKNKRRRTNMDEQNRYSGLVFCSDCGSNMVLHRAHTISASYNHFTCRTYKKDGEACTGHYIRECVLDEVVLEDLRRVTAMAREHPEEFAAYIGSRQSAEIQREIRRQEKELSAMRKRKMELDTIFKKLYEDSVLGRITTEQFQMLSGSYTEEQNCITAGIPQKENEIQRLRETVSGTDSFLDKAKRYTDITELTPELLRLFIEKIVVHEKEVKWSKHAPQTVEIYYNGIGFVDSQQQDMESLQPRKTEEPRQAS

SEQ ID NO: 13337 - DNA, 50 bp, Flavonifractor plautii
  source 1..50: mol_type = genomic DNA
tgttacccctgtgaggggggaacaaaaggtcaccacgaataaggacaaca

SEQ ID NO: 13338 - DNA, 40 bp, Flavonifractor plautii
  source 1..40: mol_type = genomic DNA
gatgaaaacagggcagccaaaaggctgccctgtttcttgt

SEQ ID NO: 13339 - DNA, 50 bp, Flavonifractor plautii
  source 1..50: mol_type = genomic DNA
tgttacccctgtgaggggggaacaagaggtcaccacgaataaggacaaca

SEQ ID NO: 13340 - DNA, 40 bp, Flavonifractor plautii
  source 1..40: mol_type = genomic DNA
gaagaaaaaaggatggacaagaggctgctctgtctcttct

SEQ ID NO: 13341 - protein, 548 aa, Vibrio parahaemolyticus; identical to SEQ ID NO: 3261

SEQ ID NO: 13342 - DNA, 50 bp, Vibrio parahaemolyticus; identical to SEQ ID NO: 3262
  source 1..50: mol_type = genomic DNA

SEQ ID NO: 13343 - DNA, 40 bp, Vibrio parahaemolyticus
  source 1..40: mol_type = genomic DNA
ggctggaaaccacaacctactttttcttgggcctcctggt

SEQ ID NO: 13344 - DNA, 50 bp, Vibrio parahaemolyticus
  source 1..50: mol_type = genomic DNA
tggggtgataccagttacagtaaggtattagagtgcctgaaataacccca

SEQ ID NO: 13345 - DNA, 40 bp, Vibrio parahaemolyticus
  source 1..40: mol_type = genomic DNA
ggccagaaacctcacccaagttttgtttgggcctgctggg

SEQ ID NO: 13346 - protein, 555 aa, Streptococcus suis
MNTSTLTIDDIKTQNLNSLPDVITALYCRLSAEDANEGESNSISNQKQILAQVAMRENLPNPFFFVDDGFSGSNAQRPDFQKMMNLVEAGKIQAIVVKDLSRLTRDYLLSGQLTEITFPSKNIRFISLNENLDSSKRNSQDAYLTPLVSLFNNWYSLQCSEKIKLSKHTKAKTGEKIGWIAPYGYLKNPENPKEWLIDDYASRIVKRVFKEYLSGRPIASIANDLRKDKILTPANYKKKLGISNYRVLESDPYRWKSQMICQMLEKEEYTGATINLKTTKISYKQRGHRMKPREDWLIFPDTHEAIISKEDFAMARKMLGHKRVTQRHNWKEFPGHENLFAGLVFCENGHKLSFCPQQKGDTNLDHYKCYHYHRAGDTCSGSHYLRKNILETIALNDLQQLISAIHFDEEKLLEKLKSRFDIRENEKQDSLRKQLKQSQKRSKELDTIIQKLYEKQFLSEISDDRFRKLADGYESEQFELNRKIQELQKVLVSQTEAVENVEQFLRTVRKYTKLDALTARLVNELIDKIIVHQPTGRGKNRQATIELHYRFIGEL

SEQ ID NO: 13347 - DNA, 50 bp, Streptococcus suis
  source 1..50: mol_type = genomic DNA
ggactgctcagagaggtgtggatattataccacagctcggacagcagtcc

SEQ ID NO: 13348 - DNA, 40 bp, Streptococcus suis
  source 1..40: mol_type = genomic DNA
tcttgttttcataagaatattatatcatgatttgagggtg

SEQ ID NO: 13349 - DNA, 50 bp, Streptococcus suis; identical to SEQ ID NO: 13347
  source 1..50: mol_type = genomic DNA

SEQ ID NO: 13350 - DNA, 40 bp, Streptococcus suis
  source 1..40: mol_type = genomic DNA
tgttggttccataagattattataccatattttgactgtg

SEQ ID NO: 13351 - protein, 555 aa, Streptococcus suis
MNKSTLTIKEIKTQTLEELPDKITVLYCRLSAEDANEGESNSISSQKQILAQVAEREGLVNPYFFVDDGFSGSNAQRPDFQKALNLVEAGRVSNFVVKDLSRLSRDYLLSGQLTEITFPSKNIRFISLNENLDSSKRSSQDAYLAPLVSLFNNWYSLQCSEKIKLSKHTKAKTGEKIGWIAPYGYLKNPENSKEWLIDDYASQIVKRIFKEYLSGKPIASIANGLRKDKILTPANYKKKLGVSNYRVLESDPYHWKSQMICQMLEKEEYTGATINLKTAKISYKQRNCRLRPREDWLIFPDTHEAIISKEDFALARKMLGHKRVVQRNTWKDKPGHENIFAGLVFCENGHKLSFCPQQKDHINLDHYKCYHHRRAGDSCSGLHYLRKNVLEELVLTELQQLISSTHLDEEKLLEELKSRFDIREDKRQDSLRKQLNRSKRRSKELDTIIQKLYEKQLLDEISEDRFRKLADGYESEQAELEQQIRELQEVLVGQTESAENIDRFMRIIRQYTNIETLSTQLVNELIDKIVIHQPTGRGKSRQVPIELHYRFIGEI

SEQ ID NO: 13352 - DNA, 50 bp, Streptococcus suis
  source 1..50: mol_type = genomic DNA
ggactgctgggggaggagtggatattataccacacctcagacagcagtcc

SEQ ID NO: 13353 - DNA, 40 bp, Streptococcus suis; identical to SEQ ID NO: 13348
  source 1..40: mol_type = genomic DNA

SEQ ID NO: 13354 - DNA, 50 bp, Streptococcus suis; identical to SEQ ID NO: 13352
  source 1..50: mol_type = genomic DNA

SEQ ID NO: 13355 - DNA, 40 bp, Streptococcus suis; identical to SEQ ID NO: 13350
  source 1..40: mol_type = genomic DNA

SEQ ID NO: 13356 - protein, 556 aa, Streptococcus suis
MNKSTLTFEDIKTQNLENLPDQITALYCRLSAEDANEGESNSISNQKQILAQVATRENLPNPFFFVDDGFSGSNVQRPDFQRMMSLVEAGKIQAVVVKDLSRLSRDYLLTGQLTEITFPSKNIRFISLNENLDSNKRNSQDAYLAPLVSLFNNWYSLQCSEKIKLSKHTKAKTGEKIGWIAPYGYLKNPENPKEWLIDDYASQIVKRIFKEYLSGKPIASIANDLRKDKVLTPANYKKKLGISNYRVLESDPCHWKSQMICQMLEKEEYTGATINLKTAKISYKQRGCKLRPREDWLIFPNTHEAIISQEDFEMARKMLGHKRVKRKNHWKDTAGHENLFFAGLVFCENGHKLSFCPQQKDDINLDHYKCYHYRRAGDTCSGSHYLRKETLEELVLGDLQQLISSIQFDEGRLLAKLKSRFYIRESEKQDSLRKQLNKAEKRSLELDTIIQKLYEKQLLDEISDERFRKLADSYESEQAELSQQIQEFQKVLVSQTESAENIDKFMRTIRQHTKLETLTTQLVNELIDKIIIHQPTGRGKKRQVTIELHYRFIGEL

SEQ ID NO: 13357 - DNA, 50 bp, Streptococcus suis
  source 1..50: mol_type = genomic DNA
agactgctcggtgaggggtggatattataccatacatcagacagcagtcc

SEQ ID NO: 13358 - DNA, 40 bp, Streptococcus suis; identical to SEQ ID NO: 13348
  source 1..40: mol_type = genomic DNA

SEQ ID NO: 13359 - DNA, 50 bp, Streptococcus suis; identical to SEQ ID NO: 13357
  source 1..50: mol_type = genomic DNA

SEQ ID NO: 13360 - DNA, 40 bp, Streptococcus suis; identical to SEQ ID NO: 13350
  source 1..40: mol_type = genomic DNA

SEQ ID NO: 13361 - protein, 556 aa, Vibrio cholerae
MDNRKVLYPYIRFSKDEQKHGTSYERQMEKIEEYAAKNDFVIDDTLNLKDLGLSAFKGKHKDKGALGGFIKAIEKKSIPVDGSSYLCIEQFDRLSREDVDTAYQLFRSILKANVNIITLMDKRIYTKESLNDMMSIIYSIMLMSQANVESQKKSERITASYRAKLDKVKSGENILFAARYPEWIDNQGSIKDRQFVLNDKAEIVRRIFQLYLDGVSMNGIARIFNDEGIAPFMRTKNSINQWSSGNVSSILRNRCVIGDLCVSRTGDIIKGYYPPVISVDDFEATEGLRDKKRTLKTAGKPSINVFTGKVFCVECGRKFYFEKESFTYKGQKNNYHFLKCSGKRNNGGCHSLNIKYEDFLDATKAPLKMKMKKDPKKVGEIEDHISKIRGVVKELNGELAQLDLMLDSGEINATIYAKAASKLEDKLVVERKRIASYKQKIAQMNNDLDFDSFDIHDPKSINKVKKYINDNYAAFIVSSYNKTILSLSHTGGVIITPFKHKKSLVKDSESVKDFYTLQADILDQYKRGEMDNKFTEILEATNFWGIETPETDYSFE

SEQ ID NO: 13362 - DNA, 50 bp, Vibrio cholerae
  source 1..50: mol_type = genomic DNA
atgcaggcaattgtaaaaatatccttcaacaactatatgattatcggtat

SEQ ID NO: 13363 - DNA, 40 bp, Vibrio cholerae
  source 1..40: mol_type = genomic DNA
gatcccagcaaacagatctttaaaaatgttggcaccaaga

SEQ ID NO: 13364 - DNA, 50 bp, Vibrio cholerae
  source 1..50: mol_type = genomic DNA
atgcaggcaattgtaaaaatatcctgcaacaactatatgattatcggtat

SEQ ID NO: 13365 - DNA, 40 bp, Vibrio cholerae
  source 1..40: mol_type = genomic DNA
ggacacagcaaaaaggtcttgaaagatgctggcaccttga

SEQ ID NO: 13366 - protein, 560 aa, Erysipelatoclostridium ramosum
MYYQSNTAAALQFPYTAMSSEELTALYCRLSRDDELQGDSNSIVNQKKILEKYAREHGYSNFKFYVDDGISGTTFNRPGFQQMIADIEAGLVKRVIIKDMSRFGRDYLQVGMYTEIMFPEHDIHFIAVNDGVDSTQGDNEFMPFRNIINEWYAKDTSKKIRAVMKVKGNAGEHLTVLPPYGYMKSSDDKKQWVKDEEAAQVVYEIGLYIMDGLGPSQIARKLTERKILTPAAYYASKGRTTNVTKKGSPYAWDSSTIADIMDRWREYLGRTVNFKTRKKSYKSKKTLHNPESEWKIFDNTHEAIWTEAIADAARLARQTRRRPTKMGEMGMFSGMMFCADCGSIMYQCRATNFRRDQEYYLCSGYRKSRDVCGQTHSIRTVILEELVLQNLREIVSFASQRKDDFVKMVMDADMRQRNQDLAKRQKTLADAEKRIAELDTIFKRLYEDTISGKLSDERFQKLSTDYEKEQHQLQDVAAALRDEIEAEEQKSANVERFLSVVERYTEIPELTPCILHEFVEKIVVHAASDPKGKNRTQEIDIYYKGIGALEVSKVTSSRQE

SEQ ID NO: 13367 - DNA, 50 bp, Erysipelatoclostridium ramosum
  source 1..50: mol_type = genomic DNA
atgttttcttatcgggaggcacctttccccgcctcctaataagaaaacat

SEQ ID NO: 13368 - DNA, 40 bp, Erysipelatoclostridium ramosum
  source 1..40: mol_type = genomic DNA
caaaataaaaggacttcttttacgaaatccctcttttatc

SEQ ID NO: 13369 - DNA, 50 bp, Erysipelatoclostridium ramosum
  source 1..50: mol_type = genomic DNA
atgttttcttatcgggaggcacctcaccccgcctcctaataagaaaacat

SEQ ID NO: 13370 - DNA, 40 bp, Erysipelatoclostridium ramosum
  source 1..40: mol_type = genomic DNA
ataaataataggacttattcaactaaatcctctttatatc

SEQ ID NO: 13371 - protein, 498 aa, Streptococcus equi
MNNRIDAIYARQSVDKKDSISIESQIEFCKYELKGGNCKEYTDKGYSGKNTDRPKFQELVRDIKRGLIAKVIVYKLDRISRSILDFANMMELFQQYDVEFVSSTEKFDTSTPMGRAMLNICIVFAQLERETIQKRVADAYYSRSLKGFRMGGKAPYGFHTEPIKIDGINTKKLVASPEEAEQVKLMFEMYAEPGTSYGDIVRHFAEHGIKDFSRPALASLLCNPIYVKADLDIYEFFKSQGTVIINDAADFTGTNGCYFYRGRGMKGDTKHNLQGHTLVMAPSEGLVSSELWLKCRKKILANASYQAGRKAVNTWLAGKIKCGRCQKALKAEGSYGRWYFRCSKRSDNKSCEGAGTLRIPDTEAIIYAAMVKKLKPFQTIKGRKNAMKSNPKLTALQVELAQIQHEIETLIDTLTGANPVLLSYVNSKIEELDGRKQELVKKIAELSVDTISPEQVKEISGYLDTWEEVDFDDKRRVVDLMISAIYATSESINIVWKI

SEQ ID NO: 13372 - DNA, 50 bp, Streptococcus equi
  source 1..50: mol_type = genomic DNA
ctttcgccctttgtaaactaagctacgccaaactttacaaagggcgaaaa

SEQ ID NO: 13373 - DNA, 40 bp, Streptococcus equi
  source 1..40: mol_type = genomic DNA
atatcctataaaacttgaaacacttattctgggtggaatg

SEQ ID NO: 13374 - DNA, 50 bp, Streptococcus equi
  source 1..50: mol_type = genomic DNA
ctttcgccctttgtaaactaagctgggccaaactttacaaagggcgaaaa

SEQ ID NO: 13375 - DNA, 40 bp, Streptococcus equi
  source 1..40: mol_type = genomic DNA
tgatcctataaaacttgtgggattaattctggttgaactg

SEQ ID NO: 13376 - protein, 548 aa, Clostridium paraputrificum
MKVAIYSRKSVFTGKGESIENQIEMCKEYFSRLNGNDVEYSIYEDEGFSGGNINRPRFQQLLKDIKKNSFDALICYRLDRISRNVADFSTTLELLQEHNVDFISIREQFDTSTPMGRAMVYIASVFAQLERETIAERIRDNMLQLSKTGRWLGGVCPLGFTSEKITYVDSEYNERSMFKLSPLEEEMNVVRFIFSKYLATSSIHMALKELLASNIKGKHGGDFASMSLADILKNPVYVQSDSSIKEYYESLGVNFFGEPNGCGIMLYNKKNSKGKLRDMSEWIAAVGKHKGIISSSDWLKVQYSLDRNSKKNNPRQGTSAKALLSGVLKCSICGAPMRVCYGRLRKDGKRNHYYMCTMKAHSCKSRCENPNAKGLELEQEVINRLINYNEETLLRKLTSYADELKSITPNDMIKNIDKSIDEKKSEMDTLMSQLGKTNNPATQNFILKKADSLSNEIMDLENKLNGIHKKKEQNSIEMRNIEIIMSSFSEFAKLCSTIKDVSNIEDENIKIALRNLINRLVSRISYNGFTKEVVIDIMGSQKNCSPSG

SEQ ID NO: 13377 - DNA, 50 bp, Clostridium paraputrificum
  source 1..50: mol_type = genomic DNA
ggtcgcaatacagtaaaacatgcacatgcattccgtgttgtattgcaacc

SEQ ID NO: 13378 - DNA, 40 bp, Clostridium paraputrificum
  source 1..40: mol_type = genomic DNA
agattttccagggcataaacatgccaacctttatgacgtc

SEQ ID NO: 13379 - DNA, 50 bp, Clostridium paraputrificum
  source 1..50: mol_type = genomic DNA
ggtcgcaatacagtaaaacatgcagttgcattccgtgttgtattgcaacc

SEQ ID NO: 13380 - DNA, 40 bp, Clostridium paraputrificum
  source 1..40: mol_type = genomic DNA
tcatttttcttagcataaagttgtcaacctttatgacaac

SEQ ID NO: 13381 - protein, 543 aa, Clostridium leptum
MNVLKIRNEMRNGKSIFDMPLRVTFYARVSTDKDEQLNSLENQIQYYTDLIQSKVSWTYIPGYIDEGISGTSTKKRDSFLQMIEDAKAGRFDFIITKEISRFSRSTLDSIQYTQELLEHNVGVLFQNDNINTLDPDSEFRLVVMAGVAQDEVRKLSERLKFGFRQAIKNGHVLGNDKLWGYDKKDCILTINESEAKAVRRIFDLYANQKMGIRRISQKLYDEGFTSRRGNAFNVLTIRHILENPKYKGWYCANKSQTVDYRSKRKIFLEEDEWIMYPDPSIPAIVSEELWDRANALYKRRRQQMLSHQNAAEFHNRYPYSGKIICEEHGTSFHRQVRKSMKGEKEAWQCRVYRNRGRAGCSAPQLLTEELDQIMARIFDQLAQDKQAIVEAVVKIIRSVPNELDYQQDIRRIAEEISAIIWKKDRLLEMSIERALSTTEFKQRNERFNQQLQELERQKRSLELEKDKSKISVDQLSKIKTALEEEITFQNGINSALVTTILDHIVVKKDSTREVMRLDIHLKLGEPYEAIIDRKNSSFSFNRL

SEQ ID NO: 13382 - DNA, 50 bp, Clostridium leptum
  source 1..50: mol_type = genomic DNA
ttcctccttcagcttcaaccgtctaagaatggataaagcagaaggagaaa

SEQ ID NO: 13383 - DNA, 40 bp, Clostridium leptum
  source 1..40: mol_type = genomic DNA
gctggtggctcatattattaaaaaatattattccagccaa

SEQ ID NO: 13384 - DNA, 50 bp, Clostridium leptum; identical to SEQ ID NO: 13382
  source 1..50: mol_type = genomic DNA

SEQ ID NO: 13385 - DNA, 40 bp, Clostridium leptum
  source 1..40: mol_type = genomic DNA
gtagttggctcttatttttaaaaaacattaattcagccac

SEQ ID NO: 13386 - protein, 516 aa, Roseburia intestinalis; identical to SEQ ID NO: 11651

SEQ ID NO: 13387 - DNA, 50 bp, Roseburia intestinalis; identical to SEQ ID NO: 11652
  source 1..50: mol_type = genomic DNA

SEQ ID NO: 13388 - DNA, 40 bp, Roseburia intestinalis
  source 1..40: mol_type = genomic DNA
tatttcaaaatgggaaagtgggcaggtcatacccgaagta

SEQ ID NO: 13389 - DNA, 50 bp, Roseburia intestinalis
  source 1..50: mol_type = genomic DNA
tttggtctagggttgacacgagcagatgtttgagttataataggaccaag

SEQ ID NO: 13390 - DNA, 40 bp, Roseburia intestinalis
  source 1..40: mol_type = genomic DNA
cactactaaataggaaagtgagcaggtcttaccagaggca

SEQ ID NO: 13391 - protein, 537 aa, Roseburia faecis; identical to SEQ ID NO: 1706

SEQ ID NO: 13392 - DNA, 50 bp, Roseburia faecis; identical to SEQ ID NO: 1707
  source 1..50: mol_type = genomic DNA

SEQ ID NO: 13393 - DNA, 40 bp, Roseburia faecis; identical to SEQ ID NO: 13388
  source 1..40: mol_type = genomic DNA

SEQ ID NO: 13394 - DNA, 50 bp, Roseburia faecis
  source 1..50: mol_type = genomic DNA
tcatatctttaactaagggaaactgaagtttccccaacaaaaggatatta

SEQ ID NO: 13395 - DNA, 40 bp, Roseburia faecis; identical to SEQ ID NO: 13390
  source 1..40: mol_type = genomic DNA

SEQ ID NO: 13396 - protein, 500 aa, Bacillus pumilus
MKAIYVRVSTEEQAIKGSSIDSQIEACVKKAGTTNFLKYADEGFSGELLERPALNRLREDARKGLITELICYDPDRLSRKLMNQLIIDDELRKKGIVLTFVNGDYADSPEGQLFFSMRGAISEFEKAKIKERTSTGRLQKIKKGMIIKDSNLLGYRMNKEKRTLEIIEKEAKIVRMIFDLFTNHSSHFFNRVNGIALHLTKLGIPTKKGAKVWHRQVVRQILMNPTYKGKHEQYKYDTEGSYVSKQAGGTAIVKLRPEEERYVIEVPSVVSDEQWEYAQELLDKSRRKQLQYGTHQYLLSGLVRCGNCGNTMTGKKRKSHGEDFYVYECRKNYAGAKNRGCGKSMSENKLNRIVWDEIYKFITNPGKYRVYKEEEKATHKADELEFIQKEIEKAKKGRQRLITLISLSEEDDLDIEEVKTQIVELQKKQNHLMTQHDKIEKEIKELEGSAAGENAMKRALDYLNSVSADNLKLEDKTAIINFMVKEVLIVDSETIHIRTH

SEQ ID NO: 13397 - DNA, 50 bp, Bacillus pumilus
  source 1..50: mol_type = genomic DNA
caccccccttttgtcattaatatctcattattaatgtcaaaaaggaggtg

SEQ ID NO: 13398 - DNA, 40 bp, Bacillus pumilus
  source 1..40: mol_type = genomic DNA
gcgtaaatgcatcagaatttcattttcaatacaccgcgct

SEQ ID NO: 13399 - DNA, 50 bp, Bacillus pumilus; identical to SEQ ID NO: 13397
  source 1..50: mol_type = genomic DNA

SEQ ID NO: 13400 - DNA, 40 bp, Bacillus pumilus
  source 1..40: mol_type = genomic DNA
gagtaaaataatcagactttcattttcaaaagatcgccct

SEQ ID NO: 13401 - protein, 554 aa, Ruminococcus callidus
MREVEILKKKQLKCYLYTRVSTSMQVDGYSLDAQRDKLRKYAAYEDMIVAGEYSDEGFSGKNIQGRQEFQRMLNDIQDGKDDVSYVLVFKLSRFGRNAADVLNSLQLMQDFGVNLICVEDGIDSSKDAGKLMISVLSAVAEIERENIRTQTMAGREQKAREGKWNGGFAPYGYKLENGNLVIAEDEVEVIRVIYDRYIHTNEGVAGVAKYLNRNGYTKKLRQNNTIPGFSRDFVKNVLYNPVYMGKIAYGRRRTEKKQGTRNEMHVVEQSEFPVYEGQHEAIISEEDWYLAQEKRKINSFKREKVNNPDHAHILSGILKCPCCGKSMYGNIAKAHSKDKKTRYYYYCKNTVTPTGHECSFRLNIEQTEINKFVAKVISAMVNNPRFVEAIQAKIGTAVDTEDMERQIAVLQGRLKQAFGTKSRLERQMDTLDINDAHYDRKILDLQRRYDEQYDTIEEIEVQIGELQSQIRSIQQEKISGDNIYRLLLAFDEVYHSATEAEQKEFMKAFIERIEMFPEKRKDGSWIKKIVFNFPVPVDGEEVKELPLETETTVE

SEQ ID NO: 13402 - DNA, 50 bp, Ruminococcus callidus; identical to SEQ ID NO: 11137
  source 1..50: mol_type = genomic DNA

SEQ ID NO: 13403 - DNA, 40 bp, Ruminococcus callidus
  source 1..40: mol_type = genomic DNA
cccggggacggggcacgttgagtgcatggtattgatgtca

SEQ ID NO: 13404 - DNA, 50 bp, Ruminococcus callidus
  source 1..50: mol_type = genomic DNA
cccttggaaactgaaacaactgtcctgacggttgtcttgctttccaaggg

SEQ ID NO: 13405 - DNA, 40 bp, Ruminococcus callidus
  source 1..40: mol_type = genomic DNA
cctggggagggagcaccctctgtggatgctatggatgtcc

SEQ ID NO: 13406 - protein, 560 aa, Anaerobutyricum hallii
MPRIRKDKTARSYAEPFWKIGLYIRLSKEDDNEDESESVINQEKILRDFVDSYFEPGTFVIVDVFADDGLTGTDTARPNFKRLEGCIVRKEVNCMIIKSLARGFRNLADQQKFLEEFIPINGARFICTGTPFIDTYANPHSASGLEVPIRGMFNEQFAATTSEEIRKTFKMKRERGEFIGAFATYGYKKDPNDKNSLLVDEEAAEVVKSIYHWFVNEGYSKMGIAKRLNQMGEPNPEAYKKKKGLKYNNPNSGKNDGLWSASTIARILQNEIYTGVMVQGRHRVISYKVHKQISVPEDEWFVVPNTHEAIIDRETFEKAQALHKRDTRTAPGKQEVYLMSGFVRCADCQKAMRRKTARNIAYYSCRSYTDKKICSKHSIRQDKLENAVLAALQMQIALVDQLAEEIERINNAPVINRENKRLSYSLKQAEKQLKQYNDASDSLYLDWKSGEITKEEYRRLKGKIAEQIQQLEANISYLKEEMQIMADGIGADDPYLTAFLKYKNIQSLNRGIVVELIKAVWVHENGEITVDFNFADEYQRIIDYIENNHNIITVIESKAI

SEQ ID NO: 13407 - DNA, 50 bp, Anaerobutyricum hallii
  source 1..50: mol_type = genomic DNA
tgttgtgcataaataaacggctctactgccccgtcaatatatgcacaaca

SEQ ID NO: 13408 - DNA, 40 bp, Anaerobutyricum hallii
  source 1..40: mol_type = genomic DNA
cccaggccctgtgggacctacaggaccaaccggtcccaga

SEQ ID NO: 13409 - DNA, 50 bp, Anaerobutyricum hallii
  source 1..50: mol_type = genomic DNA
tgttgtgcataaataaacggctctgctgccccgtcaatatatgcacaaca

SEQ ID NO: 13410 - DNA, 40 bp, Anaerobutyricum hallii
  source 1..40: mol_type = genomic DNA
ccaaggccatgtgtgactggcaggacccaccagtaccagg

SEQ ID NO: 13411 - protein, 581 aa, Escherichia coli; identical to SEQ ID NO: 1621

SEQ ID NO: 13412 - DNA, 50 bp, Escherichia coli
  source 1..50: mol_type = genomic DNA
aagcaatgtatttcttgattttttgggcagcctaatgatataaatccaat

SEQ ID NO: 13413 - DNA, 40 bp, Escherichia coli
  source 1..40: mol_type = genomic DNA
tgaatcaacaaggttttttgggcagccaagggaaacaaag

SEQ ID NO: 13414 - DNA, 50 bp, Escherichia coli
  source 1..50: mol_type = genomic DNA
aagcaatgtatttcttgattttttcagcagcctaatgatataaatccaat

SEQ ID NO: 13415 - DNA, 40 bp, Escherichia coli
  source 1..40: mol_type = genomic DNA
tcaaccaacaatgccttatcagctgccaagggaaaggaag

SEQ ID NO: 13416 - protein, 556 aa, Selenomonas ruminantium
MARQSQTAVENGEKITALYCRLSRDDELTGDSNSIRNQKAILEKYAIDNGFGNREFFVDDGYSGTNFDRPDWQRLIAKAESGQVGTVIVKDMSRLGRNYLRVGYYTEMFFPEAGIRFIAVNNGVDSENQQDSDFTPFLNIINEWYAKDCSKKIKAVFKAKGESGRHMTNRVPYGYKRDPQDKEHWILDEIAAPLVSGMFRKCMQGLGPSLIAKELTEQKVLNPILHGKVRDGKMSRQEAEAMPNAFEWNAACVADILKRPDYLGHTVNFKTCKKTFLSKRGTWRDRSEWLYFKNTQEPIIDQETFDTVQRIREGRRRKTVMGIPDMLSGILYCQDCGSKMGAVRQGKRRRELDHYVCGLYRRQKKGCDGRSHTIRINKIENILLNSIRSVTTFAREHEDEFVALIAQKSRKAVDKTLRDAKKELEHADSRMKKLDTLIQRLYEDNVDGKISDERFAKMTATYEEEQKILAVRSEELKAVIAKESETTANVSGFLSIVQKYTDIPELTAEIVREFIKKVYISHPEEIDGKRTQKIVIVWNCIGEFHSQTLDAENEQA

SEQ ID NO: 13417 - DNA, 50 bp, Selenomonas ruminantium
  source 1..50: mol_type = genomic DNA
tggtatccctaagaaaacttttctaaagatgacttttcttagggatacgc

SEQ ID NO: 13418 - DNA, 40 bp, Selenomonas ruminantium
  source 1..40: mol_type = genomic DNA
tgcctctgcaaacatagaaaagcaaaagttaaaggtacag

SEQ ID NO: 13419 - DNA, 50 bp, Selenomonas ruminantium
  source 1..50: mol_type = genomic DNA
tggtatccctaagaaaacttttctgtagatgacttttcttagggatacgc

SEQ ID NO: 13420 - DNA, 40 bp, Selenomonas ruminantium
  source 1..40: mol_type = genomic DNA
tgcctcttaatacttagatgtccaaaagtaaaaggtaatg

SEQ ID NO: 13421 - protein, 456 aa, Clostridioides difficile
MDNIKRVALYIRVSTEEQVLHGDSIRTQTEALEQYAKEKNYIIIDKYIDEGYSATNLNRPSLQRLLADIKENKIDLILLTKLDRFSRGVKNFYKILDTLEKHKCDWKTILEDYDSSTASGRLHINIMLSFAENEASQTSERIKFVFNNKIQKKEVVSGKVPFGYRIESKHLVIKEDEAEIVRESFDTYIKFSALTKTIQHINSKFNMKHMYKWMQKLLKNKIYIGIYERENILIEDYCEPIISEEQFYFVQSLLKKNKRISKNKFDINYIFAGMIICSCGRKMSGSYHLNPSGTLYLHYRCSASYGAKLCSNTSRLGEKKVETFLLENVKIELYKTILEHESNNKKSSNKNDTEKLKNKLKKQIDKLQDLYFDDLISKDNYRFKYKRLNDDLIELEKKENEEKVVINDLQKMKSFLKINFEDDYVNMSSLEKRTLWTSLIDRIEVQKDGNLVIKFL

SEQ ID NO: 13422 - DNA, 50 bp, Clostridioides difficile
  source 1..50: mol_type = genomic DNA
tattgtactaaattaccctatccatgtggctagggtaatttagtacaata

SEQ ID NO: 13423 - DNA, 40 bp, Clostridioides difficile
  source 1..40: mol_type = genomic DNA
tacaggatgctccattccatgtggcaaggctgtgcccgct

SEQ ID NO: 13424 - DNA, 50 bp, Clostridioides difficile
  source 1..50: mol_type = genomic DNA
tattgtactaaattaccctatccacctggctagggtaatttagtacaata

SEQ ID NO: 13425 - DNA, 40 bp, Clostridioides difficile
  source 1..40: mol_type = genomic DNA
tagaggcagctccatgccacctgccacagctgtggcccct

SEQ ID NO: 13426 - protein, 508 aa, Caldanaerobacter subterraneus
MNVCIYLRKSRADEEIEKELGQGETLAKHRKTLLKFAKEKNLNVVKIYEEIASGESLIHRPAMLELLKEVEQGMYDAVLCMDLQRLGRGNMQEQGLILEAFKKSNTKIITLQKTYDLNNDFDEEYSEFEAFMSRKELKMINRRLQGGRVRSIQEGNYLSPLPPYGYLIHEEKFSRTLIPNPEQADVVKMIFDMYVNKHMGSNMIANELNKLGYKSYTGKKWTGSSVINILKNPVYIGKVTWKKKEIKKSADPNKTKDVRQRPKSEWIIVDGKHEPIIDEEIFNKAQEILSEKYHVPYQIVNGPRNPLAGLIICKKCGAKMVYRPYGKKEPHIVCPNKCGNKSSKFIYVESKLLQALEEWLKNYELEIKINAEESKNSILQAQKKQLELLEKELKELQIQKSRLHDLLEQGVYDVDTFIERSKIITERIENVTNAIEALENKIQDEEKKTDRKKIIPAIKHVLDVYHQTNDVTQKNILLKSVLEKVEYLKEKDQREDNFTLIVYPKLPE

SEQ ID NO: 13427 - DNA, 50 bp, Caldanaerobacter subterraneus
  source 1..50: mol_type = genomic DNA
ggtgtataacatgtggaaggtaattcattgccttcttgatgttatacacc

SEQ ID NO: 13428 - DNA, 40 bp, Caldanaerobacter subterraneus
  source 1..40: mol_type = genomic DNA
cacatccattagtgagatttcatttccttccttatctacc

SEQ ID NO: 13429 - DNA, 50 bp, Caldanaerobacter subterraneus
  source 1..50: mol_type = genomic DNA
ggtgtataacatgtggaaggtaatagattgccttcttgatgttatacacc

SEQ ID NO: 13430 - DNA, 40 bp, Caldanaerobacter subterraneus
  source 1..40: mol_type = genomic DNA
ttaatccatttgtcagatgagatttccttctttaactagc

SEQ ID NO: 13431 - protein, 582 aa, Agrobacterium tumefaciens
MHISRGAVMAKAYSYVRISSKAQIKGDGVRRQLDVSRAYADRAGLALDDELTDIGLSAYHGKHKAIGALGGFLDLVKAGKIEPGSVLIVESLDRLSRENPVTAQSQLLDILSADIDVVTLIDNQRYSKGNDYTQLIISLTVMYRAHEESKTKSLRLKAAAAKRKTDILAGQKRYVTNPPMWLTNVQTNGQWDCVINDFGLIVREMYELYDSGLGGHSIARLFNERSVPTFKSATSDFKTKGVWYSPTVINLLKHEAAIGTYRAGDQVAENYFPAVVDRDLFYRVQDRLRTQNNVRRGRKGGAYTNLFQGMAVCHHCGHAIRLNRGGVKNQVLYFSCHTRFIGSVCGGEGKKFIPYQGLEDAILRVVMDYYVDQSKGGNKSQDTIISDLNAYRQSRDEVAKRIANIRAVVETAENDDDRISFMARLNELRKDTASIDAKIKGLERQLRDFDEADKAEQTIHEEIRNEVSKWPSMSKEELFVSRSKIGHNLRRVITTVQVDVPAEQVIIAVGGFVRWWIVGVDGTVRTTGDWSALPFDILLARSKEFFGDRINVDSMRAVYDRIDVPRADPALWDNERAARGLM

SEQ ID NO: 13432 - DNA, 50 bp, Agrobacterium tumefaciens
  source 1..50: mol_type = genomic DNA
aaactattaattgcataagagcgctttttggcgtattcaattgttagtaa

SEQ ID NO: 13433 - DNA, 40 bp, Agrobacterium tumefaciens
  source 1..40: mol_type = genomic DNA
tagtgatggaaaagagcgcttttcggcgtatccagcatgt

SEQ ID NO: 13434 - DNA, 50 bp, Agrobacterium tumefaciens
  source 1..50: mol_type = genomic DNA
aaactattaattgcataagagcgccttttggcgtattcaattgttagtaa

SEQ ID NO: 13435 - DNA, 40 bp, Agrobacterium tumefaciens
  source 1..40: mol_type = genomic DNA
tagtggtggaaaagaaggcctctcggagttaatagcatgt

SEQ ID NO: 13436 - protein, 573 aa, Agrobacterium tumefaciens
MAKAYSYVRISSKVQAKRDGVRRQLEVSRAYAEKAGLTLDEELTDIGLSAYHGKHKAIGALGGFLDLVKTGKIEPGSVLIVESLDRLSREDVLTAQSQLLGILSADIDVATLIDNQRYSKGNDYTQLIISLTIMARAYDESKTKSERLKAAAAKRKTDILAGQKRYVTNPPMWLTNFQTDGQWDCVVNGFGSVVKEMFELYDSGLGGHSIARLFNERGVPTFKSATSEVETKGVWYSPTIMNLLKHEAAIGTYRAGDQVAENYFPAVVDRDLFYRVQDRLKSQNNVRRGRKGDSYTNLLQGLAVCHHCGHAIRLNRGGVKNKVLYLSCQTRFIGSNCDSEGRKFLPYQAFEDAILRLVMDYYIDQSKGGNKPKDSIASDLTSHRQTRADMARRIANIRAVIETAEDDDDRISFMTRLNDLRKDTASVDAKIEALERQLRDFDETDKAEKNIHDEIRSEVSKWSSMSKEELFVSRSKIARNLRRVITTVQVDVPGEQVIVVVGGFIRWWIIGVDGTVRTTGDWSALPFDILVARSKEFFGDRIDVGAMRAVYDRIDLPRADPALWDNERAARGL

SEQ ID NO: 13437 - DNA, 50 bp, Agrobacterium tumefaciens
  source 1..50: mol_type = genomic DNA
aaactactaattgcataagagcgcttttcggcgtattcaattgttagtaa

SEQ ID NO: 13438 - DNA, 40 bp, Agrobacterium tumefaciens; identical to SEQ ID NO: 13433
  source 1..40: mol_type = genomic DNA

SEQ ID NO: 13439 - DNA, 50 bp, Agrobacterium tumefaciens
  source 1..50: mol_type = genomic DNA
aaactactaattgcataagagcgcctttcggcgtattcaattgttagtaa

SEQ ID NO: 13440 - DNA, 40 bp, Agrobacterium tumefaciens; identical to SEQ ID NO: 13435
  source 1..40: mol_type = genomic DNA

SEQ ID NO: 13441 - protein, 500 aa, Flavonifractor plautii
MNVVIYARYSSHSQTEQSIEGQLHTCYEYAKNNGYLVVGEYIDRAQSGTTDSRAEFQRMIADSDKHTFEGVLVYQLDRFAHNRYDSAINKAKLKKNGVRVISARENISDDASGILVEGVLESMAEYYSAELSQKIRRGMDINAEKCLSNGSNPGLGYRVDEERRFHIDPEGAAVVREIFEQYASGKTVTEIIQSLNARQIKTSQGKAFNKNSLHRLLRNRRYIGYYIYKGVETPNGMPRILEDELFERVQHILNRNKKAPARSRGREEYLLTTKLFCGYCREMMTGYGGTGKSGKAYHYYACNNFKRRKCKKKVINKEKIENRVVLECRKLLTDSNIEHIAASVAAVCESDWDTISVKRIKAAIQETDTAIENLWKALEKGQAADMITERIEKRQKEKEELQAQLAIEMNKQVRLSAPDIRAYLYALKHGDKNDENTKRGIINIFLRAVYLFDETFTLILNGSDKPIVIDDILLDEIEEGLDDDLANHNLCSSLVADAPP

SEQ ID NO: 13442 - DNA, 50 bp, Flavonifractor plautii
  source 1..50: mol_type = genomic DNA
tcgtcgttggttgcggacgctccaccaaaaatcccagtctcgaaaagaga

SEQ ID NO: 13443 - DNA, 40 bp, Flavonifractor plautii
  source 1..40: mol_type = genomic DNA
tcgactccccccgcctccaccaaaaaagaaagacacgact

SEQ ID NO: 13444 - DNA, 50 bp, Flavonifractor plautii
  source 1..50: mol_type = genomic DNA
tcgtcgttggttgcggacgctccaaaaaaaatcccagtctcgaaaagaga

SEQ ID NO: 13445 - DNA, 40 bp, Flavonifractor plautii
  source 1..40: mol_type = genomic DNA
tccactccccccacataaaaaaaaaaagaaaaaaaaaact

SEQ ID NO: 13446 - protein, 594 aa, Faecalibacterium prausnitzii
MNITQRMYFGQFPLDKDRDRRIVFYGRVSTQHEAQVDALGNQMQWYDDQLRYHPNWQVINRYIDEGITGTSAKKRPAFMQMISDAKRGKFDLIVTREVCRFARNTVDTLQLTRELRNFGVEVFFVSDNIWTMDGDGELRLSIMATMAQEESRKISERVLAGQKISRQNGVLYGSGNIIGYDRDKVNRTYVINEEQAATIRMVFTLYSQGYGEKAIVNELSRLGRKDGHGNVSWSCTKISRILRNATYMGYICYNKSKVNNYLEKKRINNLDETSFVYVKGNFDPIVSEALWHECERIRKSRISSLRLPDGETRRKGARTTKNLWVSKLRCRCGSSYRIFNWRKLKDGTPVFGYQCNMRTVNPTRSFVLEHNMTQQLSCDAISIPEWKLELMAKKIFEKVWGNQNKAILRACKMIESCQNGKATARMSAAPIQSKIEKIKKRKLNYAAMRADGELPREEYQALCKQADDEVARLEQELKALSPAPEPQTVSSDMKAIYDFLSQKVDVHGACLAPELIEQFVEVVTPIADYSYRWKLNTGCKKSKEERTDLMAVSEKPILTFTIDFETAKRYREANKMPHQFRRAAWTDLTVEVYL

SEQ ID NO: 13447 - DNA, 50 bp, Faecalibacterium prausnitzii
  source 1..50: mol_type = genomic DNA
gctctcggttttttaatagcagcctgttctgcactttataaacagagagc

SEQ ID NO: 13448 - DNA, 40 bp, Faecalibacterium prausnitzii
  source 1..40: mol_type = genomic DNA
tggatttttgatagcagcctgagcagcagccagacgggcg

SEQ ID NO: 13449 - DNA, 50 bp, Faecalibacterium prausnitzii
  source 1..50: mol_type = genomic DNA
gctctcggttttttaatagcagccttttctgcactttataaacagagagc

SEQ ID NO: 13450 - DNA, 40 bp, Faecalibacterium prausnitzii
  source 1..40: mol_type = genomic DNA
tgtatatttgataccaggcttagcagcagggtggcggggg

SEQ ID NO: 13451 - protein, 523 aa, Brevibacterium oceani
MEKTRAAAYVRQSQTHEDTISPAIQREQIKAYCKSKGWKLTEGVYEDVDISGRAMNNRPGLLKLRKDYEAGAFDIAVALNYSRFSRTLEDGASILGSMKLATVEEGIAESDDEFTPLLHLLLAHKFSRDLGKKWRQTHENRVKRGLPPTGAPYFGYSKNDKGEYVPNEYAPLLKKAYEDYVGGKSFGAITAEWNEAGVPTITNRTDAWAFPTLIGLMRKKFQTGVIEFKGEEFPGSHEPIISKELYTAFEARRNQNSKAPARNKYPEWPLSGLMVCGSCGGPVGMIQRNKDGATRLGCLHRRNKGTCKQKAIYRLQADHAFMLFVSQYMDQIVSALPDAETQSQLKEDVKEAEYALTAAKSKLQEFLETITVLGLSLEESKEILEARRADVKTAEIKLSEAEGELALATPLEVDQQALEQKEDMSPSEWALYVRTKLVDKCTLNPDQSFSIIGKAGYTLTQEKMSYDGSVKVEKANTQGLSREETKQARAWLRANGYEEKVSVRGNIKFEYLKLWIKEGKPVA

SEQ ID NO: 13452 - DNA, 50 bp, Brevibacterium oceani
  source 1..50: mol_type = genomic DNA
gtttgcggtttgatagttggatttactattgcaactcgctaagtatcatt

SEQ ID NO: 13453 - DNA, 40 bp, Brevibacterium oceani
  source 1..40: mol_type = genomic DNA
cagggcccagagagcaacaaccaatcctgctgtcatcaag

SEQ ID NO: 13454 - DNA, 50 bp, Brevibacterium oceani
  source 1..50: mol_type = genomic DNA
gtttgcggtttgatagttggatttaatattgcaactcgctaagtatcatt

SEQ ID NO: 13455 - DNA, 40 bp, Brevibacterium oceani
  source 1..40: mol_type = genomic DNA
cacctcccaaagagcaagaaacaaacctgctttcatcagc

SEQ ID NO: 13456 - protein, 517 aa, Cytobacillus gottheilii
MNKVAMYLRKSRADIEAESRGEGETLAKHKKALLKVASELQLNIIKIYEEIVSGESLMHRPAMLQLLNEVEAHKYDAVICMDMDRLGRGGMKEQGLILETFKEANTKIITPRKTYDLHDEWDEEYSEFEAFMARKELKIITRRLQRGRLASVEAGNYIGTTPPYGYKIKPLKDGRSLEPHEEQSAVVKMIFDWYTHDDPEVRIGAAMIANKLNELGYKTAKGNKWSNSSVLSVIKNAVYAGRIQWGKTKTTKSSDPQKTKEIATKPKEQWIDVEGKHDPIITMELYQKAQEVLKGRYHVPYQLVNGITNPLAGIVVCDKCGAKMVYRPYTTQKPHIKCYNNPRCDNKASNFELVERRIIESLEQWLEAYKADWEMRVNEEGDELQLAEVNRTALIKLERELVETEKQQHKLHDLLERGIYTENVFLERSRHLSQRSEEINAAIESAKESLSLEEERQQAKEKIIPQVEHVLDLYYKSDDPKRKNSLLKSVLEKAVYRKEKHQWRDDFQLVLYPKLNQ

SEQ ID NO: 13457 - DNA, 50 bp, Cytobacillus gottheilii
  source 1..50: mol_type = genomic DNA
aacagataacatgttagggttaattcatttcctgaaagaggttatctgtt

SEQ ID NO: 13458 - DNA, 40 bp, Cytobacillus gottheilii
  source 1..40: mol_type = genomic DNA
gacgtcgatgagggagatttcattcccttccttatcctgc

SEQ ID NO: 13459 - DNA, 50 bp, Cytobacillus gottheilii
  source 1..50: mol_type = genomic DNA
aacagataacatgttagggttaataaatttcctgaaagaggttatctgtt

SEQ ID NO: 13460 - DNA, 40 bp, Cytobacillus gottheilii
  source 1..40: mol_type = genomic DNA
caagtcaatgaaagagataaaattcctttccttttcctcc

SEQ ID NO: 13461 - protein, 481 aa, Streptococcus agalactiae; identical to SEQ ID NO: 2986

SEQ ID NO: 13462 - DNA, 50 bp, Streptococcus agalactiae; identical to SEQ ID NO: 2997
  source 1..50: mol_type = genomic DNA

SEQ ID NO: 13463 - DNA, 40 bp, Streptococcus agalactiae
  source 1..40: mol_type = genomic DNA
gatgacataacccaccatttcattgaatgtcattctctca

SEQ ID NO: 13464 - DNA, 50 bp, Streptococcus agalactiae
  source 1..50: mol_type = genomic DNA
taaagaaatttactatccttggttctaatcaaggttactaaaattattga

SEQ ID NO: 13465 - DNA, 40 bp, Streptococcus agalactiae
  source 1..40: mol_type = genomic DNA
tttcactttacccaccattctctaggatgtcattatctca

SEQ ID NO: 13466 - protein, 481 aa, Streptococcus agalactiae; identical to SEQ ID NO: 391

SEQ ID NO: 13467 - DNA, 50 bp, Streptococcus agalactiae; identical to SEQ ID NO: 1812
  source 1..50: mol_type = genomic DNA

SEQ ID NO: 13468 - DNA, 40 bp, Streptococcus agalactiae; identical to SEQ ID NO: 13463
  source 1..40: mol_type = genomic DNA

SEQ ID NO: 13469 - DNA, 50 bp, Streptococcus agalactiae
  source 1..50: mol_type = genomic DNA
taaagaaatttactatccttgattctaatcaaggttactaaaattattga

SEQ ID NO: 13470 - DNA, 40 bp, Streptococcus agalactiae; identical to SEQ ID NO: 13465
  source 1..40: mol_type = genomic DNA

SEQ ID NO: 13471 - protein, 481 aa, Streptococcus agalactiae; identical to SEQ ID NO: 2986

SEQ ID NO: 13472 - DNA, 50 bp, Streptococcus agalactiae; identical to SEQ ID NO: 1812
  source 1..50: mol_type = genomic DNA

SEQ ID NO: 13473 - DNA, 40 bp, Streptococcus agalactiae; identical to SEQ ID NO: 13463
  source 1..40: mol_type = genomic DNA

SEQ ID NO: 13474 - DNA, 50 bp, Streptococcus agalactiae; identical to SEQ ID NO: 13469
  source 1..50: mol_type = genomic DNA

SEQ ID NO: 13475 - DNA, 40 bp, Streptococcus agalactiae; identical to SEQ ID NO: 13465
  source 1..40: mol_type = genomic DNA

SEQ ID NO: 13476 - protein, 480 aa, Streptococcus agalactiae; identical to SEQ ID NO: 2981

SEQ ID NO: 13477 - DNA, 50 bp, Streptococcus agalactiae; identical to SEQ ID NO: 2982
  source 1..50: mol_type = genomic DNA

SEQ ID NO: 13478 - DNA, 40 bp, Streptococcus agalactiae; identical to SEQ ID NO: 13463
  source 1..40: mol_type = genomic DNA

SEQ ID NO: 13479 - DNA, 50 bp, Streptococcus agalactiae
  source 1..50: mol_type = genomic DNA
taaagaattttactatcctacattctaattaaagatactaaatctcttga

SEQ ID NO: 13480 - DNA, 40 bp, Streptococcus agalactiae; identical to SEQ ID NO: 13465
  source 1..40: mol_type = genomic DNA

SEQ ID NO: 13481 - protein, 523 aa, Anaerobutyricum hallii
MNENVCIYLRKSRADQEAELRGEGETLARHERILLDLAKSRNYSVGAIYREIVSGETISARPVMQQLLREVEAGSWDGVLVVEVERLARGDTIDQGVVSRAFQFSDTKIITPTKTYDPDNEFDEEYFEFGLFMSRREYKTIKRRLNAGRIASVKEGKYCGSKPPYGYERVKLHGEKGFTLQPVPDQAEVIKMIYSLYSGSSGDRIGVSKIVRKLNDMGIKSPSGKDWVPISVQDVLANPVYAGMIRWNGRKTVRAIQDGVVTQSRPRSKEDDILLFPGRHPAIVSKEMYDSVQQIRKKNPPRPISIKNTIKNPLAGIVYCSKCGRAMVRRPYQKRGQDDTLMCSYTSCPTVSSKLSLVERAVLNGIQDLVDEYRLNDAVPGPDINNAVKSKKKLIAEKEHELEKLNVQKMKQYDLLEQGIYTTEVFLERSNSIASSINSCQDSIECLKEEIRHDKELIDQRSSFIPRCENLLEIYWSLDTAAKNKMLKELIERVNYTKDVKNAFRMGNEATFVLDIFPRIQSN

SEQ ID NO: 13482 - DNA, 50 bp, Anaerobutyricum hallii
  source 1..50: mol_type = genomic DNA
taatgataacatctatgtgcaaacgaatctgctcataaatgttatcattt

SEQ ID NO: 13483 - DNA, 40 bp, Anaerobutyricum hallii
  source 1..40: mol_type = genomic DNA
caacgacataggaacagaagaactcagtcatctggaaatg

SEQ ID NO: 13484 - DNA, 50 bp, Anaerobutyricum hallii
  source 1..50: mol_type = genomic DNA
taatgataacatctatgtgcaaaccgatctgctcataaatgttatcattt

SEQ ID NO: 13485 - DNA, 40 bp, Anaerobutyricum hallii
  source 1..40: mol_type = genomic DNA
gaaagccagagaaacagaacgattcactcctctggaaaag

SEQ ID NO: 13486 - protein, 507 aa, Flavobacterium johnsoniae
MSKIADLYIRVSTDEQAEKGFSQRNQEEMLRKYCGINRIQIRNVIYEDHSAKTFNRPQWKKFLADIKKRKHKISLVLFMKWDRFSRNAGDAYQMINQLRALGVEPQAIEQPLDLSVPENKMMLAFYLAAPEVENDRRALNTFQGLRRGKKEGRHMGMAPYGYANKVTEDGKKYIAIVPDKAANVVWVYEQIAKNIFSTESIYQTAKEKGMGISKNNMWLIIRNPLYCGMIVVPKYRDEEERLVKGQHDPIISQDLFYKVQDILNSKARTYRPKIKTIENFPLRGFFVCPKCGQKLGGSKCRGRSRDYFYYHCDKVCKWRVNSEMANSVFKGHLNKFKPLAEVRKLYSAVLLEAYREHTGLVINEKKKSLEQIGVYEKKLAVARNLLVTEKIDADDYHLMKTEYNAEISRLENEIGNVDEDRADIESLMNTGLQNLIKLGEAFGDGSLVDSREIIGLIFPENFTFQNNKIQTARVNEMFKCIYLVNNRLRAKKNGTKDDIFLLSRVVT

SEQ ID NO: 13487 - DNA, 50 bp, Flavobacterium johnsoniae
  source 1..50: mol_type = genomic DNA
ttttcttttgtcccgagtagtgaccttactgaacaatttacaaaccattt

SEQ ID NO: 13488 - DNA, 40 bp, Flavobacterium johnsoniae
  source 1..40: mol_type = genomic DNA
agttgtctcttttagtgacctcgactggattcaaaccagt

SEQ ID NO: 13489 - DNA, 50 bp, Flavobacterium johnsoniae
  source 1..50: mol_type = genomic DNA
ttttcttttgtcccgagtagtgactttactgaacaatttacaaaccattt

SEQ ID NO: 13490 - DNA, 40 bp, Flavobacterium johnsoniae
  source 1..40: mol_type = genomic DNA
tgttgttgctcttggtgatttagagtggagtcaaaccagt

SEQ ID NO: 13491 - protein, 510 aa, Rhodothalassium salexigens
MSEKKQPAVIYCRVSDTKQKTEGHGLESQEVRCFEYAKSKGYEVVATYKDDASGGDLKRPQSEEMLKYLRANRRIPHVIIIEDISRLARDTRIWMWFRDELAKTNSTLECPSFQFGETSEAWLMEMMSVNFAEYHRLKNAEQTRNRMWGRMMNGYWVFKPPIGFKYEKVGPHGKLLMRDEPVASILQEALERYADGRLQTLSEVKRYLESEPDFPKDTKQGEVRIQRIREWLTQVLYAGYIERPDWDIELREAQHDGIISLHTYRKIQDRLAGRKTNTATAAVRQDLREEMPLRGFVLCGDCDRPLTGGKTKGRSKYYVYYECHNKECASHRKSIRKADIEKDFEMLLATATPTRKLFEFVHTMLKDLWEKHGERLAEQRKSLTHKIREVDAKIETLVDRTLETSSQTLIERYEARLRDLELEKAALVEQSTLPAEPQDTFKRTFRTAMDFLGNPLKLWNSSRFEDKRAVLKLTFADQLAYKRNEGFRTANFSLPFKLLGDFSTLESKMV

SEQ ID NO: 13492 - DNA, 50 bp, Rhodothalassium salexigens
  source 1..50: mol_type = genomic DNA
gatttttcgaccctagaaagcaagatggtgcacctaagcggagaaacttc

SEQ ID NO: 13493 - DNA, 40 bp, Rhodothalassium salexigens
  source 1..40: mol_type = genomic DNA
ttggcgtgagggagaaagaatggtgccggcagcaggactc

SEQ ID NO: 13494 - DNA, 50 bp, Rhodothalassium salexigens
  source 1..50: mol_type = genomic DNA
gatttttcgaccctagaaagcaaggtggtgcacctaagcggagaaacttc

SEQ ID NO: 13495 - DNA, 40 bp, Rhodothalassium salexigens
  source 1..40: mol_type = genomic DNA
ttggcgtgaaggagactgagtggtgctggcagccactccc

SEQ ID NO: 13496 - protein, 566 aa, Brucella anthropi
MNKHVFHNSVSKQPDATKRVATYYRVSTGRQYANEASIPSQRKITASFADQNGYVIIEEFVEAKTATDDRRPVLQDMIERACAPDHPYDAILFYAFNRFFRNVAEMELTIRKLRKHGVDVVSVTQPTGDDPSQILVRQIIGAFDEHTSREISKNTTRAMRESAKQGFWNGATPPLGYKIVEAERRGQKIKKKLDIDAVEAETVRLMFKLYLEGDGKTGPLGVKETTKWLNSHGYRTRRGATFGVGPVHKILTNSCYATGQWPYGVRSSRDGRKYDPSTVIQIPVPVLIEQGDFDRVQAKLARSNPKTTPPRVVNGPSLLTGIAVCASCGSGMTRTGTTNRQGRSYSYYSCAGCQQKGKSVCKGRHIPAATLDEIVLTNLKQCVLAPDRIADLLKSLIERQAAKSESADGRLLGLQKELTDCEDRMKRLYRSIEDGIVELDDILRERTAALKAQRDRAKAALDHARAQCGMAAAVNAEKIDAFARLMNAKLDAGDTNTRKGYIHSIIDAVEVDDQTIRIIGSKDILQAAIAGKQTENGNVRGFVRKWRARHDSNVWPPPSEGGALSS

SEQ ID NO: 13497 - DNA, 50 bp, Brucella anthropi
  source 1..50: mol_type = genomic DNA
atcagaaagagcttgcatttgccttcggagcaatttagcctgcctatcct

SEQ ID NO: 13498 - DNA, 40 bp, Brucella anthropi
  source 1..40: mol_type = genomic DNA
gaacctgtgacctctgccttcggagggcagcactctatcc

SEQ ID NO: 13499 - DNA, 50 bp, Brucella anthropi
  source 1..50: mol_type = genomic DNA
atcagaaagagcttgcatttgcctttggagcaatttagcctgcctatcct

SEQ ID NO: 13500 - DNA, 40 bp, Brucella anthropi
  source 1..40: mol_type = genomic DNA
gcccctttgccttcttcacttggagggcagcactctctcc

SEQ ID NO: 13501 - protein, 511 aa, Chryseobacterium indologenes
MKIADLYIRVSTDEQADKGYSQRDQHERLEKYCQQNEITIGQVIFEDHSAKNFNRPEWNNYIQNIKKRSLRSNLILFTKWDRFSRNAGDAYQMIKLLLSNNISPQAIEQPLDMSIPENKMMLAIYLAAPEVENDRRALNTFYGMRRAQKEGRLMGTASYGYINKCSEDGRKYIALKEPEASNMRWAFNEIAKGKYSINQIRLKMNTMAGTKISRTSFYRAIKNPLYCGKIYIKPYKDEDACTVDGKHESLISESLFNKVQMVLSGITTTERPKGKINAAKEFPLRGFLKCPRCGGHISGSGSKGKKSIYYYYHCNSTCGYRYRSNIINCAFEKELQKYEYHEGVNTLLKEIIFTNFKYIQEDIDAQKKEISSQIQSLNNRLNNAREKYLEDRLDYDDYQLIKNECKKKIDDLEISLQNHKLSNKNSDIKLKLDRVIKIVPNLYKLYVQGNDETKNTILCSILAEKLEFHENSFRTPKLNSALSHILLISNKLKDKKKGKSTFENAFSRKVT

SEQ ID NO: 13502 - DNA, 50 bp, Chryseobacterium indologenes
  source 1..50: mol_type = genomic DNA
aaaatgctttttcccgaaaggtgacctcagcggtgcattttccgaacact

SEQ ID NO: 13503 - DNA, 40 bp, Chryseobacterium indologenes
  source 1..40: mol_type = genomic DNA
taaaaaaggagctttgtgaccgcagaaggattcgaaccct

SEQ ID NO: 13504 - DNA, 50 bp, Chryseobacterium indologenes
  source 1..50: mol_type = genomic DNA
aaaatgctttttcccgaaaggtgatgtcagcggtgcattttccgaacact

SEQ ID NO: 13505 - DNA, 40 bp, Chryseobacterium indologenes
  source 1..40: mol_type = genomic DNA
ttaaaaagtagcttagaaatgacagaaggaaaggaaccct

SEQ ID NO: 13506 - protein, 571 aa, Rhizobium leguminosarum
MVRQLNEFFFPKKSRETTAARRRRQAQQNPEITLPAQHVVRAALYLRVSGEKSVESNLSIPDQQDQLEKFCSEKGWAVAAIYVEPGVSAKSIARPAFRNMMIDTQAEVKPFDKILVHNTSRFARSSFDYDSCERLLHQADIELLSVTQTFANDVGGWMAKRITTVFDEYHSRRSGVDSIRARRKLVTEGYWPGGAPPYGYKLISARDNARRRVLAQEANETQLVAMIFSFVRCGDGSSAPMGIKAIAKWVNDRGFRTRNGARWGIQDIHRMLTNSVYYGMYYWGVNTQEQDFTATQDPLPLPAPAIITREEFDAVQQTLEARDPKMGAARLMASPLLLSGIAKCKCGASMTLGTGTGKLQVLYRYYRCCSDLRGQQKCSGPWIPEEQLDKIVRDAIRKSVLEKGRLSEVLTRLQQRQILRRKDAEGRVHELREKLSSAESSLRGLLEAAKTVPLINAQPVFQADLIRVTNDLNTTRTLLFEALSTDADFSEITPERLAYFRSEMDEVIFGDNTALAKIYIGTIIERVVVGERFIMICGRDEDLRTAIMDTIPSDQSGGPGVRRYVRRWRKR

SEQ ID NO: 13507 - DNA, 50 bp, Rhizobium leguminosarum
  source 1..50: mol_type = genomic DNA
caggtatgtacgcagatggcggaagaggcggaacaataatgcgaacccag

SEQ ID NO: 13508 - DNA, 40 bp, Rhizobium leguminosarum
  source 1..40: mol_type = genomic DNA
aaaacggcatatggcgggagaggtgggattcgaacccacg

SEQ ID NO: 13509 - DNA, 50 bp, Rhizobium leguminosarum
  source 1..50: mol_type = genomic DNA
caggtatgtacgcagatggcggaagcggcggaacaataatgcgaacccag

SEQ ID NO: 13510 - DNA, 40 bp, Rhizobium leguminosarum
  source 1..40: mol_type = genomic DNA
aaaccacaacaagctggcagcggtgggattcgaacccacg

SEQ ID NO: 13511 - protein, 562 aa, Nocardia cyriacigeorgica
MSRRTEATRSESHEKAVLLLRVSTKKQLETAIDIDPDGLSIATQRDHGTAKAAAMGVEVATEFVEPGYSAKTIDKRPVFRDLLRYLADHPEVRYVIVYMRSRAFRNRFDAAIVESQLNKMGVRLISAKEDFGEGPHAVAMEGMLDVMNHLMNTLQGLDIQEKMRTKALNGGTLGIAKVGYVNTRVEYEGKQINTIALDPDRAPLVRMAFELYATGDYGLERLEAKMADLGLTARARGDIPERPVSFKLLHRMLQDPYYAGWVIVDGQLRPGRHEAIVSQELFDRVQDVRDIRSRRGQRDRVLQHYLKGDLFCGRCRDNGRTSRFIYTEARGRNGQRYHYFLCRGRQEGVCDLPHLPADRVEDAIVDYYGTLRIPEQFRSTAHELLDEVLTDEQSSVRQMHSAMTKKLKDLDAKEERLLDLAADGTLPQTKIKDRLRKINADRAAVEASLTATNAELAVGVEILKRGLDLLADPWTLYQTRTDDIRRHLNRAFFERLYLDIDGVVADELQQPFADLHEVAGTRRTCGNPSIRQTPRKGKSGPTLGGVLSDPVSSKTALVELPG

SEQ ID NO: 13512 - DNA, 50 bp, Nocardia cyriacigeorgica
  source 1..50: mol_type = genomic DNA
aagaccgctcttgtggagctgccgggaaagtactcgaaacaatcaggcat

SEQ ID NO: 13513 - DNA, 40 bp, Nocardia cyriacigeorgica
  source 1..40: mol_type = genomic DNA
gagtggagtggagctgccgggaatcgaacccgggtcctcc

SEQ ID NO: 13514 - DNA, 50 bp, Nocardia cyriacigeorgica; identical to SEQ ID NO: 13512
  source 1..50: mol_type = genomic DNA

SEQ ID NO: 13515 - DNA, 40 bp, Nocardia cyriacigeorgica
  source 1..40: mol_type = genomic DNA
aactacactggagatgccggggatcgaacccggggcctca

SEQ ID NO: 13516 - protein, 613 aa, Streptomyces clavuligerus; identical to SEQ ID NO: 3851

SEQ ID NO: 13517 - DNA, 50 bp, Streptomyces clavuligerus; identical to SEQ ID NO: 3852
  source 1..50: mol_type = genomic DNA

SEQ ID NO: 13518 - DNA, 40 bp, Streptomyces clavuligerus
  source 1..40: mol_type = genomic DNA
ggggtgccagggcgtgcccttgggctccccgggggcgtac

SEQ ID NO: 13519 - DNA, 50 bp, Streptomyces clavuligerus
  source 1..50: mol_type = genomic DNA
gtagtgccccaactggggtaaccttggagttctctcagttgggggcgtag

SEQ ID NO: 13520 - DNA, 40 bp, Streptomyces clavuligerus
  source 1..40: mol_type = genomic DNA
gggaagccaggggctgccctggggctgctggggtgtgtac

SEQ ID NO: 13521 - protein, 599 aa, Klebsiella quasipneumoniae; identical to SEQ ID NO: 2026

SEQ ID NO: 13522 - DNA, 50 bp, Klebsiella quasipneumoniae
  source 1..50: mol_type = genomic DNA
ggttcctatttcttttacatccaggtgtagttaatataggtgcatctaaa

SEQ ID NO: 13523 - DNA, 40 bp, Klebsiella quasipneumoniae
  source 1..40: mol_type = genomic DNA
ccgcccctgctccagccaggtgtaccaggtaacgccgacg

SEQ ID NO: 13524 - DNA, 50 bp, Klebsiella quasipneumoniae
  source 1..50: mol_type = genomic DNA
ggttcctatttcttttacatccagtggtagttaatataggtgcatctaaa

SEQ ID NO: 13525 - DNA, 40 bp, Klebsiella quasipneumoniae
  source 1..40: mol_type = genomic DNA
cagcccctcctcaagcccgtgctaccaggtaacgaagggg

SEQ ID NO: 13526 - protein, 573 aa, Collimonas pratensis
MPTAYSYIRFSTPDQIKGDSLRRQLEASSRYATEHNLTLDKTLNVRDLGVSAFTGTNFQSGALGQFITAIDDGRVAPDSFLLVESLDRLSRLPVTEALAIFQSIINRGITIVTMIDSAVYNKERLKNDWTPLLIALVSMSRAHEESAVKSRRVKAAWDAKKVRVKANKEVMSGRCPWWLKTSADNKKYEVIEASADIVRLMFNLAKDGLGNMAIAKYLNARNIPPAQHAKLWGNSSTQFNLRNIAAIGVLQLDQDNNGRTTTNTFIEDYYPAVVDKTLFYEVQALRNERGRTKSTGAGRKGHCYNMFQGTATCGYCGSSMYLRRKPGINSGFLYCAKSLQGGGCIEVSYNMRQLETEFLKFTKELNLAHVLSDTSMSDSLAAKRSELAACTGQLAELQIKMNNLITAIESGADVNALVQRSRDVEGQINDHKKRQLLLQSEVETLINIGTSDQAFVENLSDLMEQLASKETDLDEKYRLRFRLLSEVQKLVFRLDLYPGGITKTPEQLTKLVLELETFGYTEGRIANYISQVQTKPDRKARFFLAHMRNGIKRTVVNGEVLDTNLNNESQTQL

SEQ ID NO: 13527 - DNA, 50 bp, Collimonas pratensis
  source 1..50: mol_type = genomic DNA
aggtgtcaaattaagcaaaatattaagatcagatgtttaatttgacacct

SEQ ID NO: 13528 - DNA, 40 bp, Collimonas pratensis
  source 1..40: mol_type = genomic DNA
gtattacgctcatccgcaaaaccgcttctggaaactgctg

SEQ ID NO: 13529 - DNA, 50 bp, Collimonas pratensis
  source 1..50: mol_type = genomic DNA
aggtgtcaaattaagcaaaatattccgatcagatgtttaatttgacacct

SEQ ID NO: 13530 - DNA, 40 bp, Collimonas pratensis
  source 1..40: mol_type = genomic DNA
gttttactctcatccccagccccgctcctgggttctgcag

SEQ ID NO: 13531 - protein, 541 aa, Enterocloster clostridioformis
MQEKYNVGIYCRLSRDDERTGESVSIENQKIMLSRYVQEQGWNFYAAYCDDGVSGTTFDRPMFNQMIADARAGKINLILCKDLSRLGRDYIEAGRYTDIVFPSMGCRFIALNDGVDTIHKNNEMLVILKNVMNDLYARDTSSKIRAVKQSTFRTGKYVGCYAPIGYRKSPTDKHILEIDPVTAPVVLRIFDMRLQGDSFRKIARTLNEEGVPSPRSFYYMAEGRPNLRGETPYWNDVTVKTILRNEVYLGHMVQNKTGTVSYKVHKQVSKPKEDWIKVEHTHEPLVSQKVWDAVQRLDNHPSKGRSGSDGAISLFAGVLYCADCGGSMRYQRDYRSRKRHADGHFGEFQAYTCNRYMNGGKAVCTSHYINCKVLTKLLLLDIHAKAMLAQNSPATLKEKILAQKNAASMEQTKALRATLAAVDKRLAELEKLVVSAYEDKVKGVMPEALCVQLMNRYEDERRGKLEQRTQLTAQLEATQEDEQATDEWLAVIRDYAQLEELDRPTLLRLVKRIEVGEKYEIAGETHRDIKIYYNFVGYVEL

SEQ ID NO: 13532 - DNA, 50 bp, Enterocloster clostridioformis
  source 1..50: mol_type = genomic DNA
gtacttctttatgcgaggttatctaatgccaccctctcataaagaatgac

SEQ ID NO: 13533 - DNA, 40 bp, Enterocloster clostridioformis
  source 1..40: mol_type = genomic DNA
cccgttccgcaacctgttcaacgatttttatgccaaagac

SEQ ID NO: 13534 - DNA, 50 bp, Enterocloster clostridioformis
  source 1..50: mol_type = genomic DNA
gtacttctttatgcgaggttatctcttgccaccctctcataaagaatgac

SEQ ID NO: 13535 - DNA, 40 bp, Enterocloster clostridioformis
  source 1..40: mol_type = genomic DNA
aatgccctggaacctgttccttgacttttatgccaaagac

SEQ ID NO: 13536 - protein, 539 aa, Clostridium botulinum
MKTIVIYARKSLFTGKGDSIGAQIDTCKRFIDYKFAHEEYKLKIFTDEGWSGKTTDRPEFNKMLKLIKQKNIEYIISYKLDRLGRTARDLHNFLYDIDRLNIIYLSATEPYDTTTSAGRFMISILAAMAQMERERLAERVKGGMMQLAKKGRWLGGQTPLGFDSIKEVYIDNAGKERQLMKLTANKEEIKIVKLLYDKYLELTSMSQVKKWCIENSIKGKNGGEISTNTLKQILSSPIYVKSSSKVVDYLENQGINVFGEPNGNGMLTFNKTKEIRLPRDKSEWISAVSKHKGIIDDIKWLQVQSQLELQSEKQIKSSGRKGTSDSALLSGIIKCAKCGSNMVLKTGHKSKKNPNITYSYYICNAKIDSYGHKCSNKNIRTDEADLAVISQMKLYNKNLLVKNLLVASKEINKDTELDKITILKDNIAEKEKGIANLIKKLSLTDDETISTAILNEVSILNMEIKELKTSLNASEIKNNEATTIKVNIDSYIQSLKNFNENIDIASITDKKSLLASVLESVVWDGESCELKINLINSAK

SEQ ID NO: 13537 - DNA, 50 bp, Clostridium botulinum
  source 1..50: mol_type = genomic DNA
aatcgtctttttatctatcaaggacatccattttgtacaaaaagacgtta

SEQ ID NO: 13538 - DNA, 40 bp, Clostridium botulinum
  source 1..40: mol_type = genomic DNA
ttctgctaaatgacatggacaatattcagttccagcatct

SEQ ID NO: 13539 - DNA, 50 bp, Clostridium botulinum
  source 1..50: mol_type = genomic DNA
aatcgtctttttatctatcaaggagatccattttgtacaaaaagacgtta

SEQ ID NO: 13540 - DNA, 40 bp, Clostridium botulinum
  source 1..40: mol_type = genomic DNA
ttctgccaaatgaaataaagaatatccagttcctcctttt

SEQ ID NO: 13541 - protein, 546 aa, Geobacillus stearothermophilus
MVMDGVKKRVATLYRVSTKGQLDGDDIPMQRNACRSFIEKQGNWELVKEYIEKGVSGFKVSASKRDAIQRAKEDAEKGLFDVLLVFMFDRLGRRDDETPFIVEWFINNGIEVWSVKEGQQKLEDHADRLINYIRFWQSSGESRKTSIRVNEKHSQMVEDGIYRGGLVPYGYKTVNSGVFNKKGKELLKVVIDEEEAEIVKKMYDLVLEEGYGQSRIAQYLNEKGIPSKTGKKWTSGAVNNVLRNPMYKGYMVYARGTEKEVVSKEKLEELVIIDEEKWNKVQSIREKRNPENVKNRGEESIITTTKSSLLLVGLVRCGHCGNPLCTTYNKKKYVRKDGTEYVKREAKYRCSGKAQKKVDCDGQTLYSPKKIEGVVLDELYDYLDQLETIDLTSKIQEFKQHNTDKEVKTLKKLQSEFDKVNSALVKLRDEALKIIMGESFFDAKVVNDLINQKENELRELEESINKAKLDLESKKVELSEMEKLQRYIPVWREVFEKASVEKKKMMLSTVIDKIVVFRDRVEITFKISLNRFLVNKGSHSNNDALP

SEQ ID NO: 13542 - DNA, 50 bp, Geobacillus stearothermophilus
  source 1..50: mol_type = genomic DNA
ggcagtcattctaacaatgacgccctcccacgcttgtcagttacactgcc

SEQ ID NO: 13543 - DNA, 40 bp, Geobacillus stearothermophilus
  source 1..40: mol_type = genomic DNA
gcgctgccagcacgacgctctcccaactgagctaatgccc

SEQ ID NO: 13544 - DNA, 50 bp, Geobacillus stearothermophilus
  source 1..50: mol_type = genomic DNA
ggcagtcattctaacaatgacgcccgcccacgcttgtcagttacactgcc

SEQ ID NO: 13545 - DNA, 40 bp, Geobacillus stearothermophilus
  source 1..40: mol_type = genomic DNA
gagctgccagcccaccgctcgcccagctgggccacttccc

SEQ ID NO: 13546 - protein, 546 aa, Parageobacillus thermoglucosidasius
MVMDGVKKRVATLYRVSTKGQLDGDDIPMQRNACRSFIEKQGNWELVKEYIEKGVSGFKVSASKRDAIQRAKEDAENGLFDVLLVFMFDRLGRRDDETPFIVEWFINNGIEVWSVKEGQQKLEDHADRLINYIRFWQSSGESRKTSIRVNEKHSQMVEDGIYRGGLVPYGYKTVNSGVFNKKGKELLKVVIDEEEAEIVKKMYDLVLEEGYGQSRIAQYLNEKGIPSKTGKKWTSGAVNNVLRNPMYKGYMVYARGTEKEVVSKEKLEELVIIDEEKWNKVQSIREKRNPENVKNRGEESIITTTKSSLLLVGLVRCGHCGSPLCTTYNKKKYVRKDGTEYVKREAKYRCSGKAQKKVDCDGQTLYSPKKIEGVVLDELYDYLDQLETIDLTSKIQEFKQHNTDKEVKTLKKLQSEFDKVNSALVKLRDEALKIIMGESFFDAKVVNDLINQKENELRELEESINKAKLDLESKKVELSEMEELQRYIPVWREVFEKASVEKKKMMLSTVIDKIVVFRDRVEITFKISLNRFLVNEGSHSNNDALP

SEQ ID NO: 13547 - DNA, 50 bp, Parageobacillus thermoglucosidasius; identical to SEQ ID NO: 13542
  source 1..50: mol_type = genomic DNA

SEQ ID NO: 13548 - DNA, 40 bp, Parageobacillus thermoglucosidasius; identical to SEQ ID NO: 13543
  source 1..40: mol_type = genomic DNA

SEQ ID NO: 13549 - DNA, 50 bp, Parageobacillus thermoglucosidasius; identical to SEQ ID NO: 13544
  source 1..50: mol_type = genomic DNA

SEQ ID NO: 13550 - DNA, 40 bp, Parageobacillus thermoglucosidasius; identical to SEQ ID NO: 13545
  source 1..40: mol_type = genomic DNA

SEQ ID NO: 13551 - protein, 546 aa, Geobacillus thermocatenulatus
MVMDGVKKRVATLYRVSTKGQLDGDDIPMQRNACRSFIEKQGNWELVKEYIEKGVSGFKVSASKRDAIQRAKEDAEKGLFDVLLVFMFDRLGRRDDETPFIVEWFINNGIEVWSVKEGQQKLEDHADRLINYIRFWQSSGESRKTSIRVNEKHSQMVEDGIYRGGLVPYGYKTVNSGVFNKKGKELLKVVIDEEEAEIVKKMYDLVLEEGYGQSRIAQYLNEKGIPSKTGKKWTSGAVNNVLRNPMYKGYMVYARGTEKEVVSKEKLEELVIIDEEKWNKVQSIREKRNPENVKNRGEESIITTTKSSLLLVGLVRCGHCGSPLCTTYNKKKYVRKDGTEYVKREAKYRCSGKAQKKVDCDGQTLYSPKKIEGVVLDELYDYLDQLETIDLTSKIQEFKQHNTDKEVKTLKKLQSEFDKVNSALVKLRDEALKIIMGESFFDAKVVNDLINQKENELRELEESINKAKLDLESKKVELSEMEELQRYIPVWREVFEKASVEKKKMMLSTVIDKIVVFRDRVEITFKISLNRFLVNEGSHSNNDALP

SEQ ID NO: 13552 - DNA, 50 bp, Geobacillus thermocatenulatus; identical to SEQ ID NO: 13542
  source 1..50: mol_type = genomic DNA

SEQ ID NO: 13553 - DNA, 40 bp, Geobacillus thermocatenulatus; identical to SEQ ID NO: 13543
  source 1..40: mol_type = genomic DNA

SEQ ID NO: 13554 - DNA, 50 bp, Geobacillus thermocatenulatus; identical to SEQ ID NO: 13544
  source 1..50: mol_type = genomic DNA

SEQ ID NO: 13555 - DNA, 40 bp, Geobacillus thermocatenulatus; identical to SEQ ID NO: 13545
  source 1..40: mol_type = genomic DNA

SEQ ID NO: 13556 - protein, 580 aa, Pectobacterium brasiliense
MRKCYLYVRVSSDQQIQGDGLGRQESMLINYFNDNAAIQGFDPQYEIIIDEGRSAFKAEHLQENAGLGKFFKQVKEGLIQPGSVLIVESLDRFSRENPFKCVEYISHLDKKQIELHDVDKRLIISRRHSNSLTFATMIAERAYEESRLKSHRIRKGWDKRRRMAKEEGQYMIKNCPPWISIVNNRYELNDNAKIIRDIFDLYLSGIRSFNISKMMNNSGRLINDKLWTGTKVCRVLRNVRCKGDYITNITDRNFDDDTINVTSDILKIYPAVISDDEFREVQRRLEGHNYSGRIRNDLKKTLFSYVVKCSSCGSALSISTTGKYTYLKCSNSRENNGCTASMLPYMPFEKAILKHIKDIDIAAVLNNTDRAFNGIDKIKSEIVELEKNIDEYVQGIAKRKKQRQLIPFSMLDEQSQAEDRLKLLKESLSSKLESTSITHVEFSDDVHDVKNIEERARLEIELKKVIKRIDVSSEPKKKFIIADVQYYNDDYIKHLILINKKNGDINAVGEISQKNGWRTYSFSENSRLIFRVESNGDVWTVQASNGQSIEDIKMYMTMMVGREPDDFDYHVNEGFIEWIE

SEQ ID NO: 13557 - DNA, 50 bp, Pectobacterium brasiliense
  source 1..50: mol_type = genomic DNA
agtttgtttaatgttcaatgtattttgataccatagagcttatacaaact

SEQ ID NO: 13558 - DNA, 40 bp, Pectobacterium brasiliense
  source 1..40: mol_type = genomic DNA
ctttatagtgtcacagtttttgatgccatacatggtcagc

SEQ ID NO: 13559 - DNA, 50 bp, Pectobacterium brasiliense
  source 1..50: mol_type = genomic DNA
agtttgtttaatgttcaatgtattctgataccatagagcttatacaaact

SEQ ID NO: 13560 - DNA, 40 bp, Pectobacterium brasiliense
  source 1..40: mol_type = genomic DNA
tttcagagtgtcacagtttctgaccacatacattctccgc

SEQ ID NO: 13561 - protein, 580 aa, Pectobacterium quasiaquaticum
MKKCYLYVRVSSDQQIQGDGLDRQEYMLINYFNDNAAIQGFDPQYELIIDEGRSAFKAEHLQENAGLGKFFKQVKEGLIQPGSVLIVESLDRFSRENPFRCVEYISHLDKKQIELHDVDKRLIISRRHSNSLTFATMIAERAYEESRLKSYRIRKGWDKRRRMAKEEGQYMIKNCPPWISIVNNKYEVNDNAKIIREIFDLYLSGIRSFNISKMMNDSGRLINDKLWTGTKVCRVLRNVRCKGDYITNITERNFDDDTVNVTSDILKIYPAIVSEDEFREVQRRLEGHNYSGRIRNDLKKTLFSYVVKCSHCGSALSTSTTGEYTYLKCSNAREKNGCAASMLPYMPFEKAILKHIKDIDVAEVLNNTDRNLNEIDTIKSEIVELESNIDEYIQGIAKRKRQGLLIPFAMIDEQSQAEDKLKVLKELLSSKLDSANITRVEFSDDIHDVKNIEERARLEVELKKVIKRIDILSESKNKFIIADIQYYNDDHVKHVLLINKKNGTINAVGEISQKNGWRTYSFSENSRLIFRVESNGDIWTVQASNGQSIEDIRMYMTMMVGREPDDFDYQINEDCIEWLE

SEQ ID NO: 13562 - DNA, 50 bp, Pectobacterium quasiaquaticum
  source 1..50: mol_type = genomic DNA
attttgtctaatgttcagtgtattttgataccatagagcttatacaaact

SEQ ID NO: 13563 - DNA, 40 bp, Pectobacterium quasiaquaticum
  source 1..40: mol_type = genomic DNA
ctttatagtgtcacagtttttgataccatacatggtcagc

SEQ ID NO: 13564 - DNA, 50 bp, Pectobacterium quasiaquaticum
  source 1..50: mol_type = genomic DNA
attttgtctaatgttcagtgtattctgataccatagagcttatacaaact

SEQ ID NO: 13565 - DNA, 40 bp, Pectobacterium quasiaquaticum; identical to SEQ ID NO: 13560
  source 1..40: mol_type = genomic DNA

SEQ ID NO: 13566 - protein, 638 aa, Cedecea davisae
MKPKLYSYVRFSSVKQREGNSLERQQDTALKIATRYNLELDTTAFHDLGMSAFKGKNAHEGKLSEFIKQIGVKVPVGSWLVVENLDRISRDDAWSALDIFKSILSKGIVVVTGMDEKVYKYADVKNNPTDLIISLLMFTRAHDESLTKKNRVEAQARSLIRHNLTREPGTPAKAIESVGQNVWWVDTKSGYVTPHSIYFAAAQKIIELKQNGETLLGIQRYLNEHYTAPKKRVYKDKTGQALTPKTEQWGKHLIRTFLNPTVHGQKIFTLDKRDESGAIIYDSESDEPLKETFIIPDYYPALMSEVDYLTLSKLDRHRAVTRSSSTYPGGNPEPEIPLLSGIGILFCGKCGSFMFKSGSSENKYRYICGSKIVQGKPCGKKGFTSYQLEHTVLQLIADHVWNNHQEDKTAWYESEIEKASEAVKKLLKLATLTDNIEELADQINANKQKKITLEKEFQQYKISRSEIQTTGWDQFRHFDVHDTKNPERKRIRLKVKQAIKRIDCYDIDGRHSHFEVTFADETKQRIVIKFNRNRSPGISYVEAQTVNDHDLLKMQGLVLHSFIDELISPEKFAQHIKDKHEVSILNPTFITELEDGVTRDEDSGMAIRVDGITSKSYATVNGIKYEINSLEDLEKLSQ

SEQ ID NO: 13567 - DNA, 50 bp, Cedecea davisae
  source 1..50: mol_type = genomic DNA
actgagaataattgactgttaggcttgcctaacatataattattcactgt

SEQ ID NO: 13568 - DNA, 40 bp, Cedecea davisae
  source 1..40: mol_type = genomic DNA
gcagggcgtgttggcgggcttgccctccggcatgccgggg

SEQ ID NO: 13569 - DNA, 50 bp, Cedecea davisae
  source 1..50: mol_type = genomic DNA
actgagaataattgactgttaggcccgcctaacatataattattcactgt

SEQ ID NO: 13570 - DNA, 40 bp, Cedecea davisae
  source 1..40: mol_type = genomic DNA
gccggtggccttggaggacccgccctccggcctgccgggc

SEQ ID NO: 13571 - protein, 550 aa, Bacillus badius
MNRQSTFSTIRKSTVTFEEAQITALYCRLSRDDELAGDSNSIVNQKAILKKYAGDNGFRNIEFYVDDGVSGTTFDRPDFNRMIADVESGRVRTIIIKDMSRFGRDYLKVGYYTEIMFPEADVRFIAINNGIDSANQQDSDFTPFLNIINEWYAKDTSKKIRAVFKSKGQSGKPLCTNPPYGYIKDPEDKLHWIIDEEAAEVVRDIFRLCMAGFGPTQIAKQLEKRCIDTPTVHLRKMGINTPARPPENPFAWSARSVADILAKMEYLGHTVNFKTSKKSYKSKVKILNNPEDWLVFKNTHEAIIDEGTWETVQKIRDGKRRPSRLGEMGMLSGMMFCADCGAKLYQVRGKGWTHDKEYFVCATYRKKKGMCSSHQIRNVVVEQLLLEDLRRVTSFAKDHEQEFIRIVMNNSEKELAKELRQSKKEYEQAQTRIADIDKIIRKLYEDNVMGKIPEERFYKMSAEYEAEQKTLEERITKLKHTIDTANEQSLNTDRFLALVKKYTEITELDAEIIREFIDKIIVFKAEKVDGRRTQRIQIFYNCIGAIDLPK

SEQ ID NO: 13572 - DNA, 50 bp, Bacillus badius; identical to SEQ ID NO: 3022
  source 1..50: mol_type = genomic DNA

SEQ ID NO: 13573 - DNA, 40 bp, Bacillus badius
  source 1..40: mol_type = genomic DNA
gagaagaaaaggggagcggaatgggcgccccttttctttt

SEQ ID NO: 13574 - DNA, 50 bp, Bacillus badius
  source 1..50: mol_type = genomic DNA
ataaatccctatctgaccgctcctggagaagcgttcacttagggattgaa

SEQ ID NO: 13575 - DNA, 40 bp, Bacillus badius
  source 1..40: mol_type = genomic DNA
gaaaggaaaagggtatgggggagagagcaccttttctttt

SEQ ID NO: 13576 - protein, 538 aa, Streptococcus equi
MLRQATQNLITALYPRLSHEDELQGESNSISNQKRILETYAKQNGFTNLRWYTDDGFSGANFQRPGFQAMLADIEAGKVGTVIVKDMSRLGRNYLQVGFYTEMLFPQKGVRFIAVNDNVDSASEGMDNDFTPLRNLFNEWLVRDTSKKIKAVKKSKGMSGKPVTSKPVYGYVMDEDENFIIDEEAAPVVQQIYQLCLAGNGPTKIARMLTEQQIPTPGTLEYQRTGSTRRYHPGYECKWATNTVVHILENREYTGCLVNFKTEKPSYKVKHSIENPVEKQAIFENHHEPIIDKETWERVQELRKQRKRPNRYDEVGLFSGILFCADCGHVLYQQRYQNKDRKQDCYICGSYKKRTRNCTAHFIRTDLLTAGVLANLRQVTEYAAKHESRFVKLLVQQNEIGGKRKTAAAIKQLEQAQERISEISRIIKRLYEDNVNGKISDERFMELSADYEAEQAELKKRAAALQAELDKSQAATVNAEKFMGIVRKHLAFEELTPTLLREMIEKIVVHECSYDENGTRRQDIEIYYSFVGKIDLPE

SEQ ID NO: 13577 - DNA, 50 bp, Streptococcus equi
  source 1..50: mol_type = genomic DNA
ttgcttctttatcacacataagcaaatgctcatgtacggtaaggaagcaa

SEQ ID NO: 13578 - DNA, 40 bp, Streptococcus equi
  source 1..40: mol_type = genomic DNA
taaaaacaagccaagaaataaggatcttggcttgtttttt

SEQ ID NO: 13579 - DNA, 50 bp, Streptococcus equi
  source 1..50: mol_type = genomic DNA
ttgcttctttatcacacataagcatttgctcatgtacggtaaggaagcaa

SEQ ID NO: 13580 - DNA, 40 bp, Streptococcus equi
  source 1..40: mol_type = genomic DNA
tctaaactagcccagaaatttgttttttggtttttttttt

SEQ ID NO: 13581 - protein, 581 aa, Klebsiella quasipneumoniae
MKKLYSYVRWSTDKQTGNTSLERQTEKAKQYAAIHGLEYVQLLDAGVSAFRAKNSTSGKLAGFISAVESGVIPSDSWLYVENLDRLSRADATTANELFLRLLRLGLTLVTGMDRKTFTRDSVNQNPTDLMLSILLFMRANEESLTKQKRAFETTLKLIERYRSGLPVNIKSAGSSPWWIDASGPNNEAVKAHPTHFKAAKEAVRLLLSGWGNYRVTNYLNDNCKIYPPPAGKKSKNEKKEVRWTVPNIKKMRLNRALMGEKVLTLNNVTHHLENYFPPVCTPAEFARLQDVASNNKMPQGEQKQVITLLSGMGILRCGHCGGAMTSFSKQEKIRYMCESGKKRMSSCKAWSVSGELVERCLLQPLITGYISLVMDKQDSEQSISGLIDSKRGELEAIQSQIDNTTTAISMGGNLGSLVALLQGLESRKSAILVDLDKLTQRELLQGSRDQQIEKIVDTMELITPALLEDTTDPDRLNIREVVRAVIGRVTISKGGDKALRLIFDGYDHQRFIFQGEILADDRGRLSRGYSIHIEDRNVDMHDGIESDLSSKFGELIKAQYDKVDEMLSAFPPLKASWFVSK

SEQ ID NO: 13582 - DNA, 50 bp, Klebsiella quasipneumoniae
  source 1..50: mol_type = genomic DNA
ttctttgccaaaatgaattttggcttgcccaagttcgaaaaggtgataat

SEQ ID NO: 13583 - DNA, 40 bp, Klebsiella quasipneumoniae
  source 1..40: mol_type = genomic DNA
cggattagccaacttagtgttgcccataattcctcaaaat

SEQ ID NO: 13584 - DNA, 50 bp, Klebsiella quasipneumoniae
  source 1..50: mol_type = genomic DNA
ttctttgccaaaatgaattttggcaagcccaagttcgaaaaggtgataat

SEQ ID NO: 13585 - DNA, 40 bp, Klebsiella quasipneumoniae
  source 1..40: mol_type = genomic DNA
cagcttggccaacatagtgaaacccatagctactaaaaat

SEQ ID NO: 13586 - protein, 596 aa, Klebsiella variicola
MIPSECLLFSVLAMKKLYSYIRWSTDKQTGNTSLERQTEKAKQYAAIHGLEYVQILDAGVSAFRGKNTTQGAFAGFINAVNAGVIPSDSWLYVENLDRLTRQDVMTALNLFTSLLKLGLTIVTGMDGKTYTEESVSKNVHDLMMSLFLFSRANEESLTKQKRAFETTLKLIERHKSGQPTNIKSAGSTPFWIDATGPNTEAVKPHPIYFKAAKEAVRLLLSGWGNYRVTNYLNENSDIYPPPPGKKTQNEKKEVRWTVPNIKKMRLNRALMGEKVLTLNNVTHHLENYFPPVCTPAEFARLQDVASNNKMPQGEQKKVVTLLSGMGILRCGHCGGAMTSFSKLGKIRYMCESGKKRMSSCKAWSVSGALVERCLLYPLISGYMSLVMEDQNAGESLADQIDSKRSELELIESQIGNLTTAITMGGNLGSLVTQLQEMESRKRRLLLELDKLAQRELLQGSREQQIEKIVDTVELITPQLLDDTTHPDRLNIREVVRAVITRVTVSKAIDKTLTLRYDVYDKQRYLFEGQIKTDNNGDKCCGYAMYVEDPTVLVDSDSLEISGALKKVTDSTKLLQQRIDEILDGFPRIKPSDFVSK

SEQ ID NO: 13587 - DNA, 50 bp, Klebsiella variicola
  source 1..50: mol_type = genomic DNA
agattcgtctaaatgaaaatgggcttgcccaagttcgaaaagatgatacc

SEQ ID NO: 13588 - DNA, 40 bp, Klebsiella variicola; identical to SEQ ID NO: 13583
  source 1..40: mol_type = genomic DNA

SEQ ID NO: 13589 - DNA, 50 bp, Klebsiella variicola
  source 1..50: mol_type = genomic DNA
agattcgtctaaatgaaaatgggcaagcccaagttcgaaaagatgatacc

SEQ ID NO: 13590 - DNA, 40 bp, Klebsiella variicola; identical to SEQ ID NO: 13585
  source 1..40: mol_type = genomic DNA

SEQ ID NO: 13591 - protein, 581 aa, Klebsiella variicola
MKKLYSYIRWSTDKQTGNTSLERQTEKAKQYAAIHGLEYVQLLDAGVSAFRAKNSTSGKLAGFISAVESGVIPSDSWLYVENLDRLSRADATTANELFLRLLRLGLTLVTGMDGKTFTRDSVNQNPTDLMLSILLFMRANEESLTKQKRAFETTLKLIERYRSGLPVNIKSAGSSPWWIDASGPNNEAVKQHPIHFKAAKEAVRLLLSGWGNYRVTNYLNDNSELYPPPTGKKSKNERKEVRWTVPNIKKMRLNRALMGEKVLTLNNVTHHLENYFPPVCTPAEFARLQDVASNNKMPQGEQKQVITLLSGMGILRCGHCGGAMTSFSKQGKIRYMCESGKKRMSSCRAWSVSGVLVERCLLQPLITGYISLVMDKQDSEQSISGLIDSKRGELEAIQSQIDNTTTAISMGGNLGSLVAMLQGFESRKSTILVDLDKLTQRELLQGSRDQQIEKIVDTMILISPELLEDTTDPDRLNIREVVRAVIDRVTISKGEDKVLRLVFDGYDHQRFIFQGEILADDRGRVSKGYSLHIEDRNVEMNDGIEPALSLKFGELIKAQHDKVDEMLSAFPPLKASWFVSK

SEQ ID NO: 13592 - DNA, 50 bp, Klebsiella variicola; identical to SEQ ID NO: 13582
  source 1..50: mol_type = genomic DNA

SEQ ID NO: 13593 - DNA, 40 bp, Klebsiella variicola; identical to SEQ ID NO: 13583
  source 1..40: mol_type = genomic DNA

SEQ ID NO: 13594 - DNA, 50 bp, Klebsiella variicola; identical to SEQ ID NO: 13584
  source 1..50: mol_type = genomic DNA

SEQ ID NO: 13595 - DNA, 40 bp, Klebsiella variicola; identical to SEQ ID NO: 13585
  source 1..40: mol_type = genomic DNA

SEQ ID NO: 13596 - protein, 581 aa, Klebsiella pneumoniae
MKKLYSYIRWSTDKQTGNTSLERQTEKAKQYAAIHGLEYVQLLDAGVSAFRAKNSTSGKLAGFISAVESGVIPSDSWLYVENLDRLSRADATTANELFLRLLRLGLTLVTGMDGKTFTRDSVNQNPTDLMLSILLFMRANEESLTKQKRAFETTLKLIERYRSGLPVNIKSAGSSPWWIDASGPNNEAVKQHPIHFKAAKEAVRLLLSGWGNYRVTNYLNDNSELYPPPAGKKSKNERKEVRWTVPNIKKMRLNRALMGEKVLTLNNVTHHLENYFPPVCTPAEFARLQDVASNNKMPQGEQKQVITLLSGMGILRCSHCGGAMTSSSKQGKIRYMCESGKKRMSSCKAWSVSGALVERCLLQPLINGYISLVMEKQDSEQSISGLIDSKRGELEAIQSQIDNTTTAISMGGNLGSLVAMLQGFESRKSAILVDLDKLAQRELLQDSRDQQIEKIVDTVELITPELLEDTTDPDRLNIREVVRAVIARVTIGKGEDKALKLIFDVYDRQRFIYQGEIQTDDRGWIRRGYSIHIEDQSVETHDGIDSALSSKLEELIKVQHDKVDEMLSAFPPLKASWFVSK

SEQ ID NO: 13597 - DNA, 50 bp, Klebsiella pneumoniae
  source 1..50: mol_type = genomic DNA
ttattttcctaaatgaattttggcttgcccaagttcgaaaaggtgataat

SEQ ID NO: 13598 - DNA, 40 bp, Klebsiella pneumoniae; identical to SEQ ID NO: 13583
  source 1..40: mol_type = genomic DNA

SEQ ID NO: 13599 - DNA, 50 bp, Klebsiella pneumoniae
  source 1..50: mol_type = genomic DNA
ttattttcctaaatgaattttggcaagcccaagttcgaaaaggtgataat

SEQ ID NO: 13600 - DNA, 40 bp, Klebsiella pneumoniae; identical to SEQ ID NO: 13585
  source 1..40: mol_type = genomic DNA

SEQ ID NO: 13601 - protein, 581 aa, Klebsiella pneumoniae
MKKLYSYVRWSTDKQTGNTSLERQTEKAKQYAAIHGLEYVQLLDAGVSAFRAKNSTSGKLAGFISAVESGVIPSDSWLYVENLDRLSRADATTANELFLRLLRLGLTLVTGMDGKTFTRDSVNQNPTDLMLSILLFMRANEESLTKQKRAFETTLKLIERYRSGLPVNIKSAGSSPWWIDASGPNNEAVKAHPTHFKAAKEAVRLLLSGWGNYRVTNYLNDNCKIYPPPAGKKSKNEKKEVRWTVPNIKKMRLNRALMGEKVLTLNNVTHHLENYFPPVCTPAEFARLQDVASNNKMPQGEQKQVITLLSGMGILRCGHCGGAMTSFSKQEKIRYMCESGKKRMSSCKAWSVSGELVERCLLQPLITGYISLVMDKQDSEQSISGLIDSKRGELEAIQSQIDNTTTAISMGGNLGSLVALLQGLESRKSAILVDLDKLTQRELLQGSRDQQIEKIVDTMELITPALLEDTTDPDRLNIREVVRAVIGRVTISKGGDKALRLIFDGYDHQRFIFQGEILADDRGRLSRGYSIHIEDRNVDMHDGIESDLSSKFGELIKAQYDKVDEMLSAFPPLKASWFVSK

SEQ ID NO: 13602 - DNA, 50 bp, Klebsiella pneumoniae; identical to SEQ ID NO: 13582
  source 1..50: mol_type = genomic DNA

SEQ ID NO: 13603 - DNA, 40 bp, Klebsiella pneumoniae; identical to SEQ ID NO: 13583
  source 1..40: mol_type = genomic DNA

SEQ ID NO: 13604 - DNA, 50 bp, Klebsiella pneumoniae; identical to SEQ ID NO: 13584
  source 1..50: mol_type = genomic DNA

SEQ ID NO: 13605 - DNA, 40 bp, Klebsiella pneumoniae; identical to SEQ ID NO: 13585
  source 1..40: mol_type = genomic DNA

SEQ ID NO: 13606 - protein, 581 aa, Klebsiella pneumoniae
MKKLYSYIRWSTDKQTGNTSLERQTEKAKQYAAIHGLEYVQLLDAGVSAFRAKNSTSGKLAGFISAVESGVIPSDSWLYVENLDRLSRADATTANELFLRLLRLGLTLVTGMDGKTFTRDSVNQNPTDLMLSILLFMRANEESLTKQKRAFETTLKLIERYRSGLPVNIKSAGSSPWWIDASGPNNEAVKQHPIHFKAAKEAVRLLLSGWGNYRVTNYLNDNSELYPPPTGKKSKNERKEVRWTVPNIKKMRLNRALMGEKVLTLNNVTHHLENYFPPVCTPAEFARLQDVASNNKMPQGEQKQVITLLSGMGILRCGHCGGAMTSFSKQGKIRYMCESGKKRMSSCRAWSVSGVLVERCLLQPLITGYISLVMDKQDSEQSISGLIDSKRGELEAIQSQIDNTTTAISMGGNLGSLVAMLQGFESRKSTILVDLDKLTQRELLQGSRDQQIEKIVDTMDLISPELLEDTTDPDRLNIREVVRAVIDRVTISKGEDKVLRLIFDGYDHQRFIFQGEILADDRGRVSKGYSLHIEDRNVEMNDGIEPALSLKFGELIKAQHDKVDEMLSAFPPLKASWFVSK

SEQ ID NO: 13607 - DNA, 50 bp, Klebsiella pneumoniae; identical to SEQ ID NO: 13582
  source 1..50: mol_type = genomic DNA

SEQ ID NO: 13608 - DNA, 40 bp, Klebsiella pneumoniae; identical to SEQ ID NO: 13583
  source 1..40: mol_type = genomic DNA

SEQ ID NO: 13609 - DNA, 50 bp, Klebsiella pneumoniae; identical to SEQ ID NO: 13584
  source 1..50: mol_type = genomic DNA

SEQ ID NO: 13610 - DNA, 40 bp, Klebsiella pneumoniae; identical to SEQ ID NO: 13585
  source 1..40: mol_type = genomic DNA

SEQ ID NO: 13611 - protein, 581 aa, Klebsiella pneumoniae
MKKLYSYIRWSTDKQTGNTSLERQTKKAKQYAAIHGLEYVQLLDAGVSAFRAKNSTSGKLAGFISAVESGVIPSDSWLYVENLDRLSRADATTANELFLRLLRLGLTLVTGMDGKTFTRDSVNQNPTDLMLSILLFMRANEESLTKQKRAFETTLKLIERYRSGLPVNIKSAGSSPWWIDASGPNNEAVKQHPIHFKAAKEAVRLLLSGWGNYRVTNYLNDNSELYPPPTGKKSKNERKEVRWTVPNIKKMRLNRALMGEKVLTLNNVTHHLENYFPPVCTPAEFARLQDVASNNKMPQGEQKQVITLLSGMGILRCGHCGGAMTSFSKQGKIRYMCESGKKRMSSCRAWSVSGVLVERCLLQPLITGYISLVMDKQDSEQSISGLIDSKRGELEAIQSQIDNTTTAISMGGNLGSLVAMLQGFESRKSTILVDLDKLTQRELLQGSRDQQIEKIVDTMILISPELLEDTTDPDRLNIREVVRAVIDRVTISKGEDKVLRLVFDGYDHQRFIFQGEILADDRGRVSKGYSLHIEDRNVEMNDGIEPALSLKFGELIKAQHDKVDEMLSAFPPLKASWFVSK

SEQ ID NO: 13612 - DNA, 50 bp, Klebsiella pneumoniae; identical to SEQ ID NO: 13582
  source 1..50: mol_type = genomic DNA

SEQ ID NO: 13613 - DNA, 40 bp, Klebsiella pneumoniae; identical to SEQ ID NO: 13583
  source 1..40: mol_type = genomic DNA

SEQ ID NO: 13614 - DNA, 50 bp, Klebsiella pneumoniae; identical to SEQ ID NO: 13584
  source 1..50: mol_type = genomic DNA

SEQ ID NO: 13615 - DNA, 40 bp, Klebsiella pneumoniae; identical to SEQ ID NO: 13585
  source 1..40: mol_type = genomic DNA

SEQ ID NO: 13616 - protein, 581 aa, Klebsiella michiganensis
MKKLYSYIRWSTDKQTGNTSLERQTEKAKQYAAIHGLEYVQLLDAGVSAFRAKNSTSGKLAGFISAVESGVIPSDSWLYVENLDRLSRADATTANELFLRLLRLGLTLVTGMDGKTFTRDSVNQNPTDLMLSILLFMRANEESLTKQKRAFETTLKLIERYRSGLPVNIKSAGSSPWWIDASGPNNEAVKQHPIHFKAAKEAVRLLLSGWGNYRVTNYLNDNSELYPPPTGKKSKNERKEVRWTVPNIKKMRLNRALMGEKVLTLNNVTHHLENYFPPVCTPAEFARLQDVASNNKMPQGEQKQVITLLSGMGILRCGHCGGAMTSFSKQGKIRYMCESGKKRMSSCRAWSVSGVLVERCLLQPLITGYISLVMDKQGSEQSISGLIDSKRGELEAIQSQIDNTTTAISMGGNLGSLVAMLQGFESRKSTILVDLDKLTQRELLQGSRGQQIEKIVDTMDLIIPELLEDTTDPDRLNIREVVRAVIDRVTISKGEDKVLRLIFDGYGHQRFIFQGEILADDRGRVSRGYSLHIEDRNVEMHDGIEPALSLKFGELIKAQHDKVDEMLSAFPPLKASWFVSK

SEQ ID NO: 13617 - DNA, 50 bp, Klebsiella michiganensis; identical to SEQ ID NO: 13582
  source 1..50: mol_type = genomic DNA

SEQ ID NO: 13618 - DNA, 40 bp, Klebsiella michiganensis; identical to SEQ ID NO: 13583
  source 1..40: mol_type = genomic DNA

SEQ ID NO: 13619 - DNA, 50 bp, Klebsiella michiganensis; identical to SEQ ID NO: 13584
  source 1..50: mol_type = genomic DNA

SEQ ID NO: 13620 - DNA, 40 bp, Klebsiella michiganensis; identical to SEQ ID NO: 13585
  source 1..40: mol_type = genomic DNA

SEQ ID NO: 13621 - protein, 581 aa, Klebsiella michiganensis
MKKLYSYIRWSTDKQTGNTSLERQTEKAKQYAAIHGLEYVQLLDAGVSAFRAKNSTSGKLAGFISAVENGVIPSDSWLYVENLDRLSRADATTANELFLRLLRLGLTLVTGMDGKIFTRDSVNQNPTDLMLSILLFMRANEESLTKQKRAFETTLKLIERYRSGHPVNIKSAGSSPWWIDASGPNNEAVKAHPTHFKAAKEAVRLLLSGWGNYRVTNYLNDNSEIYPPPAGKKSKNERKEVRWTVPNIKKMRLNRALMGEKVLTLNNVTHHLENYFPPVCTPAEFARLQDVASNNKIPQGEQKQVITLLSGMGILRCAHCGGAMTSFSKQGKIRYMCESGKKRMSSCKAWSVSGELVERCLLQPLITGYISLVMDKQDSEQSISGLIDSKRGELEAIQSQIDNTTTAISMGGNLGSLVAMLQGFESRKSAILVDLDKLTQRELLQGSRDQQIEKIVDTMELITPELLEDTTDPDRLNIREVVRAVIARVTIGKGEDKALKLIFDVYDHQQFIYQGEIQTGDRGWIRRGYSMHIEDQSVEMHDGIDPALASKLEELIKVQHDKVDEMLSAFPPLKASWFVSK

SEQ ID NO: 13622 - DNA, 50 bp, Klebsiella michiganensis
  source 1..50: mol_type = genomic DNA
ttatttgccaaaatgaattttggcttgcccaagttcgaaaaggtgataat

SEQ ID NO: 13623 - DNA, 40 bp, Klebsiella michiganensis; identical to SEQ ID NO: 13583
  source 1..40: mol_type = genomic DNA

SEQ ID NO: 13624 - DNA, 50 bp, Klebsiella michiganensis
  source 1..50: mol_type = genomic DNA
ttatttgccaaaatgaattttggcaagcccaagttcgaaaaggtgataat

SEQ ID NO: 13625 - DNA, 40 bp, Klebsiella michiganensis; identical to SEQ ID NO: 13585
  source 1..40: mol_type = genomic DNA

SEQ ID NO: 13626 - protein, 581 aa, Kosakonia radicincitans
MKKLYSYVRWSTDKQTGNTSLERQTEKAKQYAAIHGLEYVQLLDAGVSAFRAKNSTSGKLAGFISAVESGVIPSDSWLYVENLDRLSRADATTANELFLRLLRLGLTLVTGMDGKIFTRDSVNQNPTDLMLSILLFMRANEESLTKQKRAFETTLKLIERYRSGLPVNIKSAGSSPWWIDASGPNNEAVKPHPTHFKAAKEAVRLLLSGWGNYRVTNYLNDNSEIYPPPAGKKSKNERKEVRWTVPNIKKMRLNRALMGEKVLTLNNVTHHLESYFPPVCTAAEFARLQDVASNNKMPQGEQKQVITLLSGMGILRCSHCGGAMTSSSKQGKIRYMCESGKKRMSSCKAWSVSGALVERCLLQPLITGYISLVMDKQDSEQSISGLIDSKRSELEAIQLQIDNTTTAISMGGNLGSLVAMLQGFESRKSAILVDLDKLTQRELLQGSRDQQIEKIVDTMELITPELLEDTTDPDRLNIREVVRAVIACVTIGKGEDKALKLIFDVYDRQQFIYQGEIQTDNRGWIRRGYSIHIEDQSVEMHDGIEPALSSKLGELIKAQHDKVDEILSAFPPLKASWFVSK

SEQ ID NO: 13627 - DNA, 50 bp, Kosakonia radicincitans
  source 1..50: mol_type = genomic DNA
ttcttttcctaaatgaattttggcttgcccaagttcgaaaaggtgataat

SEQ ID NO: 13628 - DNA, 40 bp, Kosakonia radicincitans; identical to SEQ ID NO: 13583
  source 1..40: mol_type = genomic DNA

SEQ ID NO: 13629 - DNA, 50 bp, Kosakonia radicincitans
  source 1..50: mol_type = genomic DNA
ttcttttcctaaatgaattttggcaagcccaagttcgaaaaggtgataat

SEQ ID NO: 13630 - DNA, 40 bp, Kosakonia radicincitans; identical to SEQ ID NO: 13585
  source 1..40: mol_type = genomic DNA

SEQ ID NO: 13631 - protein, 581 aa, Klebsiella pneumoniae
MKKLYSYVRWSTDKQTGNTSLERQTEKAKQYAAIHGLEYVQLLDAGVSAFRAKNSTSGKLAGFISAVESGVIPSDSWLYVENLDRLSRADATTANELFLRLLRLGLTLVTGMDGKIFTRDGVNQNPTDLMLSILLFMRANEESLTKQKRAFETTLKLIERYRSGLPVNIKSAGSSPWWIDASGPNNEAVKPHSVHFKAAKEAVRLLLSGWGNYRVTNYLNDNSEIYPPPVGKKSKNQRKEVRWTVPNIKKMRLNSALMGEKVLTLNNVTHRLENYFPPVCTPAEFARLQDVASNNKMPQGEQKQVITLLSGMGILRCGHCGGAMTSFSKKGKIRYMCESGKKRMSSCKAWSVSGELVERCLLQPLITGYISLVMDKQDSEQSISGLIDSKRGELEAIQSQIDNTTTAISMGGNLDSLVAMLQGFESRKSAILVDLDKLTQRELLQGSRDQQIEKIVDTMELITPELLEDTTDPDRLNIREVVRAVIARVTIGKGEDKALKLIFDVYDRQQFIYQGEIQTDDRGWIRRGYSLHIEDQSVEMHDGIEPDLSSKLSELIKTQHDKVDEMLSAFPPLKASWFVSK

SEQ ID NO: 13632 - DNA, 50 bp, Klebsiella pneumoniae
  source 1..50: mol_type = genomic DNA
ttctttttctaaatgaattttggcttgcccaagttcgaaaaggtgataat

SEQ ID NO: 13633 - DNA, 40 bp, Klebsiella pneumoniae; identical to SEQ ID NO: 13583
  source 1..40: mol_type = genomic DNA

SEQ ID NO: 13634 - DNA, 50 bp, Klebsiella pneumoniae
  source 1..50: mol_type = genomic DNA
ttctttttctaaatgaattttggcaagcccaagttcgaaaaggtgataat

SEQ ID NO: 13635 - DNA, 40 bp, Klebsiella pneumoniae; identical to SEQ ID NO: 13585
  source 1..40: mol_type = genomic DNA

SEQ ID NO: 13636 - protein, 510 aa, Pseudomonas khazarica
MQYAQRWAADRGLTLDESLSLRDEGLSAYHQNHVKQGALGTFLRAVDEGRIPDGSVLIVEGLDRLSRAEPIQAQAQLAQIINAGITVVTASDGREYNRAGLKAQPMDLVYSLLVMIRAHEESDTKSKRVKAAIRRQCEGWVAGTYRGLIRNGQDPQWLRWDGQAWHLIPERVEAVRYAIELYKQGEGATRAVRKLAERGYDLGDWSISGQQIYRLVKLPALRGAKRISLDGEDYLLEGYYPPVLADVEYEALQAATETRHGRRGASDIVGIVTGIGITWCGYCGTALVAQNLVSRKRDDGSLADGHRRLHCTSYSNGAGCKSASCSVVPIEKALLSYCSDQMNLSRLLEPADDGHQVRQRLQACRRKEADIERQLQRITEALLADDQGAAPLAFVRKARELEADLQRIQAEVTQLEREQALVGQVQTPAGSELWRKLAVDGQDVHSSAREHLRQLVLDTFSRITVYTRGVVPDPKSKVIHLVLVSRSGQRVALDVDRRSGAWKAGRDRRG

SEQ ID NO: 13637 - DNA, 50 bp, Pseudomonas khazarica
  source 1..50: mol_type = genomic DNA
agtttactaaatgtgcctcatgggcaccctaaggaaataaaccctacact

SEQ ID NO: 13638 - DNA, 40 bp, Pseudomonas khazarica
  source 1..40: mol_type = genomic DNA
gtcgacggtcgccttggggcagccaagagagacgaaaccg

SEQ ID NO: 13639 - DNA, 50 bp, Pseudomonas khazarica
  source 1..50: mol_type = genomic DNA
agtttactaaatgtgcctcatggggcccctaaggaaataaaccctacact

SEQ ID NO: 13640 - DNA, 40 bp, Pseudomonas khazarica
  source 1..40: mol_type = genomic DNA
gtccacggtcggcttgggtgcgccaaaggaatccaaaccc

SEQ ID NO: 13641 - protein, 636 aa, Blautia sp
MECIILSVNDTYMDAQEVMHMTDYSKITALYSRLSVGDEDRDGGESNSIQNQKIFLENYARGQHLTNIRHYIDDDESGRFFDRSAYSRMMDDVENGKIGVCIMKDLTRWGRDYLQVGNAMEIFRRNNVRFIAVNNGIDSEKPDTLEFAPFINIMSEWYAKDISKKVKTGIKTKGMSGKPIVTEAPYGYVKDPDNKDFWIIDEEAAEVVRLIFRLFIGGKNRNQIAVHLKNEQIPTPTFYMKDRGRGTCKNKTLNEDNRCKWNKATLTNILTRQEYCGDVVNFKTTKHFRDKHNHYVDRSQWHITENVHEPIISRSDFETVQRILENAPVRRPNGDGEIHPLSGLLFCKDCGAKMHIRIDYRNGGKRHVAYCSEYHKGKAKNPKCHSPHIMDADLLMQTIAEVLKKIEDYSISNRAEFEALVKKNLAMQQTDQTKKQQKRIPQIMTRLEQIDKVLNKLYEDNALGTIPQDRYEQMSQKYSEEYYALKAELATLQEQLSAYENAGGRAQKFLKLTERHAAFTDLTPTILNEFISRIEVHERDQKRARYAIQHISIYFNYIGKFENEVTQLAEPTEQEIRQMREEIEEAKKEKSRAYHRQYSREYRARNLEKQREYDRMKAREYRARRKAQAAAAQPTQ

SEQ ID NO: 13642 - DNA, 50 bp, Blautia sp
  source 1..50: mol_type = genomic DNA
aaaagcacttgacaaaacgcttcatggagtgcataattttaagtgtaaat

SEQ ID NO: 13643 - DNA, 40 bp, Blautia sp
  source 1..40: mol_type = genomic DNA
agaatatggttctgccagatggggaaatgaaaaggatata

SEQ ID NO: 13644 - DNA, 50 bp, Blautia sp
  source 1..50: mol_type = genomic DNA
aaaagcacttgacaaaacgcttcaaagagtgcataattttaagtgtaaat

SEQ ID NO: 13645 - DNA, 40 bp, Blautia sp
  source 1..40: mol_type = genomic DNA
agaatattattcagccataaaaggaaatgaaatgctgata

SEQ ID NO: 13646 - protein, 525 aa, Mucilaginibacter rubeus
MIEISPFDTFAKGTITSNKVRGTNCVIYTRVSSREQADNLSLGTQLKGCNQYAERLKYKVLAQFGGTYESAENDERKEFIAMLAFVKKSKEKVSYILVYSLERFSRNDNSIWLSGELRKLGIEIVSVTQPIDTSSASGQMQQKMLFLFGEFDNQLRKQKCTAGIKEMLLRGDWPTAAPLGFDIVRSNGVRKIVVNHKGKLLREAFEMKAQYNLSNEAIRQKLNDKGLKLNHQRISEIFRNPFYCGLMAHNMLEGRVVEGNQEKLISKATFLKVNGILDQNAHGYSLKEENNAIPLKRFTKCAECGKPLTGYLMRKKNIHYYKCKTLGCNTNKNASSLNETFYKLLNNFTLNLDNDFLKLIRQQAIATFNQLFKGEEEAYVSLSNQYKELEKRIGRLEERYVEEEINSDLYNKFLEKYHQEKGELERKLLNASKKSSNLGNCIDISIEIASKMAEKWVLSDYVSKQQIQSLVFPEGITFSKKKEEVRTPRINSLFLYLTYLQQLISNKKSGIPELNLDFAAFACLV

SEQ ID NO: 13647 - DNA, 50 bp, Mucilaginibacter rubeus
  source 1..50: mol_type = genomic DNA
attttgccgctttcgcctgtttggtagccgaagctaaaagatttccaaac

SEQ ID NO: 13648 - DNA, 40 bp, Mucilaginibacter rubeus
  source 1..40: mol_type = genomic DNA
tagctgcttcatcttcaagtagcggggagcaggatcgaac

SEQ ID NO: 13649 - DNA, 50 bp, Mucilaginibacter rubeus
  source 1..50: mol_type = genomic DNA
attttgccgctttcgcctgtttgggagccgaagctaaaagatttccaaac

SEQ ID NO: 13650 - DNA, 40 bp, Mucilaginibacter rubeus
  source 1..40: mol_type = genomic DNA
tagttccttcatcttccaggagcggggagtagcagcagat

SEQ ID NO: 13651 - protein, 511 aa, Mycobacteroides abscessus
MIFHITRYPSIMRVLGRLRLSRSTDESTSIERQKEIIEQWALTHDHTIVGWAEDSDVSRSVDPFDTPELGKWLSDRAPEWDIVATWKLDRLATGSIYLNRLMHWCFEYEKVIISVTENFDLSTWVGRMIANVIAGVAEGELEAIKERQLSSRQKLRQSARWAGGKPPYGYVKVPHPSGTGWALSVDKQASTVIDRIVNDMIDGRPMGHIVRELNDEGYRPPAAYHETVKAGQPKLKWSPDEARTGKWKQTAMRNMLRNNALRGYVHHNNTTVRDDDGSPLRYSEPLIDSDRWELLQASLDQIQNACRNNRRPESSPLAGLVNCFECGGTLFHTRYNTRGHEYRYYRCDINKCTVHIPAGDVESMAEETFLEHVGDWEVQERVWVSGDSRETELREAVTAFDELSAAAGKAVSATAKQRLQKQLSALDVRIAELESSPSRESHWEYRSTGGTYREAWEAADEAGKRELLSKSGITFAMSITGIVGKRSKSNAGITRSKINVPPELEANMRRS

SEQ ID NO: 13652 - DNA, 50 bp, Mycobacteroides abscessus
  source 1..50: mol_type = genomic DNA
gttctgcggagcatgatgttcggttcatggaacatgatcttccacataac

SEQ ID NO: 13653 - DNA, 40 bp, Mycobacteroides abscessus
  source 1..40: mol_type = genomic DNA
attgggggcgatgcggggttcgtggaaaaggatgtgaaac

SEQ ID NO: 13654 - DNA, 50 bp, Mycobacteroides abscessus
  source 1..50: mol_type = genomic DNA
gttctgcggagcatgatgttcggtgaatggaacatgatcttccacataac

SEQ ID NO: 13655 - DNA, 40 bp, Mycobacteroides abscessus
  source 1..40: mol_type = genomic DNA
attgggggcggtgggtggtgacagggaaacgatttaaaac

SEQ ID NO: 13656 - protein, 513 aa, Mycobacteroides abscessus
MIFHITRYPSIMRVLGRLRLSRSTDESTSIERQKEIIEQWALTHDHTIVGWAEDSDVSRSVDPFDTPELGKWLSDRAPEWDIVATWKLDRLATGSIYLNRLMHWCFEYEKVIISVTENFDLSTWVGRMIANVIAGVAEGELEAIKERQLSSRQKLRESARWAGGKPPYGYVKVPHPSGTGWALSVDKQASTVIDRIVNDMIDGRPMGHIVRELNDEGYRPPAAYHETVKAGQPKLKWSPDEARTGKWKQTAMRNMLRNNALRGYVHHNNTTVRDDDGSPLRYSEPLIDSDRWELLQASLDQIQNARRNNRRPESSPLAGLVNCFECGDTLFHTRYNTRGHEYRYYRCDINKCTVHIPAGDVESMAEETFLEHVGDWEVQERVWVSGDSRETELREAVTAFDELSAAAGKAVSATAKQRLQKQLSALDVRIAELESSPSRESHWEYRSTGGTYREAWEAADEAGKRELLSKSGITFAMSITGIVGKRSKSNAGITRSKINIPPELEANMRRSYA

SEQ ID NO: 13657 - DNA, 50 bp, Mycobacteroides abscessus; identical to SEQ ID NO: 13652
  source 1..50: mol_type = genomic DNA

SEQ ID NO: 13658 - DNA, 40 bp, Mycobacteroides abscessus
  source 1..40: mol_type = genomic DNA
attgggggcgatgcgaggttcgtggaaaaggatgtgaaac

SEQ ID NO: 13659 - DNA, 50 bp, Mycobacteroides abscessus; identical to SEQ ID NO: 13654
  source 1..50: mol_type = genomic DNA

SEQ ID NO: 13660 - DNA, 40 bp, Mycobacteroides abscessus; identical to SEQ ID NO: 13655
  source 1..40: mol_type = genomic DNA

SEQ ID NO: 13661 - protein, 643 aa, Blautia obeum
MNAGYVRLSRDDDKRNYVSIENQKLIINQYAAAHGVVIDRWYEDDGISGYIFDRPGFQQMMMDMDKDIDTVYVKDFSRLGRHNAKVLLLLDEFQERGKHLVVIDDNYDSMDSSDDTIGIKTWFNERYVKDTSKKIKRAIGARQKEGTLITRAPFGYRRNEKDKTVLEIVPKEAEYIKKIYDLYLSGSGYRKIATYLTEQGAPTPSMIQREREIEEGRLSKRQIASKWSDAMVKEILDNDFYIGTFRLKKRARNTVHGKDKRVPKEEQCIFENHHPAIIDKATFALVQELKEKRNRTNYRGSRGQWLGSEIPNPFGSCLFCKDCGSRLTPIKRQTSSKERKYYICTTYNTKGRRYCSKAHLIEEDDLMEDVLTYIKMCRNALCEVISTYDLKDFEAEKKTIAEKRQELHTAINERKSQLKVLLTQKVKDLAVAAGNEDLINETYDSMQKDLFAQIHGLEMQIKELNETAIETPDVKDKLKNALEVVDKIIAGGSLDRRDIELLIEKIVVDEDGMPEITLKYGLSNLISYSPADEMNRRENTMIAIVMKLIAEDERGFSSAKYLSEHITDLGFKKTKQSILTYIELMKELGILEATDNPLKPYNIVKSKEEITQLTKDYLPNVSAETTAKQLADDYLHGISDDRW

SEQ ID NO: 13662 - DNA, 50 bp, Blautia obeum
  source 1..50: mol_type = genomic DNA
atttacatggcattagtgacgacaggtggcgtacatacatcaatgtaaat

SEQ ID NO: 13663 - DNA, 40 bp, Blautia obeum
  source 1..40: mol_type = genomic DNA
agttcttggcgggcgtaaaggtggcatgcctgaaatggtg

SEQ ID NO: 13664 - DNA, 50 bp, Blautia obeum
  source 1..50: mol_type = genomic DNA
atttacatggcattagtgacgacagctggcgtacatacatcaatgtaaat

SEQ ID NO: 13665 - DNA, 40 bp, Blautia obeum
  source 1..40: mol_type = genomic DNA
tgttctgggcgggcttacagctgacatgccaggaataggg

SEQ ID NO: 13666 - protein, 643 aa, Blautia obeum
MNAGYVRLSRDDDKRNYVSIENQKLIINQYAAAHGVVIDRWYEDDGISGYIFDRPGFQQMMMDMDKDIDTVYVKDFSRLGRHNAKVLLLLDEFQERGKHLVVIDDNYDSMDSSDDTIGIKTWFNERYVKDTSKKIKRAIGARQKEGTLITRAPFGYRRNEKDKTVLEIVPKEAEYIKKIYDLYLSGSGYRKIATYLTEQGAPTPSMIQREREIEEGRLSKRQIASKWSDAMVKEILDNDFYIGTFRLKKRARNTVHGKDKRVPKEEQCIFENHHPAIIDKATFALVQELKEKRNRTNYRGSRGQWLGSEIPNPFGSCLFCKDCGSRLTPIKRQTSSKERKYYICTTYNTKGRRYCSKAHLIEEDDLMEDVLTYIKMCRNALCEVISTYDLKDFEAEKKTIAEKRQELHTAINERKSQLKVLLTQKVKDLAVAAGNEDLINETYDSMQKDLFAQIHGLEMQIKELNETAIETPDVKDKLKNALEVVDKIIAGGSLDRRDIELLIEKIVVDEDGMPEITLKYGLSNLISYSPADEMNRRENTMIAIVMKLIAEDERGFSSAKYLSEHITDLGFKKTKQSILPYIELMKELGILEATDNPLKPYNIVKSKEEITQLTKDYLPNVSAETTAKQLADDYLHGISDDRW

SEQ ID NO: 13667 - DNA, 50 bp, Blautia obeum
  source 1..50: mol_type = genomic DNA
atttacatggtattagtgacgacaggtggcgtacatacatcaatgtaaat

SEQ ID NO: 13668 - DNA, 40 bp, Blautia obeum; identical to SEQ ID NO: 13663
  source 1..40: mol_type = genomic DNA

SEQ ID NO: 13669 - DNA, 50 bp, Blautia obeum
  source 1..50: mol_type = genomic DNA
atttacatggtattagtgacgacagctggcgtacatacatcaatgtaaat

SEQ ID NO: 13670 - DNA, 40 bp, Blautia obeum; identical to SEQ ID NO: 13665
  source 1..40: mol_type = genomic DNA

SEQ ID NO: 13671 - protein, 521 aa, Lachnospiraceae bacterium UBA1818
MEGNYCAYLRKSRKDLEAEARGEGETLARHEHILLDLAHRLNISLEAIYKEVVSGETISARPVVQQVLREVEEGVWTGVLVVEIERLARGDTRDQGYVAEAFTYSNTKIITPLKIYDPSDPADQEYFEFNLFMSRREYKTINRRLETGRHQSFLEGKFLGNVAPYGWERYKLERQKGFSLRPHPQEGKYLVMMYNLIAYGSDGTPLGPDQVASLLNDMGVPSRTGSGWTGITIRGIIENEHNIGLVRRGYRKTVKKMQNGHIVKLRPHQKSYELAEGLHDGQVSEEVFRLANENIHSPAPPVNRDYTVKNPLAGLVICSCCGHAMRRRPTHVKAAYDFLYCPYGCKTIGAPLYLVENAVLDMLKGWTEKYQLQRTSHDDRGSRDLIQAKQLILSEKEDDLAKLKKQRGSLYDLLEQGVYSTEVFLTRQKDLSEREKTLMEELSRLQDEIEYERKLESERVNFIPKCKKLIDNYEFLSVQEKNRFLKELIDRIVYTKTERNQRGKGGTANFTLEIYPRVPRS

SEQ ID NO: 13672 - DNA, 50 bp, Lachnospiraceae bacterium UBA1818
  source 1..50: mol_type = genomic DNA
catgtacagcctggatgggcggaagaagcggcccattgaggctatacata

SEQ ID NO: 13673 - DNA, 40 bp, Lachnospiraceae bacterium UBA1818
  source 1..40: mol_type = genomic DNA
cacggatatcgggacagaagaacttgctcatatggagatg

SEQ ID NO: 13674 - DNA, 50 bp, Lachnospiraceae bacterium UBA1818
  source 1..50: mol_type = genomic DNA
catgtacagcctggatgggcggaaaaagcggcccattgaggctatacata

SEQ ID NO: 13675 - DNA, 40 bp, Lachnospiraceae bacterium UBA1818
  source 1..40: mol_type = genomic DNA
ctcgtatgtgggaactgaaaaagttgatcatatggagttg

SEQ ID NO: 13676 - protein, 541 aa, Faecalicatena orotica
MRIYIYSRKSVYTGKGESVENQIEMCREYISTKIPESDNAEIVVYEDEGFSAKNTDRPQFQQMLRDIRLNKPEYVVCYRLDRISRNVSDFSSLIEDLNSYNISFICIKEEFDTSKPMGKAMMYIASVFAQLERETIAERVRDNMLMLARTGRWLGGTTPTGFTSEKIQEIIIDGKIKTSCKLKDNPEELKAIDCILEKFLEFRSISGVSKYLIKQGIKSRTGKMFSLLGIKEILQNPVYCIADEDAWEYFTEHHSDVCFEKTECSNKYGLLAYNKRDYRKKSAPRQDMDKWIVAIGKHKGRISGKKWVAIQNILKDNIPTGKKPAVMHNDYSLLSGLIFCDKCQSRMFAKQRSGKGGNHELYDYICNNKLRGGLDLCDCQNLNGQQADDIVCEYLMQYTDENSGIYKLLEKLKRDLQGQTQKSPVAVIDDKIKKCNSEIDNLINTLSHGNLGAAFIERVNSRITELDKELASMKEEKARLQKDVNIIADREIQVDMLSTALSSFKDNFHTLTIEEKRTLIKLMVKKIVWDGKDLHIFIDGE

SEQ ID NO: 13677 - DNA, 50 bp, Faecalicatena orotica; identical to SEQ ID NO: 1642
  source 1..50: mol_type = genomic DNA

SEQ ID NO: 13678 - DNA, 40 bp, Faecalicatena orotica
  source 1..40: mol_type = genomic DNA
tgtgccgtgcaacgggagatttccgaccctgattgcgatc

SEQ ID NO: 13679 - DNA, 50 bp, Faecalicatena orotica
  source 1..50: mol_type = genomic DNA
agttgccgtttggatggtggcgcaagtccaccaccatacaaagggaaaca

SEQ ID NO: 13680 - DNA, 40 bp, Faecalicatena orotica
  source 1..40: mol_type = genomic DNA
tgagccttgcacggggagaaggtggcccctgattgccatc

SEQ ID NO: 13681 - protein, 506 aa, Blautia wexlerae
MERYLMYLRKSRMDTDFDEISVEETLNRHRRILESFCKERRLNVVDVLEEVVSGESLSSRPKMLRLLELVNTGMYAGVICIDIERLSRGSSLESGYIMQVLQTNNCKIITPSKIYDLQNESDEQFTDMKFMFSRYELKTITKRLVRGRNQSASEGKFLGSVAPYGYRAYKLVGMKGNSLRIEPKEAKVVRMIFDMYGKQGIGYNTIAHELNQMNIPSLTGTWGQTSITNILNNEVYLGMIRWKHEPTKRVVKDGMLTKKRVTSKDYELYEGLHEPIIDQEQWDRVKAVQSSRNHASVHKDKKLMNPFATILFCEKCGAVMKRNVPAKTQNTSPWYRCPTRGCNCRTIKCDFLEAEVVKAMSQWWGEYTIKIKEDKVAQTDSTETALSIVREQLTELQLQQDKICEYLEKGIYTIEMFTKRNDTLTREIHKVQAAENELLKKQGAQKDIHDVEKEIIPTTQHILDSYPQLSVEEKNRLWKIVMERITAYRTPGGEVSIHIYPKLPMR

SEQ ID NO: 13682 - DNA, 50 bp, Blautia wexlerae
  source 1..50: mol_type = genomic DNA
atatgtgctggtctgttggcccatgtatgagccgacagacggtaacaacc

SEQ ID NO: 13683 - DNA, 40 bp, Blautia wexlerae
  source 1..40: mol_type = genomic DNA
cattggtatccttgcccacgtagatgcaggtaagactacg

SEQ ID NO: 13684 - DNA, 50 bp, Blautia wexlerae
  source 1..50: mol_type = genomic DNA
atatgtgctggtctgttggcccattcatgagccgacagacggtaacaacc

SEQ ID NO: 13685 - DNA, 40 bp, Blautia wexlerae
  source 1..40: mol_type = genomic DNA
cagtggtctcctgggcaactcagaagcaggtgagagtaag

SEQ ID NO: 13686 - protein, 449 aa, Blautia wexlerae
MERYLMYLRKSRMDTDFDEISVEETLNRHRRILESFCKERRLNVVDVLEEVVSGESLSSRPKMLRLLELVNTGMYAGVICIDIERLSRGSSLESGYIMQVLQTNNCKIITPSKIYDLQNESDEQFTDMKFMFSRYELKTITKRLVRGRNQSASEGKFLGSVAPYGYRAYKLVGMKGNSLRIEPKEAKVVRMIFDMYGKQGIGYNTIAHELNQMNIPSLTGTWGQTSITNILNNEVYLGMIRWKHEPTKRVVKDGMLTKKRVTSKDYELYEGLHEPIIDQEQWDRVKAVQSSRNHASVHKDKKLMNPFATILFCEKCGAVMKRNVPAKTQNTSPWYRCPTRGCNCRTIKCDFLEAEVVKAMSQWWGEYTIKIKEDKVAQTDSTETALSIVREQLTELQLQQDKICEYLEKGIYTIEMFTKRNDTLTREIHKVQAAENELLKKQGGSKRYS

SEQ ID NO: 13687 - DNA, 50 bp, Blautia wexlerae; identical to SEQ ID NO: 13682
  source 1..50: mol_type = genomic DNA

SEQ ID NO: 13688 - DNA, 40 bp, Blautia wexlerae; identical to SEQ ID NO: 13683
  source 1..40: mol_type = genomic DNA

SEQ ID NO: 13689 - DNA, 50 bp, Blautia wexlerae; identical to SEQ ID NO: 13684
  source 1..50: mol_type = genomic DNA

SEQ ID NO: 13690 - DNA, 40 bp, Blautia wexlerae; identical to SEQ ID NO: 13685
  source 1..40: mol_type = genomic DNA

SEQ ID NO: 13691 - protein, 616 aa, Blautia obeum
MTDYSKITALYSRLSVGDEDRDGGESNSIQNQKIFLENYARGQHLTNIRHYIDDDESGRFFDRSAYSRMMDDVENGKIGVCIMKDLTRWGRDYLQVGNAMEIFRRNNVRFIAVNNGIDSEKPDTLEFAPFINIMSEWYAKDISKKVKTGIKTKGMSGKPIVTEAPYGYVKDPDNKDFWIIDEEAAEVVRLIFRLFIGGKNRNQIAVHLKNEQIPTPTFYMKDRGRGTCKNKTLNEDNRCKWNKATLTNILTRQEYCGDVVNFKTTKHFRDKHNHYVDRSQWHITENVHEPIISRSDFETVQRILENAPVKRPNGDGEIHPLSGLLFCKDCGAKMHIRIDYRNGGKRHVAYCSEYHKGKAKNPKCSSPHIMDADLLMQTIAEVLKKIEDYSISNRAEFEALVKKNLAMQQTDQTKKQQKRIPQITTRLEQIDKVLNKLYEDNALGTIPQDRYEQMSQKYSEEYYSLKAELEQLREQLSAYENAGGRAQKFLKLTERHAAFTDLTPAILNEFISRIEVHERDQKRARYAIQHISIYFNYIGKFENEVTQLAEPTEQEIRQMREEIEEAKKEKSRAYHRQYSREYRARNLEKQREYDRIKAREYRARRKAQAAAAQSTQ

SEQ ID NO: 13692 - DNA, 50 bp, Blautia obeum; identical to SEQ ID NO: 13642
  source 1..50: mol_type = genomic DNA

SEQ ID NO: 13693 - DNA, 40 bp, Blautia obeum
  source 1..40: mol_type = genomic DNA
ggagtatggttcggcaagatgggggacggcaaaagacatt

SEQ ID NO: 13694 - DNA, 50 bp, Blautia obeum
  source 1..50: mol_type = genomic DNA
aaaagcacttgacaaaacgcttcaaggagtgcataattttaagtgtaaat

SEQ ID NO: 13695 - DNA, 40 bp, Blautia obeum
  source 1..40: mol_type = genomic DNA
agagtagggttcgggaagaaggggggtggcctgaggcatt

SEQ ID NO: 13696 - protein, 489 aa, Enterocloster asparagiformis
MPQVTIGAAYIRVSTDDQTELSPDAQLRVILERSKSDGVTIPPEFIFIEKKGISGRKAENRPEFQRMIAIAKSQKPSPFRRLYLWKFSRFARNQEESAFYKGILRKKCSVEVVSVSEPIMEGMFGRLIEMIIEWFDEYYSVNLSGEVLRGMKEKALRQGYQLRPCLGYDAAGGGKPYTINESEYAVAERIFREYYNGLDLTGVARRMNALGFRTKTGKRFDRRSVERILKNRFYLGEVIWNGITFTGAHEARPSITSIFEPVQNRLESEYRPLGRREVSANAHWLSGLLRCSVCGGNLGYNRSNNPKRRPDFFQCWKYAKGVHPESCAITARRAEAAVIESLRQVISTGKVEYEYIPRREERGHSGQSPHDEESGLRDALARLSMKETRVRDAYENGIDTLEEYRENRRRLSAERDELTQALDLLHKAAAPPENIPDSREVIRRIQTVYDLLISPDVDFAIKGNALRSVVKYIEFDRKNDRISMRYYIS

SEQ ID NO: 13697 - DNA, 50 bp, Enterocloster asparagiformis
  source 1..50: mol_type = genomic DNA
tatcatgagttattgctatacgggggaccgaaagggaaatacttataggg

SEQ ID NO: 13698 - DNA, 40 bp, Enterocloster asparagiformis
  source 1..40: mol_type = genomic DNA
tattatgagtcagtatgggggaccggacggcgaaatgggc

SEQ ID NO: 13699 - DNA, 50 bp, Enterocloster asparagiformis
  source 1..50: mol_type = genomic DNA
tatcatgagttattgctatacgggcaaccgaaagggaaatacttataggg

SEQ ID NO: 13700 - DNA, 40 bp, Enterocloster asparagiformis
  source 1..40: mol_type = genomic DNA
tattatgaggcggtgtaggcaagcggagggaggaaggggc

SEQ ID NO: 13701 - protein, 533 aa, Clostridioides difficile; identical to SEQ ID NO: 12191

SEQ ID NO: 13702 - DNA, 50 bp, Clostridioides difficile; identical to SEQ ID NO: 12192
  source 1..50: mol_type = genomic DNA

SEQ ID NO: 13703 - DNA, 40 bp, Clostridioides difficile
  source 1..40: mol_type = genomic DNA
attgatacatccatttcaagatggtaatggtcgcataggt

SEQ ID NO: 13704 - DNA, 50 bp, Clostridioides difficile; identical to SEQ ID NO: 12192
  source 1..50: mol_type = genomic DNA

SEQ ID NO: 13705 - DNA, 40 bp, Clostridioides difficile
  source 1..40: mol_type = genomic DNA
attcccacatccttttcatgatggaaatggtcccatctgt

SEQ ID NO: 13706 - protein, 533 aa, Clostridioides difficile; identical to SEQ ID NO: 12191

SEQ ID NO: 13707 - DNA, 50 bp, Clostridioides difficile; identical to SEQ ID NO: 12192
  source 1..50: mol_type = genomic DNA

SEQ ID NO: 13708 - DNA, 40 bp, Clostridioides difficile
  source 1..40: mol_type = genomic DNA
attgatacatccatttcaagatggtaatggtcacataggt

SEQ ID NO: 13709 - DNA, 50 bp, Clostridioides difficile; identical to SEQ ID NO: 12192
  source 1..50: mol_type = genomic DNA

SEQ ID NO: 13710 - DNA, 40 bp, Clostridioides difficile; identical to SEQ ID NO: 13705
  source 1..40: mol_type = genomic DNA

SEQ ID NO: 13711 - protein, 463 aa, Clostridioides difficile
MFEDIEAGKVNVVLVKDMSRLGRNNALFMYYVEEVFPDLDVRFIAINDMVDTAQDDNEIMPFKSVLNEYYARDISKKIRSSIRTTALTGGFTGAFAPYGYLVDPENKKKLIVDPETAPIVKRIFELSQQGTSTHQIARILCKDGILVPRAYRAKKKGILEQSKGFTFPTDWVGKNVKMILENQVYLGHMVSHKSQTKSFKNKKIVPVPKEDWIVVENTHEAIIDKETFEIVQKFISVKKQPNKTGKPNIFVGLVKCPDCGRNLAYSNPNGNEPRFRCRTYARNTELCTTHAISYKALYEIVQNDIKNHVNSMEELGDHFIKEMRELSETSGSQKIHQFNQELVSLEKRIDEIDSIFTKLIEQNALGKITDERFSKMSMNYETEQAEVVQSYRELKSKIKSEEEKVQGTDRFLETISKYKDVTELNRSMLCELIDSIYVYQAEGIGKERTQKVEINYRFLAVSH

SEQ ID NO: 13712 - DNA, 50 bp, Clostridioides difficile; identical to SEQ ID NO: 12192
  source 1..50: mol_type = genomic DNA

SEQ ID NO: 13713 - DNA, 40 bp, Clostridioides difficile; identical to SEQ ID NO: 13703
  source 1..40: mol_type = genomic DNA

SEQ ID NO: 13714 - DNA, 50 bp, Clostridioides difficile; identical to SEQ ID NO: 12192
  source 1..50: mol_type = genomic DNA

SEQ ID NO: 13715 - DNA, 40 bp, Clostridioides difficile; identical to SEQ ID NO: 13705
  source 1..40: mol_type = genomic DNA

SEQ ID NO: 13716 - protein, 533 aa, Clostridioides difficile
MLKQQANNKEKVALYSRLSRYDGLDKESNSIANQREMLKRYAKENKFYVYDEYIDDGFSGTTFNRPALNRMFEDIEAGKVNVVLVKDMSRLGRNNALFMYYVEEVFPDLDVRFIAINDMVDTAQDDNEIMPFKSVLNEYYARDISKKIRSSIRTTALTGGFTGAFAPYGYLVDPENKKKLIVDPETAPIVKRIFELSQQGTSTHQIARILCKDGILVPRAYRAKKKGILEQSKGFTFPTDWVGKNVKMILENQVYLGHMVSHKSQTKSFKNKKIVPVPKEDWIVVENTHEAIIDKETFEIVQKFISVKKQPNKTGKPNIFVGLVKCPDCGRNLAYSNPNGNEPRFRCRTYARNTELCTTHAISYKALYEIVQNDIKNHVNSMEELGDHFIKEMRELSETSGSQKIHQFNQELVSLEKRIDEIDSIFTKLIEQNALGKITDERFSKMSMNYETEQAEVVQSYRELKSKIKSEEEKVQGTDRFLETISKYKDVTELNRSMLCELIDSIYVYQAEGIGKERTQKVEINYRFLAVSH

SEQ ID NO: 13717 - DNA, 50 bp, Clostridioides difficile; identical to SEQ ID NO: 12192
  source 1..50: mol_type = genomic DNA

SEQ ID NO: 13718 - DNA, 40 bp, Clostridioides difficile; identical to SEQ ID NO: 13703
  source 1..40: mol_type = genomic DNA

SEQ ID NO: 13719 - DNA, 50 bp, Clostridioides difficile; identical to SEQ ID NO: 12192
  source 1..50: mol_type = genomic DNA

SEQ ID NO: 13720 - DNA, 40 bp, Clostridioides difficile; identical to SEQ ID NO: 13705
  source 1..40: mol_type = genomic DNA

SEQ ID NO: 13721 - protein, 543 aa, Clostridioides difficile
MFVCCGKELTLLKQQANNKEKVALYSRLSRDDGLDKESNSIANQREMLKRYAKENKFYVYDEYIDDGFSGTTFNRPALNRMFEDIEAGKVNVVLVKDMSRLGRNNALFMYYVEEVFPDLDVRFIAINDMVDTAQDDNEIMPFKSVLNEYYARDISKKIRSSIRTTALTGGFTGAFAPYGYLVDPENKKKLIVDPETAPIVKRIFELSQQGTSTHQIARILCKDGILVPRAYRAKKKGILEQSKGFTFPTDWVGKNVKMILENQVYLGHMVSHKSQTKSFKNKKIVPVPKEDWIVVENTHEAIIDKETFEIVQKFISVKKQPNKTGKPNIFVGLVKCPDCGRNLAYSNPNGNEPRFRCRTYARNTELCTTHAISYKALYEIVQNDIKNHVNSMEELGDHFIKEMRELSETSGSQKIHQFNQELVSLEKRIDEIDSIFTKLIEQNALGKITDERFSKMSMNYETEQAEVVQSYRELKSKIKSEEEKVQGTDRFLETISKYKDVTELNRSMLCELIDSIYVYQAEGIGKERTQKVEINYRFLAVSH

SEQ ID NO: 13722 - DNA, 50 bp, Clostridioides difficile; identical to SEQ ID NO: 12192
  source 1..50: mol_type = genomic DNA

SEQ ID NO: 13723 - DNA, 40 bp, Clostridioides difficile; identical to SEQ ID NO: 13703
  source 1..40: mol_type = genomic DNA

SEQ ID NO: 13724 - DNA, 50 bp, Clostridioides difficile; identical to SEQ ID NO: 12192
  source 1..50: mol_type = genomic DNA

SEQ ID NO: 13725 - DNA, 40 bp, Clostridioides difficile; identical to SEQ ID NO: 13705
  source 1..40: mol_type = genomic DNA

SEQ ID NO: 13726 - protein, 537 aa, Clostridioides difficile
MLKQQTRLRVRLYARLSKDDGDADKESNSIKNQLQMLRYNAKEKGFIVVGEYVDDGYSGTTFNRPDLNRMIKDAMEDTEPSGIMVKDMSRFGRNNAMFMYYVEEIFPNNDILFIALNDDVDTRFDENEMMPFKSIMNEYYARDTSKKIRSVKKTTALNGGFCGSFAPYGYRLDPQNKQKLLIDEETALIVKRIFELSKQGNGIHQIARILCEDGILIPRAYRAMKNGTLETSTGFKFPTDWVAKNVKMILENQVYLGHMVSHKTQTKSFKNRKLVPVPKEDWIIVKNTHEPIIDEDTFELVQKFISVKKQPNKTRKPNMFVGLVKCPDCGRNMALSGRADSSRWLRCRTYTRNTNLCTSHSISYNALQQIVMNDIQKHIKNMEALGDQFLEEMKELSEKGGNEKIQHLKQSLEVAEKRIEEIDNVIMKLFEQNALGKISDERFEKMSISYENEQSELKLKRNDLKDKIESEEKKTQSTNQFLETIRKYENVTELNRAMLVELIDSIYVYQAEGTGQEKTQKVEINYRFLAGSQCGIA

SEQ ID NO: 13727 - DNA, 50 bp, Clostridioides difficile
  source 1..50: mol_type = genomic DNA
caggttctcaatgtggtattgcatgatggtaatgtaacattgagatattg

SEQ ID NO: 13728 - DNA, 40 bp, Clostridioides difficile; identical to SEQ ID NO: 13708
  source 1..40: mol_type = genomic DNA

SEQ ID NO: 13729 - DNA, 50 bp, Clostridioides difficile; identical to SEQ ID NO: 13727
  source 1..50: mol_type = genomic DNA

SEQ ID NO: 13730 - DNA, 40 bp, Clostridioides difficile; identical to SEQ ID NO: 13705
  source 1..40: mol_type = genomic DNA

SEQ ID NO: 13731 - protein, 537 aa, Clostridioides difficile
MLKQQTRLRVRLYARLSKDDGDADKESNSIKNQLQMLRYNAKEKGFIVVGEYVDDGYSGTTFNRPDLNRMIKDAMEDTEPSGIMVKDMSRFGRNNAMFMYYVEEIFPNNDILFIALNDDVDTRFDENEMMPFKSIMNEYYARDTSKKIRSVKKTTALNGGFCGSFAPYGYRLDPQNKQKLLIDEETAPIVKRIFELSKQGNGIHQIARILCEDGILIPRAYRAMKNGTLETSTGFKFPTDWVAKNVKMILENQVYLGHMVSHKTQTKSFKNRKLVPVPKEDWIIVKNTHEPIIDEDTFELVQKFISVKKQPNKTRKPNMFVGLVKCPDCGRNMALSGRADSSRWLRCRTYTRNTNLCTSHSISYNALQQIVMNDIQKHIKNMEALGDQFLEEMKELSEKGGNEKIQHLKQSLEVAEKRIEEIDNVIMKLFEQNALGKISDERFEKMSISYENEQSELKLKRNDLKDKIESEEKKTQSTNQFLETIRKYENVTELNRAMLVELIDSIYVYQAEGTGQEKTQKVEINYRFLAGSQCGIA

SEQ ID NO: 13732 - DNA, 50 bp, Clostridioides difficile; identical to SEQ ID NO: 13727
  source 1..50: mol_type = genomic DNA

SEQ ID NO: 13733 - DNA, 40 bp, Clostridioides difficile; identical to SEQ ID NO: 13708
  source 1..40: mol_type = genomic DNA

SEQ ID NO: 13734 - DNA, 50 bp, Clostridioides difficile; identical to SEQ ID NO: 13727
  source 1..50: mol_type = genomic DNA

SEQ ID NO: 13735 - DNA, 40 bp, Clostridioides difficile; identical to SEQ ID NO: 13705
  source 1..40: mol_type = genomic DNA

SEQ ID NO: 13736 - protein, 496 aa, Acidaminococcus intestini
MQKKIIEDKGKAVIYARYSSDRQREESIEGQLRVCEDYAKRNGMTILHVYADRALSGRSDQRPEFQMMIQAAATQAFDTVLVYKLNRFARNRYDSAKYKHKLKKYGVKVVSAMENIANDPSGILLESVIEGMAEYYSAELAENVMRGMTENALECKWPGGTVPLGYKLDAAHHLIIDEPAAKTVRWIYQMALEGRQPSSIIRELNAAGCRTAFGRPFGRTSLNTILKNERYIGAFVWNDIKKPNAIPAIVNPEDWQKVQEITKAKKKCIAKSRGENYLLTGRLFCGQCGGSMVGTAGTSKMQRVYHYYDCGNHLKKKGCTTKAIRADKLEDIICNTTTQLLSNQEAISAIAKQAISAQKEQGPSLVLQSLQNQRTEISRKLQNCIKAVEKGLISQTVTNHIQDYEKQLQTLNDDIRKEELMNQVPRLTEKHIEFFFWSISQQIKKADKYKSILLSSLVRSVIIYGDFIEIQYNYKKELPILQNPVKIKSSYLNKMV

SEQ ID NO: 13737 - DNA, 50 bp, Acidaminococcus intestini
  source 1..50: mol_type = genomic DNA
ataaagagttcttatttgaacaaaatggtgaacttacccataccacatac

SEQ ID NO: 13738 - DNA, 40 bp, Acidaminococcus intestini
  source 1..40: mol_type = genomic DNA
tagggagcttacagttgaagtggtgatccacccgggattc

SEQ ID NO: 13739 - DNA, 50 bp, Acidaminococcus intestini
  source 1..50: mol_type = genomic DNA
ataaagagttcttatttgaacaaaaaggtgaacttacccataccacatac

SEQ ID NO: 13740 - DNA, 40 bp, Acidaminococcus intestini
  source 1..40: mol_type = genomic DNA
tatttagattagagctgaaaaggtgacccaccagggtttc

SEQ ID NO: 13741 - protein, 550 aa, Gardnerella vaginalis; identical to SEQ ID NO: 446

SEQ ID NO: 13742 - DNA, 50 bp, Gardnerella vaginalis; identical to SEQ ID NO: 447
  source 1..50: mol_type = genomic DNA

SEQ ID NO: 13743 - DNA, 40 bp, Gardnerella vaginalis
  source 1..40: mol_type = genomic DNA
acagtataagaatgcaaataatgtagggaactttttttac

SEQ ID NO: 13744 - DNA, 50 bp, Gardnerella vaginalis
  source 1..50: mol_type = genomic DNA
ttaaatccctaagtgaacgccccttaaggagtgttcagtaagggattaaa

SEQ ID NO: 13745 - DNA, 40 bp, Gardnerella vaginalis
  source 1..40: mol_type = genomic DNA
acagtataaaaatgcaaactatataaataacttttgataa

SEQ ID NO: 13746 - protein, 544 aa, Spongiibacter marinus
MTRSQANIGIYARYSTDMQSQASIEDQVRLCTERAEREGWTIVQIYTDHGLSGASMMRPGIQALMQDAQSGKFDIVLAEALDRLSRDQEDIAGIHKRLSFANVQMVTLSEGEISHLHIGLKGTMNALFLKDLADKTRRGLRGRVEAGKSGGGKSYGYDVVRKFDGNGEPIKGDREINQDQAETINQIFRDYAAGISPKAIAKSLNERGIPGPSGKGWTQSTINGNRDRGTGILNNELYIGRLVWNRQRFIKDPDTGKRVPRLNPESEWIIQDVPELAIVDQELWQAAKVRQQKLTKARKKNDALWDCRRPKYLFSGLMKCGECGGGFSKISSEHFGCSTARNKGTCSNRRSIRRNLLEDTVLNGLRHHLMDPELAAVFAEEYTRHMNKLRMGRNAAIKTHKEELDRNNKELDKLIDAICNGVPAARVKDRMWELENRNEELKGLLETTVEEPVYIHPNMGKRYREQIEKLVAVLNEDDKRAEAAEIIRGLVDKIVLSPDTTAKKGLKIDLHGALAGILSLGKACKNSKDISSSELQQVVLVAGA

SEQ ID NO: 13747 - DNA, 50 bp, Spongiibacter marinus
  source 1..50: mol_type = genomic DNA
tcagcaagtagtgttggtagcgggggcaggcaaccgacactgcttgctgt

SEQ ID NO: 13748 - DNA, 40 bp, Spongiibacter marinus
  source 1..40: mol_type = genomic DNA
tttcttttttggtagcgggggctggattcgaaccaacgac

SEQ ID NO: 13749 - DNA, 50 bp, Spongiibacter marinus; identical to SEQ ID NO: 13747
  source 1..50: mol_type = genomic DNA

SEQ ID NO: 13750 - DNA, 40 bp, Spongiibacter marinus
  source 1..40: mol_type = genomic DNA
ttttttttttgatagcagaggatggttttgatccatcgac

SEQ ID NO: 13751 - protein, 628 aa, Coprococcus comes
MRKNEKITALYERLSRDDFGKDDDQQRESNSISNQKAMLEEFAARQGFTNIVHFTDDGISGTCFDRPGFLAMMKEVEAGNVEYLCIKDMSRMGRDYLKVGQIMEILRQRGVRLIAINDGVDSARGDDDFTPFRNIMNEYYARDTSRKIRSTFQSKGKSGKHLTGTVIYGYLWNEARDQWLVDPEAADVVKRIFAMTIEGYGPYQIASKLKEEKVLIPSAYLAQHGEGVNKNKTFKDVYGWGSSTICNLLEKREYLGHTINFKTRKHFKDKKSHYVPEDEWTIFENTHEPIIDQQTFDLVQKIRGNVRRYPDGWGEAAPLTGLLYCADCGGKMYVHRTNNGKRISQYTCSQYTKVPCGTLCKTQHRINEDVVLSLVSEMLKAIAEYAKLDRAEFVRVVQEAQSSQQTTEVKKQRIRLAAAKQRISELEVLLCKIYEDNILGKLSDSRYATLDAQYAKEQSELTAEISALEKAVKSYETHEKNADRFIALIDKYENFDKLTIAMLNEFIEKILVHERDRKGSIQTTQEVEIYFNFVGRFVPPTFGEVELTPEELEEIRKREERKDRLHQNYLKRKASGAQKRYEDKIKGRKKAEIEAKKAAIRAEDIAKGVFVPVSSLPQREPMKGVQTA

SEQ ID NO: 13752 - DNA, 50 bp, Coprococcus comes
  source 1..50: mol_type = genomic DNA
aaaagtccttgatttttcgtctctggtgttgtatgctctaaaagacttct

SEQ ID NO: 13753 - DNA, 40 bp, Coprococcus comes
  source 1..40: mol_type = genomic DNA
aaaatacaaaatggcggctggcaaaactgccaaaagtatt

SEQ ID NO: 13754 - DNA, 50 bp, Coprococcus comes
  source 1..50: mol_type = genomic DNA
aaaagtccttgatttttcgtctctattgttgtatgctctaaaagacttct

SEQ ID NO: 13755 - DNA, 40 bp, Coprococcus comes
  source 1..40: mol_type = genomic DNA
aaaacagagaatggagactatcaacagtgccaaaagtgtg

SEQ ID NO: 13756 - protein, 564 aa, Streptococcus suis
MNRTLTISDYRQVDTSRLSDITVVYCRLSQDDGLDGDSNSIINQKNILFEVVTREKLPNPVLFVDDGFSGTNFDRPAISEALRLVENGQVSNFIVKDLSRLGRSYIKVGQLTEITFPSFDVRFIALNDGIDSNKPNETNSIFLPIKSLMDEMYAADTSKKIRAVFQAKAKSGVHVTTNPPYGYLKDPSNPKNWIIDPVASEVVKRIFQEAKSGKSANEIGRMLEVDRVEKPDAYRVKNGRKPLSGMKDSGYSPYYWSRETINRLLRREEYLGHTVNLRTRTKSYKDKRSIDLPREDWLIFKNTHEAIIDQETFDIVQKMRSHKRSNQRYKNRSGHENLFAGLVFCGTCGRKHYFCPQEKNGLNHDHYKCSGYGRPIDGCENPHYIQKSALVEIVSDKLRQTISEAQLNRENFLKKLEQQSQAQFSKDNKRQRQQLQKDEHRSKEIDRIIQQLYEDNLLGKISDERFMKLSQTYEEEQKQLQTSISDLTEKLAKQQEDSLNISKFMTRISKYTQVSELTVEMVNELIDKIVIHKPTGTKRNRIIQIDIYYNFIGKLNNEKASQAD

SEQ ID NO: 13757 - DNA, 50 bp, Streptococcus suis
  source 1..50: mol_type = genomic DNA
aaactgctaggtgtcagctcgggttagggtagcctgacattcagcagtct

SEQ ID NO: 13758 - DNA, 40 bp, Streptococcus suis
  source 1..40: mol_type = genomic DNA
taagaaaagtcccttgcattacgcgagggactttattttt

SEQ ID NO: 13759 - DNA, 50 bp, Streptococcus suis
  source 1..50: mol_type = genomic DNA
aaactgctaggtgtcagctcgggtctgggtagcctgacattcagcagtct

SEQ ID NO: 13760 - DNA, 40 bp, Streptococcus suis
  source 1..40: mol_type = genomic DNA
taagaaaagtcactttcacctctgaagtcactttatttat

SEQ ID NO: 13761 - protein, 596 aa, Klebsiella quasipneumoniae
MSKIIPHLYCRVSTSHQLQGSGMDDQSRVVTEYVKSKPEVFDVSKMTLLKDEGLSAYKGEHLQGDGALRGFVDDVESGVIPSGSALIVYSLDRLSRLNPWVGSHLISTLISKGIEIHSVSENSVLKSDDPIGSIISGIYLLRANNESVLKSERAKDGYKARLQKSILNKTILTKQMPRWLFDDNGSYGVKKDMKEAIDYIFDCYIDGLSSGHIAKELNTKGLKNNNTSWTGSYVAKLIRDRRLIGEHIRLSAQIKGVKREIIEKIPEFYPVVVDKDRFNLANNMLDNVAKNIRGRTRLTYGDTSVLKNLFSGVIKCGLCNGMTTVVKNSKPVKLPDGSRKYVAGTTFIRCRTKYEYKSCKQGDVKYETIEKAILEHLMGLDIPALLAKPVDNKLDIWKSELNLCISDRNDYKRLIDERKALGKRASVESLEALQEVTDRIEELTSLIESHVDEDFVPVFDAIDLERITDITNVKERGLIKKSINSLVEKITYKTVSGFVMLEFTYLYRSIKHVIIINKTESKVVVNFSVESRDDVVEFVCNQFMMRYYKYNNEFDVMGSSLIDYSHMVNFVDYLEDDVSRLAKEFLVKNMDRIVLL

SEQ ID NO: 13762 - DNA, 50 bp, Klebsiella quasipneumoniae
  source 1..50: mol_type = genomic DNA
tagtgttgatagctactacaaaccctgctattgtatgactatatacacta

SEQ ID NO: 13763 - DNA, 40 bp, Klebsiella quasipneumoniae
  source 1..40: mol_type = genomic DNA
ttagtgtaaagcataatgtctccgatctacacctgtgcaa

SEQ ID NO: 13764 - DNA, 50 bp, Klebsiella quasipneumoniae
  source 1..50: mol_type = genomic DNA
tagtgttgatagctactacaaacctagctattgtatgactatatacacta

SEQ ID NO: 13765 - DNA, 40 bp, Klebsiella quasipneumoniae
  source 1..40: mol_type = genomic DNA
ttagtgtacagtacaatgttaactatatgcacttgtgtaa

SEQ ID NO: 13766 - protein, 599 aa, Klebsiella quasipneumoniae
MKKIIPYGYLRVSSLEQVRSGGGLEAQNDAVRNYINERSDLFDTDRTVMISDAGLSAFSGQQLSEGQLGVFLSDVETGKVPTGSALVCFSIDRLSRQNPWIGTKLISTLIGAGIQIHSVAERQVLKSDDPVGVIMSTIYLMRANNESEIKSSRAKDGYQQRLLKSIQNKTVLTGQMPRWLFNKNGRYSINPDMQKIINFSFDSYIAGQSTGYIAKELNNKGWMYGSTSWRGSYVAKLIRDERLIGKHTRYGKQIKGVKREIIEVIPDFYPVAVELEKFYLANNMLTNIAEKIRGRTRITYGDTSILRNLFSGVIKCGVCGGDTSVVQNTRRKIVNGTVKYIPYKTFLRCRNKYELKSCTQGDLRYEVIEQAVLLHLKSLDINSLLNKPIDNTVELYKAELEGCISDSLQYQSMINLRKAENKRVRPETLEAYEKVMDRIDELNRLIESHVVDDFVPDFNIDLDRIKNISNVAERSVIKKGIASISDTIKYKRISDFIFIEIKYRNINAKHVLVIDNKSSDMVVDFSIEYNEGNKVYICNSFVMEYDNLSCEFTISKTTMEDYAHMMNFVDYVSDDESYKAKEFLVNNLTHIKFITKSNE

SEQ ID NO: 13767 - DNA, 50 bp, Klebsiella quasipneumoniae
  source 1..50: mol_type = genomic DNA
tagtgttcttaacttcttcaatgcctgctatcgtagagttatctacacta

SEQ ID NO: 13768 - DNA, 40 bp, Klebsiella quasipneumoniae; identical to SEQ ID NO: 13763
  source 1..40: mol_type = genomic DNA

SEQ ID NO: 13769 - DNA, 50 bp, Klebsiella quasipneumoniae
  source 1..50: mol_type = genomic DNA
tagtgttcttaacttcttcaatgctagctatcgtagagttatctacacta

SEQ ID NO: 13770 - DNA, 40 bp, Klebsiella quasipneumoniae; identical to SEQ ID NO: 13765
  source 1..40: mol_type = genomic DNA

SEQ ID NO: 13771 - protein, 599 aa, Klebsiella quasipneumoniae
MKKIIPYGYLRVSSLEQVRSGGGLEAQDEEVRRYITQKSDVFDIDKMVMMSDEGLSAYSGRNIKEGELGRFLANVDAGLIPAGSALVCYSVDRLSRQNPWVGTQLISTLIGAGIEIHSVAENQILRSDDPVGAIMSTIYLMRANNESVIKSERAKHGYTKRLNESIANNKVLTRQMPRWLYDNDGKYAIDPNMQKVIDFTFDSYIAGQSTGYIAKKLNDMGLKYGDTSWRGSYVAKLIRDERLIGKHIRYSKQIKGVKREIIETIPDFYPVTIDTDKFHIANNMLTSVAKNIRGRTRMTYGDISILRNLFNGVIKCGVCSGETSVVQNTRRKITNGVVTYVPYKTFLRCRNRYELKTCTQGDIRYEVIERAILNHLMGLDITTLLAAPVDNKIERYRTELELCKAEEEELQAIIKERENEGKRPRPQTLKSYEDVADRIDELTQLIESHVEDNFIPHFNVDLDSITDVSNVSERSLIKKGIATIADSICYKRISDFILVEIKYRNLNDKHVLVIDNKNSEVVVNFSIEYNEENKVYICNSFVMEYDNLSCEFTVSKTTMEDYAHMMNFVDYVSDDESYNAKEFLVKNFTHIKFIDKSNE

SEQ ID NO: 13772 - DNA, 50 bp, Klebsiella quasipneumoniae
  source 1..50: mol_type = genomic DNA
tagtgttcttaacttccttaatgcctgctattgtagtgctatctacacta

SEQ ID NO: 13773 - DNA, 40 bp, Klebsiella quasipneumoniae; identical to SEQ ID NO: 13763
  source 1..40: mol_type = genomic DNA

SEQ ID NO: 13774 - DNA, 50 bp, Klebsiella quasipneumoniae
  source 1..50: mol_type = genomic DNA
tagtgttcttaacttccttaatgctagctattgtagtgctatctacacta

SEQ ID NO: 13775 - DNA, 40 bp, Klebsiella quasipneumoniae; identical to SEQ ID NO: 13765
  source 1..40: mol_type = genomic DNA

SEQ ID NO: 13776 - protein, 599 aa, Klebsiella quasipneumoniae
MKKIIPYGYLRVSSLEQVRSGGGLEAQDEEVRRYITQKSDVFDIDKMVMMSDEGLSAYSGRNIKEGELGRFLADVDAGLIPAGSALVCYSVDRLSRQNPWVGTQLISTLIGAGIEIHSVAENQILRSDDPVGAIMSTIYLMRANNESVIKSERAKHGYTKRLNESIANNKVLTRQMPRWLYDNDGKYAIDPNMQKVIDFTFDSYIAGQSTGYIAKKLNDMGLKYGDTSWRGSYVAKLIRDERLIGKHIRYSKQIKGVKREIIETIPDFYPVTIDTDKFHIANNMLTSVAKNIRGRTRMTYGDISILRNLFNGVIKCGVCSGETSVVQNTRRKITNGVVTYVPYKTFLRCRNRYELKTCTQGDIRYEVIERAILNHLMGLDITTLLAAPVDNKIERYRTELELCKAEEEELQAIIKERENEGKRPRPQTLKSYEDVADRIDELTQLIESHVEDNFIPHFNVDLDSITDVSNVSERSLIKKGIATIADSICYKRISDFILVEIKYRNLNDKHVLVIDNKNSEMVVNFSIEYNEENKVYICNSFVMEYDNLSCEFTVSKTTMEDYAHMMNFVDYVSDDESYNAKEFLVKNFTHIEFIDKSNE

SEQ ID NO: 13777 - DNA, 50 bp, Klebsiella quasipneumoniae
  source 1..50: mol_type = genomic DNA
tagtgttcttaacttccttaatgtctgctattgtagtgctatctacacta

SEQ ID NO: 13778 - DNA, 40 bp, Klebsiella quasipneumoniae; identical to SEQ ID NO: 13763
  source 1..40: mol_type = genomic DNA

SEQ ID NO: 13779 - DNA, 50 bp, Klebsiella quasipneumoniae
  source 1..50: mol_type = genomic DNA
tagtgttcttaacttccttaatgttagctattgtagtgctatctacacta

SEQ ID NO: 13780 - DNA, 40 bp, Klebsiella quasipneumoniae; identical to SEQ ID NO: 13765
  source 1..40: mol_type = genomic DNA

SEQ ID NO: 13781 - protein, 599 aa, Klebsiella quasipneumoniae
MKKIIPYGYLRVSSLEQVRSGGGLEAQDEEVRRYITQKSDVFDIDKMVMMSDEGLSAYSGRNIKEGELGRFLANVDAGLIPAGSALVCYSVDRLSRQNPWVGTQLISTLIGAGIEIHSVAENQILRSDDPVGAIMSTIYLMRANNESVIKSERAKHGYTKRLNESIANNKVLTRQMPRWLYDNDGKYAIDPNMQKVIDFTFDSYIAGQSTGYIAKKLNDMGLKYGDTSWRGSYVAKLIRDERLIGKHIRYSKQIKGVKREIIETIPDFYPVTIDTDKFHIANNMLTSVAKNIRGRTRMTYGDISILRNLFNGVIKCGVCSGETSVVQNTRRKITNGVVTYVPYKTFLRCRNRYELKTCTQGDIRYEVIERAILNHLMGLDITTLLAAPVDNKIERYRTELELCKAEEEELQAIIKERENEGKRPRPQTLKSYEDVADRIDELTQLIESHVEDNFIPHFNVDLDSITDVSNVSERSLIKKGIATIADSICYKRISDFILVEIKYRNLNDKHVLVIDNKNSEMVVNFSIEYNEENKVYICNSFVMEYDNLSCEFTVSKTTMEDYAHMMNFVDYVSDDESYNAKEFLVKNFTHIKFIDKSNE

SEQ ID NO: 13782 - DNA, 50 bp, Klebsiella quasipneumoniae; identical to SEQ ID NO: 13772
  source 1..50: mol_type = genomic DNA

SEQ ID NO: 13783 - DNA, 40 bp, Klebsiella quasipneumoniae; identical to SEQ ID NO: 13763
  source 1..40: mol_type = genomic DNA

SEQ ID NO: 13784 - DNA, 50 bp, Klebsiella quasipneumoniae; identical to SEQ ID NO: 13774
  source 1..50: mol_type = genomic DNA

SEQ ID NO: 13785 - DNA, 40 bp, Klebsiella quasipneumoniae; identical to SEQ ID NO: 13765
  source 1..40: mol_type = genomic DNA

SEQ ID NO: 13786 - protein, 599 aa, Klebsiella quasipneumoniae
MKKIIPYGYLRVSSLEQVRSGGGLEAQDEEVRRYITQKSDVFDIDKMVMMSDEGLSAYSGRNIKEGELGRFLADVDAGLIPAGSALVCYSVDRLSRQNPWVGTQLISTLIGAGIEIHSVAENQILRSDDPVGAIMSTIYLMRANNESVIKSERAKHGYTKRLNESIANNKVLTRQMPRWLYDNDGKYAIDPNMQKVIDFTFDSYIAGQSTGYIAKKLNDMGLKYGDTSWRGSYVAKLIRDERLIGKHIRYSKQIKGVKREIIETIPDFYPVTIDTDKFHIANNMLTSVAKNIRGRTRMTYGDISILRNLFNGVIKCGVCSGETSVVQNTRRKITNGVVTYVPYKTFLRCRNRYELKTCTQGDIRYEVIERAILNHLMGLDITTLLAAPVDNKIERYRTELELCKAEEEELQAIIKERENEGKRPRPQTLKSYEDVADRIDELTQLIESHVEDNFIPHFNVDLDSITDVSNVSERSLIKKGIATIADSICYKRISDFILVEIKYRNLNDKHVLVIDNKNSEMVVNFSIEYNEENKVYICNSFVMEYDNLSCEFTVSKTTMEDYAHMMNFVDYVSDDESYNAKEFLVKNFTHIKFIDKSNE

SEQ ID NO: 13787 - DNA, 50 bp, Klebsiella quasipneumoniae; identical to SEQ ID NO: 13777
  source 1..50: mol_type = genomic DNA

SEQ ID NO: 13788 - DNA, 40 bp, Klebsiella quasipneumoniae; identical to SEQ ID NO: 13763
  source 1..40: mol_type = genomic DNA

SEQ ID NO: 13789 - DNA, 50 bp, Klebsiella quasipneumoniae; identical to SEQ ID NO: 13779
  source 1..50: mol_type = genomic DNA

SEQ ID NO: 13790 - DNA, 40 bp, Klebsiella quasipneumoniae; identical to SEQ ID NO: 13765
  source 1..40: mol_type = genomic DNA

SEQ ID NO: 13791 - protein, 598 aa, Klebsiella quasipneumoniae
MNKIIPYGYLRVSSLEQVRTGGGLDTQDEEVRRYITQNSEKFDIDRMVVMSDAGMSAYTGSNIKEGELGRFLADVNAGLIPTGSALICYSVDRLSRQNPWVGTHLISTLIGAGIEIHSVAENQILRSDDPVGAIMSTIYLMRANNESVIKSERAKKGYEKRLKESITNKKVLTRQMPRWLYDCDGKYAIDPNMQNVINFTFDSYIAGQSTGFIAKELNNRGLMYGNTSWRGSYVAKLIRDERLIGKHIRYSKQIKGVKRVVIETIPNFYPVVVDVEKFFVANNILTSVAKNIRGRTRVTYGDDSILRNLFNGVIKCGVCGGDTSVVQNTRKKIVNGEATYIPYKTFLRCRTRYELKNCVQSDIRYEVIERAILNHLMRLDISALLSVPVDNKIESYRTELELCKAEEVELHTLIEQREREGKRVRPRTIKAYEDVSDRIDELNKLIESYVEDTFVPDFNVDLNSIADVSNVSDRSLIKKGIATIAESICYKRISDFILIEIKYRNLSVKHVLVIDNKQSKVVVNFSIEYHENSHDYTCNGFILKYVKSPEEFHLMGVNIEDYAHMMNFVDFISDNEAKKIKEYLVSNLSRVLISNIPE

SEQ ID NO: 13792 - DNA, 50 bp, Klebsiella quasipneumoniae
  source 1..50: mol_type = genomic DNA
tagtgtgtataacttccataatgcctgctatcgtatagctaactacacta

SEQ ID NO: 13793 - DNA, 40 bp, Klebsiella quasipneumoniae; identical to SEQ ID NO: 13763
  source 1..40: mol_type = genomic DNA

SEQ ID NO: 13794 - DNA, 50 bp, Klebsiella quasipneumoniae
  source 1..50: mol_type = genomic DNA
tagtgtgtataacttccataatgctagctatcgtatagctaactacacta

SEQ ID NO: 13795 - DNA, 40 bp, Klebsiella quasipneumoniae; identical to SEQ ID NO: 13765
  source 1..40: mol_type = genomic DNA

SEQ ID NO: 13796 - protein, 599 aa, Klebsiella variicola
MKKIIPYGYLRVSSLEQVRSGGGLEAQDDAVRNYINERSDLFDTDRTVMISDAGLSAFSGQQLSEGQLGVFLSEVETGKVPTGSALVCFSIDRLSRQNPWIGTKLISTLIGAGIQIHSVAERQVLKSDDPVGAIMSTIYLMRANNESEIKSSRAKDGYQQRLLKSIQSKTVLTGQMPRWLFNKDGRYSINPDMQKIINFSFDSYIAGQSTGYIAKELNNKGWMYGSTSWRGSYVAKLIRDERLIGKHTRYGKQIKGVKREIIDVIPDFYPVAVDVEKFYLANNMLTNIAEKIRGRTRITYGDTSILRNLFSGVIKCGVCGGDTSVVQNTRRKVVNGTVKYIPYKTFLRCRNKYEFKSCTQGDLRYEVIEQAVLLHLKSLDINSLLNKPIDNTVELYKAELEGCISDSLQYQSMINLRKAENKRVRPDTLEAYENVMDRIDELNKLIESHVVDDFVPDFNIDLDRIKNISNVAERSIIKKGIASISDTIKYKRISDFILIEIKYRNINVKHVLVIYNTNSEMVVDFSIEYNEGNKLYICNSFVMEYDNLSCEFTVSKTTMEDYAHMMNFVDYVSDDESYKAKEFLVNNFAHIKFITKSNE

SEQ ID NO: 13797 - DNA, 50 bp, Klebsiella variicola
  source 1..50: mol_type = genomic DNA
tagtgtgtttaacttccttaatgtctgctattgtagtgctatctacacta

SEQ ID NO: 13798 - DNA, 40 bp, Klebsiella variicola; identical to SEQ ID NO: 13763
  source 1..40: mol_type = genomic DNA

SEQ ID NO: 13799 - DNA, 50 bp, Klebsiella variicola
  source 1..50: mol_type = genomic DNA
tagtgtgtttaacttccttaatgttagctattgtagtgctatctacacta

SEQ ID NO: 13800 - DNA, 40 bp, Klebsiella variicola; identical to SEQ ID NO: 13765
  source 1..40: mol_type = genomic DNA

SEQ ID NO: 13801 - protein, 599 aa, Klebsiella pneumoniae
MSKIIPYAYLRVSSVEQVRSGKGLETQDEEVRRYITERSDKFDIDRMVTMSDAGMSAYSGIHLKEGELGRFLADVEMGNVPSGSALVCFSIDRLSRQNPWIGTKLISTLIGAGIEIHSVAENQVLKSDDPVGAIMSTIYLMRANNESVIKSERAKHGYTKRLNESIANKKVLTRQMPRWLYDNDGKYAIDPNMQKVIDFTFDSYIAGQSTGYIAKKLNDMGLKYGYTSWRGSYVAKLIRDERLIGKHIRYSKQIKGVKREIIETIPDFYPVTIDTDKFHIANNMLTSVAKNIRGRTRITYGDTSILRNLFNGVIKCGVCSGETSVVQNTRKKIINGVVTYVPYKTFLRCRNRYELKTCTQGDIRYEVIERAILNHLMGLDIATLLAAPVDNKIERYRTELELCKAEEAELQAIIKERENEGKRPRPQTLKSYEDVSDRIDELTQLIESHVEDNFIPHFNVDLDHITDVSNVSERSLIKKSIATIADNICYKRISDFILVEIKYRNLNDKHVLVIDNKNSEMVVNFSIEYNEENKVYICNSFVMEYDNLSCEFTVSKTTMEDYAHMMNFVDYVSDDKSYNAKEFLVNNFTNIKFIAKSNE

SEQ ID NO: 13802 - DNA, 50 bp, Klebsiella pneumoniae
  source 1..50: mol_type = genomic DNA
tagtgttcttaacttccttaatgtctgctatcttatagctaaacacgcta

SEQ ID NO: 13803 - DNA, 40 bp, Klebsiella pneumoniae; identical to SEQ ID NO: 13763
  source 1..40: mol_type = genomic DNA

SEQ ID NO: 13804 - DNA, 50 bp, Klebsiella pneumoniae
  source 1..50: mol_type = genomic DNA
tagtgttcttaacttccttaatgttagctatcttatagctaaacacgcta

SEQ ID NO: 13805 - DNA, 40 bp, Klebsiella pneumoniae; identical to SEQ ID NO: 13765
  source 1..40: mol_type = genomic DNA

SEQ ID NO: 13806 - protein, 599 aa, Klebsiella pneumoniae
MKKIIPYGYLRVSSLEQVRSGGGLEAQDEEVRRYITQKSDVFDIDKMVMMSDEGLSAYSGRNIKEGELGRFLADVDAGLIPAGSALVCYSVDRLSRQNPWVGTQLISTLIGAGIEIHSVAENQILRSDDPVGAIMSTIYLMRANNESVIKSERAKHGYTKRLNESIANNKVLTRQMPRWLYDNDGKYAIYPNMQKVIDFTFDSYIAGQSTGYIAKKLNDMGLKYGDTSWRGSYVAKLIRDERLIGKHIRYSKQIKGVKREIIETIPDFYPVTIDTDKFHIANNMLTSVAKNIRGRTRMTYGDISILRNLFNGVIKCGVCSGETSVVQNTRRKITNGVVTYVPYKTFLRCRNRYELKTCTQGDIRYEVIERAILNHLMGLDITTLLAAPVDNKIERYRTELELCKAEEEELQAIIKERENEGKRPRPQTLKSYEDVADRIDELTQLIESHVEDNFIPHFNVDLDSITDVSNVSERSLIKKGIATIADSICYKRISDFILVEIKYRNLNDKHVLVIDNKNSEMVVNFSIEYNEENKVYICNSFVMEYDNLSCEFTVSKTTMEDYAHMMNFVDYVSDDESYNAKEFLVKNFTHIKFIDKSNE

SEQ ID NO: 13807 - DNA, 50 bp, Klebsiella pneumoniae; identical to SEQ ID NO: 13777
  source 1..50: mol_type = genomic DNA

SEQ ID NO: 13808 - DNA, 40 bp, Klebsiella pneumoniae; identical to SEQ ID NO: 13763
  source 1..40: mol_type = genomic DNA

SEQ ID NO: 13809 - DNA, 50 bp, Klebsiella pneumoniae; identical to SEQ ID NO: 13779
  source 1..50: mol_type = genomic DNA

SEQ ID NO: 13810 - DNA, 40 bp, Klebsiella pneumoniae; identical to SEQ ID NO: 13765
  source 1..40: mol_type = genomic DNA

SEQ ID NO: 13811 - protein, 599 aa, Klebsiella pneumoniae
MKKIIPYGYLRVSSLEQVRSGGGLEAQDEEVRRYITQKSDVFDIDKMVMMSDEGLSAYSGRNIKEGELGRFLADVDAGLIPAGSALVCYSVDRLSRQNPWVGTQLISTLIGAGIEIHSVAENQILRSDDPVGAIMSTIYLMRANNESVIKSERAKHGYTKRLNESIANNKVLTRQMPRWLYDNDGKYAIDPNMQKVIDFTFDSYIAGQSTGYIAKKLNDMGLKYGDTSWRGSYVAKLIRDERLIGKHIRYSKQIKGVKREIIETIPDFYPVTIDTDKFHIANNMLTSVAKNIRGRTRMTYGDISILRNLFNGVIKCGVCSGETSVVQNTRRKITNGVVTYVPYKTFLRCRNRYELKTCTQGDIRYEVIERAILNHLMGLDITTLLAAPVDNKIERYRTELELCKAEEEELQAIIKERENEGKRPRPQTLKSYEDVADRIDELTQLIESHVEDNFIPHFNVDLDSITDVSNVSERSLIKKGIATIADSICYKRISDFILVEIKYRNLNDKHVLVIDNKNSEMVVNFSIEYNEENKVYICNSLVMEYDNLSCEFTVSKTTMEDYAHMMNFVDYVSDDESYNAKEFLVKNFTHIKFIDKSNE

SEQ ID NO: 13812 - DNA, 50 bp, Klebsiella pneumoniae; identical to SEQ ID NO: 13777
  source 1..50: mol_type = genomic DNA

SEQ ID NO: 13813 - DNA, 40 bp, Klebsiella pneumoniae; identical to SEQ ID NO: 13763
  source 1..40: mol_type = genomic DNA

SEQ ID NO: 13814 - DNA, 50 bp, Klebsiella pneumoniae; identical to SEQ ID NO: 13779
  source 1..50: mol_type = genomic DNA

SEQ ID NO: 13815 - DNA, 40 bp, Klebsiella pneumoniae; identical to SEQ ID NO: 13765
  source 1..40: mol_type = genomic DNA

SEQ ID NO: 13816 - protein, 599 aa, Klebsiella pneumoniae
MEKIIPYGYLRVSSLEQVRSGGGLEAQDDAVRNYINEHSDLFDTDRTVMISDAGLSAFSGQQLSEGQLGVFLSDVETGKVPTGSALVCFSIDRLSRQNPWIGTKLISTLIGAGIQIHSVAERQVLKSDDPVGAIMSTIYLMRANNESEIKSSRAKDGYQQRLLKSIQNKTVLTEQMPRWLFNNDGKYAIDPDMQKIINFTFDSYIAGQSTGYIAKELNDKGWMYGSTSWRGSYVAKLIRDERLIGKHIRYGKQTKGVKREVIETISDFYPVAVDVEKFYLANNMLTNVAEKIRGRTRITYGDTSILRNLFSGVIKCGVCGGDTSVVQNTRRNVVNGAVKYIPYKTFLRCRNKYELKSCSQGDLRYEVIEQAILLHLKSLDINALLNKPIDNTVELYKSELEGCISDSLQYQSMINFRKAENKRVRPDTLEAYENVMDRIDELNKLIESHVVDDFVPDFNIDFDRIKNVSNVAERSVIKKGIASISESIKYRRVSDYILIEIMYRNINAKHVLVIDNKSAEIVVDFSIEYNEMNKMYICNSFNMEYDNSSCKFTLSKTTMEDYAHMMNFVDYVSDDESYKAKEFLVGNFNKFKFLTKSNE

SEQ ID NO: 13817 - DNA, 50 bp, Klebsiella pneumoniae
  source 1..50: mol_type = genomic DNA
tagtgtatttaacttcctttatgcctgctattgtagtgttatctacacta

SEQ ID NO: 13818 - DNA, 40 bp, Klebsiella pneumoniae; identical to SEQ ID NO: 13763
  source 1..40: mol_type = genomic DNA

SEQ ID NO: 13819 - DNA, 50 bp, Klebsiella pneumoniae
  source 1..50: mol_type = genomic DNA
tagtgtatttaacttcctttatgctagctattgtagtgttatctacacta

SEQ ID NO: 13820 - DNA, 40 bp, Klebsiella pneumoniae; identical to SEQ ID NO: 13765
  source 1..40: mol_type = genomic DNA

SEQ ID NO: 13821 - protein, 598 aa, Raoultella planticola
MNKIIPYGYLRVSSLEQVRTGGGLDTQDEEVRRYITQNSEKFDIDRMVVMSDAGMSAYTGSNIKEGELGRFLADVNAGLIPTGSALICYSVDRLSRQNPWVGTHLISTLIGAGIEIHSVAENQILRSDDPVGAIMSTIYLMRANNESVIKSERAKKGYEKRLKESITNKKVLTRQMPRWLYDCDGKYAIDPNMQNVINFTFDSYIAGQSTGFIAKELNNRGLMYGNTSWRGSYVAKLIRDERLIGKHIRYSKQIKGVKRVVIETIPNFYPVVVDVEKFFVANNMLTSVAKNIRGRTRVTYGDDSILRNLFNGVIKCGVCGGDTSVVQNTRKKIVNGEATYIPYKTFLRCRTRYELKNCVQSDIRYEVIERAILNHLMRLDISALLSVPVDNKIESYRTELELCKAEEVELHTLIEQREREGKRVRPRTIKAYEDVSDRIDELNKLIESYVEDTFVPEFNVDLNSIADVSNVSDRSLIKKGIATIAESICYKRISDFILVEIKYRNLSVKHVLVIDNKQSKVVVNFSIEYHENSHDYTCNSFILKYVKSPEEFHLMGVNIEDYAHMMNFVDFISDNEAKKIKEYLVSNLSRVLISNIPE

SEQ ID NO: 13822 - DNA, 50 bp, Raoultella planticola; identical to SEQ ID NO: 13792
  source 1..50: mol_type = genomic DNA

SEQ ID NO: 13823 - DNA, 40 bp, Raoultella planticola; identical to SEQ ID NO: 13763
  source 1..40: mol_type = genomic DNA

SEQ ID NO: 13824 - DNA, 50 bp, Raoultella planticola; identical to SEQ ID NO: 13794
  source 1..50: mol_type = genomic DNA

SEQ ID NO: 13825 - DNA, 40 bp, Raoultella planticola; identical to SEQ ID NO: 13765
  source 1..40: mol_type = genomic DNA

SEQ ID NO: 13826 - protein, 599 aa, Klebsiella pneumoniae; identical to SEQ ID NO: 13786

SEQ ID NO: 13827 - DNA, 50 bp, Klebsiella pneumoniae; identical to SEQ ID NO: 13772
  source 1..50: mol_type = genomic DNA

SEQ ID NO: 13828 - DNA, 40 bp, Klebsiella pneumoniae; identical to SEQ ID NO: 13763
  source 1..40: mol_type = genomic DNA

SEQ ID NO: 13829 - DNA, 50 bp, Klebsiella pneumoniae; identical to SEQ ID NO: 13774
  source 1..50: mol_type = genomic DNA

SEQ ID NO: 13830 - DNA, 40 bp, Klebsiella pneumoniae; identical to SEQ ID NO: 13765
  source 1..40: mol_type = genomic DNA

SEQ ID NO: 13831 - protein, 599 aa, Klebsiella quasipneumoniae; identical to SEQ ID NO: 13781

SEQ ID NO: 13832 - DNA, 50 bp, Klebsiella quasipneumoniae
  source 1..50: mol_type = genomic DNA
tagtgttcttaacttccttaatgcctgctattgtaatgctatctacacta

SEQ ID NO: 13833 - DNA, 40 bp, Klebsiella quasipneumoniae; identical to SEQ ID NO: 13763
  source 1..40: mol_type = genomic DNA

SEQ ID NO: 13834 - DNA, 50 bp, Klebsiella quasipneumoniae
  source 1..50: mol_type = genomic DNA
tagtgttcttaacttccttaatgctagctattgtaatgctatctacacta

SEQ ID NO: 13835 - DNA, 40 bp, Klebsiella quasipneumoniae; identical to SEQ ID NO: 13765
  source 1..40: mol_type = genomic DNA

SEQ ID NO: 13836 - protein, 596 aa, Klebsiella variicola
MSKIIPHLYCRVSTSHQLQGSGMDDQSRVVTEYVKSKPEVFDVSKMTLLKDEGLSAYKGEHLQGDGALRGFVDDVESGVIPSGSALIVYSLDRLSRLNPWVGSHLISTLISKGIEIHSVSENSVLKSDDPIGSIISGIYLLRANNESVLKSERAKDGYKARLQKSILNKTILTKQMPRWLFDDNGSYGVKKDMKEAIDYIFDSYIDGLSSGHIAKELNTKGLKNNNTSWTGSYVAKLIRDRRLIGEHIRLSAQIKGVKREIIEKIPEFYPVVVDKDRFNLANNMLDNVAKNIRGRTRLTYGDTSVLKNLFSGVIKCGLCNGMTTVVKNSKPVKLPDGSRKYVAGTTFIRCRAKYEYKSCKQGDVKYETIEKAILEHLMGLDIPALLAKPVDKKLDIWKSELNLCISDRNDYKRLIDERKALGKRASVESLEALQEVTDRIEELTSLIESHVDEDFVPVFDAIDLERITDITNVKERGLIKKSINSLVEKITYKTVSGFVMLEFTYLYRSIKHVIIINKTESKVVVNFSVESGDDVVEFVCNQFMMRYYKYNNEFDVMGSSLIDYSHMVNFVDYLEDDVSRLAKEFLVKNMDRMVLL

SEQ ID NO: 13837 - DNA, 50 bp, Klebsiella variicola
  source 1..50: mol_type = genomic DNA
tagtgttgatagcaactacaaaccctgctattgtatgactatctacacta

SEQ ID NO: 13838 - DNA, 40 bp, Klebsiella variicola; identical to SEQ ID NO: 13763
  source 1..40: mol_type = genomic DNA

SEQ ID NO: 13839 - DNA, 50 bp, Klebsiella variicola
  source 1..50: mol_type = genomic DNA
tagtgttgatagcaactacaaacctagctattgtatgactatctacacta

SEQ ID NO: 13840 - DNA, 40 bp, Klebsiella variicola; identical to SEQ ID NO: 13765
  source 1..40: mol_type = genomic DNA

SEQ ID NO: 13841 - protein, 616 aa, Klebsiella pneumoniae
MSAIVVLSTLRLSDLSIMEKIIPYGYLRVSSLEQVRSGGGLEAQDDAVRNYINEHSDLFDTDRTVMISDAGLSAFSGQQLSEGQLGVFLSDVETGKVPTGSALVCFSIDRLSRQNPWIGTKLISTLIGAGIQIHSVAERQVLKSDDPVGAIMSTIYLMRANNESEIKSSRAKDGYQQRLLKSIQNKTVLTEQMPRWLFNNDGKYAIDPDMQKIINFTFDSYIAGQSTGYIAKELNDKGWMYGSTSWRGSYVAKLIRDERLIGKHIRYGKQTKGVKREVIETISDFYPVAVDVEKFYLANNMLTNVAEKIRGRTRITYGDTSILRNLFSGVIKCGVCGGDTSVVQNTRRNVVNGAVKYIPYKTFLRCRNKYELKSCSQGDLRYEVIEQAILLHLKSLDINALLNKPIDNTVELYKSELEGCISDSLQYQSMINFRKAENKRVRPDTLEAYENVMDRIDELNKLIESHVVDDFVPDFNIDFDRIKNVSNVAERSVIKKGIASISESIKYRRVSDYILIEIMYRNINAKHVLVIDNKSAEIVVDFSIEYNEMNKMYICNSFNMEYDNSSCKFTLSKTTMEDYAHMMNFVDYVSDDESYKAKEFLVGNFNKFKFLTKSNE

SEQ ID NO: 13842 - DNA, 50 bp, Klebsiella pneumoniae
  source 1..50: mol_type = genomic DNA
tagtgtatttaacttccttaatgcctgctattgtagtgttatctacacta

SEQ ID NO: 13843 - DNA, 40 bp, Klebsiella pneumoniae; identical to SEQ ID NO: 13763
  source 1..40: mol_type = genomic DNA

SEQ ID NO: 13844 - DNA, 50 bp, Klebsiella pneumoniae
  source 1..50: mol_type = genomic DNA
tagtgtatttaacttccttaatgctagctattgtagtgttatctacacta

SEQ ID NO: 13845 - DNA, 40 bp, Klebsiella pneumoniae; identical to SEQ ID NO: 13765
  source 1..40: mol_type = genomic DNA

SEQ ID NO: 13846 - protein, 596 aa, Klebsiella pneumoniae
MSKIIPHLYCRVSTSHQLQGSGMDDQSRVVTEYVKSKPEVFDVSKMTLLKDEGLSAYKGEHLQGDGALRGFVDDVESGVISSGSALIVYSLDRLSRLNPWVGSHLISTLISKGIEIHSVSENSVLKSDDPIGSIISGIYLLRANNESVLKSERAKDGYKARLQKSILNKTILTKQMPRWLFDDNGSYGVKKDMKEAIDYIFESYIDGLSSGHIAKELNTKGLKNNNTSWTGSYVAKLIRDRRLIGEHIRLSAQIKGVKREIIEKIPEFYPVVVDKDRFNLANNMLDNVAKNIRGRTRLTYGDTSVLKNLFSGVIKCGLCNGMTTVVKNSKPVKLPDGSRKYVAGTTFIRCRTKYEYKSCKQGDVKYQTIEKAILEHLMGLDIPALLAKPVDNKLDIWKSELNLCISDRNDYKRLIDERKALGKRASVESLEALQEVTDRIEELTSLIESHVEEDFVPVFDDIDLEQITDVTNVKERSLIKKSINSLVEKITYKTVSGFVMLEFTYLYRSIKHVVIINKTENKVVVNFSVESRDDVVEFVCNQFMMRYYKYNNEFDVMGSSLIDYSHMVNFVDHLEDDVSRLAKEFLVKKMDRMVLL

SEQ ID NO: 13847 - DNA, 50 bp, Klebsiella pneumoniae
  source 1..50: mol_type = genomic DNA
tagtgtagatagaaaccacaaaccctgctattgtatgactatatacacta

SEQ ID NO: 13848 - DNA, 40 bp, Klebsiella pneumoniae; identical to SEQ ID NO: 13763
  source 1..40: mol_type = genomic DNA

SEQ ID NO: 13849 - DNA, 50 bp, Klebsiella pneumoniae
  source 1..50: mol_type = genomic DNA
tagtgtagatagaaaccacaaacctagctattgtatgactatatacacta

SEQ ID NO: 13850 - DNA, 40 bp, Klebsiella pneumoniae; identical to SEQ ID NO: 13765
  source 1..40: mol_type = genomic DNA

SEQ ID NO: 13851 - protein, 596 aa, Klebsiella pneumoniae
MSKIIPHLYCRVSTSHQLQGSGMDDQSRVVTEYVKSKPEVFDVSKMTLLKDEGLSAYKGEHLQGDGALRGFVDDVESGVIPSGSALIVYSLDRLSRLNPWVGSHLISTLISKGIEIHSVSENSVLKSDDPIGSIISGIYLLRANNESVLKSERAKDGYKARLQKSILNKTILTKQMPRWLFDDNGSYGVKKDMKDAIDYIFESYIDGLSSGHIAKELNTKGLKNNNTSWTGSYVAKLIRDRRLIGEHIRLSAQIKGVKREIIEKIPEFYPVVVDKDRFNLANNMLDNVAKNIRGRTRLTYGDTSVLKNLFSGVIKCGLCNGMTTVVKNSKPVKLPDGSRKYVAGTTFIRCRTKYEYKSCKQGDVKYQTIEKAILEHLMGLDIPALLAKPVDNKLDIWKSELNLCISDRNDYKRLIDERKALGKRASVESLEALQEVTDRIEELTSLIESHVDEDFVPVFDAIDLEQITDVTNVEERALIKKSINSLVEKITYKTVSGFVMLEFTYLYRSIKHVVIINKTESKVVVNFSVESRDDVVEFVCNQFMMRYYKYNNEFDVMGSSLIDYSHMVNFVDYLEDDVSRLAKEFLVKNMDRMVLL

SEQ ID NO: 13852 - DNA, 50 bp, Klebsiella pneumoniae
  source 1..50: mol_type = genomic DNA
tagtgtagatagaaactacaaaccctgctattgtatgactatctacacta

SEQ ID NO: 13853 - DNA, 40 bp, Klebsiella pneumoniae; identical to SEQ ID NO: 13763
  source 1..40: mol_type = genomic DNA

SEQ ID NO: 13854 - DNA, 50 bp, Klebsiella pneumoniae
  source 1..50: mol_type = genomic DNA
tagtgtagatagaaactacaaacctagctattgtatgactatctacacta

SEQ ID NO: 13855 - DNA, 40 bp, Klebsiella pneumoniae; identical to SEQ ID NO: 13765
  source 1..40: mol_type = genomic DNA

SEQ ID NO: 13856 - protein, 599 aa, Klebsiella pneumoniae
MKKIIPYGYLRVSSLEQVRSGGGLEAQDEEVRRYITQKSDVFDIDKMVMMSDEGLSAYSGRNIKEGELGRFLADVDAGLIPAGSALVCYSVDRLSRQNPWVGSQLISTLIGAGIEIHSVAENQILRSDDPVGAIMSTIYLMRANNESVIKSERAKHGYTKRLNESIANNKVLTRQMPRWLYDNDGKYAIDPNMQKVIDFTFDSYIAGQSTGYIAKKLNDMGLKYGDTSWRGSYVAKLIRDERLIGKHIRYSKQIKGVKREIIETIPDFYPVTIDTDKFHIANNMLTSVAKNIRGRTRMTYGDISILRNLFNGVIKCGVCSGETSVVQNTRRKITNGVVTYVPYKTFLRCRNRYELKTCTQGDIRYEVIERAILNHLMGLDITTLLAAPVDNKIERYRTELELCKAEEEELQAIIKERENEGKRPRPQTLKSYEDVADRIDELTQLIESHVEDNFIPHFNVDLDSITDVSNVSERSLIKKGIATIADSICYKRISDFILVEIKYRNLNDKHVLVIDNKNSEMVVNFSIEYNEENKVYICNSFVMEYDNLSCEFTVSKTTMEDYAHMMNFVDYVSDDESYNAKEFLVKNFTHIKFIDKSNE

SEQ ID NO: 13857 - DNA, 50 bp, Klebsiella pneumoniae; identical to SEQ ID NO: 13772
  source 1..50: mol_type = genomic DNA

SEQ ID NO: 13858 - DNA, 40 bp, Klebsiella pneumoniae; identical to SEQ ID NO: 13763
  source 1..40: mol_type = genomic DNA

SEQ ID NO: 13859 - DNA, 50 bp, Klebsiella pneumoniae; identical to SEQ ID NO: 13774
  source 1..50: mol_type = genomic DNA

SEQ ID NO: 13860 - DNA, 40 bp, Klebsiella pneumoniae; identical to SEQ ID NO: 13765
  source 1..40: mol_type = genomic DNA

SEQ ID NO: 13861 - protein, 599 aa, Klebsiella pneumoniae
MKKIIPYGYLRVSSLEQVRSGGGLEAQDEEVRRYITQKSDVFDIDKMVMMSDEGLSAYSGRNIKEGELGRFLANVDAGLIPAGSALVCYSVDRLSRQNPWVGTQLISTLIGAGIEIHSVAENQILRSDDPVGAIMSTIYLMRANNESVIKSERAKHGYTKRLNESIANNKVLTRQMPRWLYDNDGKYAIDPNMQKVIDFTFDSYIAGQSTGYIAKKLNDMGLKYGDTSWRGSYVAKLIRDERLIGKHIRYSKQIKGVKREIIETIPDFYPVTIDTDKFHIANNMLTSVAKNIRGRTRMTYGDISILRNLFNGVIKCGVCSGETSVVQNTRRKITNGVVTYVPYKTFLRCRNRYELKTCTQGDIRYEVIERAILNHLMGLDITTLLAAPVDNKIERYRTELELCKAEEEELQAIIKERENEGKRPRPQTLKSYEDVADRIDELTQLIESHVEDNFIPHFNVDLDSITDVSNVSERSLIKKGIATIADSICYKRISDFILVEIKYRNLNDKHVLVIDNKNSEMVVNFSIEYNEENKVYICNSFVMEYDNLSCEFTVSKTTMEDYAHMMNFVDYVSDDESYNAKEFLVKNFTHVKFIDKSNE

SEQ ID NO: 13862 - DNA, 50 bp, Klebsiella pneumoniae; identical to SEQ ID NO: 13772
  source 1..50: mol_type = genomic DNA

SEQ ID NO: 13863 - DNA, 40 bp, Klebsiella pneumoniae; identical to SEQ ID NO: 13763
  source 1..40: mol_type = genomic DNA

SEQ ID NO: 13864 - DNA, 50 bp, Klebsiella pneumoniae; identical to SEQ ID NO: 13774
  source 1..50: mol_type = genomic DNA

SEQ ID NO: 13865 - DNA, 40 bp, Klebsiella pneumoniae; identical to SEQ ID NO: 13765
  source 1..40: mol_type = genomic DNA

SEQ ID NO: 13866 - protein, 516 aa, Dehalococcoides mccartyi
MENLIKRAAIYARVSSDKQDVDLSISAQLRALKEYAKHNNYEIVREFIDEAETGRTTARPAFREMISLARHPQKPFEIILVWKYSRFARSREDSIVYKAMLRKNGVQLISINEPRDDTPTGRLLEAIIESLDEFYSDNLGEEVTRGMRESASRGYYLSSKPPYGYIKVRFKDGEKERTKLEIEPNQAAIVVSIYQDIIAGKGLTAITKELNQKGIASPKGKGWGKTGLRIILKNEAYTGTLVYGRNSKRGLEPIKVENACPAIISKAVFEQVQELIKSRTFKSIHPKRASSPFLLSGITFCGHCGKALTGQVAKSGKFAYYICGTLNKKGAGTCPAHYHNSRAFEQKVIQTLKDNILTEENLTHLAEVVNQEMDENSIQYREELNAVLDEMIEVNHRLERLYDAVETGSIPMADLAPRIRELRTRHEKLNERKLQVEQQLSDRHIELASPEILSQYVNDLRKLLTVSELTEKKAFIRSFVQKINVIGDEATLTYEMPLNGLLEQKIGVLPIVQYGG

SEQ ID NO: 13867 - DNA, 50 bp, Dehalococcoides mccartyi
  source 1..50: mol_type = genomic DNA
gttctgcctattgtacagtatggtgggcggtactgtacaatacgcagaac

SEQ ID NO: 13868 - DNA, 40 bp, Dehalococcoides mccartyi
  source 1..40: mol_type = genomic DNA
tttacatccaaataatggtgggcagtagtggatttgaacc

SEQ ID NO: 13869 - DNA, 50 bp, Dehalococcoides mccartyi
  source 1..50: mol_type = genomic DNA
gttctgcctattgtacagtatggtgagcggtactgtacaatacgcagaac

SEQ ID NO: 13870 - DNA, 40 bp, Dehalococcoides mccartyi
  source 1..40: mol_type = genomic DNA
ttgacttcccaaaaatggtgactaggaatggatttgagcc

SEQ ID NO: 13871 - protein, 463 aa, Clostridium saccharogumia
MEDTQPSGIMVKDMSRFGRNNAMFMYYVEEIFPNNDILFIALNDDVDTRYEDNEMMPFKSIMNEYYARDTSKKIRSVKKTTALSGGFCGSFAPYGYRVDPNNKRKLLIDPETAPIVKRIFEMSKQGNSVHQIARTLCEEKILIPRAYRAMKNGTLETSTGFRFPTDWVGKNVKMILENQVYLGHMVSHKTQTKSFKNRKLVAVPKEDWIVVKNTHEAIIDEETFELVQKFISVKKRPNKTGRPNMFVGLVKCPDCGRNMAFSNPNGREPRFRCRTYARNSNLCTTHAISYDALVKIVMDDIQKHIKNMETLGDQFIEEMRVLSESGGGKKIKQFKQELELAEKRIAEIDSIIMKLFEQNVAGKISDGRFEKMSVTYENEQRELEERRKALKEKIEAEDYKTKNTNKFLETIRKYENVTELNRSMLVELIDSIYVYQAEGTGKERTQKVEINYRFLCESQCGIA

SEQ ID NO: 13872 - DNA, 50 bp, Clostridium saccharogumia; identical to SEQ ID NO: 2817
  source 1..50: mol_type = genomic DNA

SEQ ID NO: 13873 - DNA, 40 bp, Clostridium saccharogumia
  source 1..40: mol_type = genomic DNA
atatattcacccattttatgatggtaatggaagaatgagc

SEQ ID NO: 13874 - DNA, 50 bp, Clostridium saccharogumia
  source 1..50: mol_type = genomic DNA
gtgagtcccaatgtggtattgcatcatggaaatgtaccattgagatacca

SEQ ID NO: 13875 - DNA, 40 bp, Clostridium saccharogumia
  source 1..40: mol_type = genomic DNA
ttagattcagcaatttaatcatagaaaagaaagaatgagc

SEQ ID NO: 13876 - protein, 538 aa, Anaerotruncus rubiinfantis
MLRQVTQNLITALYPRLSHEDELQGESNSISNQKRILEAFAKQNGFTNLRWYTDDGYSGANFQRPGFQAMLADIEAGKVGTVIVKDMSRLGRNYLQVGFYTEMLFPQKGVRFIAVNDNVDSANGGMDNDFTPLRNLFNEWLVRDTSKKIKAVKRAKGMSGKPVTSKPVYGYLMDEDENYIVDEETAPVVQQIYQLCLAGNGPTKIARMLTEQQIPTPGTLEYRRTGSTRRYHPGYECKWATNTVVHLLENREYTGCLVNFKTEKPSYKTKHSVENPVEKQAIFPNHHEPIIDTETWERVQELRKQRKRPNRYDEVGLFSGMLFCADCGHVMYQQRYQNKNRKQDCYICGSYKKRTRDCTAHFIRTDLLTAGVLSNLRQVTEYAAKHESRFVKLLIQQNEIGGKRKTAAATKQLEQAQERISEVSRIIKRLYEDNVNGKISDERFMELSADYEQEQRELKDRAAALQEELDKSQAATVNAEKFMGIVRKHLAFEELTPTLLREMIEKIVVHECSYDENGTRRQDIKIYYSFVGKIDLPE

SEQ ID NO: 13877 - DNA, 50 bp, Anaerotruncus rubiinfantis; identical to SEQ ID NO: 2967
  source 1..50: mol_type = genomic DNA

SEQ ID NO: 13878 - DNA, 40 bp, Anaerotruncus rubiinfantis
  source 1..40: mol_type = genomic DNA
agaaaagaagccggctgcgaaagcagccggcttcttttct

SEQ ID NO: 13879 - DNA, 50 bp, Anaerotruncus rubiinfantis
  source 1..50: mol_type = genomic DNA
ttacttctttatcgcacatcagtaattgctcatgtacggtaaggaagcaa

SEQ ID NO: 13880 - DNA, 40 bp, Anaerotruncus rubiinfantis
  source 1..40: mol_type = genomic DNA
aaataagaagctagctgagatagcttgcagcttcttttct

SEQ ID NO: 13881 - protein, 664 aa, Clostridium chromiireducens
MIQRQGKVLRGYINMSKKKKTVACYCRVSTKSGPQASSLNNQESFFKDFIGKNANDYKLHKIYADHGISGTLLHRENFEKMLIDAGLDIKEYDYTVKKLTTVSDKAETKEIKVNYKEYTFLVSDREPKFNEILVRNTSRFSRNVLIADVLRKLREKEVYVRFLDIDKTTENKADISIIQLFQNFDELFSRDLSRKVKAGNERSIANKTVRSTPRLYGYKYIKRKSLQENNKLEARPIEDNVVRSIYRLYAGCMSIYDDELPVCDYKCATCTVERTAGVGERVISKYLKEHNIYTRNKKEFGITTLGNMLKNEKYYGYLNTGKFDAGELFSANKSVKVRDNYLLEPDTNIEAIISKELFDLCQEKRSSRYDTIKAKGLPSTSSPFGGLLVCSVCGSKYLHNSDRGRGFYQCGLKKRKGLSACNSVNVSDAIITEYMYRLMAGALSADLYQDRQAVFKAVCKSIANKIDYIERRRDPEKVEQLQADRENADSELRAYYKQLIKEEEKGEDSTTLQRLIDDTKEVLSGIQKQLDRYTKKPIAYLDECKILREYAYELLNTPDISLEGLTKRTYTVSEVLNIINCIDVYGPTNYSGGAVSELLLKPRLKMPEMVKNILHIKEDIFSKGAEEEKTMENLENVHIIPPAKLKENIDELSAKLEVLETQYF

SEQ ID NO: 13882 - DNA, 50 bp, Clostridium chromiireducens
  source 1..50: mol_type = genomic DNA
accttgcctccgtaaccaaacataataatattatgttacagaggcaaggt

SEQ ID NO: 13883 - DNA, 40 bp, Clostridium chromiireducens
  source 1..40: mol_type = genomic DNA
agcggggaaacataatattattctttatggggaaccagga

SEQ ID NO: 13884 - DNA, 50 bp, Clostridium chromiireducens
  source 1..50: mol_type = genomic DNA
accttgcctccgtaaccaaacatattaatattatgttacagaggcaaggt

SEQ ID NO: 13885 - DNA, 40 bp, Clostridium chromiireducens
  source 1..40: mol_type = genomic DNA
agagtgtaaacataacttttttatttatggggaaacaaaa

SEQ ID NO: 13886 - protein, 615 aa, Klebsiella oxytoca; identical to SEQ ID NO: 3091

SEQ ID NO: 13887 - DNA, 50 bp, Klebsiella oxytoca; identical to SEQ ID NO: 2497
  source 1..50: mol_type = genomic DNA

SEQ ID NO: 13888 - DNA, 40 bp, Klebsiella oxytoca
  source 1..40: mol_type = genomic DNA
tttttgcatgataatcatacaaataagtaccattgcagca

SEQ ID NO: 13889 - DNA, 50 bp, Klebsiella oxytoca
  source 1..50: mol_type = genomic DNA
atgttgtaataagcgtcacacactaaagtgtgttatgcttatacaaacaa

SEQ ID NO: 13890 - DNA, 40 bp, Klebsiella oxytoca
  source 1..40: mol_type = genomic DNA
tttatataatataatgataaatataaatatcattgcagca

SEQ ID NO: 13891 - protein, 615 aa, Klebsiella oxytoca; identical to SEQ ID NO: 3101

SEQ ID NO: 13892 - DNA, 50 bp, Klebsiella oxytoca; identical to SEQ ID NO: 3102
  source 1..50: mol_type = genomic DNA

SEQ ID NO: 13893 - DNA, 40 bp, Klebsiella oxytoca; identical to SEQ ID NO: 13888
  source 1..40: mol_type = genomic DNA

SEQ ID NO: 13894 - DNA, 50 bp, Klebsiella oxytoca
  source 1..50: mol_type = genomic DNA
atgttgtaataggcgtcacacactaaagtgtgttatgcttatacaaacaa

SEQ ID NO: 13895 - DNA, 40 bp, Klebsiella oxytoca; identical to SEQ ID NO: 13890
  source 1..40: mol_type = genomic DNA

SEQ ID NO: 13896 - protein, 615 aa, Klebsiella oxytoca
MLIQTNIRGFNMKKVFVYHRVSSDQQLDGSGIARQAELLEGYLERTGICADMDDPAPVVLSDQGVSAFKGLNISEGELGAWMEQVRNGMWDSSILVVESIDRFSRQNPFDVMGYINALMAHNVAIHDVMANIVISRSNSKDLPFVMMNAQRAYDESKYKSDRIRKGWAKKREQAFNKGTIVTNKRPQWIEVENDKYVLNHKAAVVKEIFALYQTGMGCPTIAKQLQTKEGEQYKFNRPWTGELVHKILTNRRVTGKIFISEIIRNHDDIENPVTQKKYDMDVYPVVINEEEFELVQELLRSRRPNAGRVTVKKDGQEEVLIKSNLFSGIARCTECGGPMYHNVVRAKRTPKKGDPKIEEYRYIRCLNERDGLCENKAMTYETVERFVVEHLLGMDLNTVIKEHEFNPEIEVLRIQIDQVKDQITNYENGIERRKSAGKPISFDMREELDDAKSALERLLARQASLATVQVDVPVLQDVNVTELYDVNNVDIRTRYENELNKIVSNIRLKRNGKSYTIDINYKQNKLKRHVLFVENKKKEQTLISEVIIEDVDSAKFYYTPSFMIMLKDGEIRFQQTNEDLSIIDYSLLLNYIDAVDRNDAVGVWMRNQFNFLTSN

SEQ ID NO: 13897 - DNA, 50 bp, Klebsiella oxytoca; identical to SEQ ID NO: 10992
  source 1..50: mol_type = genomic DNA

SEQ ID NO: 13898 - DNA, 40 bp, Klebsiella oxytoca; identical to SEQ ID NO: 13888
  source 1..40: mol_type = genomic DNA

SEQ ID NO: 13899 - DNA, 50 bp, Klebsiella oxytoca
  source 1..50: mol_type = genomic DNA
atgttgtaataagcgtcacacactaaaatgtgttatgcttatacaaacaa

SEQ ID NO: 13900 - DNA, 40 bp, Klebsiella oxytoca; identical to SEQ ID NO: 13890
  source 1..40: mol_type = genomic DNA

SEQ ID NO: 13901 - protein, 478 aa, Streptococcus parasanguinis
MNKVALYVRVSTTSQLEEGYSIEEQKAKLESYCDIKDWHVYKVYTDGGFSGSTTERPALEQLIKDAQSKLFDTVLVYKLDRLSRSQKDTLYLIEDIFLKNNIEFVSLLENFDTSTPFGRAVIGLLSVFAQLEREQIKERMQLGKLGRAKSGKSMMWAKTSYGYNYDKETGSMTVNEYEALAVKEIFTSYLAGMSITKLRDKINGEYPKQPAWSYRTIRGILANPVYCGLNQYKGQTFQGTHKAIISLDDFEQTQRELAKRQQTAKELSNPRPFQAKYMLSGLAQCGYCHAPLKVILGAVRKDGTRFKRYECYQKHPRKTRGVTVYNDNKKCDSGHYDMELLEHYVLTRIAQLQNDPDKIQELFSDDTSPAVDKQAIQKQIDSLTLKLSKLNDLYLDDRITLDELRTKSSDFIKQRSALEEEIKKASNDKQAGQRERIEKLLDASSVLDMSYDNQKVIVRELIDKVQVTSDKVVIRWKI

SEQ ID NO: 13902 - DNA, 50 bp, Streptococcus parasanguinis
  source 1..50: mol_type = genomic DNA
ttgataaattaggttacgctattttcaatcaaggaaagtaaatttgtcac

SEQ ID NO: 13903 - DNA, 40 bp, Streptococcus parasanguinis
  source 1..40: mol_type = genomic DNA
caataagaccaccaacatttcaataagtgtaaaagcctta

SEQ ID NO: 13904 - DNA, 50 bp, Streptococcus parasanguinis
  source 1..50: mol_type = genomic DNA
ttgataaattaggttacgctatttacaatcaaggaaagtaaatttgtcac

SEQ ID NO: 13905 - DNA, 40 bp, Streptococcus parasanguinis
  source 1..40: mol_type = genomic DNA
ttacaagactacaaacattacaacatatgtaaaagcatta

SEQ ID NO: 13906 - protein, 481 aa, Streptococcus pneumoniae; identical to SEQ ID NO: 5021

SEQ ID NO: 13907 - DNA, 50 bp, Streptococcus pneumoniae; identical to SEQ ID NO: 2172
  source 1..50: mol_type = genomic DNA

SEQ ID NO: 13908 - DNA, 40 bp, Streptococcus pneumoniae; identical to SEQ ID NO: 5823
  source 1..40: mol_type = genomic DNA

SEQ ID NO: 13909 - DNA, 50 bp, Streptococcus pneumoniae
  source 1..50: mol_type = genomic DNA
taaataattttagtaacctacattacaatcaaggatagtaaaactctcac

SEQ ID NO: 13910 - DNA, 40 bp, Streptococcus pneumoniae; identical to SEQ ID NO: 13905
  source 1..40: mol_type = genomic DNA

SEQ ID NO: 13911 - protein, 481 aa, Streptococcus pneumoniae
MKTMNKVAIYVRVSTTNQVEEGYSIDEQKDKLSSYCDIKDWNVYKVYTDGGFSGSNTDRPALESLIKDAKKRKFDTVLVYKLDRLSRSQKDTLHLIEDVFIKNGIEFLSLQENFDTSTPFGKAMIGLLSVFAQLEREQIKERMQLGKIGRAKAGKSMMWAKTSYGYDYHRETGTITINPAQALTIKFIFESYLRGRSITKLRDDLNEKYPKHVPWSYRAVRTILDNPVYCGFNQYKGEIYPGNHEPIISKEEYDKTQSELKIRQRTAAENVNPRPFQAKYILSGIAQCGYCGAPLKIMLGVKRKDGSRLKKYECHQRHPRTLRGVTTYNDNKKCDSGFYYKDKLEAYVLKEISKLQDDADYLDKIFSGDNAETIDRESYKKQIEELSKKLSRLNDLYIDDRITLEELQSKSAEFISMRGTLETELENDPALRKNKRKADMRKLLNAEKVFSMDYENQKVLVRRLINKVKVIAEDIVINWKI

SEQ ID NO: 13912 - DNA, 50 bp, Streptococcus pneumoniae; identical to SEQ ID NO: 2172
  source 1..50: mol_type = genomic DNA

SEQ ID NO: 13913 - DNA, 40 bp, Streptococcus pneumoniae
  source 1..40: mol_type = genomic DNA
cagcaagaccactaacatttccaccaatgtaaaagcttta

SEQ ID NO: 13914 - DNA, 50 bp, Streptococcus pneumoniae; identical to SEQ ID NO: 13909
  source 1..50: mol_type = genomic DNA

SEQ ID NO: 13915 - DNA, 40 bp, Streptococcus pneumoniae; identical to SEQ ID NO: 13905
  source 1..40: mol_type = genomic DNA

SEQ ID NO: 13916 - protein, 481 aa, Streptococcus pneumoniae; identical to SEQ ID NO: 2226

SEQ ID NO: 13917 - DNA, 50 bp, Streptococcus pneumoniae; identical to SEQ ID NO: 2172
  source 1..50: mol_type = genomic DNA

SEQ ID NO: 13918 - DNA, 40 bp, Streptococcus pneumoniae; identical to SEQ ID NO: 5823
  source 1..40: mol_type = genomic DNA

SEQ ID NO: 13919 - DNA, 50 bp, Streptococcus pneumoniae; identical to SEQ ID NO: 13909
  source 1..50: mol_type = genomic DNA

SEQ ID NO: 13920 - DNA, 40 bp, Streptococcus pneumoniae; identical to SEQ ID NO: 13905
  source 1..40: mol_type = genomic DNA

SEQ ID NO: 13921 - protein, 481 aa, Streptococcus pneumoniae; identical to SEQ ID NO: 9451

SEQ ID NO: 13922 - DNA, 50 bp, Streptococcus pneumoniae; identical to SEQ ID NO: 2172
  source 1..50: mol_type = genomic DNA

SEQ ID NO: 13923 - DNA, 40 bp, Streptococcus pneumoniae; identical to SEQ ID NO: 13913
  source 1..40: mol_type = genomic DNA

SEQ ID NO: 13924 - DNA, 50 bp, Streptococcus pneumoniae; identical to SEQ ID NO: 13909
  source 1..50: mol_type = genomic DNA

SEQ ID NO: 13925 - DNA, 40 bp, Streptococcus pneumoniae; identical to SEQ ID NO: 13905
  source 1..40: mol_type = genomic DNA

SEQ ID NO: 13926 - protein, 481 aa, Streptococcus pneumoniae; identical to SEQ ID NO: 5036

SEQ ID NO: 13927 - DNA, 50 bp, Streptococcus pneumoniae; identical to SEQ ID NO: 2172
  source 1..50: mol_type = genomic DNA

SEQ ID NO: 13928 - DNA, 40 bp, Streptococcus pneumoniae; identical to SEQ ID NO: 5823
  source 1..40: mol_type = genomic DNA

SEQ ID NO: 13929 - DNA, 50 bp, Streptococcus pneumoniae; identical to SEQ ID NO: 13909
  source 1..50: mol_type = genomic DNA

SEQ ID NO: 13930 - DNA, 40 bp, Streptococcus pneumoniae; identical to SEQ ID NO: 13905
  source 1..40: mol_type = genomic DNA

SEQ ID NO: 13931 - protein, 479 aa, Streptococcus pneumoniae
MNKVAIYVRVSTKGQAEEGYSIDEQIALLTSYCSIHKWKIHDTYVDAGISGATIERPELSRLSRDAQKKKFNTMIVYDLKRLGRSQRNNISFIEDVLEKNGIGFISLTENFDTSTPLGKAMVGILSAFGQLDRDTIRERMMMGKIGRAKSGKPMMTSTIAFGYTYDKVTSSLNINPAEAIVVKTIYNEYLSGRSLTKLRDYLNENDLLRNGKPWNYQGISRILRNPVYMGMVRFRGEVYQGNHDPIIDSETFEAVQKELKKRQLETYEFNKNTRPFRAKYMLSGIIKCGYCGSPMGVTLGTKRKDGTRNIRYQCVNRFPRTTKGITVYNNGQKCNSGFYEKDDIEIYVLGQVRLLQLNKAKLNKMFETPEIINVEEIENQINSLNNKMKRLNDLYLNDMISLDELKTQTYTFLKQKDLLENELNNNPAINQEENRKQFQKLLGTKDITQLSYEEQSFAIKNLIDKVFVKPGIIDINWRI

SEQ ID NO: 13932 - DNA, 50 bp, Streptococcus pneumoniae; identical to SEQ ID NO: 2247
  source 1..50: mol_type = genomic DNA

SEQ ID NO: 13933 - DNA, 40 bp, Streptococcus pneumoniae; identical to SEQ ID NO: 5823
  source 1..40: mol_type = genomic DNA

SEQ ID NO: 13934 - DNA, 50 bp, Streptococcus pneumoniae
  source 1..50: mol_type = genomic DNA
ataacaaatttagatactcttgttacaagtagcgtatctaaaactcttat

SEQ ID NO: 13935 - DNA, 40 bp, Streptococcus pneumoniae; identical to SEQ ID NO: 13905
  source 1..40: mol_type = genomic DNA

SEQ ID NO: 13936 - protein, 479 aa, Streptococcus pneumoniae
MNKVAIYVRVSTKGQAEEGYSIDEQIALLTSYCSIHKWKIFDTYIDAGISGATIERPELSRLSRDAQKKKFNTMIVYDLKRLGRSQRNNISFIEDVLEKNGIGFISLTENFDTSTPLGKAMVGILSAFGQLDRDTIRERMMMGKIGRAKSGKPMMTSTIAFGYTYDKVTSSLNINPAEAIVVKTIYNEYLSGRSLTKLRDYLNENDLFRNGKPWNYQGVSRILRNPVYMGMVRFRGEVYQGNHDPIIDSETFEAVQKELKKRQLETYEFNKNTRPFRAKYMLSGIIKCGYCGSPMGVTLGTKRKDGTRNIRYQCVNRFPRTTKGITVYNNGQKCNSGFYEKDDIEIYVLGQVRLLQLNKAKLNKMFETPEIINVEEIENQINSLNNKMKRLNDLYLNDMISLDELKTQTYTFLKQKDLLENELNNNPAIHQEENRKQFQKLLGTKDITQLSYEEQSFAIKNLIDKVFVKPGIIDINWRI

SEQ ID NO: 13937 - DNA, 50 bp, Streptococcus pneumoniae; identical to SEQ ID NO: 2177
  source 1..50: mol_type = genomic DNA

SEQ ID NO: 13938 - DNA, 40 bp, Streptococcus pneumoniae; identical to SEQ ID NO: 5823
  source 1..40: mol_type = genomic DNA

SEQ ID NO: 13939 - DNA, 50 bp, Streptococcus pneumoniae
  source 1..50: mol_type = genomic DNA
ataacaaatttagatactcttgttacaagtagtgtatctaaaactctcac

SEQ ID NO: 13940 - DNA, 40 bp, Streptococcus pneumoniae; identical to SEQ ID NO: 13905
  source 1..40: mol_type = genomic DNA

SEQ ID NO: 13941 - protein, 481 aa, Streptococcus pneumoniae
MITTNKVAIYVRVSTTNQVEEGYSIEEQKDKLSSYCDIKDWSVYNVYTDGGFSGSNTDRPALEKLIKDAKKRKFDTVLVYKLDRLSRSQKDTLYLIEDIFIKNNIAFLSLQENFDTSTPFGKAMIGLLSVFAQLEREQIKERMQLGKLGRAKAGKSMMWAKTSYGYDYHRGTGTMTINPVQSLAIKFMFETYLSGRSITKLRDDLNEKFPKEKPWNYRAVRMILGNPVYCGYNQFMGEIYKGTHEPIISKETYDKVQEELKIRQRTALENNNPRPFQAKYILSGISQCGYCGAPLKLLMGMVRKDGTRFIRYECHQRHPRKIKGVTVYNNNEKCDSGFYCKDALENYVLTEISKLQDDTSYLDKIFSGDNAENIDRESYKKQIEELSKKLSRLNDLYIDDRITLEELQSKSAEFISMRATLETELENDPALKRDKRKSDMRKLLNAEKVFSMDYERQKILVRGIINKVQVTADKIVIKWKV

SEQ ID NO: 13942 - DNA, 50 bp, Streptococcus pneumoniae; identical to SEQ ID NO: 9442
  source 1..50: mol_type = genomic DNA

SEQ ID NO: 13943 - DNA, 40 bp, Streptococcus pneumoniae; identical to SEQ ID NO: 5823
  source 1..40: mol_type = genomic DNA

SEQ ID NO: 13944 - DNA, 50 bp, Streptococcus pneumoniae
  source 1..50: mol_type = genomic DNA
taaagaattttagtaaccttcattacaatcaaggatagtaaaactctcgc

SEQ ID NO: 13945 - DNA, 40 bp, Streptococcus pneumoniae; identical to SEQ ID NO: 13905
  source 1..40: mol_type = genomic DNA

SEQ ID NO: 13946 - protein, 481 aa, Streptococcus pneumoniae
MITTNKVAIYVRVSTTNQVEEGYSIDEQKDKLSSYCDIKDWNVYKVYTDGGFSGSNTDRPALESLIKDAKKRKFDTVLVYKLDRLSRSQKDTLHLIEDVFIKNGIEFLSLQENFDTSTPFGKAMIGLLSVFAQLEREQIKERMQLGKIGRAKAGKSMMWAKTSYGYDYHRETGTITINPAQALAIKFIFESYLRGRSITKLRDDLNEKYPKHVPWSYRAVRTILDNPVYCGFNQYKGEIYPGNHEPIISKEEYDKTQSELKIRQRTAAENVNPRPFQAKYILSGIAQCRYCGAPLKIMLGVKRKDGSRLKKYECHQRHPRTLRGVTTYNDNKKCDSGFYYKDKLEASVLKEISKLQDDADYLDKIFSGDNAETIDRESYKKQIEELSKKLSRLNDLYIDDRITLEELQSKSAEFISMRGTLETELENDPALRKNKRKADMRKLLNAEKVFSMDYESQKVLVRRLINKVKVTAEDIVINWKI

SEQ ID NO: 13947 - DNA, 50 bp, Streptococcus pneumoniae; identical to SEQ ID NO: 2172
  source 1..50: mol_type = genomic DNA

SEQ ID NO: 13948 - DNA, 40 bp, Streptococcus pneumoniae; identical to SEQ ID NO: 5823
  source 1..40: mol_type = genomic DNA

SEQ ID NO: 13949 - DNA, 50 bp, Streptococcus pneumoniae; identical to SEQ ID NO: 13909
  source 1..50: mol_type = genomic DNA

SEQ ID NO: 13950 - DNA, 40 bp, Streptococcus pneumoniae; identical to SEQ ID NO: 13905
  source 1..40: mol_type = genomic DNA

SEQ ID NO: 13951 - protein, 481 aa, Streptococcus pneumoniae; identical to SEQ ID NO: 2171

SEQ ID NO: 13952 - DNA, 50 bp, Streptococcus pneumoniae; identical to SEQ ID NO: 2172
  source 1..50: mol_type = genomic DNA

SEQ ID NO: 13953 - DNA, 40 bp, Streptococcus pneumoniae; identical to SEQ ID NO: 5823
  source 1..40: mol_type = genomic DNA

SEQ ID NO: 13954 - DNA, 50 bp, Streptococcus pneumoniae; identical to SEQ ID NO: 13909
  source 1..50: mol_type = genomic DNA

SEQ ID NO: 13955 - DNA, 40 bp, Streptococcus pneumoniae; identical to SEQ ID NO: 13905
  source 1..40: mol_type = genomic DNA

SEQ ID NO: 13956 - protein, 481 aa, Streptococcus pneumoniae; identical to SEQ ID NO: 5021

SEQ ID NO: 13957 - DNA, 50 bp, Streptococcus pneumoniae
  source 1..50: mol_type = genomic DNA
taaataattttagtaacctacattttaatcaaggatagtaaaactctcac

SEQ ID NO: 13958 - DNA, 40 bp, Streptococcus pneumoniae; identical to SEQ ID NO: 5823
  source 1..40: mol_type = genomic DNA

SEQ ID NO: 13959 - DNA, 50 bp, Streptococcus pneumoniae; identical to SEQ ID NO: 13909
  source 1..50: mol_type = genomic DNA

SEQ ID NO: 13960 - DNA, 40 bp, Streptococcus pneumoniae; identical to SEQ ID NO: 13905
  source 1..40: mol_type = genomic DNA

SEQ ID NO: 13961 - protein, 481 aa, Streptococcus pneumoniae; identical to SEQ ID NO: 7681

SEQ ID NO: 13962 - DNA, 50 bp, Streptococcus pneumoniae; identical to SEQ ID NO: 2172
  source 1..50: mol_type = genomic DNA

SEQ ID NO: 13963 - DNA, 40 bp, Streptococcus pneumoniae; identical to SEQ ID NO: 5823
  source 1..40: mol_type = genomic DNA

SEQ ID NO: 13964 - DNA, 50 bp, Streptococcus pneumoniae; identical to SEQ ID NO: 13909
  source 1..50: mol_type = genomic DNA

SEQ ID NO: 13965 - DNA, 40 bp, Streptococcus pneumoniae; identical to SEQ ID NO: 13905
  source 1..40: mol_type = genomic DNA

SEQ ID NO: 13966 - protein, 442 aa, Streptococcus pneumoniae
MIATNKVAIYVRVSTTNQVEEGYSIDEQKDKLSSYCDIKDWNVYKVYTDGGFSGSNTDRPALESLIKDAKKRKFDTVLVYKLDRLSRSQKDTLYLIEDIFIKNNIAFLSLQENFDTSTPFGKAMIGLLSVFAQLEREQIKERMQLGKIGRAKAGKSMMWAKTSYGYDYHRETGTITINPAQALAVKFIFESYLRGRSITKLRDDLNEKYPKHVPWSYRAVRTILDNPVYCGFNQYKGEIYPGNHESIISKEEYDKTQSELKIRQRTAAENVNPRPFQAKYILSGIAQCGYCGAPLKIMLGVKRKDGSRLKKYECHQRHPRTLRGVTTYNDNKKCDSGFYYKDKLEAYVLTEISKLQDNAGYLDKIFSGDNAETIDRESYKKQIEELSKKLSRLNDLYIDDRITLEELQSKSAEFISMRGTLETELENDPALRKNKRKADMRN

SEQ ID NO: 13967 - DNA, 50 bp, Streptococcus pneumoniae; identical to SEQ ID NO: 2172
  source 1..50: mol_type = genomic DNA

SEQ ID NO: 13968 - DNA, 40 bp, Streptococcus pneumoniae; identical to SEQ ID NO: 5823
  source 1..40: mol_type = genomic DNA

SEQ ID NO: 13969 - DNA, 50 bp, Streptococcus pneumoniae; identical to SEQ ID NO: 13909
  source 1..50: mol_type = genomic DNA

SEQ ID NO: 13970 - DNA, 40 bp, Streptococcus pneumoniae; identical to SEQ ID NO: 13905
  source 1..40: mol_type = genomic DNA

SEQ ID NO: 13971 - protein, 481 aa, Streptococcus pneumoniae; identical to SEQ ID NO: 2201

SEQ ID NO: 13972 - DNA, 50 bp, Streptococcus pneumoniae; identical to SEQ ID NO: 2172
  source 1..50: mol_type = genomic DNA

SEQ ID NO: 13973 - DNA, 40 bp, Streptococcus pneumoniae; identical to SEQ ID NO: 5823
  source 1..40: mol_type = genomic DNA

SEQ ID NO: 13974 - DNA, 50 bp, Streptococcus pneumoniae; identical to SEQ ID NO: 13909
  source 1..50: mol_type = genomic DNA

SEQ ID NO: 13975 - DNA, 40 bp, Streptococcus pneumoniae; identical to SEQ ID NO: 13905
  source 1..40: mol_type = genomic DNA

SEQ ID NO: 13976 - protein, 481 aa, Streptococcus pneumoniae; identical to SEQ ID NO: 5071

SEQ ID NO: 13977 - DNA, 50 bp, Streptococcus pneumoniae; identical to SEQ ID NO: 2172
  source 1..50: mol_type = genomic DNA

SEQ ID NO: 13978 - DNA, 40 bp, Streptococcus pneumoniae; identical to SEQ ID NO: 5823
  source 1..40: mol_type = genomic DNA

SEQ ID NO: 13979 - DNA, 50 bp, Streptococcus pneumoniae; identical to SEQ ID NO: 13909
  source 1..50: mol_type = genomic DNA

SEQ ID NO: 13980 - DNA, 40 bp, Streptococcus pneumoniae; identical to SEQ ID NO: 13905
  source 1..40: mol_type = genomic DNA

SEQ ID NO: 13981 - protein, 481 aa, Streptococcus pneumoniae; identical to SEQ ID NO: 2261

SEQ ID NO: 13982 - DNA, 50 bp, Streptococcus pneumoniae; identical to SEQ ID NO: 2172
  source 1..50: mol_type = genomic DNA

SEQ ID NO: 13983 - DNA, 40 bp, Streptococcus pneumoniae; identical to SEQ ID NO: 5823
  source 1..40: mol_type = genomic DNA

SEQ ID NO: 13984 - DNA, 50 bp, Streptococcus pneumoniae; identical to SEQ ID NO: 13909
  source 1..50: mol_type = genomic DNA

SEQ ID NO: 13985 - DNA, 40 bp, Streptococcus pneumoniae; identical to SEQ ID NO: 13905
  source 1..40: mol_type = genomic DNA

SEQ ID NO: 13986 - protein, 481 aa, Streptococcus pneumoniae; identical to SEQ ID NO: 2186

SEQ ID NO: 13987 - DNA, 50 bp, Streptococcus pneumoniae; identical to SEQ ID NO: 2187
  source 1..50: mol_type = genomic DNA

SEQ ID NO: 13988 - DNA, 40 bp, Streptococcus pneumoniae; identical to SEQ ID NO: 5823
  source 1..40: mol_type = genomic DNA

SEQ ID NO: 13989 - DNA, 50 bp, Streptococcus pneumoniae
  source 1..50: mol_type = genomic DNA
taaataattttagtaacttacattacaatcaaggatagtaaaactctcac

SEQ ID NO: 13990 - DNA, 40 bp, Streptococcus pneumoniae; identical to SEQ ID NO: 13905
  source 1..40: mol_type = genomic DNA

SEQ ID NO: 13991 - protein, 550 aa, Oscillibacter sp
MKQSDKITALYCRLSRDDESQGDSNSIVNQKAYLSRYAKEHSFRNTEFFVDDGYTGANFQRPDWQRMMALVEEGKIGTVITKDMSRIGRNYLEVGMYTEITFPQNNVRFIAVNSGVDSANQQDNEFVPFVNIINEYYVRDGSKKVRTSLRLKGESGEHLTTIPPYGYVKDPDNSEHWLVDPEAAQVVKRIFFLCMDGNGPTQIARMLKEDHVLTPTVYQDRQKRKVRCALPDNPYNWNGSTVAAILERMEYCGHTVNFKTHRQSYKIKKTIENPPEQWKIFRNTHEAIVDEDTFQRVQELRRNKRRPARTGKSNLFSGVAYCADCGEKMYYCTSRNFEERQDHFVCSTSRKKGKDVCGTHFIRAVVLEKGVLKFLQILLWYISDCEDLFRDKLGAKRKEDFKKELAAKRRQLTQAQRRMEELDRLFKRLYEDNISGKINDSRFEKLSADYENEQAELTEKMQLLEQEIAQQEEEADSIEQFILRAKKYHNLQELTPAVLHDLVNRVYVSAPDKSSGQRVQDVHISLACIGFLPESIIAEMLTHASKSRTA

SEQ ID NO: 13992 - DNA, 50 bp, Oscillibacter sp
  source 1..50: mol_type = genomic DNA
aacctgtcttatgcgctgctaccctgaggtagctgtccataaaacaggtt

SEQ ID NO: 13993 - DNA, 40 bp, Oscillibacter sp
  source 1..40: mol_type = genomic DNA
cgggggaaaaagcgggcagtgggggcattcgttggcattt

SEQ ID NO: 13994 - DNA, 50 bp, Oscillibacter sp
  source 1..50: mol_type = genomic DNA
aacctgtcttatgcgctgctacccggaggtagctgtccataaaacaggtt

SEQ ID NO: 13995 - DNA, 40 bp, Oscillibacter sp
  source 1..40: mol_type = genomic DNA
tgggggaagaagggggaaggggaggcatgcgctggcgctt

SEQ ID NO: 13996 - protein, 502 aa, Clostridioides difficile
MEFIREDCIYARQSVDRKDSISIESQIDFCKYELKGGSCRIFKDKGYSGKNTDRPEFQKLLGEIRKGKVRRVIVYKLDRISRSILDFATMMELFQEYDVEFVSSTEKFDTSTPMGRAMLNICIVFAQLERETIQKRVTDAYYSRCLKGFHMSGQAPYGYQLEPTVVEGIRTKKMVADPVAADHVRLMFEMYAEPETSFGDITRYFEEHDIKIYGKSMFRTFLSQLLRNPVYAQADLELYEFFKSQGAAIVNDASDFAGTNGCYLYQGRDVKEDKDRCLKDQILVIAPHEALISSDTWLKCRKKLMANTTFQQGRKPKNTWLAGKIKCGHCGYALKATHVPNSTGYFRCTKRTENKGCPGCGKIRKEEFEQFIFSAMQEKFKDFQILHGREEKVNPKLTAYQVELAQVEAEIEKLLDTLTGANATLLAYANKKIEELDTRRQTISKAIAELSVETISPQQIKKLSYYLDNWDSIDFDDKRKAADGLISTIKATSDHVQIEWKI

SEQ ID NO: 13997 - DNA, 50 bp, Clostridioides difficile; identical to SEQ ID NO: 2062
  source 1..50: mol_type = genomic DNA

SEQ ID NO: 13998 - DNA, 40 bp, Clostridioides difficile
  source 1..40: mol_type = genomic DNA
ttacattatgaaaaagtgcttccttttgtgttgaatcaat

SEQ ID NO: 13999 - DNA, 50 bp, Clostridioides difficile
  source 1..50: mol_type = genomic DNA
tttgtaccccttgtacaccgatgttagcaacggtgtacaaagggaacata

SEQ ID NO: 14000 - DNA, 40 bp, Clostridioides difficile
  source 1..40: mol_type = genomic DNA
attcattatgaaaaattgctaccttttttatttaataaga

SEQ ID NO: 14001 - protein, 463 aa, Staphylococcus aureus
MKVAIYTRVSSAEQANEGYSIHEQKRKLISFCEVNDWDRYEVFSDPGVSGGSMKRPSLQKLFDRLEEFDLVLVYKLDRLTRNVRDLLEMLEVFEKNNIAFKSATELFDTTSAIGKLFITMVGAMAEWERETIRERSLIGARAAVRSGKYIKVQPFCYDLVDQKLKPNQYAEYIRFIVDKLLSGKSANEVVRLLESKKKPPGITKWNRKTVLGWMRNPILRGHTKHGDLLIKNTHEPIISEDEHSKMLDIIDKRTHKSKTKHNSIFRGVIECPQCQNKLYLVSSIQKRANGGSYEVRRYTCATCHKNKEVKDVSFNESEIEREFINTLLKKGTDNFMVNIPKPKDYDIENNKEKILEQRANYTRAWSLGYIKDEEYFVLMDETDKLLKDIEEKESPRINIELNEQQIRSVKNLLIKGFKMATAENKEELITSTVDLIKIDFIPRRLNKEGNINTVKINEIHFKY

SEQ ID NO: 14002 - DNA, 50 bp, Staphylococcus aureus
  source 1..50: mol_type = genomic DNA
aatgagtgttatgtaactagaaagaacgcaatagttacaaaacattcatt

SEQ ID NO: 14003 - DNA, 40 bp, Staphylococcus aureus
  source 1..40: mol_type = genomic DNA
tattggtgttaccattaataatgaaaatgccacactaata

SEQ ID NO: 14004 - DNA, 50 bp, Staphylococcus aureus
  source 1..50: mol_type = genomic DNA
aatgagtgttatgtaactagaaagcccgcaatagttacaaaacattcatt

SEQ ID NO: 14005 - DNA, 40 bp, Staphylococcus aureus
  source 1..40: mol_type = genomic DNA
tatcagtgttccttttactcctggaaatgcaacactaatg

SEQ ID NO: 14006 - protein, 537 aa, Fusicatenibacter saccharivorans
MKQQIYNTALYLRLSRDDELQGESSSITTQRSMLRLYAKEHHLNVIDEYIDDGWSGTNFDRPSFQRMIEDIEAGKINCVVTKDLSRLGRNYIMTGQYTELYFPSHNVRYIAIDDGVDSEKGESEIAPFKNIINEWVARDTSRKVKSAFKTKFAEGAHYGAYAPLGYKKHPDIKGKLLIDEETKWIIEKIFSLAYQGYGSAKITKQLRVEKVPTASWLNFTRYGTFAHIFEGKPESKRYEWTIAHVKAILKSEVYIGNSVHNMQSTVSFKSKKKVRKPESEWFRVENTHEPIIDKEVFYRVQEQIKSRRRQTKEKATPIFAGLVKCADCGWSMRLGTNKANKTPYSYYACSYYGQFGKGNCSMHYIRYDVLYQAVLERLQYWAKAVQQDEEKVLNKIQKVGNAERIREKKKKASTLKKAENRQNEIDRLFAKMYEDRACEKITERNFVMLSSKYQKEQIELEQQITSLREELSKMEQDMIGAEKWIELIKEYSVPKELTAPLLNAMIEKILIHEATTNEDNERIQEIEIYYRFIGKVE

SEQ ID NO: 14007 - DNA, 50 bp, Fusicatenibacter saccharivorans
  source 1..50: mol_type = genomic DNA
taatatttttaactaagggaaaccggagtttccccaacaaaaggatatta

SEQ ID NO: 14008 - DNA, 40 bp, Fusicatenibacter saccharivorans
  source 1..40: mol_type = genomic DNA
agttagcaaatgggaacgtggtcttagtatgcccaatgtc

SEQ ID NO: 14009 - DNA, 50 bp, Fusicatenibacter saccharivorans
  source 1..50: mol_type = genomic DNA
taatatttttaactaagggaaacccaagtttccccaacaaaaggatatta

SEQ ID NO: 14010 - DNA, 40 bp, Fusicatenibacter saccharivorans
  source 1..40: mol_type = genomic DNA
agttagtaagtggggaagtcatgtttgtatgaacaatgta

SEQ ID NO: 14011 - protein, 547 aa, Escherichia coli
MKLLATYIRWSTKEQDSGDSLRRQTNLIDAFYSKHKNDYYLLPAHRYVDKGKSGFHQQHKAQGSDFRRMFENVMSGAIPEGSLIVVENFDRFSRADIDTAIDDVRQILRKGVSILTLGDGELYDKSALTDPVKLIKHIIIAERAHQESLVKQKRIAQVWNHKTQLARELKKPMGKQAPGWLELSEDGSHYIVDEDKASLVNIIYDKRLSGMSMFAICKWLNEQGYPTINQRKVRISKTKKPDGNWSALSVKHILTSRSVLGYLPAKISTEDRKTVLREEIESFYPQIVTDSKFYAVQQLLEETGKGKTSSGEHWLYVNILKGLIRCKCGLVMTPTGIRKPVYQGTYRCNGNKESRCSYGTVSRKLLDTQLCSRLFSKLSQLHDEATDTAKLDELQRRLNTVDSELEKLTETLIQLPNITQIQEALRVKQEEKDELIVQLSREKARVKSVSSLDLSGLDMESVEGRTEAQIIIKRLVKEIVVSGNEKLVDIYLHNGNMIRGFPLDGKDDHTLTLEEATDEMQSLDDMLIFGEPVTRIYPAGDMEEVDA

SEQ ID NO: 14012 - DNA, 50 bp, Escherichia coli; identical to SEQ ID NO: 3242
  source 1..50: mol_type = genomic DNA

SEQ ID NO: 14013 - DNA, 40 bp, Escherichia coli
  source 1..40: mol_type = genomic DNA
gtacatggaataatagagcaccagaactttagccatttct

SEQ ID NO: 14014 - DNA, 50 bp, Escherichia coli
  source 1..50: mol_type = genomic DNA
gtacgtgtttagctatgtaaaagcattagtattcttgccttaacactcat

SEQ ID NO: 14015 - DNA, 40 bp, Escherichia coli
  source 1..40: mol_type = genomic DNA
gtagatggaataagagagaatcataaatccagtcacttct

SEQ ID NO: 14016 - protein, 575 aa, Ruminococcus torques
MTATQKHDIIPVCTTVLSADQQPKEDIMLDQQKITILYCRLSNEDAQDGESNSIANQREYLTRYARNHGYTNLKILVDDGYTGTNFNRPGVQEGFELVKQGLVGCWLVKDLSRFGRDYLTVGQYTDIIFPSYDVRFIAVNDGVDSNRGDSEGFAAIRNLFNEWYPRDTSKKVRVSLRQRGTSGKHMGKPPYGYRCDPEDKDHWILDEEAAPVVKLIFDLCIDGKGPEQIARILEEKQILTAKALYAKRKKKPMPERPYHWSNQSIVGILERQEYTGCTCNFKTYSKSYKLKKRIPNEPENMFYLPDTQEAIVSQAQFDRVQELRKNKRRPAKAERQGLFSGLLFCADCGGKLHFATSKSFEGKQDHYVCNNYKSNRGTCTAHYIREDVLREIVLERIRAVNEYIRSDVDGFQEEWLQCRRTDQERSIRDDKKKLEQAKKRLADLDVIISRLYEDYVLGNLNQDRYRKMSADYEAEQERLKLEIEVIEEWVEQREEMNDGLDAFIALTQKYVDVEELTQTIVNEYIKKIVVYAPDKSSGKRKQKVKIFFNFVDDVDIPVISEPIVTQTTYERRKTA

SEQ ID NO: 14017 - DNA, 50 bp, Ruminococcus torques; identical to SEQ ID NO: 277
  source 1..50: mol_type = genomic DNA

SEQ ID NO: 14018 - DNA, 40 bp, Ruminococcus torques
  source 1..40: mol_type = genomic DNA
aaaagaatcccgaaaaacattagtctttcgggatctctca

SEQ ID NO: 14019 - DNA, 50 bp, Ruminococcus torques; identical to SEQ ID NO: 2839
  source 1..50: mol_type = genomic DNA

SEQ ID NO: 14020 - DNA, 40 bp, Ruminococcus torques
  source 1..40: mol_type = genomic DNA
acaaaaataaagaaaaacatgagtcatttggcatccctca

SEQ ID NO: 14021 - protein, 540 aa, Eubacterium rectale
MKQPYNTTIYNTALYMRLSRDDENYGDSVSIETQRTILQQYAKEQGLHVVGEYVDDGWSGTNFERPDFQRMMDDVEAGKVNCIVTKDLSRFGREHVMMDYYLEFLFPEKRVRYIAVAENEDTEKGLSDFVPFKNLFNEWFAKDTSRKVKAAFKAKFATGQRIGAYAPIGYRKHPEIKNKLIIDEETRWIVEKIFDLAIHGRGAASITRILIMEKVPTPGFINFQRDGTFANIYAGAPEEKSYAWTIAQVKSIMKDETYIGHTIHYRETNISFKNKRRVRKPQSEWVRVENTQEPIISEQVFRQVQEQIANRRRKCKDGTTQIFSGLVKCADCGWSLSYGENRQNSKPYGHYHCSKYGQGTRQCSMHYIRYDVLYAYVLSRLQYWSGLVQHDEERLLKRLLNATDKGQAAARKKQAAELKKAEKRKAEVDTLFARMYEDWAAGRITEYNFSMLSGKYQSEQAELDEKIERLQSAIATESQNAADAEKWIALMKECVNPTELTAELLNTLIEKIVVHEAVKGEDGSREQEVEIFYRFIGKID

SEQ ID NO: 14022 - DNA, 50 bp, Eubacterium rectale; identical to SEQ ID NO: 3872
  source 1..50: mol_type = genomic DNA

SEQ ID NO: 14023 - DNA, 40 bp, Eubacterium rectale
  source 1..40: mol_type = genomic DNA
ttgaagtatgaaatcctttgcttgtaatgtcaaagtaaat

SEQ ID NO: 14024 - DNA, 50 bp, Eubacterium rectale
  source 1..50: mol_type = genomic DNA
agataggaattttgattatccggatattgaaataaggtgtaaacttctca

SEQ ID NO: 14025 - DNA, 40 bp, Eubacterium rectale
  source 1..40: mol_type = genomic DNA
ttaatatattaaatgcttctattgtaatatcaaagtgaaa

SEQ ID NO: 14026 - protein, 474 aa, Clostridiales bacterium UBA1390
METAAAYIRVSTDKQDELSPDAQLRLLKEYAQGHDLLLPEEYIFWEIGVSGRKAERRPEFLRMISLAKSHPSPFQYILVWKFSRFARNQEESIVYKSLLQKESGIQVISASEPLVEGPFGSLIERIIEWMDEYYSIRLSGEVLRGMTEKALRGEIQCKAPFGYQMQNGHLIPDSQEAPIVRRIFHDYLAGQSPGAIARSLNAWGCRTKKGSLWERRAIVYILQNPVYAGILRFSTKGPISHRNAAAIAASPDIIYTRAHHEPLLCEAEYREVQTRMQKNCIPPRAKAPSAGLHKHYLSGLLYCGRCGTGMTYANRSSSPCFRCRAYARGQCTDSSYLSLSVAVQCLLTSLDDFGTDLSLVTSRSSQTDTDLGRLLSKQLRQEEARLQRARDAYLAGIDTQEEYLAHKTEGEAHRQHLQEALSRLSPAVPPPVSLSDLLGSSDWSMEEKHDALHAVVDHILWDRANRTFSIYYRL

SEQ ID NO: 14027 - DNA, 50 bp, Clostridiales bacterium UBA1390
  source 1..50: mol_type = genomic DNA
ctgtgtacctttcctcggattggatgccctaatgtctgaaagatacactc

SEQ ID NO: 14028 - DNA, 40 bp, Clostridiales bacterium UBA1390
  source 1..40: mol_type = genomic DNA
gtatcctgccccaattggatgacccaatgggggagccaac

SEQ ID NO: 14029 - DNA, 50 bp, Clostridiales bacterium UBA1390
  source 1..50: mol_type = genomic DNA
ctgtgtacctttcctcggattggaaaccctaatgtctgaaagatacactc

SEQ ID NO: 14030 - DNA, 40 bp, Clostridiales bacterium UBA1390
  source 1..40: mol_type = genomic DNA
gtatctggtcccaaatctaaaacccaatggggaaaacaac

SEQ ID NO: 14031 - protein, 500 aa, Flavonifractor plautii; identical to SEQ ID NO: 13441

SEQ ID NO: 14032 - DNA, 50 bp, Flavonifractor plautii
  source 1..50: mol_type = genomic DNA
ttgtgttcgtcgttggttgcggacgctccaccaaaaatcccagtctcgaa

SEQ ID NO: 14033 - DNA, 40 bp, Flavonifractor plautii
  source 1..40: mol_type = genomic DNA
gggggttcgactccccccgcctccaccaaaaaagaaagac

SEQ ID NO: 14034 - DNA, 50 bp, Flavonifractor plautii
  source 1..50: mol_type = genomic DNA
ttgtgttcgtcgttggttgcggaccctccaccaaaaatcccagtctcgaa

SEQ ID NO: 14035 - DNA, 40 bp, Flavonifractor plautii
  source 1..40: mol_type = genomic DNA
tgcggtttgacacctcccaccaccaccaaaaaagaaaagc

SEQ ID NO: 14036 - protein, 595 aa, Cronobacter turicensis
MYAKKRNWKIVMKSYLYSRISTLQQTKGFGIDRQVQTVTDFLKYATIDSRLGYQLDVEDFEVLESDLGKSAYKGNNWKPNSSLGRFYKDVVSGRITSGVLICENVDRLVRMSNYEASNKLSTLITNGIDIIEVESGMCFSNKIPESATILNMSISRAYSESKRKSDMATMSWANRTNKLKDSGRAVSKVCPRWLTVKDGQYVLDEKQAETLLYIHQMYLEGHGNSALVRRLNAAKRLDNGKPWTTITLHRVLRDERLTGRMVMGKTRKPIPVLDDQGNKIIENGKVKTYVPVEIIDDAYPVVVPRELFNQVQAMISEKEGSKVKKTTKYMRNIFNGVSRCSSCGEALVADKNGHGKLFYVCLGKRHKKACNSVGIPYEAFERTMLENLSQMDWQRIYTGNTDMEAMNQCRVRLVAVEREIAELEGELESSDEDMVLALVRAIKKKKAVRDEVQGELNSYVKAGTDNVTFNPDLKRVLNQEEVELRQDVNVELRKIIKYMKVGRMDRTITVQLQYYTDVVSHLIFIDSKTGELLSRSHLTNDLIYESDSVTIDLTGGTWDIKGDKFTEWDQFALEVWKEIIEQAVDQAQEILKNRI

SEQ ID NO: 14037 - DNA, 50 bp, Cronobacter turicensis
  source 1..50: mol_type = genomic DNA
gtaaacgttgatcgattgcgaacagttgtgatacaatgtacgccaagaaa

SEQ ID NO: 14038 - DNA, 40 bp, Cronobacter turicensis
  source 1..40: mol_type = genomic DNA
ccatcagcagcagcgagcagtcggtggtgccgccgccgat

SEQ ID NO: 14039 - DNA, 50 bp, Cronobacter turicensis
  source 1..50: mol_type = genomic DNA
gtaaacgttgatcgattgcgaacacttgtgatacaatgtacgccaagaaa

SEQ ID NO: 14040 - DNA, 40 bp, Cronobacter turicensis
  source 1..40: mol_type = genomic DNA
cccacagcggcggcgagccctcgatggtcccgccaccgaa

SEQ ID NO: 14041 - protein, 557 aa, Agrobacterium tumefaciens
MTRVALYARYSSDNQRDASIEDQLRQCRERAAREGWTVVETYSDRAISGASLIRSGIQSLLADAQAGRFEMVLSEALDRLSRDQEDVAGVFKRLSFAGVRIFTLSEGEINELHVGLKGTMNALFLKDLALKTHRGIRGRVEAGRIGGGNAYGYRVVHRLDARGEPIRGEREIIEEQADIVRRIFRDYAAGKGPRRIAAELNRENIPSPTGKRWNDATIRGNRAISSGILNCELYIGVIRWNRQKKLKNPDTGRFTYRLNPESEWIRAEAPELRIVPQDLWDAAKAQQDKLTGLYRKQIDGARDAMHTARQKNGGLNATHRPRTLLSGLVFCGCCGGSYARRGQDRFTCTNHMLGNGCDNARTVPGKLLETRVLAGLRERLMTPEMVTEAMSAYTQETNRLNRERRSAAETTRRDLAETSKAIAEIVRVIEQGGWHRALSDRLTELEARQDSLAARLSDIPEDVPDLHPGIAETYRRRIERLTETLSHPDHALEAAEAIREVIDRIVVTPGKKRGSYSITLQGELGTILDWIDRTGKPGYKPKPDTAQSRLSVSVDTR

SEQ ID NO: 14042 - DNA, 50 bp, Agrobacterium tumefaciens
  source 1..50: mol_type = genomic DNA
tttgtcggtctcggtagatacccgggcaggatttgaccgagaccgacatt

SEQ ID NO: 14043 - DNA, 40 bp, Agrobacterium tumefaciens
  source 1..40: mol_type = genomic DNA
ctctcctccgtcatgctcgggcctgtcccgagcatctgct

SEQ ID NO: 14044 - DNA, 50 bp, Agrobacterium tumefaciens
  source 1..50: mol_type = genomic DNA
tttgtcggtctcggtagatacccgcacaggatttgaccgagaccgacatt

SEQ ID NO: 14045 - DNA, 40 bp, Agrobacterium tumefaciens
  source 1..40: mol_type = genomic DNA
ctcacttctctgattctagcacctgtcctgagcacctgct

SEQ ID NO: 14046 - protein, 481 aa, Streptococcus suis; identical to SEQ ID NO: 2761

SEQ ID NO: 14047 - DNA, 50 bp, Streptococcus suis
  source 1..50: mol_type = genomic DNA
gctgtcattaacttgacacaagagggggattgtgtcataataatgacaag

SEQ ID NO: 14048 - DNA, 40 bp, Streptococcus suis
  source 1..40: mol_type = genomic DNA
catttgggtagcaactgggggcaatgtagaatccaccatt

SEQ ID NO: 14049 - DNA, 50 bp, Streptococcus suis
  source 1..50: mol_type = genomic DNA
gctgtcattaacttgacacaagagcaggattgtgtcataataatgacaag

SEQ ID NO: 14050 - DNA, 40 bp, Streptococcus suis
  source 1..40: mol_type = genomic DNA
catttgggtggccattacccaaaatgtagaataaaccatt

SEQ ID NO: 14051 - protein, 479 aa, Streptococcus agalactiae
MSKIALYLRLSVDEANTDESNSIINQRLLLSRYLDHNPEFQTFQREEFVDDGFSGTSTNRPAFQRLMAGVKSGAIRHILVKDLSRFMRDYLELGNYLENIFPFLGVRFIALNDQYDSKTSEQNGLEIDVPFRNLLNDFYAKDVSEKVKSAMNTMKRSGKNMSWLPPFGYLKDPEDRFKIIIDEEVASIVRRIFRLSIEGMGDQKIAQILNQEQTITPAERKMQVSQARYRKTMILTVEQKRNVWTKGSIRQILKNEAYKGTYLFNTRTYIRGKHVRRPESEWERIENNHEAIVSTEVFEQAQQARKVRQGSQSSSLSQKTEKSILTGLVFCEHCGHRLSLRHNKGQIGYFYCGYCKGQGHSVSFCRLDKIEASILEALSCYLESSAQLKASTETARGIERLKARKLELFQEYKECYISRDMYLDKKVAIDEQVTSLEKALIAEQKPQLSTKGLTKEIVEAHVEKIVVDCLGFFEVIYKS

SEQ ID NO: 14052 - DNA, 50 bp, Streptococcus agalactiae
  source 1..50: mol_type = genomic DNA
tgcgtcattttcttgacatgagaggggtattgtgtcataataatgacagg

SEQ ID NO: 14053 - DNA, 40 bp, Streptococcus agalactiae
  source 1..40: mol_type = genomic DNA
aggagctgctttaccaggcggccatattgaagaaggagaa

SEQ ID NO: 14054 - DNA, 50 bp, Streptococcus agalactiae
  source 1..50: mol_type = genomic DNA
tgcgtcattttcttgacatgagagacgtattgtgtcataataatgacagg

SEQ ID NO: 14055 - DNA, 40 bp, Streptococcus agalactiae
  source 1..40: mol_type = genomic DNA
aggagctgcttactcaggtaccataattgaataaggacaa

SEQ ID NO: 14056 - protein, 478 aa, Streptococcus agalactiae
MSKMALYLRLSVDEDGTDESNSITNQRYLLNHYLDQSPDFSRWERLEFVDDGFSGTSLNRPAFQRLMTDVKVGIIRHIIVKDLSRFMRDYLELGNYLENIFPFLGVRFIAINDQYDSLTSEQNGLDIDVPFRNLLNDFYAKDVSEKVKSAMNSMKRSGKNMSWLPPFGYIKDPEDRFKIIIDEAVAPIVRRIFTLYLDGNSYQNIARILNKEQVITPAERKKQISQARYENSLRLTREQERNVWSVINVAQILKNEAYKGTYLYNTRTYIRGKHVSLPKSEWERIENNHEAIISPDQFEQVARLKAKKVTHKKHSQPPKIPSILTGLIRCEHCDHSLIGHYNHQGYQYFSCRYCKGQGEKMKSCRVDRIEQSIKEKLGQEVVKPRQIASKTRLLREIERLKKQKLSCYQDYKDNLVTRKDYMAKKMLIDETVKNLEEQLNEANKVQLLTKDKLTKEIISTHIEKVVVDCLGFFTVIYK

SEQ ID NO: 14057 - DNA, 50 bp, Streptococcus agalactiae
  source 1..50: mol_type = genomic DNA
agtgtcagttacttgacatgagagggggattgtgtcataataatgacagg

SEQ ID NO: 14058 - DNA, 40 bp, Streptococcus agalactiae; identical to SEQ ID NO: 14053
  source 1..40: mol_type = genomic DNA

SEQ ID NO: 14059 - DNA, 50 bp, Streptococcus agalactiae
  source 1..50: mol_type = genomic DNA
agtgtcagttacttgacatgagagacggattgtgtcataataatgacagg

SEQ ID NO: 14060 - DNA, 40 bp, Streptococcus agalactiae; identical to SEQ ID NO: 14055
  source 1..40: mol_type = genomic DNA

SEQ ID NO: 14061 - protein, 611 aa, Streptococcus oralis
MRNYEKITALYERLSRDDELQGESNSIVNQKKILEEYASKNNLSNIIHFTDDGISGTQFDRPGFMAMMNGVNQGNIGCIIVKDMSRLGRDYLKVGQCMEILRQKGVRLIAINDNVDSFYREDDFTPFRNIMNEWYARDTSRKIQSTFRSKGESGKHTASSPPYGYIKDEKDKDKWIVDEKAAEIVRRIFNLTMQGNGPYRIAKILEAEKIDIPAYHQQKLGYGLHQSKNFEYPYRWCSSTIASILKKQEYLGHTVNFKTRKHFKDKKSKYVSEDNWLIFENTHEAIIDQETFDNVQRIRGNVKRYPDGWGEYHSLTGLMYCADCGSKMYVHRTSNYKNIPYYTCSAYTKVPCGTLCPSAHRIKAEAVLNLIQETLKDLKKYLDEDNEAFIRSIQNEMEEKEKVEIERQRVRLIDSKSRIQELERLMCRIYEDMILEKIPSSRYEILNSQYETEQRALSKEIKDLELTISRYEKETDRARKFISLINRYENFDELTTTMINEFVEKIIIHERDRKGSQNSKQKIEIYFNFIGNYELPTEELTEEERLKLEEEERKINERKDRLHQNYLKRKANGKQQEYEERYKARREQKKQEKLKVLKRGGIPLSEYKKRD

SEQ ID NO: 14062 - DNA, 50 bp, Streptococcus oralis; identical to SEQ ID NO: 9697
  source 1..50: mol_type = genomic DNA

SEQ ID NO: 14063 - DNA, 40 bp, Streptococcus oralis
  source 1..40: mol_type = genomic DNA
agattgactttgctgtagcaggctatctgaatctttcttt

SEQ ID NO: 14064 - DNA, 50 bp, Streptococcus oralis
  source 1..50: mol_type = genomic DNA
agaaagtccttgacaagttgttacatgagtaatagaattaaggagaacac

SEQ ID NO: 14065 - DNA, 40 bp, Streptococcus oralis
  source 1..40: mol_type = genomic DNA
agctttatttttctttatcatgctatctatatttttcttt

SEQ ID NO: 14066 - protein, 611 aa, Streptococcus oralis
MRNYEKITALYERLSRDDELQGESNSIVNQKKILEEYASKNNLSNIIHFTDDGISGTQFDRPRFMAMMNGVNQGNIGCIIVKDMSRLGRDYLKVGQCMEILRQKGVRLIAINDNVDSFYREDDFTPFRNIMNEWYARDTSRKIQSTFRSKGESGKHTASSPPYGYIKDEKDKDKWIVDEKAAEIVRRIFNLTMQGNGPYRIAKILEAEKIDIPAYHQQKLGYVLHQSKNFEYPYRWCSSTIASILKKQEYLGHTVNFKTRKHFKDKKSKYVSEDNWLIFENTHEAIIDQEIFDNVQRIRGNVKRYPDGWGEYHSLTGLMYCADCGSKMYVHRTSNYKNIPYYTCSAYTKVPCGTLCPSAHRIKAEAVLNLIQETLKDLKKYLDEDNEAFIRSIQNEMEEKEKVEIERQRVRLIDSKSRIQELERLMCRIYEDMILEKIPSSRYEILNSQYETEQRALSKEIKDLELTISRYEKETDRARKFISLINRYENFDELTTTMINEFVEKIIIHERDRKGSQNSKQKIEIYFNFIGNYELPTEELTEEERLKLEEEERKINERKDRLHQNYLKRKANGKQQEYEERYKARREQKKQEKLKVLKRGGIPLSEYKKRD

SEQ ID NO: 14067 - DNA, 50 bp, Streptococcus oralis; identical to SEQ ID NO: 9697
  source 1..50: mol_type = genomic DNA

SEQ ID NO: 14068 - DNA, 40 bp, Streptococcus oralis; identical to SEQ ID NO: 14063
  source 1..40: mol_type = genomic DNA

SEQ ID NO: 14069 - DNA, 50 bp, Streptococcus oralis; identical to SEQ ID NO: 14064
  source 1..50: mol_type = genomic DNA

SEQ ID NO: 14070 - DNA, 40 bp, Streptococcus oralis; identical to SEQ ID NO: 14065
  source 1..40: mol_type = genomic DNA

SEQ ID NO: 14071 - protein, 554 aa, Clostridium novyi
MIAAIYARKSMETDKGESIENQIHLCKEFGTRAGATEFLYYKDEGFSGGNTNRPKFKEMIQDAKSNKFSMLICYRLDRISRNVADFSSTLETLQKHNIDFVSIKEHFDTSTPIGRAMVYIASVFAQLERETIAERIRDNMLELAKTGRWLGGITPLGFKSEAINYIDFNGKNKKMYKLIEIPEEIELIKLIFNLYLEKKGFPSVANYLCSHKYKGKNGGEFSQGTIKQIIENPVYTYADKKIYKYFKNKGAILCGNFDGKHGVITYNKREQGKKANPISEWIVSIGKHKGIISSDVWIKCQNINSLNTKKSSPRSATGNKFLLSGLLVCNECGSTMGSWSRNNPKSGKYEKYYRCNLKNRASNRCSSKMLNAYKAEDLVLSSIKGVTLNDLIEAYDDIINNKNALSSIKEKQNTLSKEIENNNKIIHGLIRKLALLDDDPTIISEFKKEINNLNKQNTSLKKEINSLEKSIKNTNSNANSINEINSKIKNFKTLCDSTTDTEKLRSYLLEIINYIVWDSKTSTLKINLFNASSDVPVGGIRRQKDNLSFGNSSR

SEQ ID NO: 14072 - DNA, 50 bp, Clostridium novyi
  source 1..50: mol_type = genomic DNA
acttgtcttttggtaatagttccagaagctcctatgttcaaaacacaagt

SEQ ID NO: 14073 - DNA, 40 bp, Clostridium novyi
  source 1..40: mol_type = genomic DNA
ttccactggtcaaggtgctgataaaaccatgcaacaagtt

SEQ ID NO: 14074 - DNA, 50 bp, Clostridium novyi
  source 1..50: mol_type = genomic DNA
acttgtcttttggtaatagttccataagctcctatgttcaaaacacaagt

SEQ ID NO: 14075 - DNA, 40 bp, Clostridium novyi
  source 1..40: mol_type = genomic DNA
ttccaattttcaaggtgattatatcaccatgaaaaaaatt

SEQ ID NO: 14076 - protein, 497 aa, Streptococcus pyogenes
MSKIALYIRLSVEDQMKKDESESIINQRYFLNDFLDRNDEFKSFQREEYIDDGYTGTNEKRPSFQRMLEGVKNGKINAIIVKDLSRFMRDYISLGDYLENIFPFLGIRFIAINDGYDSDKEKGNGTDLDIQFKGLLYDFYTKDISQKVKTVTTELKKQGKFLAWSPAFGYMKDPDDKHNIIIDDKTAWIVRKVYDLALTGLASRKIAAVMNEENIPTPNERKKELTNMDYEYNIVSSDTRDAPTWTNGTVVDILSNENYTGTYVFNMQEKSVLTPGSFKFNPKEEWGRVYDHHEAIVSREEFERVQAIKENNSFLKGKNTDYTWRKHSPLQGFARCPTCNHILGLTQSKFKRPDGSMRIHKYFHCRICKCNNVEHKNSRVDKLEEQVLSLIKEKYGEVEVKLKEKISIKDIEKKIEKLQAKKMSDFEKYKLGKMTKVKFVESKNQIDNEISKLEEKIKLSSNETEVVTDNELTRELMEKYVESVICEGSIVQKIIWK

SEQ ID NO: 14077 - DNA, 50 bp, Streptococcus pyogenes
  source 1..50: mol_type = genomic DNA
tgtgtcagtcgcttgacacgagaggggtttcgtgtcataataatgacaca

SEQ ID NO: 14078 - DNA, 40 bp, Streptococcus pyogenes
  source 1..40: mol_type = genomic DNA
cctctatgaccctgctatgggatctggatcactcctttta

SEQ ID NO: 14079 - DNA, 50 bp, Streptococcus pyogenes
  source 1..50: mol_type = genomic DNA
tgtgtcagtcgcttgacacgagaggcgtttcgtgtcataataatgacaca

SEQ ID NO: 14080 - DNA, 40 bp, Streptococcus pyogenes
  source 1..40: mol_type = genomic DNA
cctcaatgcctctgcgaaagcatctggttcactcccatta

SEQ ID NO: 14081 - protein, 497 aa, Streptococcus pyogenes; identical to SEQ ID NO: 11556

SEQ ID NO: 14082 - DNA, 50 bp, Streptococcus pyogenes; identical to SEQ ID NO: 2317
  source 1..50: mol_type = genomic DNA

SEQ ID NO: 14083 - DNA, 40 bp, Streptococcus pyogenes; identical to SEQ ID NO: 14078
  source 1..40: mol_type = genomic DNA

SEQ ID NO: 14084 - DNA, 50 bp, Streptococcus pyogenes
  source 1..50: mol_type = genomic DNA
tttgtcataagcttgacatgagaggcgtttcgtgtcataatagtgataga

SEQ ID NO: 14085 - DNA, 40 bp, Streptococcus pyogenes; identical to SEQ ID NO: 14080
  source 1..40: mol_type = genomic DNA

SEQ ID NO: 14086 - protein, 497 aa, Streptococcus pyogenes
MSKIALYIRLSVEDQMKKDESESIINQRYFLNDFLDRNDELKSFQREEYIDDGYTGTNEKRPSFQRMLEEVKSGKINAIIVKDLSRFMRDYISLGDYLENIFPFLGIRFIAINDGYDSAKEKGNGTDLDIQFKGLLYDFYTKDISQKVKTVTTELKKQGKFLAWSPPFGYMKDPDDKHNIIIDDKTAWIVRKVYDLALTGLASRKIAAVMNEENISTPNERKKELTNMDYEYNIVSSDTRDAPTWTNGTVVDILSNENYTGTYVFNMQEKSILTPGSFKFNPKEEWGRVYEHHEAIISREEFEKVQAIKENNSFLKGKNTDYPWRKHSPLQGFARCPTCNHILGLTQSKFKRPDGSMRIHKYFHCRICKCNNVEHKNSRVDKLEDQVLALIKEKYGEAEVKPKEKISIKDIEKKMEKLQAKKMSDFEKYKLGKMTKAKFVESKNQIDNEFDRLEEKIKLSSNETEVVIDNELTREVMKKYVESVICEGSIVQKIIWR

SEQ ID NO: 14087 - DNA, 50 bp, Streptococcus pyogenes; identical to SEQ ID NO: 14077
  source 1..50: mol_type = genomic DNA

SEQ ID NO: 14088 - DNA, 40 bp, Streptococcus pyogenes; identical to SEQ ID NO: 14078
  source 1..40: mol_type = genomic DNA

SEQ ID NO: 14089 - DNA, 50 bp, Streptococcus pyogenes; identical to SEQ ID NO: 14079
  source 1..50: mol_type = genomic DNA

SEQ ID NO: 14090 - DNA, 40 bp, Streptococcus pyogenes; identical to SEQ ID NO: 14080
  source 1..40: mol_type = genomic DNA

SEQ ID NO: 14091 - protein, 497 aa, Streptococcus pyogenes
MSKIALYIRLSVEDMIKTDESESIINQRAYLNDYLDKNEEFKNFTREEYVDDGYSGTNENRPAFQRMLEDVKKNNIQTIIVKDLSRFMRDYITLGDYLENIFPFLGVRFIAINDGYDSNKEKGNGTDLDIQFKGLLYDFYTKDISEKVKSSMTTLKKQGKFLAWSPPLGYMKDPNDKHKIIVDEETAWIVKKIFKLALDGISSRNIAKILNEEKIPTPSKRKSELTNLDFEYSIIRTAKKPRPTWTNGNVIDVLANENYTGTYTFNMQDKSVLNPSSFKFKPKEEWGRVENNHEAIISKEDFEKVQKIKEKNLFMKGKNTDYEWRKKSPLQGFAKCPTCNHILGCTQSKRKRQDGTIRVHTYFTCRICKCNNVKHKNSRAGSIEEQVFEAIKEKYGLEDPIKDEKVKVKPMEKSIEDLEAKKMQSFEKYKLGKMNRQKFIDLKNSIDEEIQAIKEKIQKAKEEKEVIDNTKLTRELMEKYIDSVFCEGNEVLNIIWK

SEQ ID NO: 14092 - DNA, 50 bp, Streptococcus pyogenes; identical to SEQ ID NO: 2317
  source 1..50: mol_type = genomic DNA

SEQ ID NO: 14093 - DNA, 40 bp, Streptococcus pyogenes; identical to SEQ ID NO: 14078
  source 1..40: mol_type = genomic DNA

SEQ ID NO: 14094 - DNA, 50 bp, Streptococcus pyogenes; identical to SEQ ID NO: 14084
  source 1..50: mol_type = genomic DNA

SEQ ID NO: 14095 - DNA, 40 bp, Streptococcus pyogenes; identical to SEQ ID NO: 14080
  source 1..40: mol_type = genomic DNA

SEQ ID NO: 14096 - protein, 497 aa, Streptococcus pyogenes
MSKIALYIRLSVEDMIKTDESESIINQRAYLNDYLDKNEEFKNFTREEYVDDGYSGTNENRPAFQRMLEDVKKNNIQTIIVKDLSRFMRDYITLGDYLENIFPFLGVRFIAINDGYDSDKEKGNGTDLDIQFKGLLYDFYTKDISEKVKSSMTTLKKQGKFLAWSPPLGYMKDPNDRHKIIVDEETAWIVKKIFKLALDGISSRNIAKILNEEKIPTPSKRKSELTNLDFEYSIIRTVKKPRPTWTNGNVIDVLANENYTGTYTFNMQDKSVLNPSSFKFKPKEEWGRVENNHEAIISKEDFEKVQKIKEKNLFMKGKNTDYEWRKKSPLQGFAKCPTCNHILGCIQSKHKRPDGSLRVHTYFTCRICKCNNVKHKNSRAGSLEEQVFEAIKEKYGLEAPNKDEKVKVKPMEKSIEDLEAKKMQNFEKYKLGKMNRQKFIDSKNLIDEEIQAIKEKILKAKEEKEVIDNTKLTRELMEKYIDSVICEGNEVLNIIWK

SEQ ID NO: 14097 - DNA, 50 bp, Streptococcus pyogenes; identical to SEQ ID NO: 2317
  source 1..50: mol_type = genomic DNA

SEQ ID NO: 14098 - DNA, 40 bp, Streptococcus pyogenes; identical to SEQ ID NO: 14078
  source 1..40: mol_type = genomic DNA

SEQ ID NO: 14099 - DNA, 50 bp, Streptococcus pyogenes; identical to SEQ ID NO: 14084
  source 1..50: mol_type = genomic DNA

SEQ ID NO: 14100 - DNA, 40 bp, Streptococcus pyogenes; identical to SEQ ID NO: 14080
  source 1..40: mol_type = genomic DNA

SEQ ID NO: 14101 - protein, 497 aa, Streptococcus pyogenes
MSKIALYIRLSVEDQMKKDESESIINQRYFLNDFLDRNDELKSFQREEYIDDGYTGTNEKRPSFQRMLEEVKSGKINAIIVKDLSRFMRDYISLGDYLENIFPFLGIRFIAINDGYDSAKEKGNGTDLDIQFKGLLYDFYTKDISQKVKTVTTELKKQGKFLAWSPPFGYMKDPDDKHNIIIDDKTAWIVRKVYDLALTGLASRKIAAVMNEENISTPNERKKELTNMDYEYNIVSSDTRDAPTWTNGTVVDILSNENYTGTYVFNMQEKSILTPGSFKFNPKEEWGRVYEHHEAIISREEFEKVQAIKENNSFLKGKNTDYPWRKHSPLQGFARCPTCNHILGLTQSKFKRPDGSMRIHKYFHCRICKCNNVEHKNSRVDKLEDQVLALIKEKYGEAEVKPKEKISIKDIEKKMEKLQAKKMSDFEKYKLGKMTKAKFVESKNQIDNEFDRLDEKIKLSSNETEVVTDNELTRELMEKYVESVICEGSIVQKIIWK

SEQ ID NO: 14102 - DNA, 50 bp, Streptococcus pyogenes; identical to SEQ ID NO: 14077
  source 1..50: mol_type = genomic DNA

SEQ ID NO: 14103 - DNA, 40 bp, Streptococcus pyogenes; identical to SEQ ID NO: 14078
  source 1..40: mol_type = genomic DNA

SEQ ID NO: 14104 - DNA, 50 bp, Streptococcus pyogenes; identical to SEQ ID NO: 14079
  source 1..50: mol_type = genomic DNA

SEQ ID NO: 14105 - DNA, 40 bp, Streptococcus pyogenes; identical to SEQ ID NO: 14080
  source 1..40: mol_type = genomic DNA

SEQ ID NO: 14106 - protein, 497 aa, Streptococcus pyogenes
MSKVALYIRLSVEDMIKTDESESIINQRAYLNDYLDKNEEFKNFTREEYVDDGYSGTNENRPAFQRMLEDVKKNNIQTIIVKDLSRFMRDYITLGDYLENIFPFLGVRFIAINDGYDSNKEKGNGTDLDIQFKGLLYDFYTKDISEKVKSSMTTLKKQGKFLAWSPPLGYMKDPNDRHKIIVDEETAWIVKKIFKLALDGISSRNIAKILNEEKIPTPSKRKSELTNLDFEYSIIRTAKKPRPTWTNGNVIDVLANENYTGTYTFNMQDKSVLNPSSFKFKPKEEWGRVENNHEAIISKENFEKVQKIKEKNLFMKGKNTDYEWRKKSPLQGFAKCPTCNHILGCTQSKRKRQDGSIRVHTYFTCRICKCNNVKHKNSRAGSLEEQVFEAIKEKYGLEDPIKEEKVKVKPMEKSIEDLEAKKMQNFEKYKLGKMNRKKFIDSKNLIDEEIQAIKEKILKAKEEKEVIDNTKLTRELMEKYIDSVICEGNEVLNIIWK

SEQ ID NO: 14107 - DNA, 50 bp, Streptococcus pyogenes; identical to SEQ ID NO: 2317
  source 1..50: mol_type = genomic DNA

SEQ ID NO: 14108 - DNA, 40 bp, Streptococcus pyogenes; identical to SEQ ID NO: 14078
  source 1..40: mol_type = genomic DNA

SEQ ID NO: 14109 - DNA, 50 bp, Streptococcus pyogenes; identical to SEQ ID NO: 14084
  source 1..50: mol_type = genomic DNA

SEQ ID NO: 14110 - DNA, 40 bp, Streptococcus pyogenes; identical to SEQ ID NO: 14080
  source 1..40: mol_type = genomic DNA

SEQ ID NO: 14111 - protein, 497 aa, Streptococcus pyogenes
MSKIALYIRLSVEDMIKTDESESIINQRAYLNDYLDKNEEFKNFTREEYVDDGYSGTNENRPAFQRMLEDVKKNNIQTIIVKDLSRFMRDYITLGDYLENIFPFLGIRFIAINDGYDSNKEKGNGTDLDIQFKGLLYDFYTKDISEKVKSSMTTLKKQGKFLAWSPPLGYMKDPNDRHKIIVDEETAWIVKKIFKLALDGISSRNIAKILNEEKIPTPSKRKSELTNLDFEYSIIRTAKKPRPTWTNGNVIDVLANENYTGTYTFNMQDKSVLNPSSFKFKPKEEWGRVENNHEAIISKEDFEKVQKIKEKNLFMKGKNTDYEWRKKSPLQGFAKCPTCNHILGCTQSKRKRQDGTIRVHTYFTCRICKCNNVKHKNSRAGSLEEQVFEAIKEEYGLEDPIKDNKVKVKPMEKSIEDLEAKKMQNFEKYKLGKMSRQKFIDSKNLIDEEIQAIKEKILKAKEEKEVIDNTKLTRELMEKYIDSVFCEGNEVLNIIWK

SEQ ID NO: 14112 - DNA, 50 bp, Streptococcus pyogenes; identical to SEQ ID NO: 2317
  source 1..50: mol_type = genomic DNA

SEQ ID NO: 14113 - DNA, 40 bp, Streptococcus pyogenes; identical to SEQ ID NO: 14078
  source 1..40: mol_type = genomic DNA

SEQ ID NO: 14114 - DNA, 50 bp, Streptococcus pyogenes; identical to SEQ ID NO: 14084
  source 1..50: mol_type = genomic DNA

SEQ ID NO: 14115 - DNA, 40 bp, Streptococcus pyogenes; identical to SEQ ID NO: 14080
  source 1..40: mol_type = genomic DNA

SEQ ID NO: 14116 - protein, 496 aa, Streptococcus pyogenes
MSKIALYIRLSVEDMIKTDESESIINQRAYLNDYLDKNEEFKNFTREEYVDDGYSGTNENRPAFQRMLEDVKKNNIQTIIVKDLSRFMRDYITLGDYLENIFPFLGVRFIAINDGYDSDKEKGNGTDLDIQFKGLLYDFYTKDISEKVKSSMTTLKKQGKFLAWSPPLGYMKDPNDRHKIIVDEETAWIVKKIFKLALDGTSSRNIAKILNEEKIPTPSKRKSELTNLDFEYSIIRTAKKPRPTWTNGNVIDVLANENYTGTYTFNMQDKSVLNPSSFKFKPKEEWGRVENNHEAIISREDFEKVQKIKEKNLFMKGKNTDYEWRKKSPLQGFAKCPTCNHILGCVQSKRKRQDGSMRVHTYFTCRICKCNNVKHKNSRAGSLEEQVFDAIKEKYGLEDSNKDEKIKVKPMEKSIEDLEAKKMQNFEKYKLGKMNRQKFIESKNLIDEEIQAIKEKILKAKEKEVIDNTKLTRELMEKYIDSVFCEGNEVLNIIWK

SEQ ID NO: 14117 - DNA, 50 bp, Streptococcus pyogenes; identical to SEQ ID NO: 2317
  source 1..50: mol_type = genomic DNA

SEQ ID NO: 14118 - DNA, 40 bp, Streptococcus pyogenes; identical to SEQ ID NO: 14078
  source 1..40: mol_type = genomic DNA

SEQ ID NO: 14119 - DNA, 50 bp, Streptococcus pyogenes; identical to SEQ ID NO: 14084
  source 1..50: mol_type = genomic DNA

SEQ ID NO: 14120 - DNA, 40 bp, Streptococcus pyogenes; identical to SEQ ID NO: 14080
  source 1..40: mol_type = genomic DNA

SEQ ID NO: 14121 - protein, 497 aa, Streptococcus pyogenes
MSKIALYIRLSVEDMIKTDESESIINQRAYLNDYLDKNEEFKNFTREEYVDDGYSGTNENRPAFQRMLEDVKKNNIQTIIVKDLSRFMRDYITLGDYLENIFPFLGVRFIAINDGYDSDKEKGNGTDLDIQFKGLLYDFYTKDISEKVKSSMTTLKKQGKFLAWSPPLGYMKDPNDRHKIIVDEETAWIVKKIFKLALDGISSRNIAKILNEEKIPTPSKRKSELTNLDFEYSIIRTAKKPRPTWTNGNVIDVLANENYTGTYTFNMQDKSVLNSSSFKFKPKEEWGRVENNHEAIISREDFEKVQKIKEKKLFMKGKNTDYEWRKKSPLQGFAKCPTCNHILGCTQSKRKRQDGTIRVHTYFTCRICKCNNVKHKNSRAGSLEEQVFEAIKEKYGLEDPIKDEKVKVKPMEKSIEDLEAKKMQNFEKYKLGKMNRQKFIDSKNLIDEDIQAIKEKIQKAKEEKEVIDNTKLTRELMEKYIDSVICEGNEVLNIIWK

SEQ ID NO: 14122 - DNA, 50 bp, Streptococcus pyogenes; identical to SEQ ID NO: 2317
  source 1..50: mol_type = genomic DNA

SEQ ID NO: 14123 - DNA, 40 bp, Streptococcus pyogenes; identical to SEQ ID NO: 14078
  source 1..40: mol_type = genomic DNA

SEQ ID NO: 14124 - DNA, 50 bp, Streptococcus pyogenes; identical to SEQ ID NO: 14084
  source 1..50: mol_type = genomic DNA

SEQ ID NO: 14125 - DNA, 40 bp, Streptococcus pyogenes; identical to SEQ ID NO: 14080
  source 1..40: mol_type = genomic DNA

SEQ ID NO: 14126 - protein, 497 aa, Streptococcus pyogenes
MSKIALYIRLSVEDMIKTDESESIINQRAYLNDYLDKNEEFKNVTREEYVDDGYSGTNENRPAFQRMLEDVKKNNIQTIIVKDLSRFMRDYITLGDYLENIFPFLGVRFIAINDGYDSDKEKGNGTDLDIQFKGLLYDFYTKDISEKVKSSMTTLKKQGKFLAWSPPLGYMKDPNDRHKIIIDEETAWIVKKIFKLALDGISSRNIAKILNEEKIPTPSKRKSELTNLDFEYSIIRTAKKPRPTWTNGNVIDVLANENYTGTYTFNMQDKSVLNPSSFKFKPKEEWERVENNHEAIISREDFEKVQKIKEKNLFMKGKNTDYEWRKKSPLQGFAKCPTCNHILGCTQSKRKRQDGTIRVHTYFTCRICKCNNVKHKNSRAGSLEEQVFEAIKEKYVLEDPIKDEKIKVKPMEKSIEDLEARKMQNFEKYKLGKMNRQKFIDSKNSIDEEIQAIKEKLQKAKEEKEVIDNTKLTRELMEKYIDSVFCEGNEVLNIIWK

SEQ ID NO: 14127 - DNA, 50 bp, Streptococcus pyogenes; identical to SEQ ID NO: 2317
  source 1..50: mol_type = genomic DNA

SEQ ID NO: 14128 - DNA, 40 bp, Streptococcus pyogenes; identical to SEQ ID NO: 14078
  source 1..40: mol_type = genomic DNA

SEQ ID NO: 14129 - DNA, 50 bp, Streptococcus pyogenes; identical to SEQ ID NO: 14084
  source 1..50: mol_type = genomic DNA

SEQ ID NO: 14130 - DNA, 40 bp, Streptococcus pyogenes; identical to SEQ ID NO: 14080
  source 1..40: mol_type = genomic DNA

SEQ ID NO: 14131 - protein, 497 aa, Streptococcus pyogenes
MSKIALYIRLSVEDQMKKDESESIINQRYFLNDFLDRNDEFKSFQREEYIDDGYTGTNEKRPSFQRMLEEVKNGKINAIIVKDLSRFMRDYISLGDYLENIFPFLGIRFIAINDGYDSDKEKGNGTDLDIQFKGLLYDFYTKDISQKVKTVTTELKKQGKFLAWSPAFGYMKDPDDKHNIIIDDKTAWIVRKVYDLALTGLASRKIAAVMNEENIPTPNERKKELTNMDYEYNIVSSDTRDAPTWTNGTVVDILSNENYTGTYVFNMQEKSVLTPGSFKFNPKEEWGRVYDHHEAIVSREEFERVQAIKENNSFLKGKNTDYTWRKHSPLQGFARCPTCNHILGLTQSKFKRPDGSMRIHKYFHCRICKCNNVEHKNSRVDKLEEQVLSLIKEKYGEVEVKLKEKISIKDIEKKIEKLQAKKMSDFEKYKLGKMTKVKFVESKNQIDNEISKLEEKIKLSSNETEVVTDNELTRELMEKYVESVICEGSIVQKIIWK

SEQ ID NO: 14132 - DNA, 50 bp, Streptococcus pyogenes; identical to SEQ ID NO: 14077
  source 1..50: mol_type = genomic DNA

SEQ ID NO: 14133 - DNA, 40 bp, Streptococcus pyogenes; identical to SEQ ID NO: 14078
  source 1..40: mol_type = genomic DNA

SEQ ID NO: 14134 - DNA, 50 bp, Streptococcus pyogenes; identical to SEQ ID NO: 14079
  source 1..50: mol_type = genomic DNA

SEQ ID NO: 14135 - DNA, 40 bp, Streptococcus pyogenes; identical to SEQ ID NO: 14080
  source 1..40: mol_type = genomic DNA

SEQ ID NO: 14136 - protein, 497 aa, Streptococcus pyogenes
MSKIALYIRLSVEDMIKTDESESIINQRAYLNDYLDKNEEFKNFTREEYVDDGYSGTNENRPAFQRMLEDVKKNNIQTIIVKDLSRFMRDYITLGDYLENIFPFLGVRFIAINDGYDSNKEKGNGTDLDIQFKGLLYDFYTKDISEKVKSSMTTLKKQGKFLAWSPPLGYMKDPNDRHKIIVDEETAWIVKKIFKLALDGISSRNIAKILNEEKIPTPSKRKSELTNLDFEYSIIRTAKKPRPTWTNGNVIDVLANENYTGTYTFNMQDKSVLNPSSFKFKPKEEWGRVENNHEAIISKEDFEKVQKIKEKNMFMKGKNTDYEWRKKSPLQGFAKCPTCNHILGCVQSKRKRQDGSIRVHTYFTCRICKCNNVKHKNSRAGSLEEQVFEAIKERYGLEDSNKDEKIKIKPMEKSIEDLEAKKMQNFEKYKLGKMNRQKFIDSKNLIDEEIQAIKEKIEKAKEEKEVIDNTKLTRELMEKYIDSVFCEGNEVLNIIWK

SEQ ID NO: 14137 - DNA, 50 bp, Streptococcus pyogenes; identical to SEQ ID NO: 2317
  source 1..50: mol_type = genomic DNA

SEQ ID NO: 14138 - DNA, 40 bp, Streptococcus pyogenes; identical to SEQ ID NO: 14078
  source 1..40: mol_type = genomic DNA

SEQ ID NO: 14139 - DNA, 50 bp, Streptococcus pyogenes; identical to SEQ ID NO: 14084
  source 1..50: mol_type = genomic DNA

SEQ ID NO: 14140 - DNA, 40 bp, Streptococcus pyogenes; identical to SEQ ID NO: 14080
  source 1..40: mol_type = genomic DNA

SEQ ID NO: 14141 - protein, 497 aa, Streptococcus pyogenes
MSKIALYIRLSVEDMIKTDESESIINQRAYLNDYLDKNEEFKNFTREEYVDDGYSGTNENRPAFQRMLEDVKKNNIQTIIVKDLSRFMRDYITLGDYLENIFPFLGVRFIAINDGYDSDKEKGNGTDLDIQFKGLLYDFYTKDISEKVKSSMTTLKKQGKFLAWSPPLGYMKDPNDRHKIIVDEETAWIVKKIFKLALDGISSRNIAKILNEEKIPTPSKRKSELTNLDFEYSIIRTAKKPIPTWTNGNVIDVLANENYTGTYTFNMQDKSVLNPSSFKFKPKEEWGRVENNHEAIISKEDFEKVQKIKEKNLFMKGKNTDYEWRKKSPLQGFAKCPTCNHILGCIQSKRKRKDGSIRVHTYFTCRICKCNNVKHKNSRAGSLEEQVFEAIKEKYGLEDSNKDEKIKVKPMEKSIEDLEAKKMQNFEKYKLGKMNRQKFIDSKNLIDEEIQAIKEKILKAKEEKEVIDNTKLTRELMEKYIDSVFCEGNEVLNIIWK

SEQ ID NO: 14142 - DNA, 50 bp, Streptococcus pyogenes; identical to SEQ ID NO: 2317
  source 1..50: mol_type = genomic DNA

SEQ ID NO: 14143 - DNA, 40 bp, Streptococcus pyogenes; identical to SEQ ID NO: 14078
  source 1..40: mol_type = genomic DNA

SEQ ID NO: 14144 - DNA, 50 bp, Streptococcus pyogenes; identical to SEQ ID NO: 14084
  source 1..50: mol_type = genomic DNA

SEQ ID NO: 14145 - DNA, 40 bp, Streptococcus pyogenes; identical to SEQ ID NO: 14080
  source 1..40: mol_type = genomic DNA

SEQ ID NO: 14146 - protein, 497 aa, Streptococcus pyogenes
MSKIALYIRLSVEDMIKTDESESIINQRAYLNDYLDKNEEFKNFTREEYVDDGYSGTNENRPAFQRMLEDVKKNNIQTIIVKDLSRFMRDYITLGDYLENIFPFLGVRFIAINDGYDSNKEKGNGTDLDIQFKGLLYDFYTKDISEKVKSSMTTLKKQGKFLAWSPPLGYMKDPNDRHKIIVDEETAWIVKKIFKLALDGISSRNIAKILNEEKIPTPSKRKSELTNLDFEYSIIRTAKKPRPTWTNGNVIDVLANENYTGTYTFNMQDKSVLNPSSFKFKPKEEWGRVENNHEAIISKEDFEKVQKIKEKNLFMKGKNTDYEWRKKSPLQGFAKCPTCNHILGCIQSKHKRHDGSLRVHTYFTCRICKCNNVKHKNSRAGSLEEQVFEAIKEKYGLEDPIKNEKVKVKPMEKSIEDLEAKKMQNFEKYKLGKMNRQKFIDSKNLIDEEIQAIKEKIQKAKEEKEVIDNTKLTRELMEKYIDSVFCEGNEVLDIIWK

SEQ ID NO: 14147 - DNA, 50 bp, Streptococcus pyogenes; identical to SEQ ID NO: 2317
  source 1..50: mol_type = genomic DNA

SEQ ID NO: 14148 - DNA, 40 bp, Streptococcus pyogenes; identical to SEQ ID NO: 14078
  source 1..40: mol_type = genomic DNA

SEQ ID NO: 14149 - DNA, 50 bp, Streptococcus pyogenes; identical to SEQ ID NO: 14084
  source 1..50: mol_type = genomic DNA

SEQ ID NO: 14150 - DNA, 40 bp, Streptococcus pyogenes; identical to SEQ ID NO: 14080
  source 1..40: mol_type = genomic DNA

SEQ ID NO: 14151 - protein, 497 aa, Streptococcus pyogenes
MSKIALYIRLSVEDMIKTDESESIINQRAYLNDYLDKNEEFKNFTRGEYVDDGYSGTNENRPAFQRMLEDVKKNNIQTIIVKDLSRFMRDYITLGDYLENIFPFLGVRFIAINDGYDSDKEKGNGTDLDIQFKGLLYDFYTKDISEKVKSSMTTLKKQGKFLAWSPPLGYMKDPNDRHKIIVDEETAWIVKKIFKLALDGISSRNIAKILNEENIPTPSKRKSEITNLDFEYSIIRTAKKPRPTWTNGNVIDVLANENYTGTYTFNMQDKSVLNPSSFKFKPKEEWERVENNHEAIISKEDFEKVQKIKEKNLFMKGKNTDYEWRKKSPLQGFAKCPTCNHILGCTQSKRKRQDGTIRVHTYFTCRICKCNNVKHKNSRAGSLEEQVFEAIKEKYGLEDPIKDEKVKVKPMEKSIEDLEAKKMQSFEKYKLGKMNRQKFIDSKNLIDEEIQAIKEKIQKAKEEKEVIDNTKLTRELMEKYIDSVFCEGNEVLNIIWK

SEQ ID NO: 14152 - DNA, 50 bp, Streptococcus pyogenes; identical to SEQ ID NO: 2317
  source 1..50: mol_type = genomic DNA

SEQ ID NO: 14153 - DNA, 40 bp, Streptococcus pyogenes; identical to SEQ ID NO: 14078
  source 1..40: mol_type = genomic DNA

SEQ ID NO: 14154 - DNA, 50 bp, Streptococcus pyogenes; identical to SEQ ID NO: 14084
  source 1..50: mol_type = genomic DNA

SEQ ID NO: 14155 - DNA, 40 bp, Streptococcus pyogenes; identical to SEQ ID NO: 14080
  source 1..40: mol_type = genomic DNA

SEQ ID NO: 14156 - protein, 497 aa, Streptococcus pyogenes
MSKIALYIRLSVEDMIKTDESESIINQRAYLNDYLDKNEEFKNFTREEYVDDGYSGTNENRPAFQRMLEDVKKNNIQTIIVKDLSRFMRDYITLGDYLENIFPFLGVRFIAINDGYDSKKEKGNGTDLDIQFKGLLYDFYTKDISEKVKSSMTTLKKQGKFLAWSPPLGYMKDPNDKHKIIVDEETAWIVKKIFKLALDGISSRNIAKILNEEKIPTPSKRKSELTNLDFEYSIIRTAKKPRPTWTNGNVIDVLANENYTGTYTFNMQDKSVLNPSSFKFKPKEEWGRVENNHEAIISKEDFEKVQKIKEKNLFMKGKNTDYEWRKKSPLQGFAKCPTCNHILGCTQSKHKRPDGSLRVHTYFTCRICKCNNVKHKNSRAGSLEEQVFEAIKEKYGLEDPNKDEKVKVKPMGKSIEDLEAKKMQNFEKYKLGKMSRQKFIDSKNLIDEDIQAIKEKIQKAKEEKEVIDNTKLTRELMEKYIDSVFCEGNEVLNIIWK

SEQ ID NO: 14157 - DNA, 50 bp, Streptococcus pyogenes; identical to SEQ ID NO: 2317
  source 1..50: mol_type = genomic DNA

SEQ ID NO: 14158 - DNA, 40 bp, Streptococcus pyogenes; identical to SEQ ID NO: 14078
  source 1..40: mol_type = genomic DNA

SEQ ID NO: 14159 - DNA, 50 bp, Streptococcus pyogenes; identical to SEQ ID NO: 14084
  source 1..50: mol_type = genomic DNA

SEQ ID NO: 14160 - DNA, 40 bp, Streptococcus pyogenes; identical to SEQ ID NO: 14080
  source 1..40: mol_type = genomic DNA

SEQ ID NO: 14161 - protein, 497 aa, Streptococcus pyogenes
MSKIALYIRLSVEDMIKTDESESIINQRAYLNDYLDKNEEFKNFTREEYVDDGYSGTNENRPAFQRMLEDVKKNNIQTIIVKDLSRFMRDYITLGDYLENIFPFLGVRFIAINDGYDSNKEKGNGTDLDIQFKGLLYDFYTKDISEKVKSSMTTLKKQGKFLAWSPPLGYMKDPNDKHKIIVDEETAWIVKKIFKLALEGISSRNIAKILNEEKIPTPSKRKSELTNLDFEYSIIRTAKKPRPTWTNGNVIDVLANENYTGTYTFNMQDKSVLNPSSFKFKPKEEWGRVENNHEAIISKEDFEKVQKIKEKNLFMKGKNTDYEWRKKSPLQGFAKCPTCNHILGCTQSKRKRQDGTIRVHTYFTCRICKCNNVKHKNSRAGSLEEQVFEAIKEKYGLEDPNKDEKVKVKPMEKSIEDLEAKKMQNFEKYKLGKMNRQKFIDSKNSIDEEIQAIKEKILKAKEEKEVIDNTKLTRELMEKYIDSVFCEGNEVLNIIWK

SEQ ID NO: 14162 - DNA, 50 bp, Streptococcus pyogenes; identical to SEQ ID NO: 2317
  source 1..50: mol_type = genomic DNA

SEQ ID NO: 14163 - DNA, 40 bp, Streptococcus pyogenes; identical to SEQ ID NO: 14078
  source 1..40: mol_type = genomic DNA

SEQ ID NO: 14164 - DNA, 50 bp, Streptococcus pyogenes; identical to SEQ ID NO: 14084
  source 1..50: mol_type = genomic DNA

SEQ ID NO: 14165 - DNA, 40 bp, Streptococcus pyogenes; identical to SEQ ID NO: 14080
  source 1..40: mol_type = genomic DNA

SEQ ID NO: 14166 - protein, 497 aa, Streptococcus pyogenes
MSKIALYIRLSVEDMIKTDESESIINQRAYLNDYLDKNEEFKNFTREEYVDDGYSGTNENRPAFQRMLEDVKKNNIQTIIVKDLSRFMRDYITLGDYLENIFPFLGVRFIAINDGYDSDKEKGNGTDLDIQFKGLLYDFYTKDISEKVKSSMTTLKKQGKFLAWSPPLGYMKDPNDRHKIIVDEETAWIVKKIFKLALDGISSRNIAKILNEEKIPTPSKRKSELTNLDFEYSIIRTAKKPRPTWTNGNVIDVLANENYTGTYTFNMQDKSVLNPSSFKFKPKEEWGRVENNHEAIISREDFEKVQKIKEKNLFMKGKNTDYEWRKKSPLQGFAKCPTCNHILGCTQSKRKRQDGTIRVHTYFTCRICKCNNVKHKNSRAGSIEEQVFEAIKEKYGLEDPIKDEKVKVKPMEKSIEDLEAKKMQNFEKYKLGKMNRQKFIDSKNLIDEEIQAIKEKIEKAKEEKEVIDNTKLTRELMEKYIDSVFCEGNEVLNIKWK

SEQ ID NO: 14167 - DNA, 50 bp, Streptococcus pyogenes; identical to SEQ ID NO: 2317
  source 1..50: mol_type = genomic DNA

SEQ ID NO: 14168 - DNA, 40 bp, Streptococcus pyogenes; identical to SEQ ID NO: 14078
  source 1..40: mol_type = genomic DNA

SEQ ID NO: 14169 - DNA, 50 bp, Streptococcus pyogenes; identical to SEQ ID NO: 14084
  source 1..50: mol_type = genomic DNA

SEQ ID NO: 14170 - DNA, 40 bp, Streptococcus pyogenes; identical to SEQ ID NO: 14080
  source 1..40: mol_type = genomic DNA

SEQ ID NO: 14171 - protein, 497 aa, Streptococcus pyogenes
MSKIALYIRLSVEDMIKTDESESIINQRAYLNDYLDKNEEFKNFTREEYVDDGYSGTNENRPAFQRMLEDVKKNNIQTIIVKDLSRFMRDYITLGDYLENIFPFLGVRFIAINDGYDSDKEKGNGTDLDIQFKGLLYDFYTKDISEKVKSSMTTLKKQGKFLAWSPPLGYMKDPNDRHKIIVDEETAWIVKKIFKLALDGISSRNIAKILNEEKIPTPSKRKSELTNLDFEYSIIRTVKKPRPTWTNGNVIDILANENYTGTYTFNMQDKSVLNPSSFKFKPKEEWGRVENNHEAIISREDFEKVQKIKEKNLFMKGKNTDYEWRKKSPLQGFAKCPTCNHILGCTQSKRKRPDGSLRVHTYFTCRICKCNNVKHKNSRAGSLEEQVFEAIKEKYGLEVPNKDEKVKVKPMEKSIEDLEAKKMQSFEKYKLGKMNRQKFIDSKNSIDEEIQAIKEKIQKAKEEKEVIDNTKLTRELMEKYIDSVFCEGNEVLNIIWK

SEQ ID NO: 14172 - DNA, 50 bp, Streptococcus pyogenes
  source 1..50: mol_type = genomic DNA
tttgtcataaacttgacatgagaggggtttcgtgtcataatagtgataga

SEQ ID NO: 14173 - DNA, 40 bp, Streptococcus pyogenes; identical to SEQ ID NO: 14078
  source 1..40: mol_type = genomic DNA

SEQ ID NO: 14174 - DNA, 50 bp, Streptococcus pyogenes
  source 1..50: mol_type = genomic DNA
tttgtcataaacttgacatgagaggcgtttcgtgtcataatagtgataga

SEQ ID NO: 14175 - DNA, 40 bp, Streptococcus pyogenes; identical to SEQ ID NO: 14080
  source 1..40: mol_type = genomic DNA

SEQ ID NO: 14176 - protein, 497 aa, Streptococcus pyogenes
MSKVALYIRLSVEDMIKTDESESIINQRAYLNDYLDKNEEFKNFTREEYVDDGYSGTNENRPAFQRMLEDVKKNNIQTIIVKDLSRFMRDYITLGDYLENIFPFLGVRFIAINDGYDSDKEKGNGTDLDIQFKGLLYDFYTKDISEKVKSSMTTLKKQGKFLAWSPPLGYMKDPNDRHKIIVDEETAWIVKKIFKLALDGISSRNIAKILNEEKIPTPSKRKSELTNLDFEYSIIRTAKKPRPTWTNGNVIDVLANENYTGTYTFNMQDKSVLNPSSFKFKAKEEWGRVENNHEAIISKEDFEKVQKIKEKNLFMKGKNTDYEWRKKSPLQGFAKCPTCNHILGCTQSKRKRQDGTIRVHTYFTCRICKCNNVKHKNSRAGSIEEQVFEAIKEKYGLEDPIKDEKVKVKPMEKSIEDLEAKKMQSFEKYKLGKMNRQKFIDLKNSIDEEIQAIKEKIQKAKEEKEVIDNTKLTRELMEKYIDSVFCEGNEVLNIIWK

SEQ ID NO: 14177 - DNA, 50 bp, Streptococcus pyogenes; identical to SEQ ID NO: 2317
  source 1..50: mol_type = genomic DNA

SEQ ID NO: 14178 - DNA, 40 bp, Streptococcus pyogenes; identical to SEQ ID NO: 14078
  source 1..40: mol_type = genomic DNA

SEQ ID NO: 14179 - DNA, 50 bp, Streptococcus pyogenes; identical to SEQ ID NO: 14084
  source 1..50: mol_type = genomic DNA

SEQ ID NO: 14180 - DNA, 40 bp, Streptococcus pyogenes; identical to SEQ ID NO: 14080
  source 1..40: mol_type = genomic DNA

SEQ ID NO: 14181 - protein, 497 aa, Streptococcus pyogenes
MSKIALYIRLSVEDMIKTDESESIINQRAYLNDYLDKNEEFKNFTREEYVDDGYSGTNENRPAFQRMLEDVKKNNIQTIIVKDLSRFMRDYITLGDYLENIFPFLGVRFIAINDGYDSDKEKGNGTDLDIQFKGLLYDFYTKDISEKVKSSMTTLKKQGKFLAWSPPLGYMKDPNDRHKIIVDEETAWIVKKIFKLALDGISSRNIAKILNEEKIPTPSKRKSELTNLDFEYSIIRTAKKPRPTWTNGNVIDVLANENYTGTYTFNMQDKSVLNPSSFKFKPKEEWGRVENNHEAIISKEDFEKVQKIKEKNLFMKGKNTDYEWRKKSPLQGFAKCPTCNHILGCTQSKRKRQDGTIRVHTYFTCRICKCNNVKHKNSRAGSLEEQVFEAIKEKYGLEDPIKDEKVKVKPMEKSIEDLEAKKMQSFEKYKLGKMNRQKFIDLKNSIDEEIQAIKEKIQKAKEEKEVIDNTKLTRELMEKYIDSVFCEGNEVLNIIWK

SEQ ID NO: 14182 - DNA, 50 bp, Streptococcus pyogenes; identical to SEQ ID NO: 2317
  source 1..50: mol_type = genomic DNA

SEQ ID NO: 14183 - DNA, 40 bp, Streptococcus pyogenes; identical to SEQ ID NO: 14078
  source 1..40: mol_type = genomic DNA

SEQ ID NO: 14184 - DNA, 50 bp, Streptococcus pyogenes; identical to SEQ ID NO: 14084
  source 1..50: mol_type = genomic DNA

SEQ ID NO: 14185 - DNA, 40 bp, Streptococcus pyogenes; identical to SEQ ID NO: 14080
  source 1..40: mol_type = genomic DNA

SEQ ID NO: 14186 - protein, 497 aa, Streptococcus pyogenes
MSKIALYIRLSVEDMIKTDESESIINQRAYLNDYLDKNEEFKNFTREEFVDDGYSGTNENRPAFQRMLEDVKKNNIQTIIVKDLSRFMRDYITLGDYLENIFPFLGVRFIAINDGYDSDKEKGNGTDLDIQFKGLLYDFYTKDISEKVKSSMTTLKKQGKFLAWSPPLGYMKDPNDRHKIIVDEETAWIVKKIFKLALDGISSRNIAKILNEEKIPTPSKRKSELTNLDFEYSIIRTAKKPRPTWTNGNVIDVLANENYTGTYTFNMQDKSVLNPSSFKFKPKEEWGRVENNHEAIISKEDFEKVQKIKEKNLFMKGKNTDYEWRKKSPLQGFAKCPTCNHILGCTQSKRKRQDGTIRVHTYFTCRICKCNNVKHKNSRAGSIEEQVFEAIKEKYGLEDPIKDEKVKVKPMEKSIEDLEAKKMQSFEKYKLGKMNRQKFIDLKNSIDEEIQAIKEKIQKAKEEKEVIDNTKLTRELMEKYIDSVFCEGNEVLNIIWK

SEQ ID NO: 14187 - DNA, 50 bp, Streptococcus pyogenes; identical to SEQ ID NO: 2317
  source 1..50: mol_type = genomic DNA

SEQ ID NO: 14188 - DNA, 40 bp, Streptococcus pyogenes; identical to SEQ ID NO: 14078
  source 1..40: mol_type = genomic DNA

SEQ ID NO: 14189 - DNA, 50 bp, Streptococcus pyogenes; identical to SEQ ID NO: 14084
  source 1..50: mol_type = genomic DNA

SEQ ID NO: 14190 - DNA, 40 bp, Streptococcus pyogenes; identical to SEQ ID NO: 14080
  source 1..40: mol_type = genomic DNA

SEQ ID NO: 14191 - protein, 497 aa, Streptococcus pyogenes
MSKLALYIRLSVEDMIKTDESESIINQRAYLNDYLDKNEEFKNFTREEYVDDGYSGTNENRPAFQRMLEDVKKNNIQTIIVKDLSRFMRDYITLGDYLENIFPFLGVRFIAINDGYDSNKEKGNGTDLDIQFKGLLYDFYTKDISEKVKSSMTTLKKQGKFLAWSPPLGYMKDPNDRHKIIVDEETAWIVKKIFKLALDGISSRNIAKILNEEKIPTPSKRKSELTNLDFEYSIIRTAKKPRPTWTNGNVIDVLANENYTGTYTFNMQDKSVLNPSSFKFKPKEEWGRVENNHEAIISKEDFEKVQKIKEKNLFMKGKNTDYEWRKKSPLQGFAKCPTCNHILGCIQSKRKRKDGTIRVHTYFSCRICKCNNVKHKNSRAGSLEEQVFEAIKEKYGLEDPIKNEKVKVKPMEKSIEDLEAKKMQNFEKYKLGKMNRQKFIDSKNLIDEEIQAIKEKILKAKEEKEVIDNTKLTRELMEKYIDSVFCEGNEVLNIIWK

SEQ ID NO: 14192 - DNA, 50 bp, Streptococcus pyogenes; identical to SEQ ID NO: 2317
  source 1..50: mol_type = genomic DNA

SEQ ID NO: 14193 - DNA, 40 bp, Streptococcus pyogenes; identical to SEQ ID NO: 14078
  source 1..40: mol_type = genomic DNA

SEQ ID NO: 14194 - DNA, 50 bp, Streptococcus pyogenes; identical to SEQ ID NO: 14084
  source 1..50: mol_type = genomic DNA

SEQ ID NO: 14195 - DNA, 40 bp, Streptococcus pyogenes; identical to SEQ ID NO: 14080
  source 1..40: mol_type = genomic DNA

SEQ ID NO: 14196 - protein, 497 aa, Streptococcus pyogenes
MSKIALYIRLSVEDMIKTDESESIINQRAYLNDYLDKNEEFKNFTREEYVDDGYSGTNENRPAFQRMLEDVKKNNIQTIIVKDLSRFMRDYITLGDYLENIFPFLGVRFIAINDGYDSDKEKGNGTDLDIQFKGLLYDFYTKDISEKVKSSMTTLKKQGKFLAWSPPLGYMKDPNDKHKIIVDEETAWIVKKIFKLALDGISSRNIAKILNEEKIPTPSKRKSELTNLDFEYSIIRTAKKPRPTWTNGNVIDVLANENYTGTYTFNMQDKSVLNPSSFKFKPKEEWGRVENNHEAIISKEDFEKVQKIKEKNLFMKGKNTDYEWRKKSPLQGFAKCPTCNHILGCTQSKRKRQDGTIRVHTYFTCRICKCNNVKHKNSRAGRLEEQVFEAIKEKYGLEDSNKDEKIKVKPMEKSIKDLEAKKMQNFEKYKLGKMNRQKFIDSKNLIDEEIQAIKEKIQKAKEEKEVIDNTKLTRELMEKYIDSVICEGNEVLNIIWK

SEQ ID NO: 14197 - DNA, 50 bp, Streptococcus pyogenes; identical to SEQ ID NO: 2317
  source 1..50: mol_type = genomic DNA

SEQ ID NO: 14198 - DNA, 40 bp, Streptococcus pyogenes; identical to SEQ ID NO: 14078
  source 1..40: mol_type = genomic DNA

SEQ ID NO: 14199 - DNA, 50 bp, Streptococcus pyogenes; identical to SEQ ID NO: 14084
  source 1..50: mol_type = genomic DNA

SEQ ID NO: 14200 - DNA, 40 bp, Streptococcus pyogenes; identical to SEQ ID NO: 14080
  source 1..40: mol_type = genomic DNA

SEQ ID NO: 14201 - protein, 497 aa, Streptococcus pyogenes
MSKIALYIRLSVEDMIKTDESESIINQRAYLNDYLDKNEEFKNFTREEYVDDGYSGTNENRPAFQRMLEDVKKNNIQTIIVKDLSRFMRDYITLGDYLENIFPFLGVRFIAINDGYDSNKEKGNGTDLDIQFKGLLYDFYTKDISEKVKSSMTTLKKQGKFLAWSPPLGYMKDPNDRHKIIVDEETAWIVKKIFKLALDGISSRNIAKILNEEKIPTPSKRKSELTNLDFEYSIIRTEKKPRPTWTNGNVIDVLANENYTGTYTFNMQDKSVLNPSSFKFKPKEEWGRVENNHEAIISREDFEKVQKIKEKNLFMKGKNTDYEWRKKSPLQGFAKCPTCNHILGCIQSKRKRQDGSIRVHTYFTCRICKCNNVKHKNSRAGSLEEQVFEAIKEKYGLEDPIKDEKIKVKPMQKSIEDLEAKKMQNFEKYKLGKMNRQKFIDSKNSIDEEIQAIKEKIQKAKEEKEVIDNTKLTRELMEKYIDSVFCEGNEVLNIIWK

SEQ ID NO: 14202 - DNA, 50 bp, Streptococcus pyogenes; identical to SEQ ID NO: 2317
  source 1..50: mol_type = genomic DNA

SEQ ID NO: 14203 - DNA, 40 bp, Streptococcus pyogenes; identical to SEQ ID NO: 14078
  source 1..40: mol_type = genomic DNA

SEQ ID NO: 14204 - DNA, 50 bp, Streptococcus pyogenes; identical to SEQ ID NO: 14084
  source 1..50: mol_type = genomic DNA

SEQ ID NO: 14205 - DNA, 40 bp, Streptococcus pyogenes; identical to SEQ ID NO: 14080
  source 1..40: mol_type = genomic DNA

SEQ ID NO: 14206 - protein, 497 aa, Streptococcus pyogenes
MSKVALYIRLSVEDMIKTDESESIINQRAYLNDYLDKNEEFKNFTREEYVDDGYSGTNENRPAFQRMLEDVKKNNIKTIIVKDLSRFMRDYITLGDYLENIFPFLGVRFIAINDGYDSDKEKGNGTDLDVQFKGLLYDFYTKDISEKVKSSMTTLKKQGKFLAWSPPLGYMKDPNDRHKIIVDEETAWIVKKIFKLALDGISSRNIAKILNEEKIPTPSKRKSELTNLDFEYSIIRTAKKPRPTWTNGNVIDVLANENYTGTYTFNMQDKSVLNPTSFKFKPKEEWGRVKNNHEAIISKEDFEKVQKIKEKNLFMKGKNTDYEWRKKSPLQGFAKCPTCNHILGCTQSKRKRQDGTIRVHTYFTCRICKCNNVKHKNSRAGSIEEQVFEAIKEKYGLEDPIKDEKVKVKPMEKSIEDLEAKKMQNFEKYKLGKMNRQKFIDSKNLIDEEIQAIKEKILKAKEEKEVIDNTKLTRELMEKYIDSVICEGNEVLNIKWK

SEQ ID NO: 14207 - DNA, 50 bp, Streptococcus pyogenes; identical to SEQ ID NO: 2317
  source 1..50: mol_type = genomic DNA

SEQ ID NO: 14208 - DNA, 40 bp, Streptococcus pyogenes; identical to SEQ ID NO: 14078
  source 1..40: mol_type = genomic DNA

SEQ ID NO: 14209 - DNA, 50 bp, Streptococcus pyogenes; identical to SEQ ID NO: 14084
  source 1..50: mol_type = genomic DNA

SEQ ID NO: 14210 - DNA, 40 bp, Streptococcus pyogenes; identical to SEQ ID NO: 14080
  source 1..40: mol_type = genomic DNA

SEQ ID NO: 14211 - protein, 497 aa, Streptococcus pyogenes
MSKIALYIRLSVEDMIKTDESESIINQRAYLNDYLDKNEEFKNFTREEYVDDGYSGTNENRPAFQRMLEDVKKNNIQTIIVKDLSRFMRDYITLGDYLENIFPFLGVRFIAINDGYDSNKEKGNGTDLDIQFKGLLYDFYTKDISEKVKSSMTTLKKQGKFLAWSPPLGYMKDPNDRHKIIVDEETAWIVKKIFKLALDGISSRNIAKILNEEKIPTPSKRKSELTNLDFEYSIIRTAKKPRPTWTNGNVIDVLANENYTGTYTFNMQDKSVLNPTSFKFKPKEEWGRVENNHEAIISKEDFEKVQKIKEKNLFMKGKNTDYEWRKKSPLQGFAKCPTCNHILGCVQSKRKRKDGSIRVHTYFTCRICKCNNVKHKNSRAGSLEDQVFEAIKEKYGLEDSNKDEKIKVKPMEKSIEDLEAKKMQNFEKYKLGKMNRQKFIDSKNLIDEEIQAIKEKILKAKEEKEVIDNTKLTRELMEKYIDSVFCEGNEVLNIIWK

SEQ ID NO: 14212 - DNA, 50 bp, Streptococcus pyogenes; identical to SEQ ID NO: 2317
  source 1..50: mol_type = genomic DNA

SEQ ID NO: 14213 - DNA, 40 bp, Streptococcus pyogenes; identical to SEQ ID NO: 14078
  source 1..40: mol_type = genomic DNA

SEQ ID NO: 14214 - DNA, 50 bp, Streptococcus pyogenes; identical to SEQ ID NO: 14084
  source 1..50: mol_type = genomic DNA

SEQ ID NO: 14215 - DNA, 40 bp, Streptococcus pyogenes; identical to SEQ ID NO: 14080
  source 1..40: mol_type = genomic DNA

SEQ ID NO: 14216 - protein, 497 aa, Streptococcus pyogenes
MSKVALYIRLSVEDMIKTDESESIINQRAYLNDYLDKNEEFKNFTREEYVDDGYSGTNENRPAFQRMLEDVKKNNIQTIIVKDLSRFMRDYITLGDYLENIFPFLGVRFIAINDGYDSNKEKGNGTDLDIQFKGLLYDFYTKDISEKVKSSMTTLKKQGKFLAWSPPLGYMKDPSDRHKIIVDEETAWIVKKIFKLALDGISSRNIAKILNEEKIPTPSKRKSELTNLDFEYSIIRTAKKPRPTWTNGNVIDVLANENYTGTYTFNMQDKSVLNPSSFKFKPKEEWGRVENNHEAIISKEDFEKVQKIKEKNLFMKGKNTDYEWRKKSPLQGFAKCPTCNHILGCIQSKRKRQDGSIRVHTYFTCRICKCNNVKHKNSRAGSLEEQVFEAIKEKYGLEDPIKDEKVKVKPMEKSIEDLEAKKMQSFEKYKLGKMNRQKFIDSKNLIDEEIQAIKEKILKAKEEKEVIDNTKLTRELMEKYIDSVFCEGNEVLNIIWK

SEQ ID NO: 14217 - DNA, 50 bp, Streptococcus pyogenes; identical to SEQ ID NO: 2317
  source 1..50: mol_type = genomic DNA

SEQ ID NO: 14218 - DNA, 40 bp, Streptococcus pyogenes; identical to SEQ ID NO: 14078
  source 1..40: mol_type = genomic DNA

SEQ ID NO: 14219 - DNA, 50 bp, Streptococcus pyogenes; identical to SEQ ID NO: 14084
  source 1..50: mol_type = genomic DNA

SEQ ID NO: 14220 - DNA, 40 bp, Streptococcus pyogenes; identical to SEQ ID NO: 14080
  source 1..40: mol_type = genomic DNA

SEQ ID NO: 14221 - protein, 484 aa, Streptococcus ruminantium; identical to SEQ ID NO: 10331

SEQ ID NO: 14222 - DNA, 50 bp, Streptococcus ruminantium
  source 1..50: mol_type = genomic DNA
tagcgaattttagtatccttcatttcaatcaaggttactaaaattattga

SEQ ID NO: 14223 - DNA, 40 bp, Streptococcus ruminantium
  source 1..40: mol_type = genomic DNA
taaaagaacaactaacatctctactagtgtaaaggcttta

SEQ ID NO: 14224 - DNA, 50 bp, Streptococcus ruminantium
  source 1..50: mol_type = genomic DNA
tagcgaattttagtatccttcattataatcaaggttactaaaattattga

SEQ ID NO: 14225 - DNA, 40 bp, Streptococcus ruminantium
  source 1..40: mol_type = genomic DNA
gaaaacaaaaaaaaacatcattacaagtttaatggattta

SEQ ID NO: 14226 - protein, 516 aa, Eubacterium ventriosum
MSKITAMYIRLSMEDEDVSLNRKEESNSVSSQRELLKAYIENHSELKDTKVQEYCDDGFTGTKFERPGYTKLMEDIRAEKISCIVVKDLSRLGRDYIEVGSLLEQILPLYQVRVIAVNDNYDSDNYDGSTGGMNVAFKNLIYMLYSRDLSNKICSAKHTRILNGENISGQLRYGYVKDPNDKHKIIVDPEAAEVVKLIFELTAQGKRKTEVANYLNAHGIDTPSAYKKRKGSKNFFHAVEVKSLWSTSSIRDILNDEVYLGKLIWNKTKKRVGSNNTSTYVPKDEWIVIENCHEPIITQKLFDMAHANSKKYIRPKRGKRNYNPFYYCGVCGRALAPSKRVKGDILLCSSSRIEKNSPCKSNRVEIAKVEDAIMKIVNMYATAYLDEKGIKKAGKSKEVSPEEKIATLEKKVKSLSSKKMMLYSDYKDDKLTREEYVKRSKAMVEQIDELHQEIEQLKTEIPPEDNSSSKFETQLESIINMESFDREKIQKVIKKVIINGEDNIEIVWNTDDPFFK

SEQ ID NO: 14227 - DNA, 50 bp, Eubacterium ventriosum; identical to SEQ ID NO: 11652
  source 1..50: mol_type = genomic DNA

SEQ ID NO: 14228 - DNA, 40 bp, Eubacterium ventriosum
  source 1..40: mol_type = genomic DNA
tgtaagtagatgggaaaacggaacagggatgcctgatatt

SEQ ID NO: 14229 - DNA, 50 bp, Eubacterium ventriosum
  source 1..50: mol_type = genomic DNA
tttggtctagggttgacacgagcaaatgtttgagttataataggaccaag

SEQ ID NO: 14230 - DNA, 40 bp, Eubacterium ventriosum
  source 1..40: mol_type = genomic DNA
tgtaagtagttgataaaacaaaagagaaatgcctaaagtt

SEQ ID NO: 14231 - protein, 533 aa, Clostridium perfringens
MKTAAIYARRSKVVETGDSIENQIQLCTNYLKNIGINNTLIYSDEGFSGKNTERPGFVRLMNDAKQKKFDTLVCYKVDRLSRNIGDFSNLINELEKNEISFISVIEQFDTRAAMGKAMMYICSVFSQLERETISQRVCDNMYSLATNGYWLGGEFPFGFSSSRKNFTDSSGKNRSYSELIPIEKEINLVKLIFNKYIELGSLSQVEKYLLQNNIKTRRGKDWSKASIKNIISNPVYVKANDKTIEYFKSQGIKTYGEPDDIHGILIYKKRKGKSGKIRNPDEWIYAVSTHEGIIDSDSWLEVQKIAEINKYKAPALGSSHKALLSGIIRCAQCGSSMRVSYGVPNKLTKKRKHYYMCTLKHNSGKVRCASKNVDGPEVDKLVINKLKELSLDKSYLVQRLKDYKESFATSSENILSKNIQNEISKNKEQIDNLVNNITLTEDPQLVQILLDKLTKLKSKSVELTNSLNKLNDELAKQDILINNCDNIIQKLKNLSALIDDLDVPQKRSLLSSVIDKVFVDGDTGAVKIKFKTK

SEQ ID NO: 14232 - DNA, 50 bp, Clostridium perfringens
  source 1..50: mol_type = genomic DNA
catcgcatttttgtgatgagagcatcagtactcttaataaaagtgcaatg

SEQ ID NO: 14233 - DNA, 40 bp, Clostridium perfringens; identical to SEQ ID NO: 4603
  source 1..40: mol_type = genomic DNA

SEQ ID NO: 14234 - DNA, 50 bp, Clostridium perfringens
  source 1..50: mol_type = genomic DNA
catcgcatttttgtgatgagagcactagtactcttaataaaagtgcaatg

SEQ ID NO: 14235 - DNA, 40 bp, Clostridium perfringens
  source 1..40: mol_type = genomic DNA
aatttctctcattatattactaagtctacatgtggccatt

SEQ ID NO: 14236 - protein, 533 aa, Clostridium perfringens
MKTAAIYARRSKVVETGDSIENQIQLCTNYLKNIGINNTLIYSDEGFSGKNTERPGFVRLMNDAKQKKFDTLVCYKVDRLSRNIGDFSNLINELEKNEISFISVIEQFDTRAAMGKAMMYICSVFSQLERETISQRVCDNMYSLATNGYWLGGEFPFGFSSSRKNFTDSSGKNRSYSELIPIEKEINLVKLIFNKYIELGSLSQVEKYLLQNNIKTRRRKDWSKASIKNIISNPVYVKANDKTIEYFKSQGIKTYGEPDDIHGILIYKKRKGKSGKIRNPDEWIYAVSTHEGIIDSDSWLKVQKIAEINKYKAPALGSSHKALLSGIIRCAQCGSSMRVSYGVPNKLTKKRKHYYMCTLKHNSGKVRCASKNVDGPEVDKLVINKLKELSLDKSYLVQRLKDYKESFATSSENILSKNIQNEISKNKEQIDNLVNNITLTEDPQLVQILLDKLTKLKSKSVELTNSLNKLNDELAKQDILINNCDNIIQKLKNLSTLIDDLDVPQKRSLLSSVIDKVFVDGDTGAVKIKFKTK

SEQ ID NO: 14237 - DNA, 50 bp, Clostridium perfringens; identical to SEQ ID NO: 14232
  source 1..50: mol_type = genomic DNA

SEQ ID NO: 14238 - DNA, 40 bp, Clostridium perfringens; identical to SEQ ID NO: 4603
  source 1..40: mol_type = genomic DNA

SEQ ID NO: 14239 - DNA, 50 bp, Clostridium perfringens; identical to SEQ ID NO: 14234
  source 1..50: mol_type = genomic DNA

SEQ ID NO: 14240 - DNA, 40 bp, Clostridium perfringens; identical to SEQ ID NO: 14235
  source 1..40: mol_type = genomic DNA

SEQ ID NO: 14241 - protein, 533 aa, Clostridium perfringens
MKTAAIYARRSKVVETGDSIENQIQLCTNYLKNIGINNTLIYSDEGFSGKNTERPGFVRLMNDAKQKKFDTLVCYKVDRLSRNIGDFSNLINELEKNEISFISVIEQFDTRAAMGKAMMYICSVFSQLERETISQRVCDNMYSLATNGYWLGGEFPFGFSSSRKNFTDSSGKNRSYSELIPIEKEINLVKLIFNKYIELGSLSQVEKYLLQNNIKTRRGKDWSKASIKNIISNPVYVKANDKTIEYFKSQGIKTYGESDDIHGILIYKKRKGKSGKIRNPDEWIYAVSTHEGIIDSDSWLEVQKIAEINKYKAPALGSSHKALLSGIIRCAQCGSSMRVSYGVPNKLTKKRKHYYMCTLKHNSGKIRCASKNVDGPEVDKLIINKLKELSLDKSYLVQRLKDYKESFATSSENILSKNIQNEISKNKEQIDNLVNNITLTEDPQLVQILLDKLTKLKSKSVDLTNSLNKLNDELAKQDILINNCDNIIQKLKNLSALIDDLDVPQKRSLLSSVIDKVFVDGDTGAVKIKFKTK

SEQ ID NO: 14242 - DNA, 50 bp, Clostridium perfringens; identical to SEQ ID NO: 14232
  source 1..50: mol_type = genomic DNA

SEQ ID NO: 14243 - DNA, 40 bp, Clostridium perfringens; identical to SEQ ID NO: 4603
  source 1..40: mol_type = genomic DNA

SEQ ID NO: 14244 - DNA, 50 bp, Clostridium perfringens; identical to SEQ ID NO: 14234
  source 1..50: mol_type = genomic DNA

SEQ ID NO: 14245 - DNA, 40 bp, Clostridium perfringens; identical to SEQ ID NO: 14235
  source 1..40: mol_type = genomic DNA

SEQ ID NO: 14246 - protein, 533 aa, Clostridium perfringens
MKTAAIYARRSKVVETGDSIENQIQLCTNYLKNIGINNTLIYSDEGFSGKNTERPGFVRLMNDAKQKKFDTLVCYKVDRLSRNIGDFSNLINELEKNEISFISVIEQFDTRAAMGKAMMYICSVFSQLERETISQRVCDNMYSLATNGYWLGGEFPFGFSSSRKNFTDSSGNNRSYSELIPIEKEINLVKLIFNKYIELGSLSQVEKYLLQNNIKTRRGKDWSKASIKNIISNPVYVKANDKTIEYFKSQGIKTYGEPDDIHGILIYKKRKGKSGKIRNPDEWIYAVSTHEGIIDSDSWLEVQKIAEINKYKAPALGSSHKALLSGIIRCAQCGSSMRVSYGVPNKLTKKRKHYYMCTLKHNSGKVRCASKNVDGPEVDKLVINKLKELSLDKSYLVQRLKDYKESFATSSENILSKNIQNEISKNKEQIDNLVNNITLTEDPQLVQILLDKLTKLKSKSVELTNSLNKLNDELAKQDILINNCDNIIQKLKNLSTLIDDLDVPQKRSLLSSVIDKVFVDGDTGAVKIKFKTK

SEQ ID NO: 14247 - DNA, 50 bp, Clostridium perfringens; identical to SEQ ID NO: 14232
  source 1..50: mol_type = genomic DNA

SEQ ID NO: 14248 - DNA, 40 bp, Clostridium perfringens; identical to SEQ ID NO: 4603
  source 1..40: mol_type = genomic DNA

SEQ ID NO: 14249 - DNA, 50 bp, Clostridium perfringens; identical to SEQ ID NO: 14234
  source 1..50: mol_type = genomic DNA

SEQ ID NO: 14250 - DNA, 40 bp, Clostridium perfringens; identical to SEQ ID NO: 14235
  source 1..40: mol_type = genomic DNA

SEQ ID NO: 14251 - protein, 533 aa, Clostridium perfringens
MKTAAIYARRSKVVETGDSIENQIQLCTNYLKNIGINNTLIYSDEGFSGKNTERPGFVRLMNDAKQKKFDTLVCYKVDRLSRNIGDFSNLINELEKNEISFISVIEQFDTRAAMGKAMMYICSVFSQLERETISQRVCDNMYSLAANGYWLGGEFPFGFSSSRKNFTDSSGKNRSYSELIPIEKEINLVKLIFNKYIELGSLSQVEKYLLQNNIKTRRGKDWSKASIKNIISNPVYVKANDKTIEYFKSQGIKTYGEPDEIHGILIYKKRKGKSGKIRNPDEWIYAVSTHEGIIDSDSWLEVQKIAEINKYKAPALGSSHKALLSGIIRCAQCGSSMRVSYGVPNKLTKKRKHYYMCTLKHNSGKVRCASKNVDGPEVDKLVINKLKELSLDKSYLVQRLKDYKESFATSSENILSKNIQNEISKNKEQIDNLVNNITLTEDPQLVQILLDKLTKLKSKSVELTNSLNKLNDELAKQDILINNCDNIIQKLKNLSALIDDLDVPQKRSLLSSVIDKVFVDGDTGAVKIKFKTK

SEQ ID NO: 14252 - DNA, 50 bp, Clostridium perfringens; identical to SEQ ID NO: 14232
  source 1..50: mol_type = genomic DNA

SEQ ID NO: 14253 - DNA, 40 bp, Clostridium perfringens; identical to SEQ ID NO: 4603
  source 1..40: mol_type = genomic DNA

SEQ ID NO: 14254 - DNA, 50 bp, Clostridium perfringens; identical to SEQ ID NO: 14234
  source 1..50: mol_type = genomic DNA

SEQ ID NO: 14255 - DNA, 40 bp, Clostridium perfringens; identical to SEQ ID NO: 14235
  source 1..40: mol_type = genomic DNA

SEQ ID NO: 14256 - protein, 533 aa, Clostridium perfringens
MKTAAIYARRSKVVETGDSIENQIQLCTNYLKNIGINNTLIYSDEGFSGKNTERPGFVRLMNDAKQKKFDTLVCYKVDRLSRNIGDFSNLINELEKNEISFISVIEQFDTRAAMGKAMMYICSVFSQLERETISQRVCDNMYSLATNGYWLGGEFPFGFSSSRKNFTDSSGKNRSYSELIPIEKEINLVKLIFNKYIELGSLSQVEKYLLQNNIKTRRGKDWSKASIKNIISNPVYVKANDKTIEYFKSQGIKTYGEPDDIHGILIYKKRKGKSGKIRNPDEWIYAVSTHEGIIDSDSWLEVQKIAEINKYKAPALGSSHKALLSGIIRCAQCGSSMRVSYGVPNKLTKKRKHYYMCTLKHNSGKVRCASKNVDGPEVDKLVINKLKELSLDKSYLVQRLKDYKESFATSSENILSKNIKNEISKNKEQIDNLVNNITLTEDPQLVQILLDKLTKLKSKSVELTNSLNKLNDELAKQDILINNCDNIIQKLKNLSALIDDLDVPQKRSLLSSVIDKVFVDGDTGAVKIKFKTK

SEQ ID NO: 14257 - DNA, 50 bp, Clostridium perfringens; identical to SEQ ID NO: 14232
  source 1..50: mol_type = genomic DNA

SEQ ID NO: 14258 - DNA, 40 bp, Clostridium perfringens; identical to SEQ ID NO: 4603
  source 1..40: mol_type = genomic DNA

SEQ ID NO: 14259 - DNA, 50 bp, Clostridium perfringens; identical to SEQ ID NO: 14234
  source 1..50: mol_type = genomic DNA

SEQ ID NO: 14260 - DNA, 40 bp, Clostridium perfringens; identical to SEQ ID NO: 14235
  source 1..40: mol_type = genomic DNA

SEQ ID NO: 14261 - protein, 533 aa, Clostridium perfringens
MKTAAIYARRSKVVETGDSIENQIQLCTNYLKNIGINNTLIYSDEGFSGKNTERPGFVRLMNDAKQKKFDTLVCYKVDRLSRNIGDFSNLINELEKNEISFISVIEQFDTRAAMGKAMMYICSVFSQLERETISQRVCDNMYSLATNGYWLGGEFPFGFSSSRKNFTDSSGKNRSYSELIPIEKEINLVKLIFNKYIELGSLSQVEKYLLQNNIKTRRGKDWSKASIKNIISNPVYVKANDKTIEYFKSQGIKTYGEPDDIHGILIYKKRKGKSGKIRNPDEWIYAVSTHEGIIDSDSWLEVQKIAEINKYKAPALGSSHKALLSGIIRCAQCGSSMRVSYGVPNKLTKKRKHYYMCTLKHNSGKVRCVSKNVDGPEVDKLVINKLKELSLDKSYLVQRLKDYKESFATSSENILSKNIKNEISKNKEQIDNLVNNITLTEDPQLVQILLDKLTKLKSKSVELTNSLNKLNDELAKQDILINNCDNIIQKLKNLSALIDDLDVPQKRSLLSSVIDKVFVDGDTGAVKIKFKTK

SEQ ID NO: 14262 - DNA, 50 bp, Clostridium perfringens; identical to SEQ ID NO: 14232
  source 1..50: mol_type = genomic DNA

SEQ ID NO: 14263 - DNA, 40 bp, Clostridium perfringens; identical to SEQ ID NO: 4603
  source 1..40: mol_type = genomic DNA

SEQ ID NO: 14264 - DNA, 50 bp, Clostridium perfringens; identical to SEQ ID NO: 14234
  source 1..50: mol_type = genomic DNA

SEQ ID NO: 14265 - DNA, 40 bp, Clostridium perfringens; identical to SEQ ID NO: 14235
  source 1..40: mol_type = genomic DNA

SEQ ID NO: 14266 - protein, 533 aa, Clostridium perfringens
MKTAAIYARRSKVVETGDSIENQIQLCTNYLKNIGINNTIIYSDEGFSGKNTERPGFVRLMNDAKQKKFDTLVCYKVDRLSRNIGDFSNLINELEKNEISFISVIEQFDTRAAMGKAMMYICSVFSQLERETISQRVCDNMYSLATNGYWLGGEFPFGFSSSRKNFTDSSGKNRSYSELIPIEKEINLVKLIFNKYIELGSLSQVEKYLLQNNIKTRRGKDWSKASIKNIISNPVYVKANDKTIEYFKSQGIKTYGEPDDIHGILIYKKRKGKSGKIRNPDEWIYAVSTHEGIIDSDSWLEVQKIAEINKYKAPALGSSHKALLSGIIRCAQCGSSMRVSYGVPNKLTKKRKHYYMCTLKHNSGKVRCASKNVDGPEVDKLVINKLKELSLDKSYLVQRLKDYKESFATSSENILSKNIQNEISKNKEQIDNLVNNITLTEDPQLVQILLDKLTKLKSKSVELTNSLNKLNDELAKQDILINNCDNIIQKLKNLSALIDDLDVPQKRTLLSSVIDKVFVDGDTGAVKIKFKTK

SEQ ID NO: 14267 - DNA, 50 bp, Clostridium perfringens; identical to SEQ ID NO: 14232
  source 1..50: mol_type = genomic DNA

SEQ ID NO: 14268 - DNA, 40 bp, Clostridium perfringens; identical to SEQ ID NO: 4603
  source 1..40: mol_type = genomic DNA

SEQ ID NO: 14269 - DNA, 50 bp, Clostridium perfringens; identical to SEQ ID NO: 14234
  source 1..50: mol_type = genomic DNA

SEQ ID NO: 14270 - DNA, 40 bp, Clostridium perfringens; identical to SEQ ID NO: 14235
  source 1..40: mol_type = genomic DNA

SEQ ID NO: 14271 - protein, 533 aa, Clostridium perfringens
MKTAAIYARRSKVVETGDSIENQIQLCTNYLKNIGINNTLIYSDEGFSGKNTERPGFVRLMNDAKQKKFDTLVCYKVDRLSRNIGDFSNLINELEKNEISFISVIEQFDTRAAMGKAMMYICSVFSQLERETISQRVCDNMYSLATNGYWLGGEFPFGFSSSRKNFTDSSGKNRSYSELIPIEKEINLVKLIFNKYIELGSLSQVEKYLLQNNIKTRRGKDWSKASIKNIISNPVYVKANDKTIEYFKSQGIKTYGEPDDIHGILIYKKRKGKSGKIRNPDEWIYAVSTHEGIIDSDSWLEVQKIAEINKYKAPALGSSHKALLSGIIRCAQCGSSMRVSYGVPNKLTKKRKHYYMCTLKHNSGKVRCASKNVDGPEVDKLVINKLKELSLDKSYLVQRLKDYKESFATSSENILSKNIQNEISKNKEQIDNLVNNITLTEDPQLVQILLDKLTKLKSKSVELTNSLNKLNDELAKQDILINNCDNIIQKLKNLSTLIDDLDVPQKRSLLSSVIDKVFVDGDTGAVKIKFKTK

SEQ ID NO: 14272 - DNA, 50 bp, Clostridium perfringens; identical to SEQ ID NO: 14232
  source 1..50: mol_type = genomic DNA

SEQ ID NO: 14273 - DNA, 40 bp, Clostridium perfringens; identical to SEQ ID NO: 4603
  source 1..40: mol_type = genomic DNA

SEQ ID NO: 14274 - DNA, 50 bp, Clostridium perfringens; identical to SEQ ID NO: 14234
  source 1..50: mol_type = genomic DNA

SEQ ID NO: 14275 - DNA, 40 bp, Clostridium perfringens; identical to SEQ ID NO: 14235
  source 1..40: mol_type = genomic DNA

SEQ ID NO: 14276 - protein, 497 aa, Bacillus cereus
MTINNVAIYLRKSRAEDGLTDAESLENHRNVLTEIAERNSWKYEIFEEIGSSMSISERPQLRILLDSVTNKYIYDAVLVMDVDRLSRDRYDSSLIMKILRDNDVKIVTADGKITNLRDENDALMTDFKDIFSNYEYKQITKRMIRGKEASARKGRWSSGRVPLGYVYNKDTGMLDIDEDKAPIIREIFHMYANGTGTHFISLEMNKRGYRGAMGKPFGGKSIRDIITNEIYLGNATLRKFIKAGNTYKLRPEEEHIRHEGIYPAIVEKELFESVQRRYESQKMKPNRAKAGTHSLSGLVRCGYCDKVHAIQTRPTKGKVLKGCSKRDLITGVLCKNHGILYEKVMEEVFKDLSKYSATLDETVERLLEDKTMYLNSKDRELEALESQLKTIEAQLKRINYMFMNDLLSEEELGEMKPQKVKEKDHILKRITEVKELTVDDKLEEYEKVSKTLKNILDNREVLSDKDLNRLLSSVINRIVLYNYKDKDVEPRIVIEFK

SEQ ID NO: 14277 - DNA, 50 bp, Bacillus cereus; identical to SEQ ID NO: 2772
  source 1..50: mol_type = genomic DNA

SEQ ID NO: 14278 - DNA, 40 bp, Bacillus cereus
  source 1..40: mol_type = genomic DNA
aatggattttaaatagtagccatgccatgtctcttgagag

SEQ ID NO: 14279 - DNA, 50 bp, Bacillus cereus; identical to SEQ ID NO: 2774
  source 1..50: mol_type = genomic DNA

SEQ ID NO: 14280 - DNA, 40 bp, Bacillus cereus; identical to SEQ ID NO: 2770
  source 1..40: mol_type = genomic DNA

SEQ ID NO: 14281 - protein, 550 aa, Acetivibrio saccincola
MNRQSTFSTIRKSTLAFEEAKITALYCRLSRDDELAGDSNSIVNQKAILKKYAEDNGFRNIEFYVDDGVSGTTFDRPDFNRMIADVESGRIGTIIIKDMSRFGRDYLKVGYYTEIMFPESDVRFIAINNGIDSANQTDSDFTPFLNIINEWYAKDTSKKIRAVFKSKGQSGKPLCTNPPYGYIKDPEDKLHWFIDEEAAEVVRDIFRLCMAGFGPTQIAKQLEKRCIDTPTVHLRKMGINTPARPPENPYAWSARTVADILAKMEYLGHTVNFKTSKKSYKSKVKILNNPEDWLVFKNTHEAIIDEGTWETVQKIRDGKRRPSRLGEMGMLSGMMFCADCGAKLYQVRGKGWTHDKEYFVCATYRKKKGMCSSHQIRNVVVEQLLLEDLRRVTSFAKDHEQEFIRIVMNNSEKELAKELRQSQKEYEQAQTRIADIDKIIRKLYEDNVMGKIPEERFYKMSAEYEAEQKALEERITKLKHTIDTANEQSLNTDRFLALVKKYTEITELDAEIIREFIDKIIVFKAEKIDGRRTQRIQIFYNCIGAIDLPK

SEQ ID NO: 14282 - DNA, 50 bp, Acetivibrio saccincola; identical to SEQ ID NO: 3022
  source 1..50: mol_type = genomic DNA

SEQ ID NO: 14283 - DNA, 40 bp, Acetivibrio saccincola
  source 1..40: mol_type = genomic DNA
caaagaaaagatagccaaaaaaccgcccttcacttttaag

SEQ ID NO: 14284 - DNA, 50 bp, Acetivibrio saccincola
  source 1..50: mol_type = genomic DNA
ataaatccctatctgaccgctcctgtagaagcgttcacttagggattgaa

SEQ ID NO: 14285 - DNA, 40 bp, Acetivibrio saccincola
  source 1..40: mol_type = genomic DNA
gaaagagaagataggcagagtgcagaccttcagttataag

SEQ ID NO: 14286 - protein, 452 aa, Clostridioides difficile
MLRVALYIRVSTEEQALNGDSIRTQIEALEQYSKENDFNIVGKYIDEGCSATNLKRPNLQRLLRDVEKDKVDLVLMTKIDRLSRGVKNYYKIMETFEKHKCDWKTILENYDSSTAAGRLHINIMLSVAENEAAQTSERIKFVFQDKLRRKEVISGTIPIGYKIENKHLVIDKEKKYIVKAIFDEYEKSGSVRTLIETINNLHGELYSYNKIKNILRNELYIGIYNKRGFYVEDYCEPIISKKQFKQIQRILEKNKKTTPNKNIHYHIFSGLLKCKECGYTLKGNSSNVGEKLYLSYRCSTFYLNKNCVHNVTHNEKHIENYLLTNLKPQLHKHMVKLEAQNEKIRQNKKSNKKDEKKKIMKKLDKIKDLYLEDLIDKETYRKDYEKLQSQLDNITEEQESQIIDTSHIKKFLDIDINEMYSDLSRVERRRFWLSIIDYIEIDNDKNITINFI

SEQ ID NO: 14287 - DNA, 50 bp, Clostridioides difficile
  source 1..50: mol_type = genomic DNA
atttggactaacatatagtatccacttggatattattagttagtccaaat

SEQ ID NO: 14288 - DNA, 40 bp, Clostridioides difficile
  source 1..40: mol_type = genomic DNA
tgtacttttaccacaaccacttggacctaataagcaaata

SEQ ID NO: 14289 - DNA, 50 bp, Clostridioides difficile
  source 1..50: mol_type = genomic DNA
atttggactaacatatagtatccagctggatattattagttagtccaaat

SEQ ID NO: 14290 - DNA, 40 bp, Clostridioides difficile
  source 1..40: mol_type = genomic DNA
tgtaatttttcaacaaccagctgtttctgctaagaaaata

SEQ ID NO: 14291 - protein, 477 aa, Liquorilactobacillus mali
MLVGCYLRVSTIDQAEEGYSIEQQKDKLKQYCEVKDWDVYKFYIDAGFSGSNINRPAMQELIEDVNNNKIDTVLVYKLDRLSRSQKDTLYLIEDVFNVHKTAFVSLNENFDTSTAFGKASIGILSVFAQLEREQIKERMQMGKMGRAKTGKAMNWWNPAFGYIYNGETYDIDEFKADIIKKIYKDYLSGTSINKIAENLNKEGHLGKDKQWSFRTVRMVLVNSDYTGNVKYHGKIYAGQHSQIIDEKTFKTTQKELKIRQQEAYSKNNNPRPFQSKYMLSGLLECKYCSCNLTLVQYRPRKDGTHLSVYKCPSTMRKKMFTQRQLSNCISKTQERQMLEEHVINAISELQSNTSKIDSMNKTKLINIDSYKTELGKIEKSLKKLVNIYVDTDSLTIDIFNEKKEALLLQKDAIDKKIKSVKKNQPDLSVSDAKNILDKIEGNIAEAKYDMKYKIVRKLIKKIIVGNSRIVIKWAFEL

SEQ ID NO: 14292 - DNA, 50 bp, Liquorilactobacillus mali
  source 1..50: mol_type = genomic DNA
taacgatattgattaaactacatttcgatatagttatatagatatcgttg

SEQ ID NO: 14293 - DNA, 40 bp, Liquorilactobacillus mali
  source 1..40: mol_type = genomic DNA
aaaaattacgattgacatttcgattaaagtaaatccagat

SEQ ID NO: 14294 - DNA, 50 bp, Liquorilactobacillus mali
  source 1..50: mol_type = genomic DNA
taacgatattgattaaactacattgagatatagttatatagatatcgttg

SEQ ID NO: 14295 - DNA, 40 bp, Liquorilactobacillus mali
  source 1..40: mol_type = genomic DNA
aaaaagtaggaataacattgagatgaaggtaaagtcagag

SEQ ID NO: 14296 - protein, 520 aa, Enterobacter roggenkampii
MKKAVYCYARVSSRGQAKDGYGMSRQQEMLRDYVAAYDDSQHNRGYELGDISWLYAEGVSAYSGKNIEDGSVLKTFIDDVLQKKITNSVLVIENLDRFSRAAPNRAAGLFLSLINAGCDIHEVETEMIHHQYSDLNIISGGLQRAHNESKRKARLSIKNWDERIKNTIDGTSVLTHRVPSWIEVKNNKYVLKKGESEKYNLIFKMYADGFGPAAIRDELKKRGMQINEREPTINHLMKIIKDQRLIGRFNSTGRKILDGMSIYPVVVEPELFEAVNDLRKQRNPLGKINVKANNLFAGLCICMNCGRYVQVNSVDKKGDTYFRCGGSLVKIDKCKERGFKYKIVENALLEHLRNFDFSMLRSDDNDMQVKINYLSMELVSNEKYSNEILADLEKEDIPDPNDRRILKNIQRRISEIRNEITILKQSNIGYETFNDLKDSYTDDLLDPKNTKLRLDFNVKVKRVIKNIKMKRYDNTIMLVVSYVGVNEKQAMVINSKTGEVVFMAVQNDDLKSIEYLINND

SEQ ID NO: 14297 - DNA, 50 bp, Enterobacter roggenkampii
  source 1..50: mol_type = genomic DNA
tacagtaatttactgttgataatcaccatgatatactgcttattactgtt

SEQ ID NO: 14298 - DNA, 40 bp, Enterobacter roggenkampii; identical to SEQ ID NO: 848
  source 1..40: mol_type = genomic DNA

SEQ ID NO: 14299 - DNA, 50 bp, Enterobacter roggenkampii
  source 1..50: mol_type = genomic DNA
tacagtaatttactgttgataatcatcatgatatactgcttattactgtt

SEQ ID NO: 14300 - DNA, 40 bp, Enterobacter roggenkampii
  source 1..40: mol_type = genomic DNA
agaaagaatgccgatgacaatcatcagctcattcagtgac

SEQ ID NO: 14301 - protein, 520 aa, Enterobacter roggenkampii
MKKAVYCYARVSSRGQAKDGYGMSRQQEMLRDYVAAYDDSQHNRGYELGDISWLYAEGVSAYSGKNIEDGSVLKTFIDDVLQKKITNSVLVIENLDRFSRAAPNRAAGLFLSLINAGCDIHEVETEMIHHQYSDLNIISGGLQRAHNESKRKARLSIKNWDERIKNTIDGTSVLTHRVPSWIEVKNNKYVLKKGESEKYNLIFKMYADGFGPAAIRDELKKRGMQINEREPTINHLMKIIKDQRLIGRFNSTGRKILDGMSIYPVVVEPELFEAVNDLRKQRNPLGKINVKANNLFAGLCICMNCGRYVQVNSVDKKGDTYFRCGGSLVKIDKCKERGFKYKIVENALLEHLRNFDFSMLRSDDNDIQVKINYLSMELVSNEKYSNEILADLEKEDIPDPNDRRILKNIQRRISEIRNEITILKQSNIGYETFNDLKDSYTDDLLDPKNTKLRLDFNVKVKRVIKNIKMKRYDNTIMLVVSYVGVNEKQAMVINSKTGAVVFMAVQNDDLKSIEYLINDN

SEQ ID NO: 14302 - DNA, 50 bp, Enterobacter roggenkampii; identical to SEQ ID NO: 14297
  source 1..50: mol_type = genomic DNA

SEQ ID NO: 14303 - DNA, 40 bp, Enterobacter roggenkampii; identical to SEQ ID NO: 848
  source 1..40: mol_type = genomic DNA

SEQ ID NO: 14304 - DNA, 50 bp, Enterobacter roggenkampii; identical to SEQ ID NO: 14299
  source 1..50: mol_type = genomic DNA

SEQ ID NO: 14305 - DNA, 40 bp, Enterobacter roggenkampii; identical to SEQ ID NO: 14300
  source 1..40: mol_type = genomic DNA

SEQ ID NO: 14306 - protein, 518 aa, Enterobacter roggenkampii
MKKAVYCYARVSSRGQAKDGYGMSRQQEMLRDYVAAYDDSLHNRGYELGSVNWLFAEGISAYSGKNIEDGSVLKSFIDDVLDCKIINAVLVIENLDRFSRAEPIKAANLFLNLITAGCDIHEVETETIHHSSSDLSIITGGLQRAHNESKRKARLSIKNWDERIKNAIDGKAVLTNRVPSWLEVKNNGYVIKEGEREKYNLIFQMYADGFGPAAIRDVLKERRMLINDSEPTIAHLNKIIKDERLIGKFNSTGRKKLSGLVIYPVVVDLSLFHIVDQLRKQRNPVGKIHRKANNLFAGLCICMECGRYVQVNSIEANGESYFRCGGSLVKIDRCQERGFKYKFFENALLQHIRNFDFSSLNANESKVQIRVNHLSMELLTHLKYKDEILQDIEKEDIPDPNDRRILKNLQKKIGEIESEISNLKHLNVNVSAFDELKQYSEELRDPTNVDIRLDFNIKIRRVIKNIIVKRYSDAIFLVVNYIAINEKQAIVINSKNGEILYMGVQNDDLKTVEHLIGN

SEQ ID NO: 14307 - DNA, 50 bp, Enterobacter roggenkampii
  source 1..50: mol_type = genomic DNA
aacagtaattcactattcatcattaccatgatatactgcttattactgtt

SEQ ID NO: 14308 - DNA, 40 bp, Enterobacter roggenkampii; identical to SEQ ID NO: 848
  source 1..40: mol_type = genomic DNA

SEQ ID NO: 14309 - DNA, 50 bp, Enterobacter roggenkampii
  source 1..50: mol_type = genomic DNA
aacagtaattcactattcatcattatcatgatatactgcttattactgtt

SEQ ID NO: 14310 - DNA, 40 bp, Enterobacter roggenkampii; identical to SEQ ID NO: 14300
  source 1..40: mol_type = genomic DNA

SEQ ID NO: 14311 - protein, 518 aa, Enterobacter kobei
MKKTVYCYARVSSRGQAKDGFGISRQQKMLNDYVSTYDDSLHKRGYELGAVNWLFAEGISAYSGKNIEDGSVLKSFIDDVLDRKIINAVLVIENLDRFSRAEPIKAANLFLNLITAGCDIHEVETETIHHSSSDLSIITGGLQRAHNESKRKARLSIKNWDERIKNAIDGKAVLTHRVPSWLEVKDNGYVIKEGEKEKYNLIFQMYADGFGPAAIRDVLKERNMLINDSEPTIAHLNKIIKDERLIGKFNSTGRKKLSGLVIYPVVVDLSLFHIVDQLRKQRNPVGKIHRKANNLFAGLCICMECGRYVQVNSIEPNGESYFRCGGSLVKSDRCQERGFKYKFFENALLQHIRNFDFLSLNANESEVQIKVNHLSMELLAHIKYRDEILQDIEKEDIPDPIDRRILKNLQKKIGDIESEISNLKRLNVDVSAFDELKQYSEELRDPLNADIRLDFNIKIKRVIKSIIIKRYSDTIFLIINYIAINEKQAIVINSKNGEVMYMGVQNDDLKTVEHIIGN

SEQ ID NO: 14312 - DNA, 50 bp, Enterobacter kobei
  source 1..50: mol_type = genomic DNA
aacagtaattcactgtttatcatcaccatgatatacttctttttactgtt

SEQ ID NO: 14313 - DNA, 40 bp, Enterobacter kobei
  source 1..40: mol_type = genomic DNA
cgcaataatgccaatgaccaccatcagctcaatgagtgtg

SEQ ID NO: 14314 - DNA, 50 bp, Enterobacter kobei
  source 1..50: mol_type = genomic DNA
aacagtaattcactgtttatcatcatcatgatatacttctttttactgtt

SEQ ID NO: 14315 - DNA, 40 bp, Enterobacter kobei; identical to SEQ ID NO: 14300
  source 1..40: mol_type = genomic DNA

SEQ ID NO: 14316 - protein, 502 aa, Clostridioides difficile
MDIIREDCIYARQSVDRKDSISIESQIDFCKYELKGGSCRVFKDKGYSGKNTDRPEFQKLLGEIRKGKVRRVIVYKLDRISRSILDFANMMELFQEYDVEFVSSTEKFDTSTPMGRAMLNICIVFAQLERETIQKRVTDAYYSRCLKGFHMSGQAPYGYQLEPTVVDGIRTKKMVADPAAADHVRLMFEMYAEPGTSFGDITRYFEEQGIKIYGKSMFRTFLSQLLRNPVYAQADLELYEFFKSQGAAIVNDASDFAGTNGCYLYQGRDVKEDKDRCLKDQILVIAPHEALISSDIWLKCRKKLMTNTTFQQGRKPKNTWLAGKIKCGHCGYALKATRVPSGVGYFRCTKRTENKGCPGCGKIHKDEFEQFVFMAMQEKFKDFQILHGKEEKVNPKLTAYQVELAQVEAEIEKLLDTLTGANATLLAYANKKIEELDTRRQTISKAIADLSVETISPQQIKKLSYYLDNWNSIDFDDKRKAADGLISTIKATSDRVQIEWKI

SEQ ID NO: 14317 - DNA, 50 bp, Clostridioides difficile
  source 1..50: mol_type = genomic DNA
tttgtaccccttgtacaccgatgcttgcaacggtgtacaaagggaacata

SEQ ID NO: 14318 - DNA, 40 bp, Clostridioides difficile
  source 1..40: mol_type = genomic DNA
ccaggtacaaaatcgttacttatgacaaccaataaaactt

SEQ ID NO: 14319 - DNA, 50 bp, Clostridioides difficile
  source 1..50: mol_type = genomic DNA
tttgtaccccttgtacaccgatgcatgcaacggtgtacaaagggaacata

SEQ ID NO: 14320 - DNA, 40 bp, Clostridioides difficile
  source 1..40: mol_type = genomic DNA
ctatgtacaaaatcgttttatatgtaaacaaatagaattt

SEQ ID NO: 14321 - protein, 465 aa, Eubacterium rectale
MKGNAGDTIVKKIDLSPELVRVALYIRVSGEEQKIKGLSLEAQQERLEVYARERGWVIVGIYIDAAKTARKNIHKRTDFQRMMDSVKRDEVDILLFCRLDRWFRSVADYYKIMEVLEAHNCDWKTTDEEYDTTTANGRLYINVKLSIAQNEADIDGERIDVVFDSKIAHGTVVSGSAPFGFRVNEEKRLEVVPEDAAIVQDAFNYFETSISQRATVRYIRETYGVNWCDATFRRMLKEKLYTGVYDRGGRFNDHFCPAIISKQQFDRVQALLERNARSVPSGKVYIFTSILTCAECGHKLVGYKSSDYYYYRCNQHFQRGRCSHNHSAREDVVEKWLFEHLAEELERCQLEWEVAAAKKKASVARTDKAALKRKLTKLKELYVNDLIDIEDYKRDYQIYTAALKQIPEPSIEPPPDFAAVRRLLDNDFKTIYENLTREEKRTLWRSVIKEIRIDNDQNITGVVFG

SEQ ID NO: 14322 - DNA, 50 bp, Eubacterium rectale
  source 1..50: mol_type = genomic DNA
tgttgtactaatgtgacactaccagtgggcagtgttaagttagtacaaat

SEQ ID NO: 14323 - DNA, 40 bp, Eubacterium rectale
  source 1..40: mol_type = genomic DNA
ctttgaatccagtgctcctgttggctcatcagccaaaatt

SEQ ID NO: 14324 - DNA, 50 bp, Eubacterium rectale
  source 1..50: mol_type = genomic DNA
tgttgtactaatgtgacactaccaccgggcagtgttaagttagtacaaat

SEQ ID NO: 14325 - DNA, 40 bp, Eubacterium rectale
  source 1..40: mol_type = genomic DNA
cttggactcaagtgatcctcctgcctcagcctcccaaatt

SEQ ID NO: 14326 - protein, 471 aa, Flavonifractor plautii
MKGGNCKEYTDKGYSGKNTDRPKFQELVRDIKRGLIAKVVVYKLDRISRSILDFANMMELFQQYNVEFVSSTEKFDTSTPMGRAMLNICIVFAQLERETIQKRVTDAYYSRSQRGFKMGGTAPYGFHTEPIKMDGINTKKLVVNPDEAANIRLMFEMYAQPTTSYGDITRYFAEQGILFNGKELIRPTLAQMLRNPVYVQADLDVYEFFKSQGTVIVNDAADFTGMNGCYLYQGRDVKPSKKNDLKDQMLVLAPHEGIVPSDIWLTCRKKLMNNMKIQSARKATHTWLAGKIKCGNCGYALMSINNPVGKQYLRCTKRLDNKSCAGCGKIITSELEAVVYQQMVKKLEKHKTLTGRKKAAKANPKIAALQVELAHVDGEIKKLVDSLTSANNVLLSYVNVKIAELDGRKQELLARIAELTVEAISPEQVSQISGYLDTWENVSFDDKRRVVDLMITTIAATSDSLNITWKI

SEQ ID NO: 14327 - DNA, 50 bp, Flavonifractor plautii; identical to SEQ ID NO: 12
  source 1..50: mol_type = genomic DNA

SEQ ID NO: 14328 - DNA, 40 bp, Flavonifractor plautii
  source 1..40: mol_type = genomic DNA
agaatatcttgtccgaagtttgtgaggaagaaaactacat

SEQ ID NO: 14329 - DNA, 50 bp, Flavonifractor plautii
  source 1..50: mol_type = genomic DNA
gtgtagtcccttgtaaactgtactcaaggtcagtttacaaggaactacac

SEQ ID NO: 14330 - DNA, 40 bp, Flavonifractor plautii
  source 1..40: mol_type = genomic DNA
gcactgtcttgtccaaagtcagttggaaagaaaagtacat

SEQ ID NO: 14331 - protein, 503 aa, Flavonifractor plautii
MNNRIDAIYARQSVDKKDSISIESQIEFCKYELKGGNCKEYTDKGYSGKNTDRPKFQELVRDIKRGLIAKVVVYKLDRISRSILDFANMMELFQQYNVEFVSSTEKFDTSTPMGRAMLNICIVFAQLERETIQKRVTDAYYSRSQRGFKMGGTAPYGFHTEPIKMDGINTKKLVVNPDEAANIRLMFEMYAQPTTSYGDITRYFAEQGILFNGKELIRPTLAQMLRNPVYVQADLDVYEFFKSQGTVIVNDAADFTGMNGCYLYQGRDVKPSKKNDLKDQMLVLAPHEGIVPSDIWLTCRKKLMNNMKIQSARKATHTWLAGKIKCGNCGYALMSINNPVGKQYLRCTKRLDNKSCAGCGKIITSELEAVVYQQMVKKLEKHKTLTGRKKAAKANPKIAALQVELAHVDGEIKKLVDSLTSANNVLLSYVNVKIAELDGRKQELLARIAELTVEAISPEQVSQISGYLDTWENVSFDDKRRVVDLMITTIAATSDSLNITWKI

SEQ ID NO: 14332 - DNA, 50 bp, Flavonifractor plautii; identical to SEQ ID NO: 12
  source 1..50: mol_type = genomic DNA

SEQ ID NO: 14333 - DNA, 40 bp, Flavonifractor plautii; identical to SEQ ID NO: 14328
  source 1..40: mol_type = genomic DNA

SEQ ID NO: 14334 - DNA, 50 bp, Flavonifractor plautii; identical to SEQ ID NO: 14329
  source 1..50: mol_type = genomic DNA

SEQ ID NO: 14335 - DNA, 40 bp, Flavonifractor plautii; identical to SEQ ID NO: 14330
  source 1..40: mol_type = genomic DNA

SEQ ID NO: 14336 - protein, 475 aa, Bacillus subtilis
MNLMEESSQKNVGIYVRVSTEEQAKEGYSIAAQKEKLKAYCISQGWANYKFYIDEGKSAKDIHRPSLELMLRHIEQGIINTVLVYRLDRLTRSVRDLYSLLDYFDKYNAVFRSATEVYDTGSATGRLFITLVAAMAQWERENLGERVKMGQVEKARQGQYSAPAPFGFTKEGEYLVKNPQEGEILLDMVDKIKKGYSLRELADYLDESDAMPRRGYKWHIASILVMLKNPVLYGAFRWGDELIEDAFEGYISKEEFEQLQKILHDRQNFKKRETYSIFIFQTKIICPNCGNRLTSERSKYFRKRDNKHVESNHYRCQACLLNKRPTIGGSEKKFERALVEYMQNVKPRLEPKIPEEKQQDYDKLHQKILSIEKQRKKYQKAWSMDLMTDQEFEQLMAETKEALQKAQTALEQEQTLHKPKNPIDIERAKEIVTMFNKSWSVLTSEEKRQIVQELIKQIEFEKKDRKIKILDILFY

SEQ ID NO: 14337 - DNA, 50 bp, Bacillus subtilis
  source 1..50: mol_type = genomic DNA
attagtgtttatgtaaagtatgagcatgtaaaatagacataaatacagaa

SEQ ID NO: 14338 - DNA, 40 bp, Bacillus subtilis; identical to SEQ ID NO: 6058
  source 1..40: mol_type = genomic DNA

SEQ ID NO: 14339 - DNA, 50 bp, Bacillus subtilis
  source 1..50: mol_type = genomic DNA
attagtgtttatgtaaagtatgagtatgtaaaatagacataaatacagaa

SEQ ID NO: 14340 - DNA, 40 bp, Bacillus subtilis
  source 1..40: mol_type = genomic DNA
ttgtgttttccagaataaatataaataatgctcctgggtc

SEQ ID NO: 14341 - protein, 475 aa, Bacillus subtilis
MELKEANSLKNVGIYVRVSTEEQAKEGYSIAAQKEKLKAYCVSQGWANYKFYIDEGKSAKDIHRPSLELMLRHIEQGIINTVLVYRLDRLTRSVRDLYSLLDYFDKYNAVFRSATEVYDTGSATGRLFITLVAAMAQWERENLGERVKMGQVEKARQGQYSAPAPFGFTKEGEYLVKNPQEGEILLDMVDKIKKGYSLRELADYLDKSDAMPRRGYKWHIASILVMLKNPVLYGAFRWGDEIIEDAFEGYISKEEFDQLQKILHDRQNFKKRETYSIFIFQTKIICPNCGNRLTSERSKYFRKRDNKHVESNHYRCQACLLNKRPTIGGSEKKFERALIEYMQNVKPRLEPKIPEEKQQDFDKLHQKILSIEKQRKKYQKAWSMDLMTDQEFEQIMAETKDALQKAQTALEQEQTFHKPKSPIDIERAKEIVTMFNKSWSVLTSEEKRQTVQELIKQIEFEKKDRKIKILDIQFY

SEQ ID NO: 14342 - DNA, 50 bp, Bacillus subtilis; identical to SEQ ID NO: 14337
  source 1..50: mol_type = genomic DNA

SEQ ID NO: 14343 - DNA, 40 bp, Bacillus subtilis; identical to SEQ ID NO: 6058
  source 1..40: mol_type = genomic DNA

SEQ ID NO: 14344 - DNA, 50 bp, Bacillus subtilis; identical to SEQ ID NO: 14339
  source 1..50: mol_type = genomic DNA

SEQ ID NO: 14345 - DNA, 40 bp, Bacillus subtilis; identical to SEQ ID NO: 14340
  source 1..40: mol_type = genomic DNA

SEQ ID NO: 14346 - protein, 475 aa, Bacillus subtilis
MELMEANSLKNVGIYVRVSTEEQAKEGYSIAAQKEKLKAYCVSQGWANYKFYIDEGKSAKDIHRPSLELMLRHIEQGIINTVLVYRLDRLTRSVRDLYSLLDYFDKYNAVFRSATEVYDTGSATGRLFITLVAAMAQWERENLGERVKMGQVEKARQGQYSAPAPFGFTKEGEYLVKNPQEGEILLDMVDKIKKGYSLRELADYLDESDAMPRRGYKWHIASILVMLKNPVLYGAFRWGDELIEDAFEGYISKEEFEQLQKILHDRQNFKKRETYSIFIFQTKIICPNCGNRLTSERSKYFRKRDNKHVESNHYRCQACLLNKRPTIGGSEKKFERALIEYMQNVKPRLEPKIPEEKQQDFDKLHQKILSIEKQRKKYQKAWSMDLMTDQEFEQLMAETKDALQKAQTALEQEQTFHKPKNPIDIKRAKEIVTMFNKSWSVLTSEEKRQIVQELIKQIEFEKKDGKIKVLDIQFY

SEQ ID NO: 14347 - DNA, 50 bp, Bacillus subtilis
  source 1..50: mol_type = genomic DNA
attagtatttatgtaaagtatgagcatgttaaatagacataaatacagaa

SEQ ID NO: 14348 - DNA, 40 bp, Bacillus subtilis; identical to SEQ ID NO: 6058
  source 1..40: mol_type = genomic DNA

SEQ ID NO: 14349 - DNA, 50 bp, Bacillus subtilis
  source 1..50: mol_type = genomic DNA
attagtatttatgtaaagtatgagtatgttaaatagacataaatacagaa

SEQ ID NO: 14350 - DNA, 40 bp, Bacillus subtilis; identical to SEQ ID NO: 14340
  source 1..40: mol_type = genomic DNA

SEQ ID NO: 14351 - protein, 560 aa, Enterocloster bolteae
MARRSRAVVETARPKYRVWRIAIYIRLSKEDMRCLDESESVTNQRQIIEDHIAGFNDGDEYIIVDEYVDDGISGTTDDEREDFQRMLSDIKRGRVNCVIVKDLARSFRNYSDQGYYLDDWFPRYNVRFISLYHQPLDSYKEPQNMRSIAVPIQGVLNENHCAETSDKVREVFDMKRRNGEHIGSFAAYGYVKDPNDKNALVIDEEAAAVVRDIYNMFLDGMSKNAIVRYLNGHGILSPAAYKRERLGLKYQNPSVDPAKPPLWCAMSVTTILKNRMYCGDMVQGRYRMKSYKVHVQEVVPEDEWYIVENTHEAIIDRETFEKVQRLLIRDTRTGPQQKKLYLFSGFLKCADCGKAMTRSKVGNVVYYYCRTYKDQSKTACTKHTIKHDRLEAAVLYAIQQQVYLAVDYTKTIERINRAPLVKSQSKKLMDAIEQKERELSKITRYKQAIYQDWKDGEISHSDYRHMKEDYERQAEALEEVIGKLRAEQAELENGIDTENPFLAAFRQYQNIDKLTRDILIELVDQIKIHEGGYISIVFRFADELRRIQEFIEVNTHNEAV

SEQ ID NO: 14352 - DNA, 50 bp, Enterocloster bolteae; identical to SEQ ID NO: 3677
  source 1..50: mol_type = genomic DNA

SEQ ID NO: 14353 - DNA, 40 bp, Enterocloster bolteae
  source 1..40: mol_type = genomic DNA
ctgaggccccatgggtccggtcgggccggtgggaccggac

SEQ ID NO: 14354 - DNA, 50 bp, Enterocloster bolteae
  source 1..50: mol_type = genomic DNA
acctttcctaaataaagcgccccgctcggggcgatgttaaaaggaaagtg

SEQ ID NO: 14355 - DNA, 40 bp, Enterocloster bolteae
  source 1..40: mol_type = genomic DNA
ccgtggcccactgggtcagctccggccggcgggtccgggc

SEQ ID NO: 14356 - protein, 644 aa, Klebsiella pneumoniae
MLRPICYERVSSIQQIEGGGGLDDQRSALEGYLDRNSDKFSNDRIFIQDRGVSAFKNSNISSESQLGIFLQDVQNRKYGEGDALIVMSLDRISRRSSWAEDTIRFIVNSGIEVHDISASTVLRKDDPHSKLIMELIQMRSHNESLMKSVRAKAAWDRKIIEAVQNGTVISNKMPMWLKNVDNRYQVIQEKADLIIRCFEWYRDGFSTGEIVKRIADPKWQMVTVSRLVRDRRLLGEHKRYNDEIIHNVYPKVIDDDLFLTANRMMDRVMLEKNKPAEDLLLESDVVQEIFQLYESGLGSGAIVKRLPKGWSTVNVLRVLRDKNVVTQKIIDNLTFERVNQKLSMNGVANRIRKDITIAQDDYITNLFPKILKCGCCGGNIAIHYNHVRTKYVICRNREERKICDAKSIQYIRIEKNILKCVKNVDFQKLMIESTGSETSVLDGLREELSSLRREESSYNDKINERKLAGKRVGIHLNDGLTEVQDRIEEIEKEIISAQTVREIPKFDFDMDEVLDPMNIELRAKVRKQLRLVLKAVKYWMFDKRIFIQLEYFNDVLSHMLVIDNKRGGGEVMYEMSIEEKKGERIYTVHENGYAVFIASVTIGTELWSLALSRTRTIDSVGNYLSLLAREGFEIFVNEDQIDWF

SEQ ID NO: 14357 - DNA, 50 bp, Klebsiella pneumoniae
  source 1..50: mol_type = genomic DNA
ttcccattgattatggtatgcgtcctttcgtatactatgggaacattttg

SEQ ID NO: 14358 - DNA, 40 bp, Klebsiella pneumoniae
  source 1..40: mol_type = genomic DNA
atattcatggcatgccgtcctttcgttttttagcacaggt

SEQ ID NO: 14359 - DNA, 50 bp, Klebsiella pneumoniae
  source 1..50: mol_type = genomic DNA
ttcccattgattatggtatgcgtcaattcgtatactatgggaacattttg

SEQ ID NO: 14360 - DNA, 40 bp, Klebsiella pneumoniae
  source 1..40: mol_type = genomic DNA
aaattcatggcttgcattcaatatgtcttttagccaaggt

SEQ ID NO: 14361 - protein, 644 aa, Klebsiella pneumoniae
MLRPICYERVSSIQQIEGGGGLDDQRSALEGYLDRNSDKFSNDRIFIQDRGVSAFKNSNISSESQLGIFLQDVQNRKYGEGDALIVMSLDRISRRSSWAEDTIRFIVNSGIEVHDISASTVLRKDDPHSKLIMELIQMRSHNESLMKSVRAKAAWDRKIIEAVQNGTVISNKMPMWLKNVDNRYQVIQEKADLINRCFEWYRDGFSTGEIVKRIADPKWQMVTVSRLVRDRRLLGEHKRYNDEIIHNVYPKVIDDDLFLTANRMMDRVMLEKNKPAEDLLLESDVVQEIFQLYESGLGSGAIVKRLPKGWSTVNVLRVLRDKNVVTQKIIDNLTFERVNQKLSMNGVANRIRKDITIAQDDYITNLFPKILKCGCCGGNIAIHYNHVRTKYVICRNREERKICDAKSIQYIRIEKNILKCVKNVDFQKLMIESTGSETSVLDGLREELSSLRREESSYNDKINERKLAGKRVGIHLNDGLTEVQDRIEEIEKEIISAQTVREIPKFDFDMDEVLDPMNIELRAKVRKQLRLVLKAVKYWMFDKRIFIQLEYFNDVLSHMLVIDNKRGGGEVMYEMSIEEKKGERIYTVHENGYAVFIASVTIGTELWSLALSRTRTIDSVGNYLSLLAREGFEIFVNEDQIDWF

SEQ ID NO: 14362 - DNA, 50 bp, Klebsiella pneumoniae; identical to SEQ ID NO: 14357
  source 1..50: mol_type = genomic DNA

SEQ ID NO: 14363 - DNA, 40 bp, Klebsiella pneumoniae; identical to SEQ ID NO: 14358
  source 1..40: mol_type = genomic DNA

SEQ ID NO: 14364 - DNA, 50 bp, Klebsiella pneumoniae; identical to SEQ ID NO: 14359
  source 1..50: mol_type = genomic DNA

SEQ ID NO: 14365 - DNA, 40 bp, Klebsiella pneumoniae; identical to SEQ ID NO: 14360
  source 1..40: mol_type = genomic DNA

SEQ ID NO: 14366 - protein, 644 aa, Klebsiella pneumoniae
MLRPICYERVSSIQQIEGGGGLDDQRSALEGYLDRNSDKFSNDRIFIQNRGVSAFKNSNISSESQLGIFLQDVQNRKYGEGDALIVMSLDRISRRSSWAEDTIRFIVNSGIEVHDISASTVLRKDDPHSKLIMELIQMRSHNESLMKSVRAKAAWDRKIIEAVQNGTVISNKMPMWLKNVDNRYQVIQEKADLIIRCFEWYRDGFSTGEIVKRIADPKWQMVTVSRLVRDRRLLGEHKRYNDEIIHNVYPKVIDDDLFLTANRMMDRVMLEKNKPAEDLLLESDVVQEIFQLYESGLGSGAIVKRLPKGWSTVNVLRVLRDKNVVTQKIIDNLTFERVNQKLSMNGVANRIRKDITIAQDDYITNLFPKILKCGCCGGNIAIHYNHVRTKYVICRNREERKICDAKSIQYIRIEKNILKCVKNVDFQKLMIESTGSETSVLDGLREELSSLRREESSYNDKINERKLAGKRVGIHLNDGLTEVQDRIEEIEKEIISAQTVREIPKFDFDMDEVLDPMNIELRAKVRKQLRLVLKAVKYWMFDKRIFIQLEYFNDVLSHMLVIDNKRGGGEVMYEMSIEEKKGERIYTVHENGYAVFIASVTIGTELWSLALSRTRTIDSVGNYLSLLAREGFEIFVNEDQIDWF

SEQ ID NO: 14367 - DNA, 50 bp, Klebsiella pneumoniae; identical to SEQ ID NO: 14357
  source 1..50: mol_type = genomic DNA

SEQ ID NO: 14368 - DNA, 40 bp, Klebsiella pneumoniae; identical to SEQ ID NO: 14358
  source 1..40: mol_type = genomic DNA

SEQ ID NO: 14369 - DNA, 50 bp, Klebsiella pneumoniae; identical to SEQ ID NO: 14359
  source 1..50: mol_type = genomic DNA

SEQ ID NO: 14370 - DNA, 40 bp, Klebsiella pneumoniae; identical to SEQ ID NO: 14360
  source 1..40: mol_type = genomic DNA

SEQ ID NO: 14371 - protein, 644 aa, Klebsiella pneumoniae
MLRPICYERVSSIQQIEGGGGLDDQRSALEGYLDRNSDKFSNDRIFIQDRGVSAFKNSNISSESQLGIFLQDVQNRKYGEGDALIVMSLDRISRRSSWAEDTIRFMVNSGIEVHDISASTVLRKDDPHSKLIMELIQMRSHNESLMKSVRAKAAWDRKIIEAVQNGTVISNKMPMWLKNVDNRYQVIQEKADLIIRCFEWYRDGFSTGEIVKRIADPKWQMVTVSRLVRDRRLLGEHKRYNDEIIHNVYPKVIDDDLFLTANRMMDRVMLEKNKPAEDLLLESDVVQEIFQLYESGLGSGAIVKRLPKGWSTVNVLRVLRDKNVVTQKIIDNLTFERVNQKLSMNGVANRIRKDITIAQDDYITNLFPKILKCGCCGGNIAIHYNHVRTKYVICRNREERKICDAKSIQYIRIEKNILKCVKNVDFQKLMIESTGSETSVLDGLREELSSLRREESSYNDKINERKLAGKRVGIHLNDGLTEVQDRIEEIEKEIISAQTVREIPKFDFDMDEVLDPMNIELRAKVRKQLRLVLKAVKYWMFDKRIFIQLEYFNDVLSHMLVIDNKRGGGEVMYEMSIEEKKGERIYTVHENGYAVFIASVTIGTELWSLALSRTRTIDSVGNYLSLLAREGFEIFVNEDQIDWF

SEQ ID NO: 14372 - DNA, 50 bp, Klebsiella pneumoniae; identical to SEQ ID NO: 14357
  source 1..50: mol_type = genomic DNA

SEQ ID NO: 14373 - DNA, 40 bp, Klebsiella pneumoniae; identical to SEQ ID NO: 14358
  source 1..40: mol_type = genomic DNA

SEQ ID NO: 14374 - DNA, 50 bp, Klebsiella pneumoniae; identical to SEQ ID NO: 14359
  source 1..50: mol_type = genomic DNA

SEQ ID NO: 14375 - DNA, 40 bp, Klebsiella pneumoniae; identical to SEQ ID NO: 14360
  source 1..40: mol_type = genomic DNA

SEQ ID NO: 14376 - protein, 607 aa, Finegoldia magna
MRNFEKITALYERLSRDDELEGESNSIVNQKKILEEYASKNNLTNIIHFTDDGISGTQFDRPGFMEMMNGVNTGNIGCIIVKDMSRLGRDYLKVGQCMEILRQKGVRLIAINDNVDSFYREDDFTPFRNIMNEWYARDTSRKIQSTFRSKGESGKHTASTPPYGYIKDEKDKDKWVVDEKAAEIVRRIFNLTMDGAGPYKIAKILEADKIDIPAYHQQKMGYGLHQSKNFEYPYRWCSSTIASILKKKEYLGHTVNFKTRKHFKDKKSKYVSEDKWLIFENTHEAIIDQETFDNVQRIRGNVKRYPDGWGEYHPLTGLMYCADCGSKMYVHRTNNYKNIPYYVCSNYKKVPCGTLCPSAHRIKAEVVLNLIQETLKDIKNYLDEDNEAFTRSIQNEMEEKEKVEIEKQRVRLINNKSRLQELERLMCRIYEDMILEKIPSSRYEILNSQYETEQRALNKEIKDLELVISRYEKETDKARKFISLISRYENFYELTNSMINEFVEKIIIHERDRKGSQTSKQKIEIYFNFIGNYEVPKEELSEEERSKLEEEERKINERRDRLHQNYLKRKANGKQQEYEERYKARREKKKQENLKDLKKTGILASYH

SEQ ID NO: 14377 - DNA, 50 bp, Finegoldia magna; identical to SEQ ID NO: 62
  source 1..50: mol_type = genomic DNA

SEQ ID NO: 14378 - DNA, 40 bp, Finegoldia magna
  source 1..40: mol_type = genomic DNA
aaatacaaactagcagcaggaaaaactgccaaatcaatcc

SEQ ID NO: 14379 - DNA, 50 bp, Finegoldia magna; identical to SEQ ID NO: 3509
  source 1..50: mol_type = genomic DNA

SEQ ID NO: 14380 - DNA, 40 bp, Finegoldia magna
  source 1..40: mol_type = genomic DNA
aaatacaaactaccatcagagaatactacaaaacctctac

SEQ ID NO: 14381 - protein, 520 aa, Paenibacillus larvae
MRTAIYLRKSRADLEAESRGEGETLTKHRKALMKLARVQKLTIVRVYEEIVSGESLFHRPEMNELLKNVDNNEYDAVLVMDIDRLGRGNMQEQGLILDTFRRSNTKIITPRKTYDLNDEWDEEYSEFEAFMARKELKIITRRLQGGRVRAVEEGKYLGTRPPYGYDLHFEKGIRTLKPNPAQAPYIKMIFDLYTHPDPKKRLGSGKIAKKLNELKVPTSTGKQWEPSTVIFILKNAVYAGRIQWKKVERKKSTIPGKKRSTQTRKKSEWIDVKGLHEPIISIEKFNLAKDILSRKYHIPYQLKNGVRNPLAGLIVCGKCNRKMVYRPYGKQKPHLICINQDCDNKSSRVEYVEDAVIKSLQEWLKNHEVKVNKGDSLEESENNEFEIKVKALHSLENELKELEKQKLNLFDFLERGIYSEDTFIERSQNIAVRITNTSEALEKVKYDIDSLESKNKQREQLIPEVIKVISLYRTLGDPSEKNELLKRVVDHAIYTKEKKQRNEDFNLNLYVRMKTDNINM

SEQ ID NO: 14382 - DNA, 50 bp, Paenibacillus larvae
  source 1..50: mol_type = genomic DNA
aacagataacatcaatatgtaaatgaaataacttcttgatgttatctgtc

SEQ ID NO: 14383 - DNA, 40 bp, Paenibacillus larvae
  source 1..40: mol_type = genomic DNA
aacagataaagagggaaatgaaataacactcatcgatatt

SEQ ID NO: 14384 - DNA, 50 bp, Paenibacillus larvae
  source 1..50: mol_type = genomic DNA
aacagataacatcaatatgtaaattaaataacttcttgatgttatctgtc

SEQ ID NO: 14385 - DNA, 40 bp, Paenibacillus larvae
  source 1..40: mol_type = genomic DNA
aaaagacaaagagggacattatattacaatcctaaatatt

SEQ ID NO: 14386 - protein, 505 aa, Klebsiella pneumoniae
MTQAFSYVRFSTKHQTMGTSLERQVNASKLFCTQNKLTLSHHSYHDLGISGFKNVKRPELEQMLEAIQNGDIPSGSYILIEAIDRLSRKGISHTQDILKKILQYDVKVAFVGEDAKTLQGHILNKDSLNDLSSVILVALAADLAHKESLRKSKLVKASKAIAREKAADGEILPGKSVFYLDYDRKNKKYIFNNRVDLARKIIQMRLEGKGPRKIARLLNEENIPGPTGKEWYQMSVKRLLKSPVLYGAYQTHQIIEQKYIPVSLIENYYPALIDYHTFSQIQFDEKRISKGRPSRHKFSGVLYCECGSVLCRKVNVYETKKGPKEYQYFNCFGAMEKRCKNNRAIRDLHIPLEKTIDRLEIKTNSVKNIKNEQIIAKREKIDQLNQMLLELDMPPVSVLKTISKLEKELQELLEQPEIQAPKSADVNTLVAIKDTEKYNLHLKRLVKRITIYQLNGPKNIRIKIEKTDGHYQSFIVNNGKIMFNSDTKALQGHLLKLKEGTENGV

SEQ ID NO: 14387 - DNA, 50 bp, Klebsiella pneumoniae
  source 1..50: mol_type = genomic DNA
ttataaatgaatctgtgatccaggtaatagtatcattttacaaaaaatca

SEQ ID NO: 14388 - DNA, 40 bp, Klebsiella pneumoniae
  source 1..40: mol_type = genomic DNA
cgcagaaatgtgccgcgggtaatagttctttcatataccc

SEQ ID NO: 14389 - DNA, 50 bp, Klebsiella pneumoniae
  source 1..50: mol_type = genomic DNA
ttataaatgaatctgtgatccaggaaatagtatcattttacaaaaaatca

SEQ ID NO: 14390 - DNA, 40 bp, Klebsiella pneumoniae
  source 1..40: mol_type = genomic DNA
ggcagaaaatttcagggggaaatgattcttttatataccc

SEQ ID NO: 14391 - protein, 617 aa, Streptococcus agalactiae
MRNFEKITALYERLSRDDELEGESNSIVNQKKILEEYASKNNLTNIIHFTDDGISGTQFDRPGFMEMMNGVNTGNIGCIIVKDMSRLGRDYLKVGQCMEILRQKGVRLIAINDNVDSFYREDDFTPFRNIMNEWYARDTSRKIQSTFRSKGESGKHTASTPPYGYIKDEKDKDKWIVDEKAAQIVRRIFNLTMDGAGPYKIAKILEADKIDIPAYHQQKMGYGLHQSKNFEYPYRWCSSTIASILKKKEYLGHTVNFKTRKHFKDKKSKYVSEDKWLIFENTHEAIIDQETFDNVQRIRGNVKRYPDGWGEYHPLTGLMYCADCGSKMYVHRTNNYKNIPYYVCSNYKKVPCGTLCPSAHRIKAEVVLNLIQETLKDIKNYLDEDNEAFLHSIQNEMEETEKMEMEKKKTRLTDSKNRLQELERLMCRIYEDMILEKIPNTRYEILNNQYETEQRELSKEIDGLEKAIKRYEKETDRAKKFIRLIERYDNFDELTPTIINEFVEKILVHERDRKGSQTANQKVEIYFNFIGNYEPPKEELSEEEMQKLTEEEEKERARKDRLHQNYLKRKANGKQKEYEERYKARREEKKTGEAKGFEKTMKKHKITRLKSIDNLSV

SEQ ID NO: 14392 - DNA, 50 bp, Streptococcus agalactiae; identical to SEQ ID NO: 9697
  source 1..50: mol_type = genomic DNA

SEQ ID NO: 14393 - DNA, 40 bp, Streptococcus agalactiae
  source 1..40: mol_type = genomic DNA
agaaatataagcttgcagcaggaaaaactgctaagtcaat

SEQ ID NO: 14394 - DNA, 50 bp, Streptococcus agalactiae; identical to SEQ ID NO: 14064
  source 1..50: mol_type = genomic DNA

SEQ ID NO: 14395 - DNA, 40 bp, Streptococcus agalactiae
  source 1..40: mol_type = genomic DNA
agtaatgtaaaatttcagcatgaaaacctactaggtgaat

SEQ ID NO: 14396 - protein, 557 aa, Blautia sp N6H1-15
MKRVRMLLRVSSDQQLEADGDLSIQRRILVEYIQKQEEWILDEKEYFEGSKSAYKNTASQREILQEILQDAQNKEFDILVPYKDDRVGRLMWDTSSYIMNLKNCGVDVYTVKDGCISPEADDIMGQMMLTFRYANAQKSSADTGMRVKDTAQKLVEQGKFMGGKAPYGYELEYSGEVSKHGRALKHLVVVPERAELVRYIYSLSFNKEFGSSKIAQILNKNAQYKELAPNGIWKSGTITSILTNPIYAGYTAYKRRERTNGKYKRLDNKEWVLAKEANTSIQIIEPELWNRTQEKRKLRGKKYVESLENQDVTVIHKNEGMLALIDVIYCGYCGSKLTNGSKYNYWTIKNTGEKRASKTPIYKCQGAWQGIPHSEARQFRAKEIEPIVFEAIAAYIGKLQENENVFDEIQKNQNKEKAAMAKELRKEQEIAEKIRKKITVMEEKIPDAMSGEYLLSLEELVALIKKQKEALERQEIVVKEKELSFQSAEVSVNDWEELKQKIPTWQEVFLNADGEAKRVLVNRLIRRIEVKKDEIKVFFKINLEDFFCQPRISDDSG

SEQ ID NO: 14397 - DNA, 50 bp, Blautia sp N6H1-15
  source 1..50: mol_type = genomic DNA
ccccgaatcagtgatgattccggtacaccgaaatcaatacatattcgggg

SEQ ID NO: 14398 - DNA, 40 bp, Blautia sp N6H1-15
  source 1..40: mol_type = genomic DNA
tcgtatcctttgttccggtaccattccgtgtatacccggt

SEQ ID NO: 14399 - DNA, 50 bp, Blautia sp N6H1-15
  source 1..50: mol_type = genomic DNA
ccccgaatcagtgatgattccggttaaccgaaatcaatacatattcgggg

SEQ ID NO: 14400 - DNA, 40 bp, Blautia sp N6H1-15
  source 1..40: mol_type = genomic DNA
acggatcctttgttccgcttatattccatgcataccacat

SEQ ID NO: 14401 - protein, 472 aa, Streptococcus lutetiensis
MNTKRKVAIYSRVSTLHQAEEGYSIGQQIEALTKYCQAMGWVIYDNYSDGGFSGGKLERPAMQKMIQDAKSGKFDTVVVYKLDRLSRNVRDTLYLVKDVFNANNVDFVSLQENIDTKSAMGNLFITLLSAIAEFEREQIKERMQLGVKGRAKSGKTTSWTTPPFGYEYDTNTQLMTINHYQAEIVRDIFDKIISGWSIMGITTHLRKTNNKKWTHVRVKRILENVAYIGKVKYRDEIFDGEHAPILTEEIFYKAQKALEERTSKKDNTRPFQGLYMLSNIAKCGYCGTPLKIDSYKPRKDGTRKRTYTCINRNPKRIKTATYNDGKQCKESGRYDVKDVERYVLNEISKLQLNPKSIESLYIDKPEENITAHQERLKKLETKLSKLNDLYINELISMEALKQKSAELLKEKSSLETFINNNKRKINNKPAFEKVAKMDDVFKMSYDDQKKIVKTLIKRVEVKRDEINVIFKL

SEQ ID NO: 14402 - DNA, 50 bp, Streptococcus lutetiensis
  source 1..50: mol_type = genomic DNA
ttgtaaaattactgtatttaggagcacctactaatatagttgtgcatgaa

SEQ ID NO: 14403 - DNA, 40 bp, Streptococcus lutetiensis
  source 1..40: mol_type = genomic DNA
ccatcatatgacgcttttttaccgactaatatagctgtac

SEQ ID NO: 14404 - DNA, 50 bp, Streptococcus lutetiensis
  source 1..50: mol_type = genomic DNA
ttgtaaaattactgtatttaggagtccctactaatatagttgtgcatgaa

SEQ ID NO: 14405 - DNA, 40 bp, Streptococcus lutetiensis
  source 1..40: mol_type = genomic DNA
ccagcagatgacgctgttttcttgactgacatagctggag

SEQ ID NO: 14406 - protein, 524 aa, Alcaligenes aquatilis
MEITAAFYGRFSTDRQRETSIADQERVCDVRASAIGFRIVVRHTDEGVSGSTPVAARPGGKQLLADALAGRFEVLLVEGLDRLSRDMVEQERVIRRLEHRGIRIVGVLDGYDSDSSARKLHRGMRGLINEVYLDDLRAKTHRGLAGQVSRGMHAGGLSFGYRSVPVEGGNRLEVNQEQAGWVRWIFEKYANHGWSVQRIAHELNNLKVPALRGGTWSVSVVYGHPQRGSGILNNTLYIGRYIWNRSQWMKDPDTGKRVRIDRPVEEWITQDLPELQIVSDEAWERAKERMTRTRAEGGPGRAPITRTLMSGVLKCGVCGGPIIAMNKSMYGCSIRKDRGRAVCIGVSANRDKVDERLLGIVRDEILTPEAIDELEQEVRRLMSAQRRESVQAQADAQRRIEASQAEIDRLIDAIAQVGISPALASRLQAAESELAVLQAPSQERQQPELKMRSMANIVARYRTMLENLDEILATDLDRAKELLREILGRPVMEKDAEGHVWVTLDKEKASMLSHEADSAFGCGG

SEQ ID NO: 14407 - DNA, 50 bp, Alcaligenes aquatilis
  source 1..50: mol_type = genomic DNA
gctgattctgcgtttggttgcgggggcgcgatacagaacgcagaaagaaa

SEQ ID NO: 14408 - DNA, 40 bp, Alcaligenes aquatilis
  source 1..40: mol_type = genomic DNA
ttttaaatttggttgcgggggcaggatttgaacctacgac

SEQ ID NO: 14409 - DNA, 50 bp, Alcaligenes aquatilis; identical to SEQ ID NO: 14407
  source 1..50: mol_type = genomic DNA

SEQ ID NO: 14410 - DNA, 40 bp, Alcaligenes aquatilis
  source 1..40: mol_type = genomic DNA
ttttaaatttgtttttgagggctgaatttaaacttaagac

SEQ ID NO: 14411 - protein, 523 aa, Pseudomonas gingeri
MPTAFSYARFSSAIQKKGSSLERQQTMVASWLLRHAEYTLSDLTFQDLGKSGWKGEHIKEGGGFAKLLAAVEAGVIEAGDAVLVESVDRAGRLDTLDMLAILSPILRKGVDIITLDDNVAYTRQSLDGGHIYILLGKIQAARQYSDNLSRRLTASYDSRRRLADEGKTPKRRTPAWLTSEGEVISEIAAQVKLAFELYAAGLGKAVIAKRMRDSGVQALAKCSGPGVEGWLRNEAVIGRWNGAQVYEPIIDLSLYHLAQIEGDKRKTAPRAKTAAHFYVGLVKCGHCGHNFIMRTIRGVQVSMRCRKRQELNGCQNAKVIPKEIIDAVYKYTSNTAVLKAVEREHSGVNEKAIIAAEAKLLEISKQMQELSSAILTVGAIPEVLAQLQRVQEVREATERELAVLKATVVPVAGRYWQNQGKVWELERNDPQRLSAMLRSVGYAITIYPDGRLVSSDSVYRYAGVDRRVNRYKLMAGDELILVLKERDANRPDTEKFDPIEPAEVGGESRMDEEDYENLRLQYE

SEQ ID NO: 14412 - DNA, 50 bp, Pseudomonas gingeri
  source 1..50: mol_type = genomic DNA
tttgtgtacatatgaaatccttgcttatagatttttcatatgtataaaat

SEQ ID NO: 14413 - DNA, 40 bp, Pseudomonas gingeri
  source 1..40: mol_type = genomic DNA
tttttgcatgagtcttttcttgtaggtactgacagtcttg

SEQ ID NO: 14414 - DNA, 50 bp, Pseudomonas gingeri
  source 1..50: mol_type = genomic DNA
tttgtgtacatatgaaatccttgcagatagatttttcatatgtataaaat

SEQ ID NO: 14415 - DNA, 40 bp, Pseudomonas gingeri
  source 1..40: mol_type = genomic DNA
ttttcacatgaatcgtctcaggtgggtcatggcagtcttg

SEQ ID NO: 14416 - protein, 558 aa, Clostridioides difficile; identical to SEQ ID NO: 3206

SEQ ID NO: 14417 - DNA, 50 bp, Clostridioides difficile; identical to SEQ ID NO: 3207
  source 1..50: mol_type = genomic DNA

SEQ ID NO: 14418 - DNA, 40 bp, Clostridioides difficile
  source 1..40: mol_type = genomic DNA
gaaactcttaaaggctccattggaaagatttatggttttc

SEQ ID NO: 14419 - DNA, 50 bp, Clostridioides difficile
  source 1..50: mol_type = genomic DNA
aaacatccttaccaaaccctcacactagcaaggctttgataaggatggta

SEQ ID NO: 14420 - DNA, 40 bp, Clostridioides difficile
  source 1..40: mol_type = genomic DNA
caaactttttaaagatcctctttaaagttttatggttttc

SEQ ID NO: 14421 - protein, 507 aa, Hungatella hathewayi
MNAVIYARYSAGPGQNEQSIEGQLRDCRDYAKKNDITIIDTYIDRHISGTDFENRTEFNRLIKDCERHQFSAVIVWKVDRFGRNREEIAMNKVKMKKHGVKLLYAKEHIPDGPEGIILESLLEGMAEYYSAELSQKVRRGLRESMLKGHALGGNPMLGYKIINKKYVVDPVTSPIVVEIFERYAAGETAKAIATDLNTRGVVNAKGEPFKNNTVYFILRNEKYIGIYRYGDIVVNDVIQPIVNMELWGKVQMILEMNSRNRSRSRCTAPEEFLLTGKIFCEYCKRPIIGESGTSRNGVSHYYYKCSSRKNKGVKCEKSTVRKTDLENFIISQTIDNVLQPDTIDYLAKKVVEIQNSDSQELQMQSLRKQLSDVQKGLNNLVNAVEMGIITESTKERLMALEQRKEELNICIAQAEIKRPALTEEMVRFWLNKFRSQDVDSTEFKVRLINTFVNSVYLHNDYAIIVYNFCDDESGHRAEIRAQLDDALRAKKEDQTCSSDPVQVPATG

SEQ ID NO: 14422 - DNA, 50 bp, Hungatella hathewayi
  source 1..50: mol_type = genomic DNA
gttcgtctgatcctgttcaagtgccggcgaccggaatacagacgaacatt

SEQ ID NO: 14423 - DNA, 40 bp, Hungatella hathewayi
  source 1..40: mol_type = genomic DNA
ttgcagctttttttactgccggcgaccggaatcgaaccgg

SEQ ID NO: 14424 - DNA, 50 bp, Hungatella hathewayi
  source 1..50: mol_type = genomic DNA
gttcgtctgatcctgttcaagtgcatgcgaccggaatacagacgaacatt

SEQ ID NO: 14425 - DNA, 40 bp, Hungatella hathewayi
  source 1..40: mol_type = genomic DNA
ttgcgtctttttatacttcatgcaaatggaatcgtaccgt

SEQ ID NO: 14426 - protein, 529 aa, Niallia circulans
MRKRAAIYARVSTDEQTKGFSLQSQVEQLKIYLERKGYTEIEVFIDDGYSGKDFNRPNIQRLIRNLSSFDAIAVWKVDRLSRNNEQVLSLINNYLKPFDKKLLISTCDIDSSTANGYMFISLLGTFAEYERTQIIERVSSGMKKRADNGRWNGGIILGYDTKEGELLVNEYESSIVKEIFELRASGHGYKSIVNHINTKGLKTKKGKAFGINSVKTILENPTYAGFIRWGKHLHWSEKRRSGKQTEVKLVKGRHEAIIEKELWTRVQEVGEERKKFIRTSNFEGEFILSGILKCPQCGKGMVMSKTKKSEKEYYLYYQCQNFHQRGLAACNSNLVVKGDIEKQVLLKVKSLMNSPKLIEGICSNIEQERTEDIQEYMTELGFLQKELKEKMEEEAGLLAKARQAIKAKNEMEEKNYNLMLNQTVGEREEIEKKVNEYEIFIKNHSSSLNITKDQIIMALRDFDELFQIADNKTRKVLLRSIIKRIDLSKDRKSIKSLTLWFEEGDNTPSPPPIFLGDIFPESDARRTVS

SEQ ID NO: 14427 - DNA, 50 bp, Niallia circulans
  source 1..50: mol_type = genomic DNA
ttttcccagagagtgatgcgcggagaaccgtatcacaaatagtggtaaaa

SEQ ID NO: 14428 - DNA, 40 bp, Niallia circulans
  source 1..40: mol_type = genomic DNA
ttttcggattatgaggggagaaccgtatcataagtaaatg

SEQ ID NO: 14429 - DNA, 50 bp, Niallia circulans
  source 1..50: mol_type = genomic DNA
ttttcccagagagtgatgcgcggataaccgtatcacaaatagtggtaaaa

SEQ ID NO: 14430 - DNA, 40 bp, Niallia circulans
  source 1..40: mol_type = genomic DNA
ttatgggtttatcaggacataaccctatcataagttaagg

SEQ ID NO: 14431 - protein, 554 aa, Vibrio parahaemolyticus
MTEEKQRFAVTYQRFSSVRQVGNSSLDRQTDTQKAWLRQNPNVTVIDNFVDKAMSGWSGKHLKEGSLGQLMKAIEDGIIQPGTLILVEHFSRLTRQNIDNAEELVKRIWKAGITLVTVRDNTEYPPEAVNNMSLRIRLIVEMEQAFKESEWRSAKVKASYIRREKLAKEEGKAPRIRKPFWLNPDGTLNHLHQAVKDMFNWYLEGLGQQRIVVRLREKYTDTAIQKINPSTVMRWIQSEIVRGYWRGNRVYEPAVDDQLFFDVQAIHKSRLYKNVKPDRQWPLSGLMQCGVCGRGMSIQKSGKSNPVVRCSSKQRDHSCDRKTTFPYFIVHMYMMTHVLQHAIRLHSDKSSNKGLQIELGKVERKLATTRKKLNDEKEFYNKASNEGQNTTMILQLMNETYQKIEELEEQEKSLKASLKQSNRAVSAESRDLLFTPETFNLEMHKLGFKIVVGEEVLSTIGFDKPVSKMVYLGYCRKERAYKYADASSDFVKVWPSSLVTDELLNMQMLKNYINSSSGLKYIWDHIYDDDLEEKLKKRSNEKKEKEKKLKEKGE

SEQ ID NO: 14432 - DNA, 50 bp, Vibrio parahaemolyticus
  source 1..50: mol_type = genomic DNA
aatatgcacacgtaatctttaagtgagctataggcgtaggtgtgcagttt

SEQ ID NO: 14433 - DNA, 40 bp, Vibrio parahaemolyticus
  source 1..40: mol_type = genomic DNA
attggatcacttactgtgcgagcttaaagcaggtcagtca

SEQ ID NO: 14434 - DNA, 50 bp, Vibrio parahaemolyticus
  source 1..50: mol_type = genomic DNA
aatatgcacacgtaatctttaagtgtgctataggcgtaggtgtgcagttt

SEQ ID NO: 14435 - DNA, 40 bp, Vibrio parahaemolyticus
  source 1..40: mol_type = genomic DNA
tttggattgcttactgtgtgtgtttcaagcagggcatgca

SEQ ID NO: 14436 - protein, 521 aa, Streptococcus dysgalactiae
MKKVITIEPAKQVSHKVDLPSFTKRRVAGYARVSTDHEGQTTSYEAQMKYYTDYINSRSDWEFVKMYSDEGISGTNTKARIGFQRMVEDALDGKIDLILTKSVSRFARNTVDSLSTVRKLKEAGVEIYFEKENIWTFDSKGELLITIMSSLAQEESRSISENVTWGRRRQLAEGQVTFSYSQVLGFKKSDTGGFEIDHEEAKIVRYIFHQVLLGNNPNKIARELTAQGIPTPQGKRKWSYGTVKRMLRNEKYKGDALLQKSFTTNFLTKSTKPNEGELPQYYVENSHEAIIKREVFDLVQVELDKLEKKRQTSNIFTGRLFCGDCGGAFGSKVWHSTSKYKRTIYQCNSKYKGEHKCRTPHVTEEEIKAWFLSAINQLLSNRDEIIANTELLIDMAKDTSPLESRIDDLEHHLETIRQDIKDLVDRNARKAQNQELYQKQYDTLVTAYQEKQKELQETRSSLEEQKSKRISLDGFIQQLKEQDDLITDFNQELWQTSVERLDIKVGKKISLTFKNGVRIDL

SEQ ID NO: 14437 - DNA, 50 bp, Streptococcus dysgalactiae
  source 1..50: mol_type = genomic DNA
tgtatgataaagctgatagcaacagaaatcggaataaggaaattgataca

SEQ ID NO: 14438 - DNA, 40 bp, Streptococcus dysgalactiae
  source 1..40: mol_type = genomic DNA
gattaaattaatagcaacagatatggatggtaccttctta

SEQ ID NO: 14439 - DNA, 50 bp, Streptococcus dysgalactiae
  source 1..50: mol_type = genomic DNA
tgtatgataaagctgatagcaacagtaatcggaataaggaaattgataca

SEQ ID NO: 14440 - DNA, 40 bp, Streptococcus dysgalactiae
  source 1..40: mol_type = genomic DNA
ggttgaaataatagcaacagttatgaaagctactttctct

SEQ ID NO: 14441 - protein, 568 aa, Clostridium tertium
MLKVAVYSRKSKFTGKGDSIENQIEMCKDYITNTIGKDVEFTIYEDEGFSGGNLDRPNFKKLMSAIKNKKFNILVCYRLDRISRNVADFSSTLEILQSNNCSFISIKEQFDTSSPMGRAMIYIASVFAQLERETIAERVKDNMLEIAKNGKWTGGKIPLGFTSDKVEYIDEKGITRTAPQLIINEKEMEFVNFLYNKYLELGSLHKLEVYIHENNIRSRNDVLYEKSSLKTILQNPIYVKANDDVVEYLNNSNWTVYGEPDNIHSLLTYNKTEQTKKDGKYTKVKKDLSERLAAVSSIKGYIDPELWLSVQRQFDKNKDTFPRLGKTHNALLVGKIRCGKCKEYMLISHGRISKTTGEKLFYYTCSLKKKSRKKLCDNGNAKAADLEKLVLLSLKQLSLNKKDFLSKIRDKYKTDENYKNIDLEKLSLNKSLKEKKLQIDNLVTKLSLCNDIEDIILNKIKTLKDECNNIEKTLTELETKTLTLKNNLLNLDLIESLLNKCSMIDKLDRSEQKLIVDNLIDTIYWYSDGPGKGKIKIKFVGTEDNQKEISFTIKEMQQLMLHFCSHSM

SEQ ID NO: 14442 - DNA, 50 bp, Clostridium tertium
  source 1..50: mol_type = genomic DNA
tgttgcatttctgttctcatagcatgttctatgagaataaaaagacaaca

SEQ ID NO: 14443 - DNA, 40 bp, Clostridium tertium
  source 1..40: mol_type = genomic DNA
ggtagtcataagtttagcatgtccagtatctaataaaatt

SEQ ID NO: 14444 - DNA, 50 bp, Clostridium tertium
  source 1..50: mol_type = genomic DNA
tgttgcatttctgttctcatagcaaattctatgagaataaaaagacaaca

SEQ ID NO: 14445 - DNA, 40 bp, Clostridium tertium
  source 1..40: mol_type = genomic DNA
tgcagtcataagtttagtaaacacatattataataaaatt

SEQ ID NO: 14446 - protein, 568 aa, Clostridium tertium
MLKVAVYSRKSKFTGKGDSIENQIEMCKDYITNTIGKDVEFTIYEDEGFSGGNLDRPNFKKLMSAIKNKKFNILVCYRLDRISRNVADFSSTLEILQSNNCSFISIKEQFDTSSPMGRAMIYIASVFAQLERETIAERVKDNMLEIAKNGKWTGGKIPLGFTSDKVEYIDEKGITRTAPQLIINEKEMEFVNFLYNKYLELGSLHKLEVYIHENNIRSRNDVLYEKSSLKTILQNPIYVKANDDVVEYLNNSNWTVYGEPDNIHSLLTYNKTEQTKKDGKYTKVKKDLSERLAAVSSIKGYIDPELWLSVQRQFDKNKDTFPRLGKTHNALLVGKIRCGKCKEYMLISHGRISKTTGEKLFYYTCSLKKKSRKKLCDNGNAKAADLEKLVLLSLKQLSLNKKDFLSKIRDKYKTDENYKNIDLEKLSLNKSLKEKKMQIDNLVTKLSLCNDIEDIILNKIKTLKDECNNIEKTLTELETKTLTLKNNLLNLDLIESLLNKCSMIDKLDRSEQKLIVDNLIDTIYWYSNGPGKGKIKIKFVGTEDNQKEISFTIKEMQQLMLHFCSHSM

SEQ ID NO: 14447 - DNA, 50 bp, Clostridium tertium; identical to SEQ ID NO: 14442
  source 1..50: mol_type = genomic DNA

SEQ ID NO: 14448 - DNA, 40 bp, Clostridium tertium; identical to SEQ ID NO: 14443
  source 1..40: mol_type = genomic DNA

SEQ ID NO: 14449 - DNA, 50 bp, Clostridium tertium; identical to SEQ ID NO: 14444
  source 1..50: mol_type = genomic DNA

SEQ ID NO: 14450 - DNA, 40 bp, Clostridium tertium; identical to SEQ ID NO: 14445
  source 1..40: mol_type = genomic DNA

SEQ ID NO: 14451 - protein, 587 aa, Clostridioides difficile
MKKDVKVIKGDTTLKRTASGCVERSIKRVAAYCRVSTDTEDQINSYNSQVEHYTEFIQKNKEWTLAGIYADEAITGTQVDRRIDFQRLINDCMNGDIDMIITKSISRFARNTLDTLKYVRKLKEFNVAVFFEEENINTLTMDGELLLTILSSVAQQEVENISANVKKGLRMKMERGEMVGFQGCLGYDYNPETKSISVNEKEAEIVRYIFRRYIEGVGGMVISRELEEQGYLSPRGNKRWTETTVLGIIKNEKYKGDLMMGKTYTVDPISKRRLDNFGEQDKFYIESHHEPIISKEDFEKAQGIRLRRSKNRNTVANNGGKREKYSRKYAFSSMLECGFCGHNLSRRNWHSSSEYTKVIWQCVNATKNGKKYCPHSKGIEEAAIEKAFMESYRQVCHNNVEITNEFLKTVEEELKDNSLAKDLKKISNQLDKIIKKEKDLVELRLNESISMDIYQDKYNEIAISKEKLLAEKRTLEVTLTDEKALKKRLEGFKKLLESNKYLEEFDRAVFESIVDKIIIGGTNDEGEIDPAMITIIYKTGKKDSQDGRLFKSRRKNAKEVNEETGGKLYPQSSDEVNNLYSYPIDNT

SEQ ID NO: 14452 - DNA, 50 bp, Clostridioides difficile; identical to SEQ ID NO: 1792
  source 1..50: mol_type = genomic DNA

SEQ ID NO: 14453 - DNA, 40 bp, Clostridioides difficile
  source 1..40: mol_type = genomic DNA
atgttaccaacaacttgtcatatatactttggagaaatta

SEQ ID NO: 14454 - DNA, 50 bp, Clostridioides difficile
  source 1..50: mol_type = genomic DNA
gtattcctatcctattgacaacacgcgtggagtgcatagcgttgatacaa

SEQ ID NO: 14455 - DNA, 40 bp, Clostridioides difficile
  source 1..40: mol_type = genomic DNA
atattaccaacaactttatgcctatacatttgaaaactta

SEQ ID NO: 14456 - protein, 547 aa, Escherichia albertii
MKLLVTYIRWSTKEQDSGDSLRRQTNLIDAFYAKHKDEYYLLPAHRYVDKGKSGFHQQHKTQGSDFRRMFDNVMSGAIPAGSLIVVENFDRFSRADIDTAIDDVRQMLRKGVSILTLGDGELYDKSALTDPVKLIKHIIIAERAHQESLVKQKRIAQVWNHKTQLARELKKPMGKQAPGWLELSEDGSHYIVDEDKAALVNLIYDKRLSGMSMFAITKWLNEQGYPTINQRKVRISKTKRPDGNWSSLSVKHILTSRSVLGYLPAKISTEDRKTVLREEIEGFYPQIVTDSKFYAVQQLLKDTGKGKTSSGEHWLYVNILRGLVRCRCGLVMIPSGIRKPVYQGVYRCNARHEGRCNYGTVSRKLLDTQLCSRLFSKLSQLHDDATDTVKLDEIQRRINTVDSELEKLTETLIQLPNITQIQEALRVKQEEKDELIVQLSREKARVKSVSSLDLSGLDMASVEGRTEAQIIIKRLVKEIVVSGNEKLVDIYLHNGNMIRGFPLDGKDDHTLTLEEATDEMQSLDDMLIFGEPVTRIYPAGDMEEVDA

SEQ ID NO: 14457 - DNA, 50 bp, Escherichia albertii
  source 1..50: mol_type = genomic DNA
gcgtgtttagctatgtaagagtaccagtattcttgccttaacgctcatgg

SEQ ID NO: 14458 - DNA, 40 bp, Escherichia albertii
  source 1..40: mol_type = genomic DNA
acatagaataataaagcaccagaactttagccatttctaa

SEQ ID NO: 14459 - DNA, 50 bp, Escherichia albertii
  source 1..50: mol_type = genomic DNA
gcgtgtttagctatgtaagagtacaagtattcttgccttaacgctcatgg

SEQ ID NO: 14460 - DNA, 40 bp, Escherichia albertii
  source 1..40: mol_type = genomic DNA
acctagaataaacaagcataaagactttaaacatttttaa

SEQ ID NO: 14461 - protein, 547 aa, Escherichia albertii
MKLLATYIRWSTKEQDSGDSLRRQTNLIDAFYAKHKDEYYLLPAHRYVDKGKSGFHQQHKTQGSDFRRMFDNVMSGAIPAGSLIVVENFDRFSRADIDTAIDDVRQMLRKGVSILTLVDGELYDKSALTDPVKLIKHIIIAERAHQESLVKQKRIAQVWNHKTQLARELKKPMGKQAPGWLELSEDGSHYIVDEDKAALVNLIYDKRLSGMSMFAITKWLNEQGYPTINQRKVRISKTKRPDGNWSSLSVKHILTSRSVLGYLPAKISTEDRKTVLREEIEGFYPQIVTDSKFYAVQQLLKDTGKGKTSSGEHWLYVNILRGLVRCRCGLVMIPSGIRKPVYQGVYRCNARHEGRCNYGTVSRKLLDTQLCSRLFSKLSQLHDDATDTARMDELQRKLNTVDSELEKLTETLIQLPNITQIQEALRIKQVEKDELVVQLSREKARVKSVSNLDLSGLDMASVEGRTEAQIIIKRLVKEIVVSGNEKLVDIYLHNGNMIRGFPLDGKDDHTLTLEEATDEMQSLDDMLIFGEPVTRIYPAGDMEEVDA

SEQ ID NO: 14462 - DNA, 50 bp, Escherichia albertii
  source 1..50: mol_type = genomic DNA
gcgtgcttagctatgtaagagtaccagtattcttgccttaacgctcatgg

SEQ ID NO: 14463 - DNA, 40 bp, Escherichia albertii; identical to SEQ ID NO: 14458
  source 1..40: mol_type = genomic DNA

SEQ ID NO: 14464 - DNA, 50 bp, Escherichia albertii
  source 1..50: mol_type = genomic DNA
gcgtgcttagctatgtaagagtacaagtattcttgccttaacgctcatgg

SEQ ID NO: 14465 - DNA, 40 bp, Escherichia albertii; identical to SEQ ID NO: 14460
  source 1..40: mol_type = genomic DNA

SEQ ID NO: 14466 - protein, 568 aa, Aeromonas hydrophila; identical to SEQ ID NO: 12906

SEQ ID NO: 14467 - DNA, 50 bp, Aeromonas hydrophila
  source 1..50: mol_type = genomic DNA
tcttctgacaaaaatagctcgcagtttttgggagaaatgccgtagagcac

SEQ ID NO: 14468 - DNA, 40 bp, Aeromonas hydrophila
  source 1..40: mol_type = genomic DNA
ttttttgatggtgtcgcagttcttgatgccatagagggtg

SEQ ID NO: 14469 - DNA, 50 bp, Aeromonas hydrophila
  source 1..50: mol_type = genomic DNA
tcttctgacaaaaatagctcgcagattttgggagaaatgccgtagagcac

SEQ ID NO: 14470 - DNA, 40 bp, Aeromonas hydrophila
  source 1..40: mol_type = genomic DNA
ttctttgttggtttggcagatgttgaggacatagagactg

SEQ ID NO: 14471 - protein, 611 aa, Streptococcus oralis; identical to SEQ ID NO: 14066

SEQ ID NO: 14472 - DNA, 50 bp, Streptococcus oralis; identical to SEQ ID NO: 62
  source 1..50: mol_type = genomic DNA

SEQ ID NO: 14473 - DNA, 40 bp, Streptococcus oralis
  source 1..40: mol_type = genomic DNA
attgactttgctgtagcaggctatctgaatctttctttca

SEQ ID NO: 14474 - DNA, 50 bp, Streptococcus oralis; identical to SEQ ID NO: 62
  source 1..50: mol_type = genomic DNA

SEQ ID NO: 14475 - DNA, 40 bp, Streptococcus oralis
  source 1..40: mol_type = genomic DNA
tttgactttcctgtacctggatatttaaatctttctctag

SEQ ID NO: 14476 - protein, 506 aa, Streptococcus agalactiae
MNRIAIYLRLSEEDYKKKDESVSIVNQRDYIRNYIENENSLKDCEIEEYIDDGFSATNTNRPSFLRLIDNIKAGRINTIIVKDMSRFSRDYILLGDYLSNIFPFLKIRFIAINDNYDSINEDGNGIDTDIQFKTLYYDLFSKELSEKVKSSFKQLKSQGKNTNWAAPFGYIKDPKDKYHIIPDEKTAFIVKEAFDLLLEGYSCNQVANIFNEKDYITCSERKEELKISKYTRNLVTGSKINKRVWTSAAISRITSNELYTGDYVYNKYKDTRIGGRKSILLPEEEWKVILNTHEAIVSREVFDKVGIIKKKRIFGGYTKNREESIFSDKIFCKECGRHMGFRCDSRQKKNPNKVYKYRNYYCYFCKASRTPNNVKERDIIELIRPKLDEFKSQNTEKEESIIDYEKRKEEYLKEISELNSNLQIIYENYKKNSISKEEYLRKKILVQDKKKLLENKIRELENIEDDSKKELDINNLDEDNLLKIYVDNIIDKIIASRTGEIEIIEK

SEQ ID NO: 14477 - DNA, 50 bp, Streptococcus agalactiae
  source 1..50: mol_type = genomic DNA
tatatcaattgcttgacattgtagggggataatgctataatgatgatagt

SEQ ID NO: 14478 - DNA, 40 bp, Streptococcus agalactiae
  source 1..40: mol_type = genomic DNA
tgttggagcaaatgggataggaaaaacaacattacttaag

SEQ ID NO: 14479 - DNA, 50 bp, Streptococcus agalactiae
  source 1..50: mol_type = genomic DNA
tatatcaattgcttgacattgtaggcggataatgctataatgatgatagt

SEQ ID NO: 14480 - DNA, 40 bp, Streptococcus agalactiae
  source 1..40: mol_type = genomic DNA
ggttggtgcaaaaggaatagcaaaaacacaatttcttttg

SEQ ID NO: 14481 - protein, 479 aa, Streptococcus anginosus
MPKIALYLRLSVDEANTDESNSIINQRLLLSRYLDHNPEFQTFQREEFVDDGFSGTSTNRPAFQRLMASVKSGAIRHILVKDLSRFMRDYLELGNYLENIFPFLGVRFIALNDQYDSKTSEQNGLEIDVPFRNLLNDFYAKDVSEKVKSAMNTMKRSGKNMSWLPPFGYLKDPEDRFKIIIDEEVASIVRRIFRLSIEGMGDQKIAQILNQEQTITPAERKMQVSQARYRKTMILTVEQKRNVWTKGSIRQILKNEAYKGTYLFNTRTYIRGKHVRRPESEWERIENNHEAIVSTEVFEQAQQARKVRQGSQSSSLSQKTEKSILTGLVFCEHCGHRLSLRHNKGQIGYFYCGYCKGQGHSVSFCRLDKIEASILEALSCYLESSAQLKASTETARGIERLKARKLELFQEYKECYISRDMYLDKKVAIDEQVTSLEKALIAEQKPQLSTKGLTKEIVEAHVEKIVVDCLGFFEVIYKS

SEQ ID NO: 14482 - DNA, 50 bp, Streptococcus anginosus; identical to SEQ ID NO: 14052
  source 1..50: mol_type = genomic DNA

SEQ ID NO: 14483 - DNA, 40 bp, Streptococcus anginosus
  source 1..40: mol_type = genomic DNA
tatgtgggattttcctggcggtgggagagaaaaggacgag

SEQ ID NO: 14484 - DNA, 50 bp, Streptococcus anginosus; identical to SEQ ID NO: 14052
  source 1..50: mol_type = genomic DNA

SEQ ID NO: 14485 - DNA, 40 bp, Streptococcus anginosus
  source 1..40: mol_type = genomic DNA
tatttggcttttgctgggaggtggcagagaaaaggaagag

SEQ ID NO: 14486 - protein, 522 aa, Bacillus toyonensis
MNYNNDKVAIYTRVSTDEQANEGFSLQAQEDHLRQYAKAKGYEVYDIYSDEGYSGKDYNRPEIQRLFKDLSQDKFKGILVKSVDRISRRLSDVTKLIDDVLVPRNSYIVISDANLDSSTTGGIAIIHLLATFAQLERSMIVQRVKAGMGKRAELGYWNGGRVLGYDVKNKELKVNKEEAEIVRKIFHLRTEGKGYKSIAIMLNQQGFKTKRGGLFSIGTIKTILENPLYIGYCRWGRHKNWNVERRKGKTDEYKFVKGKHEPIVSEDLWKRVQGVNYAHKKSISKNRNFNGEFVLSGILRCPSCGAGMVMCKTKKRDKSGYHLYYMCQAFHSKGKLACKSNLIRKEDIEEKVLQCINKIILIPSIVDKTFERIQEKKERGIERIKNDLLYINEELKRKKKFIKKLNKDYFDEKIRVEAYTELSEPLREEIDELESEKGKLDREIESVEIPITKEEVIKALENFANLYENATYEQKKSLLRAIIKKIEVQPNRKEIKGITYWFDCDNGQDDALLVSKEGRTIS

SEQ ID NO: 14487 - DNA, 50 bp, Bacillus toyonensis
  source 1..50: mol_type = genomic DNA
ctttactagttagtaaagaggggagaaccgtatcacaagtgatagtaaag

SEQ ID NO: 14488 - DNA, 40 bp, Bacillus toyonensis
  source 1..40: mol_type = genomic DNA
gtttcgtattaatcgtggtgaaccatatcataagtaaatt

SEQ ID NO: 14489 - DNA, 50 bp, Bacillus toyonensis
  source 1..50: mol_type = genomic DNA
ctttactagttagtaaagaggggaccaccgtatcacaagtgatagtaaag

SEQ ID NO: 14490 - DNA, 40 bp, Bacillus toyonensis
  source 1..40: mol_type = genomic DNA
gtatggtaataatcatgttcctccatatcacagttaaatt

SEQ ID NO: 14491 - protein, 515 aa, Bacillus toyonensis
MNKKVKAGIYIRVSTEEQKQGHSLEAQESMLKEFADRKGYEIYDVYNDGGYSGKNFNRPEIQRLLRDLKDDKIDAILVWKVDRLSRNNTDVMSLIDTELTPRKKNLIITSIDMDSSSPTGHMFISLLSTFARYERATIIDRVKAGMQKRAEKGYWNGGSILGYDSVDKKLIINENESEIVREIFQLRAEGKGYKFIVNILNNKGIKTKTGKNFSIPAIKVIVNNQIYNGKMVWKKHQDWNTRRRTGKSEPIIVEGIHDAIIDEGLWTRVQKVNELQKNSFSSNRNFNGNFLLTGILKCPKCGAGTVMSKTKKRNSDDYHLYYMCQAYHNKGSSVCSANLIRKDQVEQQVLNIISLLVNENDIINALIDELNSDNNKTNESHIAHIKMLKKQLGKAYEKRKKLDNDYFEGNIEGSTYNRLMNELQLDINKLKRNVRESESEIIKNDSTINKKEVIYALENFNKLFKIVNDEEKKLLIRSLIREVQMEANRKDVKEITFWFLPSSVLPSNKVRRTIS

SEQ ID NO: 14492 - DNA, 50 bp, Bacillus toyonensis
  source 1..50: mol_type = genomic DNA
ttttaccatctaataaagtgcgcagaaccgtatcacaagtgatggtaaat

SEQ ID NO: 14493 - DNA, 40 bp, Bacillus toyonensis; identical to SEQ ID NO: 14488
  source 1..40: mol_type = genomic DNA

SEQ ID NO: 14494 - DNA, 50 bp, Bacillus toyonensis
  source 1..50: mol_type = genomic DNA
ttttaccatctaataaagtgcgcaccaccgtatcacaagtgatggtaaat

SEQ ID NO: 14495 - DNA, 40 bp, Bacillus toyonensis; identical to SEQ ID NO: 14490
  source 1..40: mol_type = genomic DNA

SEQ ID NO: 14496 - protein, 522 aa, Bacillus toyonensis
MNYNNDKVAIYIRVSTDEQAKEGFSLQAQEDHLRQYAKAKGYEVYDVYSDEGYSGKDYNRPEIQRLFKDLSQEKFKGILVKSVDRVSRRVSDVTKLIDDVLVPRNSYIVISDANLDSSTTGGIAIIHFLATFAQLERSMIVQRVKAGMSKRAELGYWNGGHVLGYDIKNKELKVNAEEAEIVRKVFNLRAEGKGYKKIAVILNQQGFKTKRGQLFSICTIKTIVENPLYIGYCRWGRKKNRIEETSKEKIDEYNLVKGKHEPIISEGLWKKVQGVNYAHKESISKNRNFNGEFLLSGILRCPSCGAGMVMHKTKKRDGSGYHLYYMCQTFHSKGKLACKSNLIRKEEIEDKVIQCVNKIISMPSIVDKTLERIQEKREWGMERIKSDLLYINEELKRRRNRIVKLNKDYFDEKIRVETYTELSDPLRKEIDELEAEKHKLEKKIESAEVPITKEMVIRALGNFTDLYKHANYELKKSLLRAIIKKIEVQSNRTDIKQITYWFDYGNNPEDALLVSKEGRTIS

SEQ ID NO: 14497 - DNA, 50 bp, Bacillus toyonensis; identical to SEQ ID NO: 14487
  source 1..50: mol_type = genomic DNA

SEQ ID NO: 14498 - DNA, 40 bp, Bacillus toyonensis; identical to SEQ ID NO: 14488
  source 1..40: mol_type = genomic DNA

SEQ ID NO: 14499 - DNA, 50 bp, Bacillus toyonensis; identical to SEQ ID NO: 14489
  source 1..50: mol_type = genomic DNA

SEQ ID NO: 14500 - DNA, 40 bp, Bacillus toyonensis; identical to SEQ ID NO: 14490
  source 1..40: mol_type = genomic DNA

SEQ ID NO: 14501 - protein, 617 aa, Enterobacter mori
MLIQTKIRRTAMRKVFVYHRVSSDQQLDGSGIARQAELLEAYLKRTNILAEMDDPEPVIITESGGVSAFKGHNMLITSGLGAWMQEVRASMWDGSHLVYENGDRFSRQNPFTVIGYINDLINHNITIHDATMNIIISRENSAMLPMVLMNAQRAYDESKYKSDRIRKGWAKKREQAFNKGTIVTNKRPQWIEVEKDKYVLNEKAAVVKEIFALYQTGMGCPTIAKQLQRKEGEQYKFNRSWTGELVHKILTNRRVTGKIFISEIIRNHADIENPVTQKKYDMDVYPVVINEEEFELVQELLKSRRPNAGRVTVKKDGQEEVLIKSNLFSGIARCTECGGPMYHNVVRAKRTPKKSDPKIEEYRYIRCLNERDGLCENKAMAYETVERFVVEHMLGMDLSTVMKEQEFNPEIEVLRIQIDQVKDQITNYENGIERRKSTGKPISFEMREELDDAKSELERLLARQASLATVQVDVPVLQDVNVTELYDVNNVDIRTRYENELNKIVSNIRLKRNGTSYTIDINYKQNELKRHVLFVENKKKEQTLISEVIIEDVDGGKFYYTPSFMIMLKDGEIRFQQTNEDLSIIDYSLLLNYIDAVDRNDAVGVWMRNQFNFLTSN

SEQ ID NO: 14502 - DNA, 50 bp, Enterobacter mori; identical to SEQ ID NO: 2497
  source 1..50: mol_type = genomic DNA

SEQ ID NO: 14503 - DNA, 40 bp, Enterobacter mori
  source 1..40: mol_type = genomic DNA
tttttgcatgataatcatacaaataggtgccgttacaaca

SEQ ID NO: 14504 - DNA, 50 bp, Enterobacter mori; identical to SEQ ID NO: 12024
  source 1..50: mol_type = genomic DNA

SEQ ID NO: 14505 - DNA, 40 bp, Enterobacter mori
  source 1..40: mol_type = genomic DNA
tttttatataataataatattaataggagctgtaataacc

SEQ ID NO: 14506 - protein, 615 aa, Enterobacter mori
MLIQTKIRGASMKKVFVYHRVSSDQQLDGSGIARQAELLEGYLERTGICAEMDDPAPVVLSDQGVSAFKGLNISEGELGAWMEQVRNGMWDSSILVVESIDRFSRQNPFDVMGYINALMAHNVAIHDVMANIVISRSNSKDLPFVMMNAQRAYDESKYKSDRIRKGWAKKREHAFNKGTIITNKRPQWIEVENDKYVLNEKAVVVKEIFALYQTGMGCPTIAKQLQRKEGEQYKFNRPWTGELVHKILTNRRVTGKIFISEIIRNHDDIEYPVTQKKYDMDVYPVVINEEEFELVQELLKSRRSNAGRITVKKDGQEEVLIKSNLFSGIARCTECGGPMYHNVVRAKRTPKKGDPKIEEYRYIRCLNERDGLCENKAMTYETVERFVVEHLLGMDLSTVMKEQEFNPEIEVLRIQIDQVKDQITNYENGIERRKSAGKPISFDMREELDDAKSELERLLARQASLATVQVDVPVLQDVNVTELYDVNNVDIRTRYESELNKIVSNICLKRNGTSYTIDINYKQNELKRHVLFVENKKKEQTLISEVIIEDVDGAKFYYTPSFMIMLKDSEIRFQQTNEDLSIIDYSLLLNYIDAVDRNDAVGVWMRDQFNFLTSN

SEQ ID NO: 14507 - DNA, 50 bp, Enterobacter mori; identical to SEQ ID NO: 12002
  source 1..50: mol_type = genomic DNA

SEQ ID NO: 14508 - DNA, 40 bp, Enterobacter mori; identical to SEQ ID NO: 14503
  source 1..40: mol_type = genomic DNA

SEQ ID NO: 14509 - DNA, 50 bp, Enterobacter mori; identical to SEQ ID NO: 12004
  source 1..50: mol_type = genomic DNA

SEQ ID NO: 14510 - DNA, 40 bp, Enterobacter mori; identical to SEQ ID NO: 14505
  source 1..40: mol_type = genomic DNA

SEQ ID NO: 14511 - protein, 471 aa, Listeria monocytogenes; identical to SEQ ID NO: 1821

SEQ ID NO: 14512 - DNA, 50 bp, Listeria monocytogenes; identical to SEQ ID NO: 1822
  source 1..50: mol_type = genomic DNA

SEQ ID NO: 14513 - DNA, 40 bp, Listeria monocytogenes
  source 1..40: mol_type = genomic DNA
ttcaatgttactgtaacctgatgtgtacctatagcccatc

SEQ ID NO: 14514 - DNA, 50 bp, Listeria monocytogenes
  source 1..50: mol_type = genomic DNA
tataggttttttgtcaaatatggtaatgtgtactttacaaaaacactatt

SEQ ID NO: 14515 - DNA, 40 bp, Listeria monocytogenes
  source 1..40: mol_type = genomic DNA
accaatgttattgtaacctaatttgtacctatagactggt

SEQ ID NO: 14516 - protein, 471 aa, Listeria monocytogenes
MTVGIYIRVSTEEQVKEGFSISAQKEKLKAYCTAQGWEDFKFYVDEGKSAKDMHRPLLQEMITHIKKGLIDTVLVYKLDRLTRSVVDLHNLLSIFDEYNCAFKSATEVYDTSSAMGRFFITIISSVAQFERENTSERVSFGMAEKVRQGEYIPLAPFGYVKGPDGKLIINEAEKEIFLHVVNMVSTGYSLRQTCEYLTNIGLKTRRSNDVWKVSTLIWMLKNPAVYGAIKWNNEIYENTHEPLIDKTTFDKLANILSIRSKSTTSRRGHVHHVFKGRLICPQCGKRLSGLRTKYVNKNKETFYNNNYRCATCKEHRRPAIQISEQKIEKAFIDYISNYTLNKANISSKKLDNNLRKQEMIQKEIISLQRKREKFQKAWAADLMNDDEFSKLMIDTKMEIDAAEDRKKEYDVSLFVSPEDIAKRNNILRELKINWTSLSPTEKTDFISMFIEGIEYVKDDENKAVITKISFL

SEQ ID NO: 14517 - DNA, 50 bp, Listeria monocytogenes
  source 1..50: mol_type = genomic DNA
tataggttttttgtcaaatacggtgatgtgtactttacaaaaacactatt

SEQ ID NO: 14518 - DNA, 40 bp, Listeria monocytogenes; identical to SEQ ID NO: 14513
  source 1..40: mol_type = genomic DNA

SEQ ID NO: 14519 - DNA, 50 bp, Listeria monocytogenes
  source 1..50: mol_type = genomic DNA
tataggttttttgtcaaatacggtaatgtgtactttacaaaaacactatt

SEQ ID NO: 14520 - DNA, 40 bp, Listeria monocytogenes; identical to SEQ ID NO: 14515
  source 1..40: mol_type = genomic DNA

SEQ ID NO: 14521 - protein, 471 aa, Listeria monocytogenes
MTVGIYIRVSTEEQVKEGFSISAQKEKLKAYCTAQGWEDFKFYVDEGKSAKDMHRPLLQEMITHIKKGLIDTVLVYKLDRLTRSVVDLHNLLSIFDEYNCAFKSATEVYDTSSAMGRFFITIISSVAQFERENTSERVSFGMAEKVRQGEYIPLAPFGYVKGPDGKLIINEAEKEIFLHVVNMVSTGYSLRQTCEYLTNIGLKTRRSNDVWKVSTLIWMLKNPAVYGAIKWNNEIYENTHEPLIDKTTFDKLANILSIRSKSTTSRRGHVHHVFKGRLICPQCGKRLSGLRTKYVNKNKETFYNNNYRCATCKEHRRPAIQISEQKIEKAFIDYISNYTLNKANISSKKLDNNLRKQEMIQKEIISLQRKREKFQKAWAADLMNDDEFSKLMIDTKMEIDAAEDRKKEYDVSLFVSPEDIAKRNNILRELKINWTSLSPTEKTDFISMFIEGIEYVKDDENKAVITKISFF

SEQ ID NO: 14522 - DNA, 50 bp, Listeria monocytogenes; identical to SEQ ID NO: 14517
  source 1..50: mol_type = genomic DNA

SEQ ID NO: 14523 - DNA, 40 bp, Listeria monocytogenes; identical to SEQ ID NO: 14513
  source 1..40: mol_type = genomic DNA

SEQ ID NO: 14524 - DNA, 50 bp, Listeria monocytogenes; identical to SEQ ID NO: 14519
  source 1..50: mol_type = genomic DNA

SEQ ID NO: 14525 - DNA, 40 bp, Listeria monocytogenes; identical to SEQ ID NO: 14515
  source 1..40: mol_type = genomic DNA

SEQ ID NO: 14526 - protein, 471 aa, Listeria monocytogenes
MTVGIYIRVSTDEQVKEGFSISAQKEKLKAYCTAQGWEDFKFYVDEGKSAKDMHRPLLQEMITHIKKGLIDTVLVYKLDRLTRSVVDLHNLLSIFDEYNCAFKSATEVYDTSSAMGRFFITIISSVAQFERENTSERVSFGMAEKVRQGEYIPLAPFGYVKGPDGKLIVNEAEKEIFLHVVNMVSTGYSLRQTCEYLTNIGLKTRRSNDMWKVSTLIWMLKNPAVYGAIKWNNEIYENKHEPLIDKATFDKLANILSIRSKSTTSRRGHVHHVFKGRLICPQCGKRLSGLRTKYVNKNKETFYNNNYRCATCKEHRRPAIQISEQKIEKAFIDYISNYTLNKADISSKKLDNNLRKQEMIQKEIVSLQRKREKFQKAWAADLMSDDEFSKLMIDTKMEIDVAEDRKKEYDVSLFVSPEDIAKRNNILRELKINWTSLSPTEKTDFISMFIEGIEYVKNDENKAVITKIRFL

SEQ ID NO: 14527 - DNA, 50 bp, Listeria monocytogenes
  source 1..50: mol_type = genomic DNA
tatagactttttgtcaaatatagtgatgtgtactttacaaaaacactatt

SEQ ID NO: 14528 - DNA, 40 bp, Listeria monocytogenes
  source 1..40: mol_type = genomic DNA
ttcaatgttaatgtaacctgatgtgtacctatagcccatc

SEQ ID NO: 14529 - DNA, 50 bp, Listeria monocytogenes
  source 1..50: mol_type = genomic DNA
tatagactttttgtcaaatatagtaatgtgtactttacaaaaacactatt

SEQ ID NO: 14530 - DNA, 40 bp, Listeria monocytogenes; identical to SEQ ID NO: 14515
  source 1..40: mol_type = genomic DNA

SEQ ID NO: 14531 - protein, 471 aa, Listeria monocytogenes; identical to SEQ ID NO: 14526

SEQ ID NO: 14532 - DNA, 50 bp, Listeria monocytogenes; identical to SEQ ID NO: 14527
  source 1..50: mol_type = genomic DNA

SEQ ID NO: 14533 - DNA, 40 bp, Listeria monocytogenes; identical to SEQ ID NO: 14513
  source 1..40: mol_type = genomic DNA

SEQ ID NO: 14534 - DNA, 50 bp, Listeria monocytogenes; identical to SEQ ID NO: 14529
  source 1..50: mol_type = genomic DNA

SEQ ID NO: 14535 - DNA, 40 bp, Listeria monocytogenes; identical to SEQ ID NO: 14515
  source 1..40: mol_type = genomic DNA

SEQ ID NO: 14536 - protein, 471 aa, Listeria monocytogenes
MTVGIYIRVSTDEQVKEGFSISAQKEKLKAYCTAQGWEDFKFYVDEGKSAKDMHRPLLQEMITHIKKGLIDTVLVYKLDRLTRSVVDLHNLLSIFDEYNCAFKSATEVYDTSSAMGRFFITIISSVAQFERENTSERVSFGMAEKVRQGEYIPLAPFGYVKGPDGKLIVNEAEKEIFLHVVNMVSTGYSLRQTCEYLTNIGLKTRRSNDMWKVSTLIWMLKNPAVYGAIKWNNEIYENKHEPLIDKATFDKLANILSIRSKSTTSRRGHVHHVFKGRLICPQCGKRLSGLRTKYVNKNKETFYYNNYRCATCKEHRRPAIQISEQKIEKAFIDYISNYTLNKADISSKKLDNNLRKQEMIQKEIVSLQRKREKFQKAWAADLMSDDEFSKLMIDTKMEIDVAEDRKKEYDVSLFVSPEDIAKRNNILRELKINWTSLSPTEKTDFISMFIEGIEYVKNDENKAVITKIRFL

SEQ ID NO: 14537 - DNA, 50 bp, Listeria monocytogenes; identical to SEQ ID NO: 14527
  source 1..50: mol_type = genomic DNA

SEQ ID NO: 14538 - DNA, 40 bp, Listeria monocytogenes; identical to SEQ ID NO: 14513
  source 1..40: mol_type = genomic DNA

SEQ ID NO: 14539 - DNA, 50 bp, Listeria monocytogenes; identical to SEQ ID NO: 14529
  source 1..50: mol_type = genomic DNA

SEQ ID NO: 14540 - DNA, 40 bp, Listeria monocytogenes; identical to SEQ ID NO: 14515
  source 1..40: mol_type = genomic DNA

SEQ ID NO: 14541 - protein, 471 aa, Listeria monocytogenes
MTVGIYIRVSTDEQVKEGFSISAQKEKLKAYCTAQGWEDFKFYVDEGKSAKDMHRPLLQEMISHIKKGLIDTVLVYKLDRLTRSVVDLHNLLSIFDEYNCAFKSATEVYDTSSAMGRFFITIISSVAQFERENTSERVSFGMAEKVRQGEYIPLAPFGYVKGPDGKLIVNEAEKEIFLHVVNMVSTGYSLRQTCEYLTNIGLKTRRSNDVWKVSTLIWMLKNPAVYGAIKWNNEIYENKHEPLIDKATFDKLANILSIRSKSTTSRRGHVHHVFKGRLICPQCGKRLSGLRTKYVNKNKETFYNNNYRCATCKEHRRPAIQISEQKIEKAFIDYISNYTLNKADISSKKLDNNLRKQEMIQKEIVSLQRKREKFQKAWAADLMSDDEFSKLMIDTKMEIDVAEDRKKEYDVSLFVSPEDIAKRNNILRELKINWTSLSPTEKTDFISMFIEGIEYVKNDENKVVITKIRFL

SEQ ID NO: 14542 - DNA, 50 bp, Listeria monocytogenes
  source 1..50: mol_type = genomic DNA
tatagactttttgtcaaatatagtgatgtgtactttacaaaaacactata

SEQ ID NO: 14543 - DNA, 40 bp, Listeria monocytogenes; identical to SEQ ID NO: 14513
  source 1..40: mol_type = genomic DNA

SEQ ID NO: 14544 - DNA, 50 bp, Listeria monocytogenes
  source 1..50: mol_type = genomic DNA
tatagactttttgtcaaatatagtaatgtgtactttacaaaaacactata

SEQ ID NO: 14545 - DNA, 40 bp, Listeria monocytogenes; identical to SEQ ID NO: 14515
  source 1..40: mol_type = genomic DNA

SEQ ID NO: 14546 - protein, 471 aa, Listeria monocytogenes; identical to SEQ ID NO: 14516

SEQ ID NO: 14547 - DNA, 50 bp, Listeria monocytogenes
  source 1..50: mol_type = genomic DNA
tataggttttttgtcaaatacggtgatgtgtactttacaaaaatactatt

SEQ ID NO: 14548 - DNA, 40 bp, Listeria monocytogenes; identical to SEQ ID NO: 14513
  source 1..40: mol_type = genomic DNA

SEQ ID NO: 14549 - DNA, 50 bp, Listeria monocytogenes
  source 1..50: mol_type = genomic DNA
tataggttttttgtcaaatacggtaatgtgtactttacaaaaatactatt

SEQ ID NO: 14550 - DNA, 40 bp, Listeria monocytogenes; identical to SEQ ID NO: 14515
  source 1..40: mol_type = genomic DNA

SEQ ID NO: 14551 - protein, 471 aa, Listeria monocytogenes
MTVGIYIRVSTEEQVKEGFSISAQKEKLKAYCTAQGWEDFKFYVDEGKSAKDMHRPLLQEMITHIKKGLIDTVLVYKLDRLTRSVVDLHNLLSIFDEYNCAFKSATEVYDTSSAMGRFFITIISSVAQFERENTSERVSFGMAEKVRQGEYIPLAPFGYVKGPDGKLIINEAEKEIFLHVVNMVSTGYSLRQTCEYLTNIGLKTRRSNDVWKVSTLIWMLKNPAVYGAIKWNNEIYENTHEPLIDKTTFDKLANILSIRSKSTTSRRGHVHHVFKGRLICPQCGKRLSGLRTKYVNKNKETFYNNNYRCATCKEHRRPAIQISEQKIEKAFIDYISNYTLNKANISSKKLDNNLRKQEMIQKKIISLQRKREKFQKAWAADLMNDDEFSKLMIDTKMEIDAAEDRKKEYDVSLFVSPEDIAKRNNILRELKINWTSLSPTEKTDFISMFIEGIEYVKDDENKAVITKISFL

SEQ ID NO: 14552 - DNA, 50 bp, Listeria monocytogenes; identical to SEQ ID NO: 14517
  source 1..50: mol_type = genomic DNA

SEQ ID NO: 14553 - DNA, 40 bp, Listeria monocytogenes; identical to SEQ ID NO: 14513
  source 1..40: mol_type = genomic DNA

SEQ ID NO: 14554 - DNA, 50 bp, Listeria monocytogenes; identical to SEQ ID NO: 14519
  source 1..50: mol_type = genomic DNA

SEQ ID NO: 14555 - DNA, 40 bp, Listeria monocytogenes; identical to SEQ ID NO: 14515
  source 1..40: mol_type = genomic DNA

SEQ ID NO: 14556 - protein, 471 aa, Listeria monocytogenes
MTVGIYIRVSTEEQVREGFSISAQKEKLKEYCALRGWKDFKFYVDEGKTASNLNRPLLNELITHIKKGLIDIVLVYKMDRLSRTVVDLHNLLCVFDDYNCAIKSATEDFDTSSAMGRFFMTTISSIAQFERENISERVIFGMAEKARQGEYTPLAPFGFTKDSNGKLIVNENEKEIFLQIVNMILSGYSLRQTCEYLTNIGIKTRRSNDIWKVSTLVWMLKNPAIYGAIKWSGNIYENTHEPLIDKETFIKIAKVLSIRSKATTNRRGHVHHIFKARLICPACGKRLSGLRTKYVNKNNEIFYNNNYRCGTCKERKKASIHISEQKIENAFITYISNYSLKKANVTSTQLGVNLQKQEMINKEILSLQRKREKYQKAWAADLINDDEFTKLMNETEAEISSAESRKKEFDTSLFVSTEEIAKRKNILRELEINWTSLTTTEKADFISMFIEGIEFVKDDLNKVVVTKIRFL

SEQ ID NO: 14557 - DNA, 50 bp, Listeria monocytogenes
  source 1..50: mol_type = genomic DNA
tgtagggtgtttgtccagtaaggtgatgtatacttgacaaataccctata

SEQ ID NO: 14558 - DNA, 40 bp, Listeria monocytogenes; identical to SEQ ID NO: 14513
  source 1..40: mol_type = genomic DNA

SEQ ID NO: 14559 - DNA, 50 bp, Listeria monocytogenes
  source 1..50: mol_type = genomic DNA
tgtagggtgtttgtccagtaaggtaatgtatacttgacaaataccctata

SEQ ID NO: 14560 - DNA, 40 bp, Listeria monocytogenes; identical to SEQ ID NO: 14515
  source 1..40: mol_type = genomic DNA

SEQ ID NO: 14561 - protein, 471 aa, Listeria monocytogenes
MTVGIYIRVSTEEQVKEGFSISAQKEKLKAYCTAQGWEDFKFYVDEGKSAKDMHRPLLQEMITHIKKGLIDTVLVYKLDRLTRSVVDLHNLLSIFDEYNCAFKSATEVYDTSSAMGRFFITIISSVAQFERENTSERVSFGMAEKVRQGEYIPLAPFGYVKGPDGKLIINEAEKEIFLHVVNMVSTGYSLRQTCEYLTNIGLKTRRSNDVWKVSTLIWMLKNPAVYGAIKWNNEIYENTHEPLIDKTTFDKLANILSIRSKSTTSRRGHVHHVFKGRLICPQCGKRLSGLRTKYVNKNKETFYNNNYRCATCKEHRRPAIQISEQKIEKAFIDYISNYTLNKANISSKKLDNNLRKQEMIQKEIISLQRKREKFQKAWAADLMNDDEFSKLMIDTKMEIDAAEDRKKEYDVSLFVSPEDIAKRNNILRELKINWTSLSPTEKTEFISMFIEGIEYVKDDENKAVITKISFL

SEQ ID NO: 14562 - DNA, 50 bp, Listeria monocytogenes; identical to SEQ ID NO: 14517
  source 1..50: mol_type = genomic DNA

SEQ ID NO: 14563 - DNA, 40 bp, Listeria monocytogenes; identical to SEQ ID NO: 14513
  source 1..40: mol_type = genomic DNA

SEQ ID NO: 14564 - DNA, 50 bp, Listeria monocytogenes; identical to SEQ ID NO: 14519
  source 1..50: mol_type = genomic DNA

SEQ ID NO: 14565 - DNA, 40 bp, Listeria monocytogenes; identical to SEQ ID NO: 14515
  source 1..40: mol_type = genomic DNA

SEQ ID NO: 14566 - protein, 471 aa, Listeria monocytogenes
MTVGIYIRVSTDEQVKEGFSISAQKEKLKAYCTAQGWEDFKFYVDEGKSAKDMHRPLLQEMITHIKKGLIDTVLVYKLDRLTRSVVDLHNLLSIFDEYNCAFKSATEVYDTSSAMGRFFITIISSVAQFERENTSERVSFGMAEKVRQGEYIPLAPFGYVKGPDGKLIVNEAEKEIFLHVVNMVSTGYSLRQTCEYLTNIGLKTRRSNDMWKVSTLIWMLKNPAVYGAIKWNNEIYENKHEPLIDKATFDKLANILSIRSKSTTSRRGHVHHVFKGRLICPQCGKRLSGLRTKYVNKNKETFYNNNYRCATCKEHRRPAIQISEQKIEKAFIDYISNYTLNKADISSKKLDNNLRKQEMIQKEIVSLQRKREKFQKAWAADLMSDDEFPKLMIDTKMEIDVAEDRKKEYDVSLFVSPEDIAKRNNILRELKINWTSLSPTEKTDFISMFIEGIEYVKNDENKAVITKIRFL

SEQ ID NO: 14567 - DNA, 50 bp, Listeria monocytogenes; identical to SEQ ID NO: 14527
  source 1..50: mol_type = genomic DNA

SEQ ID NO: 14568 - DNA, 40 bp, Listeria monocytogenes; identical to SEQ ID NO: 14513
  source 1..40: mol_type = genomic DNA

SEQ ID NO: 14569 - DNA, 50 bp, Listeria monocytogenes; identical to SEQ ID NO: 14529
  source 1..50: mol_type = genomic DNA

SEQ ID NO: 14570 - DNA, 40 bp, Listeria monocytogenes; identical to SEQ ID NO: 14515
  source 1..40: mol_type = genomic DNA

SEQ ID NO: 14571 - protein, 471 aa, Listeria monocytogenes
MTVGIYIRVSTEEQVKEGFSISAQKEKLKAYCTAQGWEDFKFYVDEGKSAKDMHRPLLQEMITHIKKGLIDTVLVYKLDRLTRSVVDLHNLLSIFDEYNCAFKSATEVYDTSSAMGRFFITIISSVAQFERENTSERVSFGMAEKVRQGEYIPLAPFGYVKGPDGKLIINEAEKEIFLHVVNMVSTGYSLRQTCEYLTNIGLKTRRSNDVWKVSTLIWMLKNPAVYGAIKWNNEIYENTHEPLIDKTTFDKLANILSIRSKSTTSRRGHVHHVFKGRLICPQCGKRLSGLRTKYVNKNKETFYNNNYRCATCKEHRRPAIQISEQKIEKAFIDYISNYTLNKANISSKKLDNNLRKQEMIQKEIISLQRKREKFQKAWAADLMNDDEFSKLMIDTKMEIDAAEVRKKEYDVSLFVSPEDIAKRNNILRELKINWTSLSPTEKTDFISMFIEGIEYVKDDENKAVITKISFL

SEQ ID NO: 14572 - DNA, 50 bp, Listeria monocytogenes; identical to SEQ ID NO: 14517
  source 1..50: mol_type = genomic DNA

SEQ ID NO: 14573 - DNA, 40 bp, Listeria monocytogenes; identical to SEQ ID NO: 14513
  source 1..40: mol_type = genomic DNA

SEQ ID NO: 14574 - DNA, 50 bp, Listeria monocytogenes; identical to SEQ ID NO: 14519
  source 1..50: mol_type = genomic DNA

SEQ ID NO: 14575 - DNA, 40 bp, Listeria monocytogenes; identical to SEQ ID NO: 14515
  source 1..40: mol_type = genomic DNA

SEQ ID NO: 14576 - protein, 471 aa, Listeria monocytogenes
MTVGIYIRVSTEEQVKEGFSISAQKEKLKAYCTAQGWEDFKFYVDEGKSAKDMHRPLLQEMITHIKKGLIDTVLVYKLDRLTRSVVDLHNLLSIFDEYNCAFKSATEVYDTSSAMGRFFITIISSVAQFERENTSERVSFGMAEKVRQGEYIPLAPFGYVKGSDGKLIINEAEKEIFLHVVNMVSTGYSLRQTCEYLTNIGLKTRRSNDVWKVSTLIWMLKNPAVYGAIKWNNEIYENTHEPLIDKTTFDKLANILSIRSKSTTSRRGHVHHVFKGRLICPQCGKRLSGLRTKYVNKNKETFYNNNYRCATCKEHRRPAIQISEQKIEKAFIDYISNYTLNKANISSKKLDNNLRKQEMIKKEIISLQRKREKFQKAWAADLMNDDEFSKLMIDTKMEIDAAEDRKKEYDVSLFASPEDIAKRNNILRELKINWTSLSPTEKTDFISMFIEGIEYVKDDENKAVITKISFL

SEQ ID NO: 14577 - DNA, 50 bp, Listeria monocytogenes; identical to SEQ ID NO: 14517
  source 1..50: mol_type = genomic DNA

SEQ ID NO: 14578 - DNA, 40 bp, Listeria monocytogenes; identical to SEQ ID NO: 14513
  source 1..40: mol_type = genomic DNA

SEQ ID NO: 14579 - DNA, 50 bp, Listeria monocytogenes; identical to SEQ ID NO: 14519
  source 1..50: mol_type = genomic DNA

SEQ ID NO: 14580 - DNA, 40 bp, Listeria monocytogenes; identical to SEQ ID NO: 14515
  source 1..40: mol_type = genomic DNA

SEQ ID NO: 14581 - protein, 537 aa, Xanthomonas dyei
MCVTLHPMANAYTYIRFSTLEQQHGDSLRRQNEAIEDFVASNKLRLTESQAFQDLGVSGYRGANLKSGLGKFIAEVEAGQVPKGSYLIVESLDRLSRQRVMDALTLLVTLIDKGIKVVTLNDAGPQVLDKDAGLPALVIALSTMQRANSESDMKSKRVKAAWANKRKNAANLPVSSRGPEWLKFNKLEKKFEPLNERVSVILKIYELADAGLGRGRIVKHLNTNGYLSFRSPSQGWQTSSVTKLLKNRALIGFYQPFQLAYDEETGKKSREPAGEEIPNYYPSVIDLDLFRRVSTKKYAPTVPLKGRQGESLTNLFTGMTFCKWCEAPMTLTNKGPGSKGGTYLVCSKARRGKDCIYRSWKYEDAEIYILTALRGLDIGSILAGIDLDGRLKEVRNLIAKTAEQLDLDEKKISRYEEELTKSDESPSRTVIKILKALEESVDNGRRRLVLLQSEEIGLDSPMEDAKTFGDKLVKLYDEMETASPQERYLIRVRLRNRISQIVHRIELLPVKRNDPEFIRGAPKTKKYSWSSEMERGS

SEQ ID NO: 14582 - DNA, 50 bp, Xanthomonas dyei
  source 1..50: mol_type = genomic DNA
tttggggtgtaatagttgacataaggctcctatgtgtgtcacattacacc

SEQ ID NO: 14583 - DNA, 40 bp, Xanthomonas dyei
  source 1..40: mol_type = genomic DNA
gcagccggtggccatcacctgctgctggtcggcagccccg

SEQ ID NO: 14584 - DNA, 50 bp, Xanthomonas dyei; identical to SEQ ID NO: 14582
  source 1..50: mol_type = genomic DNA

SEQ ID NO: 14585 - DNA, 40 bp, Xanthomonas dyei
  source 1..40: mol_type = genomic DNA
ggcggcggcggccagcaccggccggtgggcgggagccccg

SEQ ID NO: 14586 - protein, 486 aa, Streptococcus dysgalactiae
MNKVAIYVRVSTTMQAEEGYSIDEQIDKLTSYCKIKDWTVYDIYKDGGFSGGNIERPAMERLISDAKRKRFDTVLVYKLDRLSRSQKDTLYLIEEIFGKNDISFLSLNESFDTSTPFGKAMIGILSVFAQLEREQIKERMLLGKIGRAKSGKSMMVSKVSFGYTYDKLKGELIVNQAEALVVRKIFDEYLGGRSLIKLRDYLNSNGIYRGDKYWNYRGLLLILSNPVYIGMIRYRGEIYPGNHQPIIDTEVFNKTQEEIKKRQIEALEFSNNPRPFRAKYMLSGLAKCGYCGTPLKIILGYKRKDGSRSMRYQCINRFPRNTKGITIYNDNKKCDSGFYEKADIEEFVIAQIRGLQLNSYKLDNMFDKQPIIDVEGIEKQITSLDNKLKRLNDLYLNDMIELDDLKKQTQSLRKQKTMLEDELINNPAIMQDKNKNHFKEILGTKDITTLDYETQKSIVNNLVNKVFVKAGHIKIEWKIPFKKCEF

SEQ ID NO: 14587 - DNA, 50 bp, Streptococcus dysgalactiae
  source 1..50: mol_type = genomic DNA
gtgtgaattttagatactcttatctcaatcaatgtatctaaatatcttaa

SEQ ID NO: 14588 - DNA, 40 bp, Streptococcus dysgalactiae
  source 1..40: mol_type = genomic DNA
acctgccttctttagattctcaatagctgtcaaagcagtt

SEQ ID NO: 14589 - DNA, 50 bp, Streptococcus dysgalactiae
  source 1..50: mol_type = genomic DNA
gtgtgaattttagatactcttatcttaatcaatgtatctaaatatcttaa

SEQ ID NO: 14590 - DNA, 40 bp, Streptococcus dysgalactiae
  source 1..40: mol_type = genomic DNA
atcttccctattctgattcttaatggctgtcaaggaagtt

SEQ ID NO: 14591 - protein, 652 aa, Rhizobium mongolense
MAALDQRPIAYSYIRMSTQQQLKGDSLRRQLDLSEAYVRQHDLILDHSLQDIGVSAWTGANVKTGALGRFLELVHAGRVARGSFLLVESLDRLSRERVIDALEPFLSILRAGIIVVTLADNQVYSAETVGDNFTQLMMSLAIMARAHEESQIKSQRITKAHQRRRENAVNGIGKFSGQMWGWIDQVEVKPNTYEYQLNKHVNVIQKMFELADAGLGCLKIERELTRLGMNGVKGKPVTQGNISSVLKNEAVIGTYQPTHVVEGKKMPYGDPIKDFLPSAISDELYWRVQRNKRKPVIRGRKGVRFANLFAGIACCGHCGHRLMLSIGGTPKQRFTYVQCSRKYKTRDCNYNKGTLRYDVLEKAILDNVTEFQDNDAFSGNSNEARNNLIEAVVKQEEKIAALDKRRASLRATIEFAETDDDRRELAAQMNLRRREVDEAKDVLLQLQTDLQTFDHRKREATEFADRIKIERLLWTTGSSSEVYRSRSRVSLLIGKTITQISVDFQAKQFIVMIGTERAYLFDKTGALLDKYDARQRGYYHTGTRYFAKEVDATGKQWIIAKRPKAFDENTMVSDIPIRTIGEGANKMIAPDVIEARQDRIEAIKRLPESRPVSPLANPRLNDPDVIAIKAKRAAEKEAFERERAGRKTAQHE

SEQ ID NO: 14592 - DNA, 50 bp, Rhizobium mongolense
  source 1..50: mol_type = genomic DNA
aattatgcaattcattattggttgttgcacagctagtgaattacataatt

SEQ ID NO: 14593 - DNA, 40 bp, Rhizobium mongolense
  source 1..40: mol_type = genomic DNA
aaacagtatctgttcgtttttgaacagaaggttgaaaccg

SEQ ID NO: 14594 - DNA, 50 bp, Rhizobium mongolense; identical to SEQ ID NO: 14592
  source 1..50: mol_type = genomic DNA

SEQ ID NO: 14595 - DNA, 40 bp, Rhizobium mongolense
  source 1..40: mol_type = genomic DNA
aaccagtatctgtgagattttcaagggaaggtagaaacct

SEQ ID NO: 14596 - protein, 537 aa, Blautia faecis
MTKQQARLRVRLYARLSKDDGDADKESNSITNQLQMLRYYSKEKGFEIIDEYVDDGYSGTTFNRPDLNRMIEDAMEDTQPSGIMVKDMSRFGRNNAMFMYYVEEIFPNNDILFIALNDDVDTRYEDNEMMPFKSIMNEYYARDTSKKIRSVKKTTALSGGFCGSFAPYGYRVDPNNKRKLLIDPETAPIVKRIFEMSKQGNSVHQIARTLCEEKILIPRAYRAMKNGTLETSTGFRFPTDWVGKNVKMILENQVYLGHMVSHKTQTKSFKNRKLVAVPKEDWIVVKNTHEAIIDEETFELVQKFISVKKRPNKTGRPNMFVGLVKCPDCGRNMAFSNPNGREPRFRCRTYARNSNLCTTHAISYDALVKIVMDDIQKHIKNMETLGDQFIEEMRVLSESGGGKKIKQFKQELELAEKRIAEIDSIIMKLFEQNVAGKISDGRFEKMSVTYENEQRELEERRKALKEKIEAEDYKTKNTNKFLETIRKYENVTELNRSMLVELIDSIYVYQAEGTGKERTQKVEINYRFLCESQCGIA

SEQ ID NO: 14597 - DNA, 50 bp, Blautia faecis
  source 1..50: mol_type = genomic DNA
gtgagtcccaatgtggtattgcatgatggtaatgtaccattgagatacca

SEQ ID NO: 14598 - DNA, 40 bp, Blautia faecis
  source 1..40: mol_type = genomic DNA
gtgcattcatcctttcaatgacggaaatggtaggatgagc

SEQ ID NO: 14599 - DNA, 50 bp, Blautia faecis
  source 1..50: mol_type = genomic DNA
gtgagtcccaatgtggtattgcataatggtaatgtaccattgagatacca

SEQ ID NO: 14600 - DNA, 40 bp, Blautia faecis; identical to SEQ ID NO: 2820
  source 1..40: mol_type = genomic DNA

SEQ ID NO: 14601 - protein, 504 aa, Serratia fonticola
MPQQNNGIAYSYVRFSSKRQELGDSLRRQTEMAEGYATKNGLKLSSKNFQDLGISAFREGKRASLVDMLAAIEEGQISAGSTIIIEALDRLSRRGIDATLETVKEILRKEVQVVSLSDGLLLTKNSLNDLQSVIRIAVAADLAHKESERKAVRLRETKGQQRQAALAGKPINKVLPFWLQRTTDGYELSDKAEIARQIVRLKQEGKGSNMIAKTLNKQGTAGIRASQWNHASITKMLKNPALYGAYQTGETTKERELVKLDLVEGYYPSLISKEDWLLLQSDQSKSKRGRRSADNPYSGLLRCECGGALIKRKHTVKGKLYVYHGCLNAKDGRCSQNISIKGLDGALTTILGRLEFKKKSSLDQSIHQERQLLEKRISDLNSKLQTLDNIPLSVIKSIGTMENRVKEITEQITKDAREQRGIDAVKNEKLSSITDGLELNLLLKRVLKNITVARSGNGWVVKILHLSGHKQNFLMVDGEIKFMSDTIALQKLLAGFREEEETAK

SEQ ID NO: 14602 - DNA, 50 bp, Serratia fonticola
  source 1..50: mol_type = genomic DNA
attttttacatatgtaactacattgtgatattgttacttaatagcaaagg

SEQ ID NO: 14603 - DNA, 40 bp, Serratia fonticola; identical to SEQ ID NO: 5098
  source 1..40: mol_type = genomic DNA

SEQ ID NO: 14604 - DNA, 50 bp, Serratia fonticola
  source 1..50: mol_type = genomic DNA
attttttacatatgtaactacattttgatattgttacttaatagcaaagg

SEQ ID NO: 14605 - DNA, 40 bp, Serratia fonticola
  source 1..40: mol_type = genomic DNA
ctgattggagagctgcttatttatgctgtttgtgcttaac

SEQ ID NO: 14606 - protein, 550 aa, Eubacterium rectale
MKNKKIKCDIYTRVSTTMQVDGYSLDAQKEKLKRYAEFQNMEIVNEYSDEGKSGKSVEGRPEFQRMLDNIENGTDEVQFVLVFKLSRFGRNAADVLNSLQRMQDFGVNLICVEDGIDSSKDSGKLMISVLSAVAEIERENILVQTMEGRKQKAREGKWNGGFAPYGYELVNGELQIAEDEAEIIRLIYDKFIHTNMGISAIAAWLNQHGYKKKKRQNNTLDAFAASFIKGVLDNPVYCGKLAYGRRKNEKVSGTRNEYRIVKQENYMLHDGIHKGIVSETDWELAHQKREKTGVKYEKTHSLDHEHILSGILRCPLCGSGMYGNVNRKKKKDGTLYKDYFYYACKHRRLVDGHKCGYRKQWSEEKINNAVEEVIRKLVKNPKFEEAILNKIGSRIDTEEIEKEIEGLEKQHRQLTGAKARLGQQMDNLDIMDKFYEKKYQDMETRLYRLYDEIEGVENSIEEVKNRLLNIRQQKISEENVYQFLLYFDKLYDKFTDLEKKEFLNSFVEQVDIYEQEQPDGRFLKHIKFRFPVYFGDRETQELCWDNESTV

SEQ ID NO: 14607 - DNA, 50 bp, Eubacterium rectale
  source 1..50: mol_type = genomic DNA
tgttgggacaacgaaagtaccgttgagacggtagttcttttatcccacaa

SEQ ID NO: 14608 - DNA, 40 bp, Eubacterium rectale
  source 1..40: mol_type = genomic DNA
ttctcatacgacgcacgtagaaagtatttgcctcctcgag

SEQ ID NO: 14609 - DNA, 50 bp, Eubacterium rectale; identical to SEQ ID NO: 14607
  source 1..50: mol_type = genomic DNA

SEQ ID NO: 14610 - DNA, 40 bp, Eubacterium rectale
  source 1..40: mol_type = genomic DNA
ttctcataggacatactttgagactatttgcctcctcggt

SEQ ID NO: 14611 - protein, 618 aa, Streptococcus acidominimus; identical to SEQ ID NO: 11111

SEQ ID NO: 14612 - DNA, 50 bp, Streptococcus acidominimus; identical to SEQ ID NO: 11112
  source 1..50: mol_type = genomic DNA

SEQ ID NO: 14613 - DNA, 40 bp, Streptococcus acidominimus
  source 1..40: mol_type = genomic DNA
tgttccttggcgtccctcagatattgtacagcgaaatgga

SEQ ID NO: 14614 - DNA, 50 bp, Streptococcus acidominimus; identical to SEQ ID NO: 11469
  source 1..50: mol_type = genomic DNA

SEQ ID NO: 14615 - DNA, 40 bp, Streptococcus acidominimus
  source 1..40: mol_type = genomic DNA
tgttgcttggcctcccacaattatggcacagtgaacaggg

SEQ ID NO: 14616 - protein, 619 aa, Streptococcus canis
MAGIRTENKIYEVGIYCRLSKDDGTDNESASIATQKSILTDYVKRQGWHLAKTYVDDGYSGTNFQRPSFQNMIKDIENGLINCVITKDLSRLGRNYLDCGLYLEVFFPEHNVRYIAVNDGVDTLNKSAMDITPFRNILNEMYSADVSVKIKSAYRARFQQGKFMGTTAPYGYVKDPADHNHLLIDDKVAHVVREIFDLALAGNGIAKIRKHINKQHILRPAAYAVEQGATGYERYFEDNEENRYIWSENSVRGILRSPIYAGNLAGYKRIAANMKSKKRPSKLPEEWEVIPDTHEGIVTQEEFDTVQQLMTSRRREQNAGGFENIFSGVIKCADCGYAMRAASANRRKRPDIIDCVQYTCNNYGRYGNVMCTAHSIEARDLFNAVLADINRFADMAVNDEKAVRAIERRLTETDQSRAKSLEKEKKKLNKRLAELDRLFSSLYEDKVMERITERNFEMMSGKYQKEQLEIEARLKEVTETLNDSYEKSQGVRDFLSLIRNYQGLKELDATIINALIDKILVSEREKLADGTVRQEIKIYYKFIGFVGELHITPTKRWTALKPKNCTVCGVEYVPSSGISKYCPACAKRIQREKSNESKRRSRERNRRACIELSAKNDRL

SEQ ID NO: 14617 - DNA, 50 bp, Streptococcus canis; identical to SEQ ID NO: 11112
  source 1..50: mol_type = genomic DNA

SEQ ID NO: 14618 - DNA, 40 bp, Streptococcus canis; identical to SEQ ID NO: 14613
  source 1..40: mol_type = genomic DNA

SEQ ID NO: 14619 - DNA, 50 bp, Streptococcus canis; identical to SEQ ID NO: 11469
  source 1..50: mol_type = genomic DNA

SEQ ID NO: 14620 - DNA, 40 bp, Streptococcus canis; identical to SEQ ID NO: 14615
  source 1..40: mol_type = genomic DNA

SEQ ID NO: 14621 - protein, 539 aa, Faecalitalea cylindroides
MLRQATQNLITALYPRLSHEDELQGESNSISNQKRILEAYAKQNGFTNLRWYTDDGYSGANFQRPGFQAMLADIEAGKVGTVIVKDMSRLGRNYLQVGFYTEMLFPQKGVRFIAVNDNVDSANGGMDNDFTPLRNLFNEWLVRDTSKKIKAVKKAKGMSGKPVTSKPVYGYLMDKDENYIVDEEAAPVVRQIYQLCLVGNGPTKIARMLTEQQIPTPGTLEYRRTGSTRRYHPGYECKWATNTVVHLLENREYTGCLVNFKTEKPSYKVKHSVENPIEKQAIFPNHHEPIIDTETWERVQELRKQRKRPNRYDEVGLFSGMLFCADCGHVLYQQRYQNKNRKQDCYICGSYKKRTRDCTAHFIRTDLLTAGVLSNLRQVTEYAARHESRFVKLLIQQNEIGGKRKTAAATKQLEQAQTRIAEVNRIIKRLYEDNVSGKISDERFMELSADYEQEQRELKDRAAALQEELSKSQAATVNAEKFMGIVRKHLAFEELTPTLLREMIEKIVVHECSYDENGTRRQDIEIYYSFVGKIDLPEA

SEQ ID NO: 14622 - DNA, 50 bp, Faecalitalea cylindroides
  source 1..50: mol_type = genomic DNA
ttacttctttatcgcacattagcaaatgctcatgtacggtaaagaagcaa

SEQ ID NO: 14623 - DNA, 40 bp, Faecalitalea cylindroides
  source 1..40: mol_type = genomic DNA
ctaagataatacctttttcaaaggcaatggtttcaaaaga

SEQ ID NO: 14624 - DNA, 50 bp, Faecalitalea cylindroides
  source 1..50: mol_type = genomic DNA
ttacttctttatcgcacattagcatgtgctcatgtacggtaaagaagcaa

SEQ ID NO: 14625 - DNA, 40 bp, Faecalitalea cylindroides
  source 1..40: mol_type = genomic DNA
ccgagttaataccttcttttgatggaatagtttcaaaaca

SEQ ID NO: 14626 - protein, 513 aa, Dorea longicatena
MHNYVIALYIRLSVEDFKTESLSIPNQKLILREKAMSLSEWDNSEILEFIDNGHTGTNFERPAVQELLTMVQAGKINCIIVKDLSRFGRNSIETGYFIERVFPLYHTRFISVSDDFDTANFKGDTGGIDIAFKYLISECYSRDMSMKTKSAKYAKMRRGEYQSVICPYGYRKSADGRMEPDEDVAPNVQMIFQWASEGNTAAEITRRLYAMNIPTPGEYRKLKGKDYYNVSRTNGVWSTSTVLRILEDQRYIGTYVIGKRKVKEIGSRHTQLKDESEWFKIPNHHPAIVSVDLFEKANASIKRFSLSNKKPRDYLLRGKVFCGCCDHAMSLRNGAWFYCRHSEVAETLPCHGVRIKMADLEQVVFETIRAQMCPALGIDSNKDKLDLQTVQQAEHEEKLRSIQDSKRHLYEQYALGEIDLETYRTRKAVYDTELVQAKNVHAVITAQTKQIKSDYEIKLKQQEIVQEVGNANMLTKALIDRLINKVYVFPGNRIEIEYATQDFLETKESEKEV

SEQ ID NO: 14627 - DNA, 50 bp, Dorea longicatena
  source 1..50: mol_type = genomic DNA
tttgtcgtgggcttgacatacgggtgccgttacggtataataacgacaaa

SEQ ID NO: 14628 - DNA, 40 bp, Dorea longicatena
  source 1..40: mol_type = genomic DNA
aagcagggaagcatgcgaatgtctcagggcatgaattttg

SEQ ID NO: 14629 - DNA, 50 bp, Dorea longicatena
  source 1..50: mol_type = genomic DNA
tttgtcgtgggcttgacatacgggggccgttacggtataataacgacaaa

SEQ ID NO: 14630 - DNA, 40 bp, Dorea longicatena
  source 1..40: mol_type = genomic DNA
acccagagagggatgcgaaggtcctagggcatgaatcttc

SEQ ID NO: 14631 - protein, 562 aa, Pseudomonas syringae
MRRRTPVYAYIRMSTLEQAKGDSERRQLGQIERFLQENNGELVEPVFLDRLSSFNGKNIKKGAIKDFLEKVKNGQIEKGSILVIESFDRISRQGGYIAHSVILDIIKNGVDIATLSPYKRYSINSDNQFIEGIEIQTLLYRAHEESRTKSERITIQHEARREKAKDKKIVYGSLPFWLVRTEDWIEFREPEASDVKLCLSLLKTYGMYTATAKVNEQRRSSKPFTKETVSHLLNRSAVCGDLQTHRIEYDDNGNKIRVPGEVIHDYYPALITRSEFEELRAEIQNRKTSNTRGRVSGFKNIFRNVMTCDSCFAPMRLAHMKWKGGEKKYLICTKSETNQCAESGRVWFDYDDVERVFFREINLSILKQSLTQRAVFNDEEVEKLRSGFLKTEEQKANILKAIEMGTVSKALVNRLEALEKLSDETQKRIDEIKAENALKRSQNEADTFDYEQLDAALNDEEQRAVINKILRTNTSKISISKCEVGYDFVIDISINDKLETQILYNKNDDFINRYEFDSPQNQSSDLVIHEDQTDPYADEEIELFDPTTMPIINIDQHKKSPD

SEQ ID NO: 14632 - DNA, 50 bp, Pseudomonas syringae
  source 1..50: mol_type = genomic DNA
gctatacgaattgactgtgcctgcatgcaggcgtaacctattcgtatagc

SEQ ID NO: 14633 - DNA, 40 bp, Pseudomonas syringae
  source 1..40: mol_type = genomic DNA
gaccatgccgctggcctgcatgtaggcataacagatggtc

SEQ ID NO: 14634 - DNA, 50 bp, Pseudomonas syringae
  source 1..50: mol_type = genomic DNA
gctatacgaattgactgtgcctgcaagcaggcgtaacctattcgtatagc

SEQ ID NO: 14635 - DNA, 40 bp, Pseudomonas syringae
  source 1..40: mol_type = genomic DNA
gagcatggcgctggcatgcaaagatgaataaaatatggtc

SEQ ID NO: 14636 - protein, 554 aa, Streptococcus vestibularis
MNKSTLTIEEWTSLNFENLTNITVLYCRLSAEDAKEGESNSISNQKQILTQVSQREGLTNPVFFVDDGFSGSNAQRPAFQQAMNLVQAGRVSNFVVKDLSRLSRDYLLSGQLTEITFPSKNIRFISLNENLDSSKRSSQDAYLAPLVSLFNNWYSLQCSEKIKLSKHTKAKTGEKIGWVAPYGYLKNPENPKEWLVDDYASQIVKRVFKEYLSGKPIASIANGLRRDKILTPANYKKKLGVSNYRVLESDPYHWKSQMICQMLEKEEYTGATINLKTAKVSYKQRNCRLRPREDWLIFPDTHEAIISKEDFALARKMLGHKRVVRRNNWKDKPGHENIFAGLVFCENGHKLTFCPQQKVDVNLDHYKCSYYERVGKTCSGSHYLRKEILEELILDDFNQIISTLELSEESLLEKLKAKFNIQESKKQNSLRKTLLKAEKRAEELDTIIQRLYEKQLLGDIRDERFRKLADGYEDEQAQLTQQILESREVLDSEIESAGNIEKFLRTIRNYTKLEKLTPQILNELIDKIVVHQPTGRGKSRQVRIELHYRFIGEI

SEQ ID NO: 14637 - DNA, 50 bp, Streptococcus vestibularis; identical to SEQ ID NO: 9392
  source 1..50: mol_type = genomic DNA

SEQ ID NO: 14638 - DNA, 40 bp, Streptococcus vestibularis
  source 1..40: mol_type = genomic DNA
caatatactcatgttaccattataccaaaaaaatgctata

SEQ ID NO: 14639 - DNA, 50 bp, Streptococcus vestibularis
  source 1..50: mol_type = genomic DNA
ggactgctggggaaggtgtggatatgataccatactccagccagcagtcc

SEQ ID NO: 14640 - DNA, 40 bp, Streptococcus vestibularis
  source 1..40: mol_type = genomic DNA
gaatatactcatgtaaacatgatataaacaaagtgattta

SEQ ID NO: 14641 - protein, 548 aa, Ezakiella massiliensis
MIQTNSNHFSYRTAIYCRLSKDDEQKGESASIQNQRDMLEHYVKARGWNIADVYVDDGYTGLNTNRPSFQRLIKDVEERKIDIVITKDLSRLGRNYLQTGYYTENFFPKNGVRYIAVNDGVDTLQDNNEIVPFKNVLNEFYSRDVSKKMKSAYLTRARQGKFTGCLAPFGYMKNPDDTYSLMVDEETSWIVEKIYDLAISGYGVQAIRRILFDEKIPTPTWWNRKKGLRNVFTKLEKTVKDGEYWWDCTTIKEIIENPVYLGHTASQKANYQFKIGWLSDKPKDDWIVVENTHEPIVSEDTYKMANEKIESRKRPFKTGEESIFAGLVKCPDCGKALNLGRNNSKKKEKILTCNTYRRYGKNLCTQHRIYFDTLYEIVLADIRKNADFALKDEKEVLKALEKSRDTENEEEQIYIAKKIEEDSKRVAELGNKIEKLYDDWINKKISESNFQRILEKSQDEQELLTKRIEEMERKVVTSRVDENGVYKWIELIKKHKNIKKLDKETLNELISKIYVHEKEVVDGEITQIIEIHYNFIGNTDSLQVSYNL

SEQ ID NO: 14642 - DNA, 50 bp, Ezakiella massiliensis
  source 1..50: mol_type = genomic DNA
tacaatctctaattagccataaagcaatttatggcgaaataaagacggaa

SEQ ID NO: 14643 - DNA, 40 bp, Ezakiella massiliensis
  source 1..40: mol_type = genomic DNA
taaatctcaaggcattaagcagcttatggctggaggggga

SEQ ID NO: 14644 - DNA, 50 bp, Ezakiella massiliensis
  source 1..50: mol_type = genomic DNA
tacaatctctaattagccataaagaaatttatggcgaaataaagacggaa

SEQ ID NO: 14645 - DNA, 40 bp, Ezakiella massiliensis; identical to SEQ ID NO: 2905
  source 1..40: mol_type = genomic DNA

SEQ ID NO: 14646 - protein, 548 aa, Streptococcus agalactiae
MIQTNSNHFSFKAAIYCRLSKDDEQKGESASIQNQKELLENYVKSRGWSIYDVYIDDGYTGLNTNRPSFQRLIRDIENKKVDIVITKDLSRLGRNYLQTGYYTENFFPKNNVRYIALNDGVDTFQENNEIVPFKNVLNEFYSRDVSKKMKSAYMTRARQGKFIGCLAPIGYRKDNEDPHKLVIDDETSWIVEKIFDLAFSGYGVQAIRRRLFEEKIPTPTWWNRKKGLRNKKTKLEMTVDGGEYWWDCTTLKEIIENPVYIGHIASQKVNYKFKVGWLSDKPKEEWIIVENTHEPIISEDIYNIANEKLKSRRRPFKNGEESIFAGIVKCPDCGKSLNLGRNKSKKREKLLTCNTYRRYGKSLCSQHRIYYDTLYEIVLKDIRKNAEIALKDEKEIIKALEKSREIDNEEEQKFIMDKIYEDQIRVEDLTKKIERLYDDWLENKISESNFQKILEKSQKEQDYLNQRIEDNQKLIVKEDLEDINVKKWIELIKKHKDIKKLDKETLNELISKIYVHEKEVVNGEITQTIDIYYNFIGNTDTLQVFYNL

SEQ ID NO: 14647 - DNA, 50 bp, Streptococcus agalactiae; identical to SEQ ID NO: 2902
  source 1..50: mol_type = genomic DNA

SEQ ID NO: 14648 - DNA, 40 bp, Streptococcus agalactiae
  source 1..40: mol_type = genomic DNA
taaatctcaaggtattaagcagcttatggctggtggggga

SEQ ID NO: 14649 - DNA, 50 bp, Streptococcus agalactiae; identical to SEQ ID NO: 2904
  source 1..50: mol_type = genomic DNA

SEQ ID NO: 14650 - DNA, 40 bp, Streptococcus agalactiae; identical to SEQ ID NO: 2905
  source 1..40: mol_type = genomic DNA

SEQ ID NO: 14651 - protein, 548 aa, Streptococcus agalactiae; identical to SEQ ID NO: 2696

SEQ ID NO: 14652 - DNA, 50 bp, Streptococcus agalactiae; identical to SEQ ID NO: 2902
  source 1..50: mol_type = genomic DNA

SEQ ID NO: 14653 - DNA, 40 bp, Streptococcus agalactiae; identical to SEQ ID NO: 14648
  source 1..40: mol_type = genomic DNA

SEQ ID NO: 14654 - DNA, 50 bp, Streptococcus agalactiae; identical to SEQ ID NO: 2904
  source 1..50: mol_type = genomic DNA

SEQ ID NO: 14655 - DNA, 40 bp, Streptococcus agalactiae; identical to SEQ ID NO: 2905
  source 1..40: mol_type = genomic DNA

SEQ ID NO: 14656 - protein, 548 aa, Streptococcus agalactiae
MIQANSNHFSYRTAIYCRLSKDDEQKGESASIQNQRDMLEHYVKAKGWNIVDVYVDDGYTGLNTNRPSFQRLIKDVENKKIDIVITKDLSRLGRNYLQTGYYTENFFPKNGVRYIAVNDGVDTLQDNNEIVPFKNVLNEFYSRDVSKKMKSAYLTRARQGKFTGCLAPFGYMKNPDDTHTLMIDEETSWIVEKIYDFAISGYGVQAIRRILFDEKIPTPTWWNRKKGLRNKTTKLEQTVKGGEYWWDCTTIKEIIENPVYLGHTASQKANYQFKIGWLSDKPKNDWIVVENTHEAIISKDTYNMANEKLQSRKRPFKTGEESIFAGLVKCPDCGKALNLGRNKSKKKEKILTCNTYRRYGKNLCSQHRIYFDTLYEIVLADIRKNADFALNDEKAVVKALEKSRDSEAEEEQIYIAKKIEEDSKRVVELSNKIEKLYDDWMDKRISETNFQRILEKAQAEQDLLTKRIEEMEKKVVTSKVDEVNVYKWIELIKKHKNIKKLDKETLNELISKIYVHEKEVVDGEITQIIEIHYNFIGNTDNLQVSYNL

SEQ ID NO: 14657 - DNA, 50 bp, Streptococcus agalactiae
  source 1..50: mol_type = genomic DNA
tacaatctctaattaggcataaagcaatttatggcaaagtaaagacggaa

SEQ ID NO: 14658 - DNA, 40 bp, Streptococcus agalactiae; identical to SEQ ID NO: 14648
  source 1..40: mol_type = genomic DNA

SEQ ID NO: 14659 - DNA, 50 bp, Streptococcus agalactiae
  source 1..50: mol_type = genomic DNA
tacaatctctaattaggcataaagaaatttatggcaaagtaaagacggaa

SEQ ID NO: 14660 - DNA, 40 bp, Streptococcus agalactiae; identical to SEQ ID NO: 2905
  source 1..40: mol_type = genomic DNA

SEQ ID NO: 14661 - protein, 548 aa, Streptococcus agalactiae
MIQTNSNHFSFKAAIYCRLSKDDEQKGESASIQNQKELLENYVKSRGWSIYDVYIDDGYTGLNTNRPSFQRLIRDIENKKVDIVITKDLSRLGRNYLQTGYYTENFFPKNNVRYIALNDGVDTFQENNEIVPFKNVLNEFYSRDVSKKMKSAYMTRARQGKFIGCLAPIGYRKDNDDPHKLVIDDETSWIVEKIFDLAFSGYGVQAIRRRLFEEKIPTPTWWNRKKGLRNKKTKLEMTVDGGEYWWDCTTLKEIIENPVYIGHIASQKVNYKFKVGWLSDKPKEEWIIVENTHEPIISEDIYNIANEKLKSRRRPFKNGEESIFAGIVKCPDCGKSLNLGRNKSKKREKLLTCNTYRRYGKSLCSQHRIYYDTLYEIVLKDIRKNAEIALKDEKEIIKALEKSREIDNEEEQKFIMDKIYEDQIRVEDLTKKIERLYDDWLDNKISESNFQKILEKSQKEQDYLNQRIEDNQKLIVKEDLEDINVKKWIELIKKHKDIKRLDKETLNELISKIYVHEKEVVNGEITQTIDIYYNFIGNTDTLQVFYNL

SEQ ID NO: 14662 - DNA, 50 bp, Streptococcus agalactiae; identical to SEQ ID NO: 2902
  source 1..50: mol_type = genomic DNA

SEQ ID NO: 14663 - DNA, 40 bp, Streptococcus agalactiae; identical to SEQ ID NO: 14648
  source 1..40: mol_type = genomic DNA

SEQ ID NO: 14664 - DNA, 50 bp, Streptococcus agalactiae; identical to SEQ ID NO: 2904
  source 1..50: mol_type = genomic DNA

SEQ ID NO: 14665 - DNA, 40 bp, Streptococcus agalactiae; identical to SEQ ID NO: 2905
  source 1..40: mol_type = genomic DNA

SEQ ID NO: 14666 - protein, 548 aa, Streptococcus agalactiae
MIQTNSNHFSFKAAIYCRLSKDDEQKGESASIQNQKELLENYVKSKGWSIYDVYIDDGYTGLNTNRPSFQRLINDIENKKVDIVITKDLSRLGRNYLQTGYYTENFFPKNNVRYIALNDGVDTFQENNEIVPFKNVLNEFYSRDVSKKMKSAYMTRARQGKFIGCLAPIGYRKDNDNPHKLVIDDETSWIVEKIFDLAFSGYGVQAIRRRLFEEKIPTPTWWNRKKGLRNKKTKLEMTVDGGEYWWDCTTLKEIIENPVYIGHIASQKVNYKFKVGWLSDKPKEEWIIVENTHEPIISEDIYNIANEKLKSRRRPFKNGEESIFAGIVKCPDCGKSLNLGRNKSKKREKLLTCNTYRRYGKSLCSQHRIYYDTLYEIVLKDIRKNAEIALKDEKEIIKALEKSREIDNEEEQKFIMDKIYEDQIRVEDLTKKIERLYDDWLDNKISESNFQKILEKSQKEQDYLNQRIEDNQKLIVKEDLEDINVKKWIELIKKHKDIKKLDKETLNELISKIYVHEKEIVNGEITQTIDIYYNFIGNTDTLQVFYNL

SEQ ID NO: 14667 - DNA, 50 bp, Streptococcus agalactiae; identical to SEQ ID NO: 2902
  source 1..50: mol_type = genomic DNA

SEQ ID NO: 14668 - DNA, 40 bp, Streptococcus agalactiae; identical to SEQ ID NO: 14648
  source 1..40: mol_type = genomic DNA

SEQ ID NO: 14669 - DNA, 50 bp, Streptococcus agalactiae; identical to SEQ ID NO: 2904
  source 1..50: mol_type = genomic DNA

SEQ ID NO: 14670 - DNA, 40 bp, Streptococcus agalactiae; identical to SEQ ID NO: 2905
  source 1..40: mol_type = genomic DNA

SEQ ID NO: 14671 - protein, 548 aa, Streptococcus agalactiae
MIQTNSNQFSFKAAIYCRLSKDDEQKGESASIQNQKELLENYVKSRGWSIYDVYIDDGYTGLNTNRPSFQRLIRDIENKKVDIVITKDLSRLGRNYLQTGYYTENFFPKNNVRYIALNDGVDTFQENNEIVPFKNVLNEFYSRDVSKKMKSAYMTRARQGKFIGCLAPIGYRKDNDDPHKLVIDDETSWIVEKIFELAFSGYGVQAIRRRLFEEKIPTPTWWNRKKGLRNKKTKLEMTVDGGEYWWDCTTLKEIIENPVYIGHIASQKVNYKFKVGWLSDKPKEEWIIVENTHEPIISEDIYNIANEKLKSRRRPFKNGEESIFAGIVKCPDCGKSLNLGRNKSKKREKLLTCNTYRRYGKSLCSQHRIYYDTLYEIVLKDIRKNAEIALKDEKEIIKALEKSREVDNEEEQKFIMDKIYEDQIRVEDLTKKIERLYDDWLENKISESNFQKILEKSQKEQDYLNQRIEDNQKLIVKEDLEDINVKKWIELIKKHKDIKKLDKETLNELISKIYVHEKEVVNGEITQTIDIYYNFIGNTDTLQVFYNL

SEQ ID NO: 14672 - DNA, 50 bp, Streptococcus agalactiae; identical to SEQ ID NO: 2902
  source 1..50: mol_type = genomic DNA

SEQ ID NO: 14673 - DNA, 40 bp, Streptococcus agalactiae; identical to SEQ ID NO: 14648
  source 1..40: mol_type = genomic DNA

SEQ ID NO: 14674 - DNA, 50 bp, Streptococcus agalactiae; identical to SEQ ID NO: 2904
  source 1..50: mol_type = genomic DNA

SEQ ID NO: 14675 - DNA, 40 bp, Streptococcus agalactiae; identical to SEQ ID NO: 2905
  source 1..40: mol_type = genomic DNA

SEQ ID NO: 14676 - protein, 548 aa, Streptococcus agalactiae
MIQTNSNHLSFKAAIYCRLSKDDEQKGESASIQNQKELLENYVKSRGWSIYDVYIDDGYTGLNTNRPSFQRLIRDIENKKVDIVITKDLSRLGRNYLQTGYYTENFFPKNNVRYIALNDGVDTFQENNEIVPFKNVLNEFYSRDVSKKMKSAYMTRARQGKFIGCLAPIGYRKDNDDPHKLVIDDETSWIVEKIFDLAFSGYGVQAIRRRLFEEKIPTPTWWNRKKGLRNKKTKLEMTVDGGEYWWDCTTLKEIIENPVYIGHIASQKVNYKFKVGWLSDKPKEEWIIVENTHEPIISEDIYNVANEKLKSRRRPFKNGEESIFAGIVKCPDCGKSLNLGRNKSKKREKLLTCNTYRRYGKSLCSQHRIYYDTLYEIVLKDIRKNAEIALKDENEIIKALEKSREIDNEEEQKFIIDKIYEDQIRVEDLTKKIERLYDDWLDNKISESNFQKILEKSQKEQDYLNQRIEDNQKLIVKEDLEDINVKKWIELIKKHKDIKKLDKETLNELISKIYVHEKEVVNGEITQTIDIYYNFIGNTDTLQVFYNL

SEQ ID NO: 14677 - DNA, 50 bp, Streptococcus agalactiae; identical to SEQ ID NO: 2902
  source 1..50: mol_type = genomic DNA

SEQ ID NO: 14678 - DNA, 40 bp, Streptococcus agalactiae; identical to SEQ ID NO: 14648
  source 1..40: mol_type = genomic DNA

SEQ ID NO: 14679 - DNA, 50 bp, Streptococcus agalactiae; identical to SEQ ID NO: 2904
  source 1..50: mol_type = genomic DNA

SEQ ID NO: 14680 - DNA, 40 bp, Streptococcus agalactiae; identical to SEQ ID NO: 2905
  source 1..40: mol_type = genomic DNA

SEQ ID NO: 14681 - protein, 548 aa, Streptococcus agalactiae
MIQTNSNHLSFKAAIYCRLSKDDEQKGESASIQNQKELLENYVKSRSWSIYDVYIDDGYTGLNTNRPSFQRLIRDIENKKVDIVITKDLSRLGRNYLQTGYYTENFFPKNNVRYIALNDGVDTFQENNEIVPFKNVLNEFYSRDVSKKMKSAYMTRARQGKFIGCLAPIGYRKDNDDPHKLVIDDETSWIVEKIFDLAFSGYGVQAIRRRLFEEKIPTPTWWNRKKGLRNKKTKLEMTVDGGEYWWDCTTLKEIIENPVYIGHIASQKVNYKFKVGWLSDKPKEEWIIVENTHEPIISEDIYNVANEKLKSRRRPFKNGEESIFAGIVKCPDCGKSLNLGRNKSKKREKLLTCNTYRRYGKSLCSQHRIYYDTLYEIVLKDIRKNAEIALKDENEIIKALEKSREIDNEEEQKFIIDKIYEDQIRVEDLTKKIERLYDDWLDNKISESNFQKILEKSQKEQDYLNQRIEDNQKLIVKEDLEDINVKKWIELIKKHKDIKKLDKETLNELISKIYVHEKEVVNGEITQTIDIYYNFIGNTDTLQVFYNL

SEQ ID NO: 14682 - DNA, 50 bp, Streptococcus agalactiae; identical to SEQ ID NO: 2902
  source 1..50: mol_type = genomic DNA

SEQ ID NO: 14683 - DNA, 40 bp, Streptococcus agalactiae; identical to SEQ ID NO: 14648
  source 1..40: mol_type = genomic DNA

SEQ ID NO: 14684 - DNA, 50 bp, Streptococcus agalactiae; identical to SEQ ID NO: 2904
  source 1..50: mol_type = genomic DNA

SEQ ID NO: 14685 - DNA, 40 bp, Streptococcus agalactiae; identical to SEQ ID NO: 2905
  source 1..40: mol_type = genomic DNA

SEQ ID NO: 14686 - protein, 548 aa, Streptococcus agalactiae
MIQTNSNHFSFKAAIYCRLSKDDEQKGESASIQNQKELLENYVKSRGWSIYDVYIDDGYTGLNTNRPSFQRLIRDIENKKVDIVITKDLSRLGRNYLQTGYYTENFFPKNNVRYIALNDGVDTFQENNEIVPFKNVLNEFYSRDVSKKMKSAYMTRARQGKFIGCLAPIGYRKDNDDPHKLVIDDETSWIVEKIFDLAFSGYGVQAIRRRLFEEKIPTPTWWNRKKGLRNKKTKLEMTVDGGEYWWDCTTLKEIIENPVYIGHIASQKVNYKFKVGWLSDKPKEEWIIVENTHEPIISEDIYNIANEKLKSRRRPFKNGEESIFAGIVKCPDCGKSLNLGRNKSKKREKLLTCNTYRRYGKSLCSQHRIYYDTLYEIVLKDIRKNAEIALKDEKEIIKALEKSREIDNEEEQKFIMDKIYEDQIRVEDLTKKIERLYDDWLDNKISESNFQKILEKSQNEQDYLNQRIEDNQKLIVKEDLEDINVKKWIELIKKHRDIKKLDKETLNELISKIYVHEKEVVNGEITQTIDIYYNFIGNTDTLQVFYNL

SEQ ID NO: 14687 - DNA, 50 bp, Streptococcus agalactiae; identical to SEQ ID NO: 2902
  source 1..50: mol_type = genomic DNA

SEQ ID NO: 14688 - DNA, 40 bp, Streptococcus agalactiae; identical to SEQ ID NO: 14648
  source 1..40: mol_type = genomic DNA

SEQ ID NO: 14689 - DNA, 50 bp, Streptococcus agalactiae; identical to SEQ ID NO: 2904
  source 1..50: mol_type = genomic DNA

SEQ ID NO: 14690 - DNA, 40 bp, Streptococcus agalactiae; identical to SEQ ID NO: 2905
  source 1..40: mol_type = genomic DNA

SEQ ID NO: 14691 - protein, 548 aa, Streptococcus agalactiae
MIQTNSNHFSFKAAIYCRLSKDDEQKGESASIQNQKELLENYVKSKGWSIYDVYIDDGYTGLNTNRPSFQRLIRDIENKKVDIVITKDLSRLGRNYLQTGYYTENFFPKNNVRYIALNDGVDTFQENNEIVPFKNVLNEFYSRDVSKKMKSAYMTRARQGKFIGCLAPIGYRKDNDDPHKLVIDDETSWIVEKIFDLAFSGYGVQAIRRRLFEEKIPTPTWWNRKKGLRNKKTKLEMTVDGGEYWWDCTTLKEIIENPVYIGHIASQKVNYKFKVGWLSDKPKEEWIIVENTHEPIISEDIYNIANEKLKSRRRPFKNGEESIFAGIVKCPDCGKSLNLGRNKSKKREKLLTCNTYRRYGKSLCSQHRIYYDTLYEIVLKDIRKNAEIALKDEKEIIKALEKSREVDNEEEQKFIMDKIYEDQIRVEDLTKKIERLYDDWLDNKISESNFQNILEKSQNEQDYLNQRIEDNQKLIVKDDLEDINVKKWIELIKKHRDIKKLDKETLNELISKIYVHEKEVVNGEITQTIDIYYNFIGNTDTLQVFYNL

SEQ ID NO: 14692 - DNA, 50 bp, Streptococcus agalactiae; identical to SEQ ID NO: 2902
  source 1..50: mol_type = genomic DNA

SEQ ID NO: 14693 - DNA, 40 bp, Streptococcus agalactiae; identical to SEQ ID NO: 14648
  source 1..40: mol_type = genomic DNA

SEQ ID NO: 14694 - DNA, 50 bp, Streptococcus agalactiae; identical to SEQ ID NO: 2904
  source 1..50: mol_type = genomic DNA

SEQ ID NO: 14695 - DNA, 40 bp, Streptococcus agalactiae; identical to SEQ ID NO: 2905
  source 1..40: mol_type = genomic DNA

SEQ ID NO: 14696 - protein, 548 aa, Streptococcus agalactiae
MIQTNSNHFSFKAAIYCRLSKDDEQKGESASIQNQKELLENYVKSKGWSIYDVYIDDGYTGLNTNRPSFQRLIRDIENKKVDIVITKDLSRLGRNYLQTGYYTENFFPKNNVRYIALNDGVDTFQENNEIVPFKNVLNEFYSRDVSKKMKSAYMTRARQGKFIGCLAPIGYRKDNDDPHKLVIDDETSWIVEKIFDLAFSGYGVQAIRRRLFEEKIPTPTWWNRKKGLRNKKTKLEMTVDGGEYWWDCTTLKEIIENPVYIGHIASQKVNYKFKVGWLSDKPKEEWIIVENTHEPIISEDIYNIANEKLKSRRRPFKNGEESIFAGIVKCPDCGKSLNLGRNKSKKREKLLTCNTYRRYGKSLCSQHRIYYDTLYEIVLKDIRKNAEIALKDEKEIIKALEKSREIDNEEEQKFIMDKIYEDQIRVEDLTKKIERLYDDWLDNKISESNFQKILEKSQNEQDYLNQRIEDNQKLIVKEDLEDINVKKWIELIKKHRDIKKLDKETLNELISKIYVHEKEIVNGEITQTIDIYYNFIGNTDTLQVFYNL

SEQ ID NO: 14697 - DNA, 50 bp, Streptococcus agalactiae; identical to SEQ ID NO: 2902
  source 1..50: mol_type = genomic DNA

SEQ ID NO: 14698 - DNA, 40 bp, Streptococcus agalactiae; identical to SEQ ID NO: 14648
  source 1..40: mol_type = genomic DNA

SEQ ID NO: 14699 - DNA, 50 bp, Streptococcus agalactiae; identical to SEQ ID NO: 2904
  source 1..50: mol_type = genomic DNA

SEQ ID NO: 14700 - DNA, 40 bp, Streptococcus agalactiae; identical to SEQ ID NO: 2905
  source 1..40: mol_type = genomic DNA

SEQ ID NO: 14701 - protein, 548 aa, Streptococcus agalactiae
MIQTNSNHLSFKAAIYCRLSKDDEQKGESASIQNQKELLENYVKSRGWSIYDVYIDDGYTGLNTNRPSFQRLIRDIENKKVDIVITKDLSRLGRNYLQTGYYTENFFPKNNVRYIALNDGVDTFQENNEIVPFKNVLNEFYSRDVSKKMKSAYMTRARQGKFIGCLAPIGYRKDDEDPHKLVIDDETSWIVEKIFDLAFSGYGVQAIRRRLFEEKIPTPTWWNRKKGLRNKKTKLEMTVDGGEYWWDCTTLKEIIENPVYIGHIASQKVNYKFKVGWLSDKPKEEWIIVENTHEPIISEDIYNVANEKLKSRRRPFKNGEESIFAGIVKCPDCGKSLNLGRNKSKKREKLLTCNTYRRYGKSLCSQHRIYYDTLYEIVLKDIRKNAEIALKDENEIIKALEKSREIDNEEEQKFIIDKIYEDQIRVEDLTKKIERLYDDWLDNKISESNFQKILEKSQKEQDYLNQRIEDNQKLIVKEDLEDINVKKWIELIKKHRDIKKLDKETLNELISKIYVHEKEVVNGEITQTIDIYYNFIGNTDTLQVFYNL

SEQ ID NO: 14702 - DNA, 50 bp, Streptococcus agalactiae; identical to SEQ ID NO: 2902
  source 1..50: mol_type = genomic DNA

SEQ ID NO: 14703 - DNA, 40 bp, Streptococcus agalactiae; identical to SEQ ID NO: 14648
  source 1..40: mol_type = genomic DNA

SEQ ID NO: 14704 - DNA, 50 bp, Streptococcus agalactiae; identical to SEQ ID NO: 2904
  source 1..50: mol_type = genomic DNA

SEQ ID NO: 14705 - DNA, 40 bp, Streptococcus agalactiae; identical to SEQ ID NO: 2905
  source 1..40: mol_type = genomic DNA

SEQ ID NO: 14706 - protein, 546 aa, Streptococcus pyogenes
MQSDFQTNRVAIYCRLSKDDEFKKGESASIQNQRDMLIDYCKQRNWTIADIYVDDGYTGLNIDRPDFQRMLVDIKAKKIDTVITKDLSRLGRNYLQTGKFTEEFFPKNGVRYIAVNDGVDTNQDNNEIVPFKNVLNEFYSRDVSKKMKSAYYTRAKQGKFTGCLAPFGYKKDENNPHLLVIDEETSWIVEKIFDYTARGYGVQYIRTLLREEKIPTPTWWNRKKGLRNAVTKWEKTMEGGEYVWDCTTLTEMIQNPVYLGHIASQKANYKFKIGWISDKPQEEWLVVEDMHEALIDEDTFEIANEKLKSRKRPFKTGELSLFAGLIKCPDCGKSLNLARNNSKKKEKLFTCNTYRRYGKDFCSQHRIMYDEVYRVVLEDIRSNAKLALKDEKEVLKILELNQEEELDSQVVLAGQMIEEDSLRYKELETKVERLYDDWIDKRINETNFNRLMEKTQKEQDILLERIKVNEKKIKNSESRDINISKWIESIKKYQNIKKLDRHILNELIDKIFVYEKEIIDGEVVQTVEIFYNFLLNTKELNIKYHL

SEQ ID NO: 14707 - DNA, 50 bp, Streptococcus pyogenes
  source 1..50: mol_type = genomic DNA
taccacctctaagtaggcataaagcaattgatggctaaataaagagggca

SEQ ID NO: 14708 - DNA, 40 bp, Streptococcus pyogenes; identical to SEQ ID NO: 14648
  source 1..40: mol_type = genomic DNA

SEQ ID NO: 14709 - DNA, 50 bp, Streptococcus pyogenes
  source 1..50: mol_type = genomic DNA
taccacctctaagtaggcataaagaaattgatggctaaataaagagggca

SEQ ID NO: 14710 - DNA, 40 bp, Streptococcus pyogenes; identical to SEQ ID NO: 2905
  source 1..40: mol_type = genomic DNA

SEQ ID NO: 14711 - protein, 548 aa, Anaerococcus vaginalis
MIQTNSNHFSFKAAIYCRLSKDDEQKGESASIQNQKELLENYVKSRGWSIYDVYIDDGYTGLNTNRPSFQRLIRDIENKKVDIVITKDLSRLGRNYLQTGYYTENFFPKNNVRYIALNDGVDTFQENNEIVPFKNVLNEFYSRDVSKKMKSAYMTRARQGKFIGCLAPIGYRKDNEDPHKLVIDDETSWIVEKIFDLAFSGYGVQAIRRRLFEEKIPTPTWWNRKKGLRNKKTKLEMTVDGGEYWWDCTTLKEIIENPVYIGHIASQKVNYKFKVGWLSDKPKEEWIIVENTHEPIISEDIYNIANEKLKSRRRPFKNGEESIFAGIVKCPDCGKSLNLGRNKSKKREKLLTCNTYRRYGKSLCSQHRIYYDTLYEIVLKDIRKNAEIALKDEKEIIKALEKSREIDNEEEQKFIMDKIYEDQIRVEDLTKKIERLYDDWLDNKISESNFQKILEKSQNEQDYLNQRIEDNQKLIVKEDLEDINVKKWIELIKKHRDIKKLDKETLNELISKIYVHEKEVVNGEITQTIDIYYNFIGNTDTLQVFYNL

SEQ ID NO: 14712 - DNA, 50 bp, Anaerococcus vaginalis; identical to SEQ ID NO: 2902
  source 1..50: mol_type = genomic DNA

SEQ ID NO: 14713 - DNA, 40 bp, Anaerococcus vaginalis; identical to SEQ ID NO: 14648
  source 1..40: mol_type = genomic DNA

SEQ ID NO: 14714 - DNA, 50 bp, Anaerococcus vaginalis; identical to SEQ ID NO: 2904
  source 1..50: mol_type = genomic DNA

SEQ ID NO: 14715 - DNA, 40 bp, Anaerococcus vaginalis; identical to SEQ ID NO: 2905
  source 1..40: mol_type = genomic DNA

SEQ ID NO: 14716 - protein, 480 aa, Streptococcus cristatus
MITTNKVAIYVRVSTTKQEEEGYSIDEQKAKLSSYCSIKDWSVYKIYTDGGFSGSNTERPALERLVKDAKNKKFDTVLVYKLDRLSRSQKDTLYLIEEVFIKNDIEFLSLQENFDTSTPFGKAMIGLLAVFAQLEREQIKERMQLGKLGRAKAGKSMMWARTSYGYDYQKETGTVTINELEAVAIRDIFESYLSGMSITKLRDKLNDKYPKTPAWHYRIVRGILANPVYCGYNQYKGQVFPGNHEPIITEEAFNKTQEELKIRQQRAADNSNPRPFRAKYMLSGIGQCGYCGAPLKILMRRTKNDGTRRIDYECHQRHPRKVAGVTVYNNNQKCDSGFYNKSDIEEYILKEISKLQHDDEYIEELFAEQELTIDREAYQKQIDALSNKISKLNDLYIDDRITLDELQIKAAEFSNQRAVLEEELDNDPAIKRQKRKEGMKQILNTDDILTMDYDHQKFIVRTLINKVQVTAEDIVIKWRI

SEQ ID NO: 14717 - DNA, 50 bp, Streptococcus cristatus
  source 1..50: mol_type = genomic DNA
tagagaattttactatccaacatttcaataaagggcactaaaattctcta

SEQ ID NO: 14718 - DNA, 40 bp, Streptococcus cristatus
  source 1..40: mol_type = genomic DNA
gagaaggacgactaacatttccatcaaagtaaaggcttta

SEQ ID NO: 14719 - DNA, 50 bp, Streptococcus cristatus
  source 1..50: mol_type = genomic DNA
tagagaattttactatccaacattgtaataaagggcactaaaattctcta

SEQ ID NO: 14720 - DNA, 40 bp, Streptococcus cristatus
  source 1..40: mol_type = genomic DNA
gagaaggaagaataatattgtgacaaaagaaaaaacttta

SEQ ID NO: 14721 - protein, 537 aa, Clostridium perfringens
MFEIKTAAIYARRSKVVETGDSIETQIQLCTNYLKNIGITDTIIYSDEGFSGKDTDRPKFMELLNDAKNKKFQVLICYKLDRLSRNIGDFSNLINDLEKYNISFISVVEQFDTGSAMGKAMMYICSVFSQLERETISKRVCDNMYSLAENGYWLGGEAPFGYTHKRNVITDSSGKNRTFTELVPVQDEIKIAKLLFDKYLEFGSISKVEKYTLQNNIKTRKNKDWSKATLSYFISNPVYVKADESIVEYYKSIGITTYGNVNGSNGMLIYKKRKGKTNKLRDSSEWIYAVSNHEGIIDSETWLKAQRLAKLNRVRAPNMGCSNRALLSGMIRCAKCGTFMRVAYGQPTKSSPTRKHYYACTLKHNSGGTRCDNKNTDGPELDRLIINKLKEMSIDKSSLVKKLKEYKNSLESSSENILYTSLQKSIAQNKEQIDNIINNISLTKDAMVVKVLLDKLTTLKEEEAKLNKNLAELNSEMQQQDALIANCDDIISKLKNFSKLIDSLNVEGQKKLVSSIIDKVFVNGDTGAVKIKFKSFK

SEQ ID NO: 14722 - DNA, 50 bp, Clostridium perfringens
  source 1..50: mol_type = genomic DNA
gcaaagtagtaaagcgagcatccgctcgccttacccctttgagatgcttg

SEQ ID NO: 14723 - DNA, 40 bp, Clostridium perfringens
  source 1..40: mol_type = genomic DNA
tctcttaatatcacatctgctctaaaaacaaacattcctg

SEQ ID NO: 14724 - DNA, 50 bp, Clostridium perfringens
  source 1..50: mol_type = genomic DNA
gcaaagtagtaaagcgagcatccgtacgccttacccctttgagatgcttg

SEQ ID NO: 14725 - DNA, 40 bp, Clostridium perfringens
  source 1..40: mol_type = genomic DNA
tctcttattttcatatgtgtaattaaaaaaaaagttcctg

SEQ ID NO: 14726 - protein, 502 aa, Flavonifractor sp An10
MNIVAYCRVSTDKEEQVDSLEHQKQFFGEYAQKNGHNLRKVYADEGITGTSLRKRSEFLRLMKDAKLGLFEAVVVKDISRFARNTVDFLQSIRELKALGINTMFITANMETFSDSEFVLTIFGAMAQEESANLSKRVKFGKKINAQKGRVPQRIFGYDRIDNFTLVINSQEAQTVREIYRLYLEEGLGCRTISLRLNQSQRKTKFKCDWNPRAVRRVLTNSIYCGHYINHKYEIADYLTGKQVHIPAEEHFHHERPEWAIIPPEVFEQAQAQLNQRRAQYDSGEPFRGARYSTKHLFSTLIKCEHCGRSFCQKHYTYKNTRIYWKCTTNDQFTAERCDNNITLNEAELLTEIQVYFTSLIHDKGNFISGILSDIEKRLSSGQSSDDRVKIERRQKSLLAKKERYQEMYANEIITMNELKKHTASILEELESLDYDLKQYEHFLAVKEDSGRFVEQYIQEIERFLQLETVTNVDLRKIIDHISVNRDGNVRIVLKKLDDLDTF

SEQ ID NO: 14727 - DNA, 50 bp, Flavonifractor sp An10
  source 1..50: mol_type = genomic DNA
tttacctatttggtgcggatagtggaaataaccgcccacaattagataag

SEQ ID NO: 14728 - DNA, 40 bp, Flavonifractor sp An10
  source 1..40: mol_type = genomic DNA
cctgcccaccgcggtggtggaggcggtggatcccatcgtg

SEQ ID NO: 14729 - DNA, 50 bp, Flavonifractor sp An10
  source 1..50: mol_type = genomic DNA
tttacctatttggtgcggatagtgtgaataaccgcccacaattagataag

SEQ ID NO: 14730 - DNA, 40 bp, Flavonifractor sp An10
  source 1..40: mol_type = genomic DNA
catgcccaactcagtgctgtgggcggtggacctcttcggg

SEQ ID NO: 14731 - protein, 553 aa, Nocardia cyriacigeorgica
MNAPQRTDPADPAVAVSYIRVSTKEQAERDGDPEGYSIPAQREANRRKATAIGAVVMEEFVDRGESARSADRPELQKLLRFIAANPVDYVVVHKVDRLARNRVDDVEINLAIRKSGATLVSATENIDETASGMLLHGIMSSIAEFYSRNLATEVLKGMEQKAKTGGTPGKAPLGYRNVAALNAEGREVRTVAVDPDRAPLITWAFQAYATGDWTLRRLAGALEARGLTSRPTTRSPGGPLALNSVHKILRAPYYKGEVTYRGVQYPGRHQPLIDDATWTRVQEVLDARATGERSREHPHYLKSSVFCGGCGSRLIVTMSKNRYGTLYPYFICLGRHSKSNGCMRKAVLISVVEELVEDAYRTIQLDPEVRRQIETRLRAEIAATRASIEAEVRDLTTQQERLMAERTRLLQAHYAGAVPLDLLKSEQDRIARQLGAIEERLSAANVTIDDVEANLQRALDYATHCYQGYLAAGPHVRRLYNQAFFEKIYVEDDDVRVTLQEPFKTLAGPVAIGDAEERVTGTAEPSAPSLTEVMSRNNKPSSWDEGLNELILV

SEQ ID NO: 14732 - DNA, 50 bp, Nocardia cyriacigeorgica
  source 1..50: mol_type = genomic DNA
aggtttgaatgaactaattctggtgcacctccatggatccctttcaagcc

SEQ ID NO: 14733 - DNA, 40 bp, Nocardia cyriacigeorgica
  source 1..40: mol_type = genomic DNA
caggtcaccacggactggcgcccccggcaggaatcgaacc

SEQ ID NO: 14734 - DNA, 50 bp, Nocardia cyriacigeorgica
  source 1..50: mol_type = genomic DNA
aggtttgaatgaactaattctggtttacctccatggatccctttcaagcc

SEQ ID NO: 14735 - DNA, 40 bp, Nocardia cyriacigeorgica
  source 1..40: mol_type = genomic DNA
caaggcacctcgggctggtttcccccacaggaatcacacc

SEQ ID NO: 14736 - protein, 537 aa, Streptomyces sp 769
MEYMSTIALTDILGVGRLSRDKEESTSPERQRSVVDGIGDMLEGQITGWAFDSGVSGRVAPFEREELGPWLSALSPECAKRQCHHTPDTPCMGQWSVMAAWKMDRVTRSALHFHQLMEWCREHGRAIVTADGVNTTTKAGRQTAELMAMVASWEWEAIQERSKNGYDAVVRAGRHRGGFVPYGYRPTRIEGKEGWYLEPCPEAAPVVGEIVRRIIEGESINAVVVWLNESKTPTSLDVQRIRAGKEPKGCLWRVGNLAKLLRSESLLGFMVTDAGEKIMGTDGRPVRRADRLISDGQWSSLQAALDARQTNKGKTARRDSAQLIRVAYCGMCDRPMYVNKGRTWTYYRCSSKTVGGVHCGNGSVPTHLLEEMVEGHFLHHVGDLEWLRAKYVPGRDHSKEIEELRGAVDRLTASLAKLNPGPALDRVVTSLNAHNERLTEIEAEPVIPAQVIEEPTGETFREVWERLNAKGRGDFLRDCRVQVMWGSPAEEFDGKRFPAQKATAKSPIFHVHFPEDIEKRAQAWARSREQSPLEQAA

SEQ ID NO: 14737 - DNA, 50 bp, Streptomyces sp 769
  source 1..50: mol_type = genomic DNA
cggagtaagtttgacttcttcgagtcatcgaactatcactagttactcca

SEQ ID NO: 14738 - DNA, 40 bp, Streptomyces sp 769
  source 1..40: mol_type = genomic DNA
tgggctgcattcggcggcctcgtcgaggaacagcacaccg

SEQ ID NO: 14739 - DNA, 50 bp, Streptomyces sp 769
  source 1..50: mol_type = genomic DNA
cggagtaagtttgacttcttcgagtgatcgaactatcactagttactcca

SEQ ID NO: 14740 - DNA, 40 bp, Streptomyces sp 769
  source 1..40: mol_type = genomic DNA
tgggaggaactgagcggcctggatgaggaacagcacagcg

SEQ ID NO: 14741 - protein, 456 aa, Clostridioides difficile
MDNIKRVALYIRVSTEEQALHGDSIRTQTEALEQYAKEKNYIIIDKYIDEGYSATNLNRPSLQRLLADIKENKIDLILLTKLDRFSRGVKNFYKILDTLEKHKCDWKTILEDYDSSTASGRLHINIMLSFAENEASQTSERIKFVFNNKIQKKEVVSGKVPFGYRIESKHLVIKEDEAEIVRESFDTYIKFSALTKTIQHINSKFNMRHMYKWMQKLLKNKIYIGIYERENILIEDYCEPIVSKEQFYFVQSLLKKNKRISKNKFDINYIFAGMIICSCGRKMSGSYHLNPSGTLYLHYRCSASYGAKLCSNTSRLGEKKVETFLLENVKTELYKTILEHESNNKKSSNKNDTEKLKNKLKKQIDKLQDLYFDDLISKDNYRFKYKKLNDDLIELEKKENEEKVVINDLQKMKNFLKINFEDDYVNMSNIEKRTFWTSIIDRIEVQKDGNLVIKFL

SEQ ID NO: 14742 - DNA, 50 bp, Clostridioides difficile
  source 1..50: mol_type = genomic DNA
tattgtactaaattaccctatccatgtggctagggtaatttaatacaata

SEQ ID NO: 14743 - DNA, 40 bp, Clostridioides difficile
  source 1..40: mol_type = genomic DNA
tacaggatgctccattccatgtggcaaggctgtacccgct

SEQ ID NO: 14744 - DNA, 50 bp, Clostridioides difficile
  source 1..50: mol_type = genomic DNA
tattgtactaaattaccctatccatttggctagggtaatttaatacaata

SEQ ID NO: 14745 - DNA, 40 bp, Clostridioides difficile
  source 1..40: mol_type = genomic DNA
tacaggctgctccattccattcctcagagctgtatccacc

SEQ ID NO: 14746 - protein, 532 aa, Clostridioides difficile
MKAAIYSRKSRFTGKGDSIENQIQLCIDYAKSIGVKDFLIYEDEGFSGSNIDRPQFKKMMQDAKDKKFSYLVCYRLDRISRNVSDFSTLIEKLNELNISFISIKEQFDTSTPMGRAMMFISSVFAQLERETIAERIKDNMYELARSGRWLGGNTPHGFNSEKITFLDENLKERSMYKLQVNDEQMEIVKLIYNKYLELRSLSKLYKYVYNNGIRGPRGGKFDPSSLSRILRNPAYVKANDEILDYLKNSGMDVVGTPDRKCGILTYAKNTSNSIAAIAKHHGVIEPEIWLEVQNQLDKNRDKTPRISTGKTALLSGLIKCGKCGSNMRITYKGKKTDKDLKYYYICGTKKTLGSDSCNCKNLNGPLVESLVIDKIKNCKEESIISAFNSNNIKTDNVFNIFKSETNLLKNQILDKERLIKNLVIELAKNTGSTASDYIVFQIESLNNEISILKDKINTLESSNINISSDSINIDIIVSNLKRFNDEVDNASLDDKRLLLSTIINSIIWDSSLGNLNIVYMGAEVDNSVSLSN

SEQ ID NO: 14747 - DNA, 50 bp, Clostridioides difficile
  source 1..50: mol_type = genomic DNA
agttgcacttttttagctatagcagaagcaaggtgtataaaagtgcaact

SEQ ID NO: 14748 - DNA, 40 bp, Clostridioides difficile
  source 1..40: mol_type = genomic DNA
agttacacatgatattggtgaagcaataagcatatcagat

SEQ ID NO: 14749 - DNA, 50 bp, Clostridioides difficile; identical to SEQ ID NO: 14747
  source 1..50: mol_type = genomic DNA

SEQ ID NO: 14750 - DNA, 40 bp, Clostridioides difficile
  source 1..40: mol_type = genomic DNA
agtaccacatcgcattggtgaagcagtaaggatttcagtt

SEQ ID NO: 14751 - protein, 532 aa, Clostridioides difficile
MKAAIYSRKSRFTGKGDSIENQIQLCIDYAKSIGVKDFLIYEDEGFSGSNIDRPQFKKMMQDAKDKKFSYLVCYRLDRISRNVSDFSTLIEKLNELNISFISIKEQFDTSTPMGRAMMFISSVFAQLERETIAERIKDNMYELARSGRWLGGNTPHGFNSEKITFLDENLKERSMYKLQVNNEQMEVVKLIYNKYLELRSLSKLYKYVYNNGIRGPRGGKFDPSSLSRILRNPAYVKANDEILDYLKNSGMDVVGTPDRKCGILTYAKNTANSIAAIAKHHGVIEPEIWLEVQNQLDKNRDKTPRISTGKTALLSGLIKCGKCGSNMRITYKGKKTDKDLKYYYICGTKKTLGSDSCNCKNLNGPLVESLVIDKIKNCKEESIISAFNSNNIKADNVFNAFKSETNLLKNQILDKERLIKNLVIELAKNTGSTASDYIVSQIESLNNEISILKDKINTLESSNINISSDSINIDIIVSNLKRFNDEVDNASLDDKRLLLSTIINSIVWDSSLGNLNIVYMGAEMDNSVSLSN

SEQ ID NO: 14752 - DNA, 50 bp, Clostridioides difficile
  source 1..50: mol_type = genomic DNA
agttgcacttttttagctatagtagatgctctatgtataaaagtgcaaca

SEQ ID NO: 14753 - DNA, 40 bp, Clostridioides difficile; identical to SEQ ID NO: 14748
  source 1..40: mol_type = genomic DNA

SEQ ID NO: 14754 - DNA, 50 bp, Clostridioides difficile; identical to SEQ ID NO: 14752
  source 1..50: mol_type = genomic DNA

SEQ ID NO: 14755 - DNA, 40 bp, Clostridioides difficile; identical to SEQ ID NO: 14750
  source 1..40: mol_type = genomic DNA

SEQ ID NO: 14756 - protein, 587 aa, Enterococcus faecalis
MKKDVKVIKGDTTLKRTASGCVERSIKRVAAYCRVSTDTEDQINSYNSQVEHYTEFIQKNNEWTLAGIYADEAITGTQVDRRIDFQRLINDCINGDIDMIITKSISRFARNTLDTLKYVRKLKEFNVAVFFEEENINTLTMDGELLLTILSSVAQQEVENISANVKKGLRMKMERGEMVGFQGCLGYDYDPETKSISINEKEAEIVRYIFRRYIEGVGGMVISRELEEQGYLSPRGNKRWTETTVLGIIKNEKYKGDLMMGKTYTVDPISKRRLDNFGEQDKFYIENHHEPIISEEDFEKAQGIRLRRSKNRNTVANNGGKREKYSRKYAFSSMLECGFCGHNLSRRNWHSSSEYTKVIWQCVNATKNGKKYCPHSKGIEEEAIEKAFMESYRQVCHNNVEITNEFLKTVEEELKDNSLAKDLKKITNQLDKILKKEKDLVELRLNESISMDIYQDKYNEIAISKEKLLAEKRTLEVTLTDEKALKKRLEGFKKLLESNKYLEEFDRAVFESIVDKIIIGGTNDEGEIDPAMITIIYKTGKKDSQDGRLFKSRRKNAKEVNEETGGKLYPQSSDEVNNLYSYPIDNT

SEQ ID NO: 14757 - DNA, 50 bp, Enterococcus faecalis; identical to SEQ ID NO: 1792
  source 1..50: mol_type = genomic DNA

SEQ ID NO: 14758 - DNA, 40 bp, Enterococcus faecalis
  source 1..40: mol_type = genomic DNA
aatttcccacaaacgacccacattgaatctgtcacgttat

SEQ ID NO: 14759 - DNA, 50 bp, Enterococcus faecalis; identical to SEQ ID NO: 1792
  source 1..50: mol_type = genomic DNA

SEQ ID NO: 14760 - DNA, 40 bp, Enterococcus faecalis
  source 1..40: mol_type = genomic DNA
aatataccaaaaacaccccatattgactctgtaaagtaat

SEQ ID NO: 14761 - protein, 587 aa, Enterococcus faecalis
MKKEVKVIKGDTTLKRTASGCVERSIKRVAAYCRVSTDTEDQINSYNSQVEHYTVFIQKNNEWTLAGIYADEAITGTQVDRRIDFQRLINDCMNGDIDMIITKSISRFARNTLDTLKYVRKLKEFNVAVFFEEENINTLTMDGELLLTILSSVAQQEVENISANVKKGLRMKMERGEMVGFQGCLGYDYDPETKSISINEKEAEIVRYIFRRYIEGVGGMVISRELEEQGYLSPRGNKRWTETTVLGIIKNEKYKGDLMMGKTYTVDPISKRRLDNFGEQDKFYIENHHEPIISEEDFEKAQGIRLRRSKNRNTVANNGGKREKYSRKYAFSSMLECGFCGYNLSRRNWHSSSEYTKVIWQCVNATKNGKKYCPHSKGIEEEAIEKAFMESYRQVCHNNVEITNEFLKTVEEELKDNSLSKDLKKISNQLDKILKKEKDLVELRLNESISMDIYQDKYNEIAISKEKLLAEKRTLEVTLTDEKALKKRLEGFKKLLESNKYLEEFDRAVFESIVDKIIIGGTNDEGEIDPAMITIIYKTGKKDSQDGRLFKSRRKNAKEVNEKADSKLYPQSSDEVNNLYSYPIDNT

SEQ ID NO: 14762 - DNA, 50 bp, Enterococcus faecalis; identical to SEQ ID NO: 1792
  source 1..50: mol_type = genomic DNA

SEQ ID NO: 14763 - DNA, 40 bp, Enterococcus faecalis; identical to SEQ ID NO: 14758
  source 1..40: mol_type = genomic DNA

SEQ ID NO: 14764 - DNA, 50 bp, Enterococcus faecalis; identical to SEQ ID NO: 1792
  source 1..50: mol_type = genomic DNA

SEQ ID NO: 14765 - DNA, 40 bp, Enterococcus faecalis; identical to SEQ ID NO: 14760
  source 1..40: mol_type = genomic DNA

SEQ ID NO: 14766 - protein, 587 aa, Enterococcus faecalis
MKKDVKVIKGDTTLKRTASGCVERSIKRVAAYCRVSTDTEDQINSYNSQVEHYTEFIKKNNEWTLAGIYADEAITGTQVDRRIDFQRLINDCANGDIDMIITKSISRFARNTLDTLKYVRKLKEFNVAVFFEEENINTLTMDGELLLTILSSVAQQEVENISANVKKGLRMKMERGEMVGFQGCLGYDYDPETKSISINEKEAEIVRYIFRRYLEGVGGMVISRELEEQGYLSPRGYKRWTETTVLGIIKNEKYKGDLLMGKTYTVDPISKRRLDNFGEQDKFYIENHHEPIISEEDFEKAQGIRLRRAKNRNTVANNGGKREKYSRKYAFSSMLECGFCGHNLSRRNWHSSSEYSKVIWQCVNATKNGKKYCPHSKGIEEEAIERAFMESYRQVCHNNVEITNEFLKTVEEELKDNSLAKDLKKISNQLDKLIKKEKELVELKLNETISMDIYQEKYNEIFINKEKLLEQKRSIEVTLTDEKALKKRLEGFKKLLESNKYLEEFDRTVFESIVDKIIIGGTNDDGEIDPAMITIIYKTGKKDSQNGRLFKSRRKNAKVGDQNDGNKLCSQSGDEVKTLCSYSIDNT

SEQ ID NO: 14767 - DNA, 50 bp, Enterococcus faecalis
  source 1..50: mol_type = genomic DNA
gtgttcctattcaatagacaacacatgtggagaccatagcgttgatacaa

SEQ ID NO: 14768 - DNA, 40 bp, Enterococcus faecalis; identical to SEQ ID NO: 14758
  source 1..40: mol_type = genomic DNA

SEQ ID NO: 14769 - DNA, 50 bp, Enterococcus faecalis; identical to SEQ ID NO: 14767
  source 1..50: mol_type = genomic DNA

SEQ ID NO: 14770 - DNA, 40 bp, Enterococcus faecalis; identical to SEQ ID NO: 14760
  source 1..40: mol_type = genomic DNA

SEQ ID NO: 14771 - protein, 583 aa, Enterococcus faecalis
MNTKVKLIKASNTGARNRNALHLDLKRVAAYCRVSTDSKDQLESYKSQVDYYTNLIKNNKNWTLAGIYADEATTGTTATKRADFMRLISDCQNGDIDMIITKSISRFARNTLDTLKYVRLLKENNVGVVFEEENIDTLTMDGELLLTILSSVAQQEVENTSAHVKKGLKMKMEKGELIGFQGCLGYDYDPITKSISINEEEAKIVRYIFKRYLEGNGGSVIGRELEEQGYLTPRGKTKWSDTTVLGIIKNEKYIGDILMGKTFTVDPITKRRLANFGESDKYHIENHHEPIISKEDFEKAQEIRLRRAQNRNTIANKDRKREKLSRQYAFSSMLECGFCGEILSRRTWHTSSIYKKINWQCVRSTKKGKKYCPHSKGIQEAAIEKAFVESYRQLCHADSTVIDDFLKIVEEEINDNTLVKDLKKVESQLNRIISQERKLVDLHLEDSIDEEVYAKKYKKLTKQKEELLDEKKTLELTIKDENSIKERLKQFKKVLENKEIIEEFNRTVFESIVDKVVVGRIDKDGTVHPYDLTFYFKTGVKDSQDSNNFKDKRKNAKDNDTNKLCSHKNDEDKKLCSQAKDNA

SEQ ID NO: 14772 - DNA, 50 bp, Enterococcus faecalis
  source 1..50: mol_type = genomic DNA
atgttcccaagcaaaagacaacgcacgtggaagctatagcgttgatacaa

SEQ ID NO: 14773 - DNA, 40 bp, Enterococcus faecalis; identical to SEQ ID NO: 14758
  source 1..40: mol_type = genomic DNA

SEQ ID NO: 14774 - DNA, 50 bp, Enterococcus faecalis
  source 1..50: mol_type = genomic DNA
atgttcccaagcaaaagacaacgcatgtggaagctatagcgttgatacaa

SEQ ID NO: 14775 - DNA, 40 bp, Enterococcus faecalis; identical to SEQ ID NO: 14760
  source 1..40: mol_type = genomic DNA

SEQ ID NO: 14776 - protein, 459 aa, Bacillus pumilus
MKVCIYARKSTGKLSQNNTIENQIKICKRYADKNNFEVVDIKVDVGTGRDDLNRFEIQELVDESIKGKYECVLMKGISRLYRNTLKGLELIEKFDMFGIRVITIEEKFDSNKSRYSHGALDVSKITMYLMFSEMESNKIGERVKLTQIEKAKMGMWNNPTRVPFGYRYNRETKKLEKEPESASTISLIFKMYEGGNSIKEIIESLEKENKKPPRGKAWRDDTIRYILRNHVYKGNIFYRTDSDKEEVENAHEPIIENKRFDAIQLKINSRAKSKGKNNQRSKLMGMVKCSSCGSSMTYRYYHYNGEYYYYCIGYIKNGKSYCSSHKIKADALEQEVRQKTSKYLNKINNIKELKNKKLIIKNKISRLNTEADMLSNLLIENKVTKKHFQQGIYHLTNKIDILMNEKVEIEQKIRRCNFLSNFVNQYDSIIDVLLENRTLLENLIESVSVSNTGVFVTFK

SEQ ID NO: 14777 - DNA, 50 bp, Bacillus pumilus
  source 1..50: mol_type = genomic DNA
ttctatactgttagtaatggtgtaccaataccaagttaaaaaatattaat

SEQ ID NO: 14778 - DNA, 40 bp, Bacillus pumilus
  source 1..40: mol_type = genomic DNA
ctatactgaacaaggtgttccagtcatggcagacggaacg

SEQ ID NO: 14779 - DNA, 50 bp, Bacillus pumilus
  source 1..50: mol_type = genomic DNA
ttctatactgttagtaatggtgtaacaataccaagttaaaaaatattaat

SEQ ID NO: 14780 - DNA, 40 bp, Bacillus pumilus
  source 1..40: mol_type = genomic DNA
ctataatgtataagtttatacagtcatggcatatggaact

SEQ ID NO: 14781 - protein, 463 aa, Enterococcus faecium
MKNDSNKVLRAACYIRVSTTEQAIKGYSIETQIETLKEYCKKNRFKIVDNYIDAGVSGSLAPAKRPAMKRLLDDVKEGKIDVTVVVKLDRFFRSVKHYFQVQEVLEKHKVEWTAALEDYDTRSANGRFAITVFLAVAQNEQERTSERIKAVFEHKRKNRESFFGANSIPFGYAEQLDENGVRRLVKDPELEEALDMFFQIAVKYENVSKAARDVNLEYGLTKARHKWMELSKMEIYTGTYRGVENYCPAYISREDWLRLNNRNKIKANTKNNRVYLFTGLIECPMCHNNMRGTYCSQKRKSGETVEYYSYKCEYKTAHICDYKHTISQLNIEKFLLDNLEDLLKGEIAKVEIEKKKKRPKPKTNVSALKEKLRRLEVIYMTGNKSDEEYITEAKQINDAIKKAESETRNAADDRDLTNIKEILSTDFKSIYNTLSPEDKRRFWRTLIKRIYIDGNRVEHVEFN

SEQ ID NO: 14782 - DNA, 50 bp, Enterococcus faecium
  source 1..50: mol_type = genomic DNA
gtatggcttaacacaccctcttctgtcgatggggtacggtaaagccatac

SEQ ID NO: 14783 - DNA, 40 bp, Enterococcus faecium
  source 1..40: mol_type = genomic DNA
ttatgttgttcctgcattcgttgggctaggtgctccttat

SEQ ID NO: 14784 - DNA, 50 bp, Enterococcus faecium
  source 1..50: mol_type = genomic DNA
gtatggcttaacacaccctcttctctcgatggggtacggtaaagccatac

SEQ ID NO: 14785 - DNA, 40 bp, Enterococcus faecium
  source 1..40: mol_type = genomic DNA
atctgttgctgctccattccttggactagatgttctttat

SEQ ID NO: 14786 - protein, 513 aa, Faecalibacterium prausnitzii
MKKKFSSVPDPDMQDAVIYARYSSHSQRDCSIEQQVADCELFAQQNGLRVVKIYADRHLSGTTDNRPQFQQMLKDAAHGHWPFVICWKIDRFARNRYDSATYKYKLKKAGVRVLYAKESIPDGPEGILLESVLEGSAEYYSASLAQNIRRGMRFNAENCKVNSGSIPFGYCKGPDGRFAIHETNAEIVRDIFRKAAAGVPFVDIATELNNKGLKTSRGGRWNKNSFVLLKNESYIGVYHFSDIRIEGGMPAIIDLGTFLAANERINANRRVRGRHHDGGDYLLTGKLKCAHCGSYMVGFSGTAKNGESHYYYGCQKRRRERACKKANVPREWIEKVVVKAALDYVLRPDVMEWITDAVMEYQEREAASSQLAALTAELEENQKATDNVMRAIEAGIITATTKQRLLDLETKAKDLKRAIELEKLSHVRLEREQILYWLEQFQGGSLQSQEFRRKVIDTFVSVVYLSDDHLRIAFNYSGQNRSEADFNLIMDAETASADYPINSFSLPLCPPHK

SEQ ID NO: 14787 - DNA, 50 bp, Faecalibacterium prausnitzii
  source 1..50: mol_type = genomic DNA
gtctcccgttatgtccaccacacaagaatcaggcgaaccccacaatctac

SEQ ID NO: 14788 - DNA, 40 bp, Faecalibacterium prausnitzii
  source 1..40: mol_type = genomic DNA
ccatcgcctccaccacacaagaaaaatccgaacctcttcc

SEQ ID NO: 14789 - DNA, 50 bp, Faecalibacterium prausnitzii
  source 1..50: mol_type = genomic DNA
gtctcccgttatgtccaccacacatgaatcaggcgaaccccacaatctac

SEQ ID NO: 14790 - DNA, 40 bp, Faecalibacterium prausnitzii
  source 1..40: mol_type = genomic DNA
cctttccccccacaacacatgaacactcctaacctctttc

SEQ ID NO: 14791 - protein, 519 aa, Paraliobacillus ryukyuensis
MNTGTIKQIKKVAIYNRKSRPDETDDGLKKNLAFLIDKCTQYDWDYEVFQEVGSSQDINRPELQKMLDKVQGFHYDAVVVTDQDRLSRTTAGFSQIKEILTNYGVQVVTSSKIYNYETQEDDLMSDMQSIVAKQEYLNIKKRLVRGKRQSAKEGNWVGGQTPYGYSYDHKTKKLVPNDDAPIVKRMYEKYLSGKTSTDIERELELEGVLTPTGTTFKKARISVILANPVYKGTVIYGKTKVSKTSKKPSGSPRQDKTDKDAQISIDNAHEPIVSPEEWDKVEAIRKGRNSKPPSARIGKVAFTGLIRCSLCGRTHSFQRRKGKELRITSCQTRNWIDDENYKICENKGVRLENFEQAFYFQFQDYVKALELYLDEVKNNIKPDTSNPADEKAHLESQIKRIDAQIKKTQQGFIMEIFTEDEAQAQIKQLKAQKEHIEAELERINTKTEDESIDELEATVNKLRDILSGDTELETKDINALLSKQIDYIEYKRVGDHKAEMEIKIHYKGQTEEQEDEQVS

SEQ ID NO: 14792 - DNA, 50 bp, Paraliobacillus ryukyuensis
  source 1..50: mol_type = genomic DNA
gattgcattttgtttattgtctatttatagattgaaaacattatgcaacc

SEQ ID NO: 14793 - DNA, 40 bp, Paraliobacillus ryukyuensis
  source 1..40: mol_type = genomic DNA
tgtggcgtcttttgttaatttataaaccatagtggcaatc

SEQ ID NO: 14794 - DNA, 50 bp, Paraliobacillus ryukyuensis
  source 1..50: mol_type = genomic DNA
gattgcattttgtttattgtctatatatagattgaaaacattatgcaacc

SEQ ID NO: 14795 - DNA, 40 bp, Paraliobacillus ryukyuensis
  source 1..40: mol_type = genomic DNA
aatgtctttttttcttaatataaaaagcatagtgtcaatc

SEQ ID NO: 14796 - protein, 557 aa, Amedibacillus dolichus; identical to SEQ ID NO: 11441

SEQ ID NO: 14797 - DNA, 50 bp, Amedibacillus dolichus; identical to SEQ ID NO: 11442
  source 1..50: mol_type = genomic DNA

SEQ ID NO: 14798 - DNA, 40 bp, Amedibacillus dolichus
  source 1..40: mol_type = genomic DNA
ttgaaaactcggtctgtcaaaatttgtccccgaccagccg

SEQ ID NO: 14799 - DNA, 50 bp, Amedibacillus dolichus
  source 1..50: mol_type = genomic DNA
aagtatcgctatctaaccccagcagctaatgaggtgtgatagcgatagcg

SEQ ID NO: 14800 - DNA, 40 bp, Amedibacillus dolichus
  source 1..40: mol_type = genomic DNA
tagaaaagtaggtttgacagcatttgttcccgtccatcag

SEQ ID NO: 14801 - protein, 655 aa, Vibrio parahaemolyticus
MKPTIITYLRYSSKQQADGLSEFRQSEINRKFVEKFCAEHDVDLNEVISLKDLGVSAYRGLNLTLGSFSQTIKKFKSGEIKKRFNEDGEINTYLIVESLDRITRTGPFKSTQIFTELLEYTNIVVLADGEKKIYSKKSIDSTHGMMDLFMALISLQRSHTESLMKEYRSRKSWEKKREDLLNYFTLPEEGRVGLERPKNATAMCPFWLTAKKDGRGYEFIPENKKVMVFLIEKLLDGNGMTRAVRLLNDEIDAGNLKPKLKKANRKTRHFRAAAYSGLFNSEISTVKGDYLLTESYYPTEDDIEQGKYPEKHLGKRVRKEVAVLKNYYPALMTESQAAYIRKMMDERRSSGTKPNKSIKNLAQGILRCPLCNSTYIKSKDRRNVYLRCNLAREGLCKAKVIKHGVFEHNLLQFCKGLNINKIISNQSSDQVLDSSLKELEQKMLPLKVKKSQLEDDIEQIVKNISSIKIPSLLEKVQDDYLKKENELKKVVQDLDLLETSIMTLQHQIAMSDGDSSLQDLIDLTLDENANDEIRQRFNVELKKVVKSMTVLYADTDDNPFGYHMISIQFLDGVHRLIPVHEKMTDKIHNILPYQDAVKVDSVDFSETVILPTDYLEGLESGKYPQLDGMAKYYQENPAKYLKLKHQIDQSQEIYE

SEQ ID NO: 14802 - DNA, 50 bp, Vibrio parahaemolyticus
  source 1..50: mol_type = genomic DNA
gacagtacaattgtttcaccaatggagatggttgatctatttgtgcagta

SEQ ID NO: 14803 - DNA, 40 bp, Vibrio parahaemolyticus
  source 1..40: mol_type = genomic DNA
aactgcaccaagcccaatggaaatggtgctaatggccgct

SEQ ID NO: 14804 - DNA, 50 bp, Vibrio parahaemolyticus
  source 1..50: mol_type = genomic DNA
gacagtacaattgtttcaccaatgtcgatggttgatctatttgtgcagta

SEQ ID NO: 14805 - DNA, 40 bp, Vibrio parahaemolyticus
  source 1..40: mol_type = genomic DNA
aactggaccaaacccaatgtcagtgttgctaaggtccaga

SEQ ID NO: 14806 - protein, 550 aa, Vibrio cyclitrophicus
MTSIRPLVSLRSPNAYSYIRFSSAIQAKGDSLRRQAQLAQDYCLKHSLTLSEQSFTDLGVSAFRSANTNEDNGLGHFLKALEQGVIPRGSFLLVESLDRLSRASVMTALSQLLNIISHGITVVTLLDDRMYNSNSNTTDLIISLTVMERAHNESKTKSERIKASWANKRANPTTTNRTSLAPFWLKLNEDKRTYTVIEKNAETVRRIFQMSISGHGIIGIVRKLNEEQIPSPKGGSWSNTSICRILNSKAAIGEYTPNIGRASTNTPISNYYPPIIDEDKFYLSQSRKAERSKPESAGRKTTFPNVFNQIAKCGVCGATMYYDNKSPTLKYLTCREFKKKNCTNRPIRIEFMHKFIVEQYLLPKYFQHHISMTTATSKQEDLISSLEAKIKEEEQALCQLMDITENFTSHIAVQQMENRDRKITQLKKKLEETKVQQAKVALTPRIGFRQAQQLVANALQTKVHDKKPINMEPEQLREYRVSLNRSLKDAFDSLRIHNVKADPQITVRCNQFTYVIEKSCLKSIHQDLYWAVKCDPHHTVATNCNIRNTL

SEQ ID NO: 14807 - DNA, 50 bp, Vibrio cyclitrophicus
  source 1..50: mol_type = genomic DNA
gtaaggtaaatcttgccaacaagtgtaatagtcagtaatatttaccttcc

SEQ ID NO: 14808 - DNA, 40 bp, Vibrio cyclitrophicus
  source 1..40: mol_type = genomic DNA
ttcaggtaaacccaccaacgtaaaaccgggcattccattg

SEQ ID NO: 14809 - DNA, 50 bp, Vibrio cyclitrophicus
  source 1..50: mol_type = genomic DNA
gtaaggtaaatcttgccaacaagttgaatagtcagtaatatttaccttcc

SEQ ID NO: 14810 - DNA, 40 bp, Vibrio cyclitrophicus
  source 1..40: mol_type = genomic DNA
ttctgataaaaccaccaactgaaaacctgccattataaag

SEQ ID NO: 14811 - protein, 612 aa, Streptococcus agalactiae; identical to SEQ ID NO: 471

SEQ ID NO: 14812 - DNA, 50 bp, Streptococcus agalactiae; identical to SEQ ID NO: 9697
  source 1..50: mol_type = genomic DNA

SEQ ID NO: 14813 - DNA, 40 bp, Streptococcus agalactiae
  source 1..40: mol_type = genomic DNA
agaaatataagctggcagcaggaaaaactgcaaagtcgat

SEQ ID NO: 14814 - DNA, 50 bp, Streptococcus agalactiae; identical to SEQ ID NO: 12464
  source 1..50: mol_type = genomic DNA

SEQ ID NO: 14815 - DNA, 40 bp, Streptococcus agalactiae
  source 1..40: mol_type = genomic DNA
attaatataagcaagcactttgtaaaactgcaaattctat

SEQ ID NO: 14816 - protein, 617 aa, Anaerococcus octavius
MRNFEKITALYERLSRDDELEGESNSIVNQKKILEEYASKNNLTNIIHFTDDGISGTQFDRPGFMEMMNGVNTGNIGCIIVKDMSRLGRDYLKVGQCMEILRQKGVRLIAINDNVDSFYREDDFTPFRNIMNEWYARDTSRKIQSTFRSKGESGKHTASTPPYGYIKDEKDKNKWIVDEKAAEIVRRIFNLTMDGAGPYKIAKILEADKIDIPAYHQQKLGYGLHQSKNFEHPYRWCSSTIASILKKKEYLGHTVNFKTRKHFKDKKSKYVSEDNWLIFENTHEAIIDQETFDNVQRIRGNVKRYPDGWGEYHPLTGLMYCADCGSKMYVHRTSNYKNIPYYNCSAYTKVPCGTLCPSAHRIKAEVVLNLIQETLKDIKNYLDEDNEAFTRSIQNEMEEKEKVEIEKKKIRLTESQNRLQELERLMCRIYEDMILNKIPNNRYEILNNQYETEQLTLSKEIKDLEIAISRYEKETDRARKFISLISRYENFDELTTTMINEFIEKIIIHERDRKGSQTSKQKIEIYFNFIGNYEVPKEELSEEERSKLEEEERKINERRDRLHQNYLKRKANGKQQEYEERYKERREQKKQEKLKVLKRAGILMKDYKNKESFKESV

SEQ ID NO: 14817 - DNA, 50 bp, Anaerococcus octavius; identical to SEQ ID NO: 9697
  source 1..50: mol_type = genomic DNA

SEQ ID NO: 14818 - DNA, 40 bp, Anaerococcus octavius
  source 1..40: mol_type = genomic DNA
agaaatataagctggcagcaggaaaaactgcaaagtcaat

SEQ ID NO: 14819 - DNA, 50 bp, Anaerococcus octavius; identical to SEQ ID NO: 12464
  source 1..50: mol_type = genomic DNA

SEQ ID NO: 14820 - DNA, 40 bp, Anaerococcus octavius; identical to SEQ ID NO: 14815
  source 1..40: mol_type = genomic DNA

SEQ ID NO: 14821 - protein, 576 aa, Enterobacter hormaechei
MTKAYIYTRVSTLQQIDGFGIDRQINTLMDFLENAVLPKELGYQLDPKNYEILDSDEGLSGYKGHNFTKGSLGKFKSRVASGEITSGCLLIESVDRFSRRQGYDAIDEFTFLLKRNIDIIEVETEQIFSYRLDHKLTQLSTSIERAYQESKRKSRLITKSWANLKRKAVDEGVALKRNVPYWLVIDGDKYQLNKSEVERIRTIFDDYANGKGVTAIVRDLNKAGGKYDKKAFSTNFINVMLRDRRLIGWLTGKRRKNETIADWKLREIKIYPEIIDANLFELVQRKIDANDVTKKVRTSSKQISLFNGVARCGICNEPLVGHFTQKGSYLRCLGKRSKLGTCNSSLIRYKECEYAVINYVKNIDFKTIYGNNKNNTPMINSLQQRMAVVTTEINGIESLLNTSDNSSEIVALTKARRERVKERDKISYELIDLMRTIDVSDEEFMLDLESICDHNNVELRERFNAALKKVIKSIKIIQDNSNDDKIFIIKFEYHTDYAMHCVALNLNGDLIGYSYIVDKGELCLKSSCMDVNFKTGEITTKHAPNYIEGLIVKSAFENIEKVISGYDNGLAIADII

SEQ ID NO: 14822 - DNA, 50 bp, Enterobacter hormaechei
  source 1..50: mol_type = genomic DNA
ggttgtatttgtgttagatgctgggtgcaaatgctaacattgatacaaac

SEQ ID NO: 14823 - DNA, 40 bp, Enterobacter hormaechei
  source 1..40: mol_type = genomic DNA
tgtttgcaccattgcctgggttcatggccttgtacagggc

SEQ ID NO: 14824 - DNA, 50 bp, Enterobacter hormaechei
  source 1..50: mol_type = genomic DNA
ggttgtatttgtgttagatgctggctgcaaatgctaacattgatacaaac

SEQ ID NO: 14825 - DNA, 40 bp, Enterobacter hormaechei
  source 1..40: mol_type = genomic DNA
cctctgcagctttgcctgccttcatggccttggacagccc

SEQ ID NO: 14826 - protein, 481 aa, Streptococcus agalactiae; identical to SEQ ID NO: 391

SEQ ID NO: 14827 - DNA, 50 bp, Streptococcus agalactiae; identical to SEQ ID NO: 1812
  source 1..50: mol_type = genomic DNA

SEQ ID NO: 14828 - DNA, 40 bp, Streptococcus agalactiae
  source 1..40: mol_type = genomic DNA
tagtaaaactgctagtatctcattactggttgtattctgc

SEQ ID NO: 14829 - DNA, 50 bp, Streptococcus agalactiae
  source 1..50: mol_type = genomic DNA
taaagaaatttactatccttgattacaatcaaggttactaaaattattga

SEQ ID NO: 14830 - DNA, 40 bp, Streptococcus agalactiae
  source 1..40: mol_type = genomic DNA
tggtcacagttctggtatcacatgactggttgtttcctgc

SEQ ID NO: 14831 - protein, 480 aa, Streptococcus agalactiae
MTTNKVAIYVRVSTTNQAEEGYSIDEQKDKLSSYCHIKDWSIYNIYTDGGFSGSNTERPALEQLVKDAKNKKFDTVLVYKLDRLSRSQKDTLYLIEDIFLENKIDFVSLLENFDTSTPFGKAMVGILSVFAQLEREQIKERMQLGKLGRAKSGKSMMWAKTSYGYDYHKETGEMTINELEAIVIREIFQSYLGGRSITKLRDDINQRYPKTPAWSYRIIRQILDNPVYCGYNQYKGKIYKGNHEPIISEEVYNKTQEELKIRQRTAAEKFNPRPFQAKYMLSGIAQCGYCQAPLTIIMGMVRKDGTRFIKYECKQRHPRKTTGVTVYNNNEKCHSGAYQKEEVEEYVLKEISKLQNDTSYLDEIFSTPETESIDRDSYQKQIDELTKKLSRLNDLYIDDRITLEELQKKSAEFTTIRAFLEAELENDPSLKQQEKKEDMRKILGAEDIFLMDYEGQKTMVKGLINKVQVTAEDIAIKWKI

SEQ ID NO: 14832 - DNA, 50 bp, Streptococcus agalactiae
  source 1..50: mol_type = genomic DNA
taaagaaatttactatcctacatttcaattaaagatactaaatctcttga

SEQ ID NO: 14833 - DNA, 40 bp, Streptococcus agalactiae; identical to SEQ ID NO: 14828
  source 1..40: mol_type = genomic DNA

SEQ ID NO: 14834 - DNA, 50 bp, Streptococcus agalactiae
  source 1..50: mol_type = genomic DNA
taaagaaatttactatcctacattacaattaaagatactaaatctcttga

SEQ ID NO: 14835 - DNA, 40 bp, Streptococcus agalactiae; identical to SEQ ID NO: 14830
  source 1..40: mol_type = genomic DNA

SEQ ID NO: 14836 - protein, 481 aa, Streptococcus agalactiae; identical to SEQ ID NO: 2986

SEQ ID NO: 14837 - DNA, 50 bp, Streptococcus agalactiae; identical to SEQ ID NO: 1812
  source 1..50: mol_type = genomic DNA

SEQ ID NO: 14838 - DNA, 40 bp, Streptococcus agalactiae; identical to SEQ ID NO: 14828
  source 1..40: mol_type = genomic DNA

SEQ ID NO: 14839 - DNA, 50 bp, Streptococcus agalactiae; identical to SEQ ID NO: 14829
  source 1..50: mol_type = genomic DNA

SEQ ID NO: 14840 - DNA, 40 bp, Streptococcus agalactiae; identical to SEQ ID NO: 14830
  source 1..40: mol_type = genomic DNA

SEQ ID NO: 14841 - protein, 481 aa, Streptococcus agalactiae; identical to SEQ ID NO: 2986

SEQ ID NO: 14842 - DNA, 50 bp, Streptococcus agalactiae; identical to SEQ ID NO: 1812
  source 1..50: mol_type = genomic DNA

SEQ ID NO: 14843 - DNA, 40 bp, Streptococcus agalactiae
  source 1..40: mol_type = genomic DNA
tagtaaaaccgctagtatctcattactggttgttttctgc

SEQ ID NO: 14844 - DNA, 50 bp, Streptococcus agalactiae; identical to SEQ ID NO: 14829
  source 1..50: mol_type = genomic DNA

SEQ ID NO: 14845 - DNA, 40 bp, Streptococcus agalactiae; identical to SEQ ID NO: 14830
  source 1..40: mol_type = genomic DNA

SEQ ID NO: 14846 - protein, 481 aa, Streptococcus agalactiae; identical to SEQ ID NO: 2986

SEQ ID NO: 14847 - DNA, 50 bp, Streptococcus agalactiae; identical to SEQ ID NO: 2997
  source 1..50: mol_type = genomic DNA

SEQ ID NO: 14848 - DNA, 40 bp, Streptococcus agalactiae; identical to SEQ ID NO: 14828
  source 1..40: mol_type = genomic DNA

SEQ ID NO: 14849 - DNA, 50 bp, Streptococcus agalactiae
  source 1..50: mol_type = genomic DNA
taaagaaatttactatccttggttacaatcaaggttactaaaattattga

SEQ ID NO: 14850 - DNA, 40 bp, Streptococcus agalactiae; identical to SEQ ID NO: 14830
  source 1..40: mol_type = genomic DNA

SEQ ID NO: 14851 - protein, 503 aa, Emergencia timonensis; identical to SEQ ID NO: 341

SEQ ID NO: 14852 - DNA, 50 bp, Emergencia timonensis; identical to SEQ ID NO: 12
  source 1..50: mol_type = genomic DNA

SEQ ID NO: 14853 - DNA, 40 bp, Emergencia timonensis
  source 1..40: mol_type = genomic DNA
aaataatttatactttcttttggcgaggactaaaactatg

SEQ ID NO: 14854 - DNA, 50 bp, Emergencia timonensis; identical to SEQ ID NO: 1784
  source 1..50: mol_type = genomic DNA

SEQ ID NO: 14855 - DNA, 40 bp, Emergencia timonensis
  source 1..40: mol_type = genomic DNA
aaacccttcatacttccatgtggggaggaatataactatg

SEQ ID NO: 14856 - protein, 536 aa, Clostridium spiroforme
MELCRKFVFIAIGVIDMNEPCLVALYCRLSDEDKQKAKKGDDSESIKNQRELLLRYCEVKNLKVYDIYVDDDYSGSDRGRPDFNRMIEDAKLHKFDMILAKTQARFARDSSLIQELLYDKFLEWNIYFKTIVDNIDTTSIGTKKSSQIIAMSDEWYLEDLSRNIRTVFENKKIQGHHIGSFAVYGYKKDPKQKGHLVIDEEAAEIVRQIFSLYAQGYGKTNIARILNESGIPNPSEYKRQKGLRYKHSGGNTGTLWKYFSINNVLHNEMYIGNMVQNKQCNISYKNSKKKQIPKSDWIIVKETHEPIIDIELWDTVQKKLKQKFKSFGNGKIGLFAYKVKCMNCHASLRSSKNRGKHYLKCETRFFHKEACQGAFISVEKLEKEVIKQLNQLNQELNCKNIEKGISLNNDLHQRIEKLKREIKKLNNDIEKTEQYLKQSYIDRLNGLISEYEYKKFSDDFQKERNNKSEQINEYKNKINELEKSLKNANERAKIVKRYINVEKLDRTMVEILIDTIYVGTNDRKNKIQPIKIEWNF

SEQ ID NO: 14857 - DNA, 50 bp, Clostridium spiroforme
  source 1..50: mol_type = genomic DNA
agttgtttattcttacttgccgaagagggagcatacaagaaagaacaact

SEQ ID NO: 14858 - DNA, 40 bp, Clostridium spiroforme
  source 1..40: mol_type = genomic DNA
aactgaagatatggcggcggaacaaaaggcaagaacaact

SEQ ID NO: 14859 - DNA, 50 bp, Clostridium spiroforme
  source 1..50: mol_type = genomic DNA
agttgtttattcttacttgccgaaaggggagcatacaagaaagaacaact

SEQ ID NO: 14860 - DNA, 40 bp, Clostridium spiroforme
  source 1..40: mol_type = genomic DNA
aactgaagatatgaaggagagaaagcagtaaagaataact

SEQ ID NO: 14861 - protein, 589 aa, Clostridiales bacterium UBA1390
MNNTFSFQQIAAPKVLSAEVREAISNNVLQFYVRDQQQDTQDEGITALYERLSQEDKLEGESNSIANQKKILERYCREHGYTAIRHYDEDDGYSGTNFNRPGFQRMLADIKAGKIKRVIVKDMSRFGRDYLQVGFYTDMLFPDFGVHFIAVNDGVDSTRGENEFTAIRNVFNEMYARDTSKKIRATWQSKGKSGEHLTTIPPYGYMKDPDNKKKWIIDEEAAAVVQQIFALCVSGLGPQKIGKWLEEHQILNPTFYWLSKGLKVTNKPKPGANPYKWTNETVSRMLEKIEYLGHTVNFKTRKQSYKSKKTLWNDPSEWVIFENTQPPIVEESVFLIVQNIRRSRRRPTKMGDMGIFSGLLYCAECGGKMYQCRATNFTEEQKYFICSTYRKGKDLCTTHSIKNVVLHEIVLRNLREAIEYVTQYEAEFIQEAADSRLRERDAEFSRKRETLSRAESRIAELDNLFKHLYEDNVTGKLSDERFIKMSRDYELEQENLKSMAEVLREEIKQQEKQKTNVKAFISVVKKYTDMQDLDASILREFIDRIEVSHTDKKSKTREITIVYNFIGAFDFERAKEKAQNTTQKQQRTA

SEQ ID NO: 14862 - DNA, 50 bp, Clostridiales bacterium UBA1390
  source 1..50: mol_type = genomic DNA
atgttttcttaattcaccgccccattcggcgcggtgagataagaaaacaa

SEQ ID NO: 14863 - DNA, 40 bp, Clostridiales bacterium UBA1390
  source 1..40: mol_type = genomic DNA
aatcaagaagaattccggttttgtccagtctttttttctt

SEQ ID NO: 14864 - DNA, 50 bp, Clostridiales bacterium UBA1390
  source 1..50: mol_type = genomic DNA
atgttttcttaattcaccgccccatacggcgcggtgagataagaaaacaa

SEQ ID NO: 14865 - DNA, 40 bp, Clostridiales bacterium UBA1390
  source 1..40: mol_type = genomic DNA
aaaaaaaaagacttccttttatgtccagtcatcttttcta

SEQ ID NO: 14866 - protein, 498 aa, Vibrio cholerae
MNKTKVYSYIRFSTSRQESGDSVRRQLEIARNYSEKVGGVYQDRSFTDMGISAFKQKERDGLQMMLDMVEDGSIEKGSHIVIERLDRLSRQGISVTQQLITQIVQTGVLLYVAGDNLLLDRNSLNDLSTVIIVAVAADLAYKESLQKSQRIKASKIAKKKDGLDGRVTKKVCPFWLTFDENKQGYVFNEKLPTIQRIIDLRQQGLGENKVAQHLNDENIKPPRAAKWNPTTLRKMYTHPALYGAWQTTEKADNGRYVDSDLIENYYPALLTYEEFSLMNPKSKTTTGKDSGLNPFKGLLRCAKCGATMSRQTTKMRSGEIYVAFRCTNAGKGIYCDAVGYRDLDKYLVSGCKRLKITKTADRDTRQQEADLRALESKLEQLQKAILTQTDISALINTSQLVERQIKELKSKIKPVATVTVEELYSHKDTPQSFNLLARSLLKRVEVEVKAKGRHTKTLFARFYQHNDYVITMTVLPSGESFYSTTELNELYKGTDNFD

SEQ ID NO: 14867 - DNA, 50 bp, Vibrio cholerae
  source 1..50: mol_type = genomic DNA
gatttgcgatttaacaactatacagtaatattgttggtaattagcatatc

SEQ ID NO: 14868 - DNA, 40 bp, Vibrio cholerae
  source 1..40: mol_type = genomic DNA
cttagcgccaaattgttgagtgatattcgctgtagaaatc

SEQ ID NO: 14869 - DNA, 50 bp, Vibrio cholerae
  source 1..50: mol_type = genomic DNA
gatttgcgatttaacaactatacaaaaatattgttggtaattagcatatc

SEQ ID NO: 14870 - DNA, 40 bp, Vibrio cholerae
  source 1..40: mol_type = genomic DNA
ctgagtggcaattggttgaaagttattatctgtagaaagc

SEQ ID NO: 14871 - protein, 674 aa, Streptomyces albireticuli
MHPGDGGNRPGAWPTEVESTVAYGTTTLRGSVKVAARATSGRRLRAVDYLRVSTEEQKKGFGVAKQGRKTARHMARKDWDHVGTYIDDGVSGSLEMHERGDLARLMKDAHGDSFDVVVVEEGRAIGRVGRAFWRWVWALEDIGIFVSIVDGDIDNTTPEGRREMRRQADYAETEWETIRSRTQGGLQEKAEAPGSPHIGGRAPFGYRIADQGKVGLSRLVICEGEAEVIRLVHHWVTGEGLSFRKAAIRLNAQGKVTRSGKPWSYPNLRDRILSDPVLKGELVFRGKHAKVDISGSLAWGDRVAIPLPRILTEEESTELQNSVRGYRKRSAANRNFYPLSGRIVGLCGSPYTGHGRGSVQGCDRFYRCDGKREKTPGAAVCECSYVEAPTLEKRVWSEIVQLLGNSTKLEELAAEWVGMSTGDHGAHKERIDELDAQIASINSAIAAVIVATAKQNAGSVDAPEAITRATAALNDELGQLHQMRDEAASWLTEQEEADQRAWSLHELARRARRELADMEPEDQAEIMELLDLKVIFEGPVPVRTGGVTCSVQAWYRSTDLEIPAADLSDSEWDAIAPLIPRGRKSTMRRSVNALFYKARTGIPWSDLPDRYGSPSTGSKYFNHWVSDGTWGRINQALPGIQRVTLPVVELLPAMRVEGRFDPRVMLLPAEPSGM

SEQ ID NO: 14872 - DNA, 50 bp, Streptomyces albireticuli
  source 1..50: mol_type = genomic DNA
tgctacccgctgaaccatccggcatgggatcgttgcggcaggagcaggat

SEQ ID NO: 14873 - DNA, 40 bp, Streptomyces albireticuli
  source 1..40: mol_type = genomic DNA
ggaaggacgcgatgccccagggaatggtgatgatcagaac

SEQ ID NO: 14874 - DNA, 50 bp, Streptomyces albireticuli
  source 1..50: mol_type = genomic DNA
tgctacccgctgaaccatccggcattggatcgttgcggcaggagcaggat

SEQ ID NO: 14875 - DNA, 40 bp, Streptomyces albireticuli
  source 1..40: mol_type = genomic DNA
gaaatgacaagaggctacattcaatggtgatgatcataac

SEQ ID NO: 14876 - protein, 621 aa, Rhizobium dioscoreae
MTNIRRRSGPKQVSVNKPKPKRGKKEQLSKSVHVETQPALEMLFNDVLNRQAKKESAADRRRRQSASMDETSQTLSGPTRAALYIRVSGDKSVKSDLSMPDQEAQLRKFCDQQQWEIVAVYYEPGRSAKSTARKEFRRMIRDASAEGDPPFDKILIHSTSRFARSSRDYLIFEALLHHRRIEILAISQTFSKDAGGMVSLRMTNLMDEFHSIRSSVDSTRARVRMVDKGYWPGGVPPHGYKCVPCPENRQRSRLAVHDEERLTVEKVYSMAVYGDGSGPPMGVKSIVVWLNEHGYRTRSGSRWSVQGIHRMLTHSIYYGQYFWGVNQTEHQFQEKYEPRYLQVAPIVSRGDFDKVQQMLTFRNPRKSGAKLVSSPLLLSGIARCACGASMTLGTGTGKKGRIYRYYRCSSDARGTNVRASASPEERKCSRPRVAEDDLDSVVLEQVRDQVLCHDRLFELLTRLRDREMLAREKENILVPQLRTRIAAAEKALTGLFAIAKQVPSISEQRPYQDDVAAVSVELRTANQMLSDLLRRTYDHAGGITPESVDLFRNDMLELLFGENRAVAKIYLSTIVAVVIVGERTIDIQGHISDLASGVDHAKQCSLGSSASGVRTYERRWR

SEQ ID NO: 14877 - DNA, 50 bp, Rhizobium dioscoreae
  source 1..50: mol_type = genomic DNA
caggggttcgtacatatgaacgcagatggcgggttaagggggatataaat

SEQ ID NO: 14878 - DNA, 40 bp, Rhizobium dioscoreae
  source 1..40: mol_type = genomic DNA
agggtaagataaacgggaaaatggcggagaagatgggatt

SEQ ID NO: 14879 - DNA, 50 bp, Rhizobium dioscoreae
  source 1..50: mol_type = genomic DNA
caggggttcgtacatatgaacgcaaatggcgggttaagggggatataaat

SEQ ID NO: 14880 - DNA, 40 bp, Rhizobium dioscoreae
  source 1..40: mol_type = genomic DNA
agggaaagagaaatgggaaaatgggggagaaaaggaggtg

SEQ ID NO: 14881 - protein, 628 aa, Ruminococcus torques
MRKNEKITALYERLSRDDFGKDDDQQRESNSISNQKAMLEEFAARQGFTNIVHFTDDGISGTCFDRPGFLAMMKEVEAGNVEYLCIKDMSRMGRDYLKVGQIMEILRQRGVRLIAINDGVDSARGDDDFTPFRNIMNEYYARDTSRKIRSTFQSKGKSGKHLTGTVIYGYLWNEARDQWLVDPEAAEVVKRIFAMTIEGYGPYQIASKLKEEKILIPSAYLAQHGEGVNKNKTFKDVYGWGSSTICNLLEKREYLGHTINFKTRKHFKDKKSHYVPEDEWTIFENTHEAIIDQQTFDLVQKIRGNVRRYPDGWGEAAPLTGLLYCADCGGKMYVHRTNNGKRISQYTCSQYSKVPVGKLCTTQHRINEDVVLSLVSEMLKAIAEYAKHDRAEFVRVVQEAQSSQQTAEVKKQRTRLATAKQRVSELEVLLCKIYEDNILGKLSDSRYATLDAQYEKEQSELTAEVSVLEKAVKSYEKHEKDADRFIALIDKYENFDKLTIAMLNEFIEKILVHERDRKGSIQTTQEVEIYFNFVGRFVPPAFGEVELTPEELEEIRKREERKDRLHQNYLKRKASGAQKRYEDKIKGRKKAEIEAKKAAIRAEDIAKGVFVPVSSLPQREPMKGVQTA

SEQ ID NO: 14882 - DNA, 50 bp, Ruminococcus torques; identical to SEQ ID NO: 57
  source 1..50: mol_type = genomic DNA

SEQ ID NO: 14883 - DNA, 40 bp, Ruminococcus torques; identical to SEQ ID NO: 4983
  source 1..40: mol_type = genomic DNA

SEQ ID NO: 14884 - DNA, 50 bp, Ruminococcus torques; identical to SEQ ID NO: 11199
  source 1..50: mol_type = genomic DNA

SEQ ID NO: 14885 - DNA, 40 bp, Ruminococcus torques
  source 1..40: mol_type = genomic DNA
cagcttgaaggagacagcagcaaagacctcaaagtccatt

SEQ ID NO: 14886 - protein, 626 aa, Ruminococcus torques
MRNEKITPLYERLSRDDELQGESNSISNQKQMLEDFARRNGLPNPTHFTDDGISGTRFDRPGFLAMMEEVEAGRVEAIVIKDMSRLGRDYLKVGQVMEVLRQRGVRLIAINDGVDSLKGDDDFTPFRNIMNEFYARDTSRKIRSVFKSKGMSGKHLTGTVIYGYLWDEKREHWLVDEEAAEVVRRIFSLTLEGYGSYQIACKLSTDRIEIPVVHLARFNEGVNRSKPVKAPYGWGSSTIVNILKKREYLGHTINFKTRKHFKDKKSHYVSEDEWTIFENTHEAIIDQQTFDLAQKIRSNVRRYPNGWGEAAPLTGLLYCADCGGKMYVHRTNNGKRVSQYTCSNYTKVPCGTLCPTQHRINESAVLTLVSDTLRAIAEYSKNDRTEFIHTVQETQVAQQSADISKKRRRMAAAQKRAGELEKLICKIYEDNALGKLPDARYRALDAQYTKEQDALEIEIAELEKAVTGYEQSQKSAEKFIALIDKYENFDTLTNTMLNEFVEKILVHERARKGSQDTTQEIEIYFNFLGRYIPPSLQPVPLTPEEQEELQKKEERKDRLHQNYLKRKASGAQKQYEDKIKAKKKAEMDAKKALIRAEDMNKGVFSTIGQLPKEEPRKGSIAASAAV

SEQ ID NO: 14887 - DNA, 50 bp, Ruminococcus torques; identical to SEQ ID NO: 2337
  source 1..50: mol_type = genomic DNA

SEQ ID NO: 14888 - DNA, 40 bp, Ruminococcus torques; identical to SEQ ID NO: 4983
  source 1..40: mol_type = genomic DNA

SEQ ID NO: 14889 - DNA, 50 bp, Ruminococcus torques
  source 1..50: mol_type = genomic DNA
aaaagtccttgacaatttgtctctgctgatatatgctctaagtgacttct

SEQ ID NO: 14890 - DNA, 40 bp, Ruminococcus torques; identical to SEQ ID NO: 14885
  source 1..40: mol_type = genomic DNA

SEQ ID NO: 14891 - protein, 628 aa, Ruminococcus torques
MRKNEKITALYERLSRDDFGKDDDQQRESNSISNQKAMLEEFAARQGFTNIVHFTDDGISGTCFDRPGFLAMMKEVEAGNVEYLCIKDMSRMGRDYLKVGQIMEILRQRGVRLIAINDGVDSARGDDDFTPFRNIMNEYYARDTSRKIRSTFQSKGKSGKHLTGTVIYGYLWNEARDQWLVDPEAAEVVKRIFAMTIDGYGPYQIASKLKEEKVLIPSAYLARHGEGVNKNKTFKDVYGWGSSTICNILEKREYLGHTINFKTRKHFKDKKSHYVPEDEWTIFENTHEAIIDQQTFDLVQKIRGNVRRYPDGWGEAAPLTGLLYCADCGGKMYVHRTNNGKRISQYTCSQYSKVPVGKLCTTQHRINEDVVLSLVSEMLKAIAEYAKHDRAEFVRVVQEAQSSQQTAEVKKQRIRLATAKQRVSELEVLLCKIYEDNILGKLSDSRYATLDAQYEKEQTELTAEISVLEKAIKSYEKHEKDADRFIALIDKYENFDKLTIAMLNEFIEKILVHERDRKGSIQTTQEVEIYFNFVGRFVPPAFGEVELTPEELEEIRKREERKDRLHQNYLKRKASGAQKRYEDKIKKRKKAEIEAKKAAIRAEDIAKGVFVPVSSLPQREPMKGVQTA

SEQ ID NO: 14892 - DNA, 50 bp, Ruminococcus torques; identical to SEQ ID NO: 57
  source 1..50: mol_type = genomic DNA

SEQ ID NO: 14893 - DNA, 40 bp, Ruminococcus torques; identical to SEQ ID NO: 4983
  source 1..40: mol_type = genomic DNA

SEQ ID NO: 14894 - DNA, 50 bp, Ruminococcus torques; identical to SEQ ID NO: 11199
  source 1..50: mol_type = genomic DNA

SEQ ID NO: 14895 - DNA, 40 bp, Ruminococcus torques; identical to SEQ ID NO: 14885
  source 1..40: mol_type = genomic DNA

SEQ ID NO: 14896 - protein, 628 aa, Ruminococcus torques; identical to SEQ ID NO: 10266

SEQ ID NO: 14897 - DNA, 50 bp, Ruminococcus torques; identical to SEQ ID NO: 262
  source 1..50: mol_type = genomic DNA

SEQ ID NO: 14898 - DNA, 40 bp, Ruminococcus torques
  source 1..40: mol_type = genomic DNA
ccatttacaagcaggcggcaggaaagaccgcaaagtccat

SEQ ID NO: 14899 - DNA, 50 bp, Ruminococcus torques
  source 1..50: mol_type = genomic DNA
aaaaagtccttgacttttcgtctcaggtgttgtatgctctaaaagacttc

SEQ ID NO: 14900 - DNA, 40 bp, Ruminococcus torques
  source 1..40: mol_type = genomic DNA
ccagcttgaaggagacagcagcaaagacctcaaagtccat

SEQ ID NO: 14901 - protein, 404 aa, Mycobacterium tuberculosis; identical to SEQ ID NO: 12861

SEQ ID NO: 14902 - DNA, 50 bp, Mycobacterium tuberculosis
  source 1..50: mol_type = genomic DNA
ttcagcagtccacggccaaccccgccaaccgtggacctgtgagatacact

SEQ ID NO: 14903 - DNA, 40 bp, Mycobacterium tuberculosis
  source 1..40: mol_type = genomic DNA
caccccacctcgaccacggcaccaacaccttccaccacca

SEQ ID NO: 14904 - DNA, 50 bp, Mycobacterium tuberculosis; identical to SEQ ID NO: 14902
  source 1..50: mol_type = genomic DNA

SEQ ID NO: 14905 - DNA, 40 bp, Mycobacterium tuberculosis
  source 1..40: mol_type = genomic DNA
cacaccaccaccaccacaacctctacaacttccaacacca

SEQ ID NO: 14906 - protein, 548 aa, Blautia wexlerae; identical to SEQ ID NO: 3731

SEQ ID NO: 14907 - DNA, 50 bp, Blautia wexlerae; identical to SEQ ID NO: 277
  source 1..50: mol_type = genomic DNA

SEQ ID NO: 14908 - DNA, 40 bp, Blautia wexlerae
  source 1..40: mol_type = genomic DNA
gtgaaaagcccgcaaagccttgtgtttagcgggtttcagg

SEQ ID NO: 14909 - DNA, 50 bp, Blautia wexlerae; identical to SEQ ID NO: 2839
  source 1..50: mol_type = genomic DNA

SEQ ID NO: 14910 - DNA, 40 bp, Blautia wexlerae
  source 1..40: mol_type = genomic DNA
gttaaaattccacaaagcctgctgtttactgagtttcagc

SEQ ID NO: 14911 - protein, 661 aa, Vibrio crassostreae
MFSFDKNLYKGICIPYARFSTKSQSKVGKKSLERQLGEARRYADQNNLFINEDLIFADKGVSGRSLSGNLAKAFKKGQMQVMLAMLDDVPAEERQFVFITFHNFDRFSRMSPDDAQAYFNLILQKGFNIITTIDNQLYTRNNKSLSSMIISIIKMTTAWQESEVKSIYVKDALARKKEIVDYLYNHPSQKGKHKHIGVVQPSIPRWIKQENITYEYVDQNGLKKVDTFKRFTLHEQKAKIVQYIFELRLSGLGHTRISQRLNEEGIPVFDQGKFKEAKHWHGYAIQNILVNEKVLGHLVLKSYKEEEFLCEESKTFKKRKVPVDSTGKLHNYYPAAVTEDMFIRANNVQLNKKSKPKPIGRIGERTNIFARIMVCSCGGSLQYHRTVKKFKNHERIKEYLRCLNAQFKNKCNCSGINYTELEESFFRFVNHLDFRSICAIGAGSVDNKIQSIEMQISESETVFNKLKLTKQGLERTFNSAIEKGMDATFVLNSISQNDEQQKEVKSKIEDLGLHIKKLELSKQNTVDEIIDMQAYSKDLKKADMDTKIKMRKKINDFLSSHIEHMEVCSNDYQRFVIVCFGDNIIRTYAYSDNFASDLMFNSIKVNFKGLNATQSKFLFVNYLKIIRESLKGERGAVSRLDMLNDLKQAKELYHNNLGIEL

SEQ ID NO: 14912 - DNA, 50 bp, Vibrio crassostreae
  source 1..50: mol_type = genomic DNA
ggttgcgtaaacgtatgtgcatccttagatatgcactatattacgaaacc

SEQ ID NO: 14913 - DNA, 40 bp, Vibrio crassostreae
  source 1..40: mol_type = genomic DNA
tgaagacatcttgatatccttcattgtgaagaaacccagt

SEQ ID NO: 14914 - DNA, 50 bp, Vibrio crassostreae
  source 1..50: mol_type = genomic DNA
ggttgcgtaaacgtatgtgcatccaaagatatgcactatattacgaaacc

SEQ ID NO: 14915 - DNA, 40 bp, Vibrio crassostreae
  source 1..40: mol_type = genomic DNA
tgaagaaatgttgataaccaacagtttgaaaaagatcagt

SEQ ID NO: 14916 - protein, 524 aa, Croceibacter atlanticus
MKDLSIFNQFARTDDSKSLRQAGNAVIYTRVSTKEQADNNASLDTQLKYCEQLAQKKGLDVVEYFGGTYESAKSDERKHFQKMLNFVKRRKDIGYIIVYSYDRFSRTGANGAYISDQLKRQGIVTISATQEVDTSTSAGSFQQNLYYMFSQFDNELRRDKSVSGMQEKLRRGDWTGAWPYGYSNTNPGKGKKPNFVINDKGKLLKKAFEWKAMSNTSHVEISKKLKRKGLELSAKKLSDYFRNPFYCGLMVNKLIPGEVIQGNHEPMISREMFLKIHNLLNSREEGRKYNLDDENLPLKMFIKSTECGTPYTGYVVKKKGLYYYKNRRSGSRENRSAKKLHSSFMALLENYTLADPKYIEPLKEIIEQTFIDLNKEQIDEAKVLNTQATELDVKLDRLEERYVFEEITKVQYDKFKSKLESEKNKITELVSNSGFNSSNLKKSIDKALNLALNLPSLWQSGNIEVKRSLQFMLFPEGIGYDFKNDRLRTFRVNSIFSAIASISDNLEGNKNGTFQNNFEKSRLV

SEQ ID NO: 14917 - DNA, 50 bp, Croceibacter atlanticus; identical to SEQ ID NO: 352
  source 1..50: mol_type = genomic DNA

SEQ ID NO: 14918 - DNA, 40 bp, Croceibacter atlanticus
  source 1..40: mol_type = genomic DNA
taggagtttaatttttgtgaccgcgccaggattcaaacct

SEQ ID NO: 14919 - DNA, 50 bp, Croceibacter atlanticus
  source 1..50: mol_type = genomic DNA
aattttgaaaaatcccgtttagtgtcctcaacgggacagagttcgaactt

SEQ ID NO: 14920 - DNA, 40 bp, Croceibacter atlanticus
  source 1..40: mol_type = genomic DNA
tatgtgtttaatgtttgtctcccctctagaattcaaactt

SEQ ID NO: 14921 - protein, 628 aa, Blautia obeum
MRKNEKITALYERLSRDDFGKDDDQQRESNSISNQKAMLEEFAARQGFTNIVHFTDDGISGTCFDRPGFLAMMKEVEAGNVEYLCIKDMSRMGRDYLKVGQIMEILRQRGVRLIAINDGVDSARGDDDFTPFRNIMNEYYARDTSRKIRSTFQSKGKSGKHLTGTVIYGYLWNEARDQWLVDPEAADVVKRIFAMTIEGYGPYQIASKLKEEKILIPSAYLAQHGEGVNKNKTFKDVYGWGSSTICNILEKREYLGHTINFKTRKHFKDKKSHYVPEDEWTIFENTHEAIIDQQTFDLVQKIRGNVRRYPDGWGEAAPLTGLLYCADCGGKMYVHRTNNGKRISQYTCSQYSKVPVGKLCTTQHRINEDVVLSLVSEMLKAIAEYAKHDRAEFVRVVQEAQSSQQTAEVRKQRTRLATAKQRVSELEVLLCKIYEDNILGKLSDSRYATLDAQYEKEQSELTAEISALEKAVKSYEKHEKDADRFIALIDKYENFDKLTIAMLNEFIEKILVHERDRKGSIQTTQEVEIYFNFVGRFVPPAFGEVELTPEELEEIRKREKRKDRLHQNYLKRKASGAQKRYEDKIKGRKKAEIEAKKAAIRAEDIAKGVFVPVSSLPQREPMKGVQTA

SEQ ID NO: 14922 - DNA, 50 bp, Blautia obeum; identical to SEQ ID NO: 262
  source 1..50: mol_type = genomic DNA

SEQ ID NO: 14923 - DNA, 40 bp, Blautia obeum
  source 1..40: mol_type = genomic DNA
aaaaatacaagctggctgccggtaagacagcaaaatctat

SEQ ID NO: 14924 - DNA, 50 bp, Blautia obeum; identical to SEQ ID NO: 264
  source 1..50: mol_type = genomic DNA

SEQ ID NO: 14925 - DNA, 40 bp, Blautia obeum
  source 1..40: mol_type = genomic DNA
aaaagtagagggtgggtgcaagatggacagcaaaatctac

SEQ ID NO: 14926 - protein, 544 aa, Aneurinibacillus migulanus
MYTAIYIRVSTGMQATEGTGLEGQYEACLKKAQEFLVSASAIKLYKEDGFTGEDISRPAMNELRSDVSAGRIERVIITHPDRLTRDLTDKLILCREFEKSNVELVFVDTEYRNTPEGQLFFNLMSSIAQYELSLIKKRTVRGRLKAVEKDKKIMPMRVAPYGFNMVNNKLLVNEEEAEFVKKVYHWYVYEGLTLREIGERLFTLGAEPKRAESRNWGASSIRRILTSEIYIGKYYYNRRQTSKVKGEKTKSGSPRKTYSFRDKSEWIMLDVPPIIDEQLFELAQRQREVNTKKSGNVKYEYLLKSLIRCGHCGRMWQSTTYSGRVDKQTGKRMKYMCYRCPNLFPKKYGEGVEKCCTKSLRAEELDRYIWGLILETISNPDDYIQRITRQSGDILENLLSTASLLQKQVEQKEKEKEKIKTMFKREVIDEKEMVDEMQKINTAMRTIQAELEKYEEQVVLHKEKEMSADRIKEIAQLINQFVDNEGRDLTFDEKRTIVEALVDEIIIRFNDNSVEVTAVGALDELKRQRLLQHCHDVGSGLYHQ

SEQ ID NO: 14927 - DNA, 50 bp, Aneurinibacillus migulanus
  source 1..50: mol_type = genomic DNA
acgtcggttcgggtttatatcaccaagagattgtaaacacagcccaatgt

SEQ ID NO: 14928 - DNA, 40 bp, Aneurinibacillus migulanus
  source 1..40: mol_type = genomic DNA
actggtggcacatattgttaagaaatttgaaaacaccgga

SEQ ID NO: 14929 - DNA, 50 bp, Aneurinibacillus migulanus
  source 1..50: mol_type = genomic DNA
acgtcggttcgggtttatatcaccaggagattgtaaacacagcccaatgt

SEQ ID NO: 14930 - DNA, 40 bp, Aneurinibacillus migulanus
  source 1..40: mol_type = genomic DNA
catcatggcacatctttttaggaaattttagaacactgga

SEQ ID NO: 14931 - protein, 454 aa, Sphingomonas taxi
MVVAGGAPHRRLDYPIAFGDEHGGGEPCIVTVRTTGTRGTAGALFLKDLGEKIRRGQRGSVSRGRIPGGLCYGYDVVRELNDKGELEAGRRRINLDQAEVVVRILTEYVAGRSPKLIAHGLNLDGIVAARGGEWRANAIVGNKARMIGILHNPIYVGRFAYNRVRMLTDPESRNRVSRPNAASDLQFAELPELRIVTDELWEAAQEAREQRGNGKLVHRRRPKHLLSGLVRCGLCDGSYTVISDNRMGCARHREAGTCSNARRIERTELQRRVISGLEDQLLSPEAVSLLVREYHVAREKQVREGAKTRLALERRLRTAEAAIARLVAAIADGAADFSDIKAALAEKTAERDAARASLGEEDAVPVIALHPRIAEAYRARIRGLSESIGRGEAAGDPVVAQIRELIQVVYVKPLDDGNEVEVIPSLQSAVAFATGSKSNTTRRRSPVADMMVAK

SEQ ID NO: 14932 - DNA, 50 bp, Sphingomonas taxi
  source 1..50: mol_type = genomic DNA
tgtggcggatatgatggtagcgaaggaccgcgaccaacgtagccgccgca

SEQ ID NO: 14933 - DNA, 40 bp, Sphingomonas taxi
  source 1..40: mol_type = genomic DNA
agtctgaaatggtagcgaaggagggacttgaacccccgac

SEQ ID NO: 14934 - DNA, 50 bp, Sphingomonas taxi; identical to SEQ ID NO: 14932
  source 1..50: mol_type = genomic DNA

SEQ ID NO: 14935 - DNA, 40 bp, Sphingomonas taxi
  source 1..40: mol_type = genomic DNA
cttctgcaatgggtgcccaggagggacttgaaaccccgcc

SEQ ID NO: 14936 - protein, 503 aa, Enterocloster clostridioformis; identical to SEQ ID NO: 341

SEQ ID NO: 14937 - DNA, 50 bp, Enterocloster clostridioformis; identical to SEQ ID NO: 12
  source 1..50: mol_type = genomic DNA

SEQ ID NO: 14938 - DNA, 40 bp, Enterocloster clostridioformis
  source 1..40: mol_type = genomic DNA
ctgtaatttgcaatattatttaccaagcactaaatcatat

SEQ ID NO: 14939 - DNA, 50 bp, Enterocloster clostridioformis; identical to SEQ ID NO: 11589
  source 1..50: mol_type = genomic DNA

SEQ ID NO: 14940 - DNA, 40 bp, Enterocloster clostridioformis
  source 1..40: mol_type = genomic DNA
ctataattagcaatattttgaaaaaaacaataaaacattt

SEQ ID NO: 14941 - protein, 501 aa, Coprococcus eutactus
MIIREDAIYGRQSVDRKDSISIESQIEFCKYELRGGNFRKYTDKGYSGKNTDRPKFQEMMADIRRGLIKRVVVYKLDRISRSILDFATMMETFQEYNVEFVSSTEKFDTSTPMGRAMLNICIVFAQLERETIQKRVTDAYYSRCQHGFHMSGAAPYGFQLEPTTIEGIRTKMMKPDPETADIAKLMFEMYSQPGISFGDIARYFADEGILIYGKEMKRGFISQLLRNPIYAQADLDMYEFFKSQGTVVVNEGTDFAGTNGCYLYQGRDVQERKNKHLKDQILVLAPSEGLVSSDTWLRCRKKLMANKTFQGGRKAKNTWLAGKVKCGRCGYALMSVGNPTGVQYLRCSKRADSKSCDGCGTLRTREFERFLYGEMVKKLSEFQTLTAKRETVNPKLTALNMELARVEDEIEKLLNTLTGANAVLLSYANSKIEELDTRRQALTKEIAALSAETMSPEQIERLSVYLNQWEEIDFEDRRQVADGLISQIRATDEHVSIEWKI

SEQ ID NO: 14942 - DNA, 50 bp, Coprococcus eutactus
  source 1..50: mol_type = genomic DNA
ctgtgtgcccttgtcaagcaatgtaaacatcgcttgacaagggcacacag

SEQ ID NO: 14943 - DNA, 40 bp, Coprococcus eutactus
  source 1..40: mol_type = genomic DNA
gtgttatatattccaacggaagaaaataaagattttcaac

SEQ ID NO: 14944 - DNA, 50 bp, Coprococcus eutactus
  source 1..50: mol_type = genomic DNA
ctgtgtgcccttgtcaagcaatgtgaacatcgcttgacaagggcacacag

SEQ ID NO: 14945 - DNA, 40 bp, Coprococcus eutactus
  source 1..40: mol_type = genomic DNA
ttgttctatggtcctacgggagaacattaagttgttcaac

SEQ ID NO: 14946 - protein, 606 aa, Aeromonas sp ASNIH1
MNGPKIYPYSRISSSKQAKGQGLTIQQEDSLLQELSERYQLPIYEHRMIDSGKSAFHGDHIKDGQLGWFLNAVRSGEVAEGSILVVSSLDRFSRQEIRKATSDLAGVLSCNIGIYSAIEQRMFCDPYGDKSSNVLDIQLAVMILERAYGESRTKQVRTLKLRDLAIGRHLNGERHPSGYAYSIKVVGNDVWWVDNSDGVVRPHPVYIHVARQIALRLMAGHSPRKVTDWLNREGPDCPIQRFDKRAPKVWSHHVIRRFHLSRALVGEKQINDIILEGYYPSVLTENEYAALVDARTRRKRPRTTGKATAISLFAELPQATCRHCGASIHMNRETGGALNYRCSGFREEYRCLGWSKRGAVIEKALLGICLDKVWKDPETLPLSRVPALQAQIDKINGHIHNLMEQAREKGFPKILTLEIGRLESQLNELSTQMELAKAEEVALQARTCASLVPRWGAISDRVLDTKNDDARIELRELLRDSIASLTIGRPGLISLQDRLALLSDPSKSIDEKNRLLAEEVPRGPERFIFVMDVTFNDGAHRCVTMDRHGVTAIVGTDRSSLGTDVAAKLGSVPTRIFNAYAPDEIDEELMAELETLRRSDRNAIPE

SEQ ID NO: 14947 - DNA, 50 bp, Aeromonas sp ASNIH1
  source 1..50: mol_type = genomic DNA
aacatctgacattgatgatacggctggccgtagactcaatgtcagatgtt

SEQ ID NO: 14948 - DNA, 40 bp, Aeromonas sp ASNIH1
  source 1..40: mol_type = genomic DNA
atcttcatggggccttgggtggccggaagccccgtttttc

SEQ ID NO: 14949 - DNA, 50 bp, Aeromonas sp ASNIH1
  source 1..50: mol_type = genomic DNA
aacatctgacattgatgatacggcgagccgtagactcaatgtcagatgtt

SEQ ID NO: 14950 - DNA, 40 bp, Aeromonas sp ASNIH1
  source 1..40: mol_type = genomic DNA
atactcatgagaacattgggagcctgaagccccgttttcc

SEQ ID NO: 14951 - protein, 598 aa, Ruminococcus lactaris; identical to SEQ ID NO: 11241

SEQ ID NO: 14952 - DNA, 50 bp, Ruminococcus lactaris
  source 1..50: mol_type = genomic DNA
aaactcattggggtgaggatagcaaatgagatcctatcgccaatggggtt

SEQ ID NO: 14953 - DNA, 40 bp, Ruminococcus lactaris
  source 1..40: mol_type = genomic DNA
tgcatcccgctgtgttgaaaatgagatcctgatgtacctg

SEQ ID NO: 14954 - DNA, 50 bp, Ruminococcus lactaris
  source 1..50: mol_type = genomic DNA
aaactcattggggtgaggatagcatttgagatcctatcgccaatggggtt

SEQ ID NO: 14955 - DNA, 40 bp, Ruminococcus lactaris
  source 1..40: mol_type = genomic DNA
cccatcccactgtgttgagtttgtgattctgatttagttg

SEQ ID NO: 14956 - protein, 606 aa, Pseudomonas aeruginosa
MLERGGDAMPKIWPYIRFSSEEQKKGDSLRRQQELIERFAARPEIVAEGAEIDTSLDLNDLGVSGFTGKNVLQGRFKDFLDAVDSGIVKPGDYLAVEALNRVTRLDPMESLPILLDLMKKGVKIAITANSQIYKQGGDITQLYIALGELQRGYAESEEKGRRVRQAWDKKKERAFQTGEIATSRLPLWLRAVKTDQKGLIVRKVEEIPERVAIVKEIFRLSDSNIGAIATARLLTERGVPTFTRENPRKNPNYGDFWQPSYIKKILDSRAVLGHYQPMTWEKLPDNRRRRINHGPEIENYFPQIITPELFRRVQEKRRGRGKEGQGNKGKKFSNLFLKIAHCAKCGATASHVNKGPDPRKGGRYLVCYRARHGDCSYKAWRYDDLETMILKFLAEADIKSIISEENKADELINKKYEIDAEINDIQEMLDAYKADFKRLKGRVSDLDREMAIENEQTLKELKEKAKDLDQEIFKALEQKKADIEKDILDLRGLSNTEDANTVFEVRSKINERLKVIIEDIKIDFQDRHIEIIFKNETRRHLKNHLAVERRESTEADQKRQDDYDDFYSSLTDEQKAELNQYSIPAEIANDPKRLIEYLAQFNVVED

SEQ ID NO: 14957 - DNA, 50 bp, Pseudomonas aeruginosa
  source 1..50: mol_type = genomic DNA
ggggtctaatggttgcctaaaagaagcatttagaccatcattggacccct

SEQ ID NO: 14958 - DNA, 40 bp, Pseudomonas aeruginosa
  source 1..40: mol_type = genomic DNA
cccggcgggccgctgagcaacaggttgtgcgcgccggcgg

SEQ ID NO: 14959 - DNA, 50 bp, Pseudomonas aeruginosa
  source 1..50: mol_type = genomic DNA
ggggtctaatggttgcctaaaagagccatttagaccatcattggacccct

SEQ ID NO: 14960 - DNA, 40 bp, Pseudomonas aeruginosa
  source 1..40: mol_type = genomic DNA
ctcggcgggccggagccctgcaggctgggcgcgcccgcgg

SEQ ID NO: 14961 - protein, 592 aa, Pseudomonas aeruginosa; identical to SEQ ID NO: 11606

SEQ ID NO: 14962 - DNA, 50 bp, Pseudomonas aeruginosa
  source 1..50: mol_type = genomic DNA
tgggtccaatggttgcgtaaaagaaggaattgagacaccattagacccca

SEQ ID NO: 14963 - DNA, 40 bp, Pseudomonas aeruginosa; identical to SEQ ID NO: 14958
  source 1..40: mol_type = genomic DNA

SEQ ID NO: 14964 - DNA, 50 bp, Pseudomonas aeruginosa
  source 1..50: mol_type = genomic DNA
tgggtccaatggttgcgtaaaagagcgaattgagacaccattagacccca

SEQ ID NO: 14965 - DNA, 40 bp, Pseudomonas aeruginosa; identical to SEQ ID NO: 14960
  source 1..40: mol_type = genomic DNA

SEQ ID NO: 14966 - protein, 549 aa, Mycoplasma hominis
MSKEKIKVYLYTRVSTSIQIEGYSLEAQKSRMKAFAIYNDYEIVGEYEDAGKSGKSIEGRIQFNRMMEDIKSGKDGVSFVLVFKLSRFARNAADVLSTLQIMQDYGVNLICVEDGIDSSKDAGKLMISVLSAVAEIERENIRIQTMEGRIQKAREGKWNGGFAPYGYKLEDGKLFINEEEAIAIRTIFDQYVNTTIGANGISKYLENHGIRKIPRQNGKNPLFDAGLIRKILKNPVYNGKIAFGRRTLEKVHGTRNEYKQVEQDEYLISEGIHEAIVSDEVWQAAQVKLKSQAKKYEHVNKGKDTRTHLLSEIVKCPICGVGMFGNKCIKKKKDGTKYKDFYYYGCKHRQMIRGHKCTFRKQIREELLDDAVAEVIVKIVSNPKFASMMQEKINMKVDTSEIETEIDNYQKELRKCHSTKFKLIEEIDNLDVEDKHYKRRKQDLDDRLYRMYDKIDELESSLIDAKAKKQTIEAEKLTGDNIYKVLIYFDKLYKVMNDVERRQLITALISEIQVYEEKQPNGQWLKSITFKLPIIEENLNIGLDNDEHV

SEQ ID NO: 14967 - DNA, 50 bp, Mycoplasma hominis; identical to SEQ ID NO: 12327
  source 1..50: mol_type = genomic DNA

SEQ ID NO: 14968 - DNA, 40 bp, Mycoplasma hominis
  source 1..40: mol_type = genomic DNA
tcctcaaacttatcatattgaaatgttgtcacttttgaaa

SEQ ID NO: 14969 - DNA, 50 bp, Mycoplasma hominis
  source 1..50: mol_type = genomic DNA
ggtttggacaatgatgagcacgtttagacggtagcacttttgtccaaact

SEQ ID NO: 14970 - DNA, 40 bp, Mycoplasma hominis
  source 1..40: mol_type = genomic DNA
ttctctaccttatcatacttaaatgccatccctttagaaa

SEQ ID NO: 14971 - protein, 549 aa, Mycoplasma hominis
MSKEKIKVYLYTRVSTSIQIEGYSLEAQKSRMKAFAIYNDYEIVGEYEDAGKSGKSIEGRIQFNRMMEDIKSGKDGVSFVLVFKLSRFARNAADVLSTLQIMQDYGVNLICVEDGIDSSKDAGKLMISVLSAVAEIERENIRIQTMEGRIQKAREGKWNGGFAPYGYKLEDGKLFINEEEAIAIRTIFDQYVNTTIGANGISKYLENHGIRKIPRQNGKNPLFDAGLIRKILKNPVYNGKIAFGRRTLEKVHGTRNEYKQVEQDEYLISEGIHEAIVSDEVWQAAQVNLKSQAKKYEHVNKGKDTRTHLLSGIVKCPICGVGMFGNKCIKKKKDGTKYKDFYYYGCKHRQMIRGHKCTFRKQIREELLDDAVAEVIVKIVSNPKFASMMQEKINMKVDTSEIETEIDNYQKELRKCHSTKFKLIEEIDNLDVEDKHYKRRKQDLDDRLYRMYDKIDELESSLIDAKAKKQTIEAEKLTGDNIYKVLIYFDKLYKVMNDVERRQLITALISEIQVYEEKQPNGQWLKSITFKLPIIEENLNIGLDNDEHV

SEQ ID NO: 14972 - DNA, 50 bp, Mycoplasma hominis; identical to SEQ ID NO: 12327
  source 1..50: mol_type = genomic DNA

SEQ ID NO: 14973 - DNA, 40 bp, Mycoplasma hominis; identical to SEQ ID NO: 14968
  source 1..40: mol_type = genomic DNA

SEQ ID NO: 14974 - DNA, 50 bp, Mycoplasma hominis; identical to SEQ ID NO: 14969
  source 1..50: mol_type = genomic DNA

SEQ ID NO: 14975 - DNA, 40 bp, Mycoplasma hominis; identical to SEQ ID NO: 14970
  source 1..40: mol_type = genomic DNA

SEQ ID NO: 14976 - protein, 549 aa, Mycoplasma hominis
MSKEKIKVYLYTRVSTSIQIEGYSLEAQKSRMKAFAIYNDYEIVGEYEDAGKSGKSIEGRIQFNRMMEDIKSEKDGVSFVLVFKLSRFARNAADVLSTLQIMQDYGVNLICVEDGIDSSKDAGKLMISVLSAVAEIERENIRIQTMEGRIQKAREGKWNGGFAPYGYKLEDGKLFINEEEAIAIRTIFDQYVNTTIGANGISKYLENHGIRKIPRQNGKNPLFDAGLIRKILKNPVYNGKIAFGRRTLEKVHGTRNEYKQVEQDEYLISEGIHEAIVSDEVWQAAQVKLKSQAKKYEHVNKGKDTRTHLLSGIVKCPICGVGMFGNKCIKKKKDGTKYKDFYYYGCKHRQMIRGHKCTFRKQIREELLDDAVAEVIVKIVSNPKFASMMQEKINMKVDTSEIETEIDNYQKELRKCHSTKFKLIEEIDNLDVEDKHYKRRKQDLDDRLYRMYDKIDELESSLIDAKAKKQTIEAEKLTGDNIYKVLIYFDKLYKVMNDVERRQLITALISEIQVYEEKQPNGQWLKSITFKLPIIEENLNIGLDNDEHV

SEQ ID NO: 14977 - DNA, 50 bp, Mycoplasma hominis; identical to SEQ ID NO: 12327
  source 1..50: mol_type = genomic DNA

SEQ ID NO: 14978 - DNA, 40 bp, Mycoplasma hominis; identical to SEQ ID NO: 14968
  source 1..40: mol_type = genomic DNA

SEQ ID NO: 14979 - DNA, 50 bp, Mycoplasma hominis; identical to SEQ ID NO: 14969
  source 1..50: mol_type = genomic DNA

SEQ ID NO: 14980 - DNA, 40 bp, Mycoplasma hominis; identical to SEQ ID NO: 14970
  source 1..40: mol_type = genomic DNA

SEQ ID NO: 14981 - protein, 549 aa, Mycoplasma hominis
MSKEKIKVYLYTRVSTSIQIEGYSLEAQKSRMKAFAIYNDYEIVGEYEDAGKSGKSIEGRIQFNRMMEDIKSGKDGVSFVLVFKLSRFARNAADVLSTLQIMQDYGVNLICVEDGIDSSKDAGKLMISVLSAVAEIERENIRIQTMEGRIQKAREGKWNGGFAPYGYKLEDGKLFINEEEAIAIRTIFDQYVNTKIGANGISKYLENHGIRKIPRQNGKNPLFDAGLIRKILKNPVYNGKIAFGRRTLEKVHGTRNEYKQVEQDEYLISEGIHEAIVSDEVWQAAQVKLKSQAKKYEHVNKGKDTRTHLLSGIVKCPICGVGMFGNKCIKKKKDGTKYKDFYYYGCKHRQMIRGHKCTFRKQIREELLDDAVAEVIVKIVSNPKFASMMQEKINMKVDTSEIETEIDNYQKELRKCHSTKFKLIEEIDNLDVEDKHYKRRKQDLDDRLYRMYDKIDELESSLIDAKAKKQTIEAEKLTGDNIYKVLIYFDKLYKVMNDVERRQLITALISEIQVYEEKQPNGQWLKSITFKLPIIEENLNIGLDNDEHV

SEQ ID NO: 14982 - DNA, 50 bp, Mycoplasma hominis; identical to SEQ ID NO: 12327
  source 1..50: mol_type = genomic DNA

SEQ ID NO: 14983 - DNA, 40 bp, Mycoplasma hominis; identical to SEQ ID NO: 14968
  source 1..40: mol_type = genomic DNA

SEQ ID NO: 14984 - DNA, 50 bp, Mycoplasma hominis; identical to SEQ ID NO: 14969
  source 1..50: mol_type = genomic DNA

SEQ ID NO: 14985 - DNA, 40 bp, Mycoplasma hominis; identical to SEQ ID NO: 14970
  source 1..40: mol_type = genomic DNA

SEQ ID NO: 14986 - protein, 519 aa, Mycoplasma hominis
MRKNFAIYNDYEIVGEYEDAGKSGKSIEGRIQFNRMMEDIKSGKDGVSFVLVFKLSRFARNAADVLSTLQIMQDYGVNLICVEDGIDSSKDAGKLMISVLSAVAEIERENIRIQTMEGRIQKAREGKWNGGFAPYGYKLEDGKLFINEEEAIAIRTIFDQYVNTTIGANGISKYLENHGIRKIPRQNGKNPLFDAGLIRKILKNPVYNGKIAFGRRTLEKVHGTRNEYKQVEQDEYLISEGIHEAIVSDEVWQAAQVKLKSQAKKYEHVNKGKDTRTHLLSGIVKCPICGVGMFGNKCIKKKKDGTKYKDFYYYGCKHRQMIRGHKCTFRKQIREELLDDAVAEVIVKIVSNPKFASMMQEKINMKVDTSEIETEIDNYQKELRKCHSTKFKLIEEIDNLDVEDKHYKRRKQDLDDRLYRMYDKIDELESSLIDAKAKKQTIEAEKLTGDNIYKVLIYFDKLYKVMNDVERRQLITALISEIQVYEEKQPNGQWLKSITFKLPIIEENLNIGLDNDEHV

SEQ ID NO: 14987 - DNA, 50 bp, Mycoplasma hominis; identical to SEQ ID NO: 12327
  source 1..50: mol_type = genomic DNA

SEQ ID NO: 14988 - DNA, 40 bp, Mycoplasma hominis; identical to SEQ ID NO: 14968
  source 1..40: mol_type = genomic DNA

SEQ ID NO: 14989 - DNA, 50 bp, Mycoplasma hominis; identical to SEQ ID NO: 14969
  source 1..50: mol_type = genomic DNA

SEQ ID NO: 14990 - DNA, 40 bp, Mycoplasma hominis; identical to SEQ ID NO: 14970
  source 1..40: mol_type = genomic DNA

SEQ ID NO: 14991 - protein, 549 aa, Mycoplasma hominis
MSKEKIKVYLYTRVSTSIQIEGYSLEVQKSRMKAFAIYNDYEIVGEYEDAGKSGKSIEGRIQFNRMMEDIKSGKDGVSFVLVFKLSRFARNAADVLSTLQIMQDYGVNLICVEDGIDSSKDAGKLMISVLSAVAEIERENIRIQTMEGRIQKAREGKWNGGFAPYGYKLEDGKLFINEEEAIAIRTIFDQYVNTTIGANGISKYLENHGIRKIPRQNGKNPLFDAGLIRKILKNPVYNGKIAFGRRTLEKVHGTRNEYKQVEQDEYLISEGIHEAIVSDEVWQAAQVKLKSQAKKYEHVNKGKDTRTHLLSGIVKCPICGVGMFGNKCIKKKKDGTKYKDFYYYGCKHRQMIRGHKCTFRKQIREELLDDAVAEVIVKIVSNPKFASMMQEKINMKVDTSEIETEIDNYQKELRKCHSTKFKLIEEIDNLDVEDKHYKRRKQDLDDRLYRMYDKIDELESSLIDAKAKKQTIEAEKLTGDNIYKVLIYFDKLYKVMNDVERRQLITALISEIQVYEEKQPNGQWLKSITFKLPIIEENLNIGLDNDEHV

SEQ ID NO: 14992 - DNA, 50 bp, Mycoplasma hominis; identical to SEQ ID NO: 12327
  source 1..50: mol_type = genomic DNA

SEQ ID NO: 14993 - DNA, 40 bp, Mycoplasma hominis; identical to SEQ ID NO: 14968
  source 1..40: mol_type = genomic DNA

SEQ ID NO: 14994 - DNA, 50 bp, Mycoplasma hominis; identical to SEQ ID NO: 14969
  source 1..50: mol_type = genomic DNA

SEQ ID NO: 14995 - DNA, 40 bp, Mycoplasma hominis; identical to SEQ ID NO: 14970
  source 1..40: mol_type = genomic DNA

SEQ ID NO: 14996 - protein, 549 aa, Mycoplasma hominis
MSKEKIKVYLYTRVSTSIQIEGYSLEAQKSRMKAFAIYNDYEIVGEYEDAGKSGKSIEGRIQFNRMMEDIKSGKDGVSFVLVFKLSRFARNAADVLSTLQIMQDYGVNLICVEDGIDSSKDAGKLMISVLSAVAEIERENIRIQTMEGRIKKAREGKWNGGFAPYGYKLEDGKLFINEEEAIAIRTIFDQYVNTTIGANGISKYLENHGIRKIPRQNGKNPLFDAGLIRKILKNPVYNGKIAIGRRTLEKVHGTRNEYKQVEQDEYLISEGIHEAIVSDEVWQAAQVKLKSQAKKYEHVNKGKDTRTHLLSGIVKCPICGVGMFGNKCIKKKKDGTKYKDFYYYGCKHRQMIIGHKCTFRKQIREELLDDAVAEVIVKIVSNPKFASMMQEKINMKVDTSEIETEIDNYQKELRKCHSTKFKLIEEIDNLDVEDKHYKRRKQDLDDRLYRMYDKIDELESSLIDAKAKKQTIEAEKLTGDNIYKVLIYFDKLYKVMNDVERRQLITALISEIQVYEEKQPNGQWLKSITFKLPIIEENLNIGLDNDEHV

SEQ ID NO: 14997 - DNA, 50 bp, Mycoplasma hominis; identical to SEQ ID NO: 12327
  source 1..50: mol_type = genomic DNA

SEQ ID NO: 14998 - DNA, 40 bp, Mycoplasma hominis; identical to SEQ ID NO: 14968
  source 1..40: mol_type = genomic DNA

SEQ ID NO: 14999 - DNA, 50 bp, Mycoplasma hominis; identical to SEQ ID NO: 14969
  source 1..50: mol_type = genomic DNA

SEQ ID NO: 15000 - DNA, 40 bp, Mycoplasma hominis; identical to SEQ ID NO: 14970
  source 1..40: mol_type = genomic DNA

SEQ ID NO: 15001 - protein, 484 aa, Mycoplasma hominis
MMEDIKSGKDGVSFVLVFKLSRFARNAADVLSTLQIMQDYGVNLICVEDGIDSSKDAGKLMISVLSAVAEIERENIRIQTMEGRIQKAREGKWNGGFAPYGYKLEDGKLFINEEEAIAIRTIFDQYVNTKIGANGISKYLENHGIRKIPRQNGKNPLFDAGLIRKILKNPVYNGKIAFGRRTLEKVHGTRNEYKQVEQDEYLISEGIHEAIVSDEVWQAAQVKLKSQAKKYEHVNKGKDTRTHLLSGIVKCPICGVGMFGNKCIKKKKDGTKYKDFYYYGCKHRQMIRGHKCTFRKQIREELLDDAVAEVIVKIVSNPKFASMMQEKINMKVDTSEIETEIDNYQKELRKCHSTKFKLIEEIDNLDVEDKHYKRRKQDLDDRLYRMYDKIDELESSLIDAKAKKQTIEAEKLTGDNIYKVLIYFDKLYKVMNDVERRQLITALISEIQVYEEKQPNGQWLKSITFKLPIIEENLNIGLDNDEHV

SEQ ID NO: 15002 - DNA, 50 bp, Mycoplasma hominis; identical to SEQ ID NO: 12327
  source 1..50: mol_type = genomic DNA

SEQ ID NO: 15003 - DNA, 40 bp, Mycoplasma hominis; identical to SEQ ID NO: 14968
  source 1..40: mol_type = genomic DNA

SEQ ID NO: 15004 - DNA, 50 bp, Mycoplasma hominis; identical to SEQ ID NO: 14969
  source 1..50: mol_type = genomic DNA

SEQ ID NO: 15005 - DNA, 40 bp, Mycoplasma hominis; identical to SEQ ID NO: 14970
  source 1..40: mol_type = genomic DNA

SEQ ID NO: 15006 - protein, 567 aa, Clostridium sporosphaeroides
MMANNEKYTILYGRLSQEDDREGESNSIQNQRLILTKYAEEKGFENIRFLFDDGFSGTNFNRPSWNEIMELIESGQVETLIVKDMSRLGRDYLQTGFLMEHTFPNNNVRFIAINDAVDTLYGDNDFAPFRNLFNDFYAKDCSKKIRSVKKAQAERGERVGTRPPYGYKKDESNPKKIVPDPEAAEVVKHIFKLCTEGRGPSQIAKQLTEEGIVNPSNSYYNQTGVALTNLDRSRIYNWSKNTVLRILDDETYLGHTVNLKHTTASYKNKKQIIRPESEWLRFENTHEAIITQDIWDIAHEVRMHKKRPRKNMENPNPYSGLIFCADCGKPLILHRAHTMDESKNNFACSTYKQYGKETCSAHYIRESQLAAVILDDLKRVTHFARQDEVLFAECINRKNTADTRKEITALQKELEGMRKRDLELTALFKRLYEDNVLGRIPDEHYRTLSDEYTAEQKALRERIPKAEARMEKLKNSLTNVDRFIEKAKKYTDLTELTPELLRMFIAKVVVGEKAEKYSRTAPQDIWIHYRDIGMLNDVKEEFDIPSMEEFYGMDDEMIFDDELPAAI

SEQ ID NO: 15007 - DNA, 50 bp, Clostridium sporosphaeroides
  source 1..50: mol_type = genomic DNA
aagtatctttatgaacactcgcctaaatacgagtagtcataaagacaact

SEQ ID NO: 15008 - DNA, 40 bp, Clostridium sporosphaeroides
  source 1..40: mol_type = genomic DNA
cagaaaaaggtgaacagccaaagctgttcacctttttctt

SEQ ID NO: 15009 - DNA, 50 bp, Clostridium sporosphaeroides
  source 1..50: mol_type = genomic DNA
aagtatctttatgaacactcgcctacatacgagtagtcataaagacaact

SEQ ID NO: 15010 - DNA, 40 bp, Clostridium sporosphaeroides
  source 1..40: mol_type = genomic DNA
cagaaaatgttgagcttttacagatgttcacctttttttt

SEQ ID NO: 15011 - protein, 623 aa, Sinorhizobium medicae
MTKPRKGSGPSSSGREKAKPAKDSTRKPAAAKIRVSDAMSPLQVLFDDVLSRQAKREGIVERRQRQAAIIGGPTLEMTAPTRAALYVRVSNDRSVRSDLSMPDQEVQLRSYCDQQGWEVVSIYYEPGRSAQSTARKEFRKMINDASCEGEAPFDKILIHSTSRFARSTKDYMIIEALLHQKNIDVLAVTQIFSKDAGGMVALRLTNLMDEFHSIRSSVDSMRARLHMVDKGYWPGGVPPHGYKCVPCVQNPQRSVLDIDENERALVEKVYSLAVHGDGKCPPLGVKALVRWLNECGYRTRNNSPWSIQGIHRMLTHSIYYGDYYWGVNQYEHQFQERQAARLLKVKAIISRADFDKVQEMLERRNPKMAGAKLVSSPLLLSGIARCACGASMTLGTGTGKLGKVYRYYRCSSDNRGTNIATLGSVSEKTCSRPKVAEDVLDAVVLEQVKEQVLSQDRLNALLASLRERELLAKAQESGQVPILLARINAAEKALSGLFAIAKQVPSISEQRPYQEDVTAVSIELKSANQMLSDLLRRTSDHSDDITPERIDLFRSEMLDLLFGENRAVAKIYLSTIVAAVIVGNNRIDIQGHISDLVAGVNRAAQSTVESPSSGVRTYERRWR

SEQ ID NO: 15012 - DNA, 50 bp, Sinorhizobium medicae
  source 1..50: mol_type = genomic DNA
ggggttcgtacatatgaacgcagatggcggattggggagaacataaatac

SEQ ID NO: 15013 - DNA, 40 bp, Sinorhizobium medicae
  source 1..40: mol_type = genomic DNA
agaatggaccaaaggcaaatggcggaagaggtgggattcg

SEQ ID NO: 15014 - DNA, 50 bp, Sinorhizobium medicae
  source 1..50: mol_type = genomic DNA
ggggttcgtacatatgaacgcagactgcggattggggagaacataaatac

SEQ ID NO: 15015 - DNA, 40 bp, Sinorhizobium medicae
  source 1..40: mol_type = genomic DNA
aaatttgacccaaggaaccctggggaagaggtgggatttg

SEQ ID NO: 15016 - protein, 556 aa, Bradyrhizobium diazoefficiens
MDAPVRTETKTRAYSYVRFSTPSQAAGATVQRQTEKAAKYAADHGLTLDTELNMMDLGMSAFRGKNARTGALGGFLKAVENGYVERGSYLLIENMDRLSRADIVTAQGLFLQLVGSGINLVTLTNGEAYSVERLEREPEAILYVVLELIRANRESTRKSQLIGDAKARKKKRLAEHGLEGKPYTRQTPAWIQWSESTASYELIPERADIVREMFQRMAAGEGLERIARDLNERGVPTWARSGRQRTADHWRTSYIRKVLTSTAPIGTFTPHTTTHDETTRARRDEAMAPVENLFPAAVDADTYWKVSRKLSTTAARGRNAKQPPKSIVSGIVFCATCGHAVTRVAKGDYVYLVCSRANMRADGCTYKAMRYDTVESALRENARRLVKEAPRGQNTATLEKKIDALQDNADGAETQMADLAELIAGERGSPEATAARKRLREVEQYLKDTQRQLRDLRAQRDTLTTASVRDRLKGVERALTSNTDAGGTNAVLRDAIRRIVLDPEQGMLWVRWHHSDETQGITCITRHYKWEDMHEAREPVSALFPERAMSANQIEK

SEQ ID NO: 15017 - DNA, 50 bp, Bradyrhizobium diazoefficiens
  source 1..50: mol_type = genomic DNA
ttttggcattgacatcctgcctttgccattgcagagtgtgaatgccaact

SEQ ID NO: 15018 - DNA, 40 bp, Bradyrhizobium diazoefficiens
  source 1..40: mol_type = genomic DNA
gtccggcaggccgacgatggcaaaggccggcaggcccggc

SEQ ID NO: 15019 - DNA, 50 bp, Bradyrhizobium diazoefficiens
  source 1..50: mol_type = genomic DNA
ttttggcattgacatcctgcctttatcattgcagagtgtgaatgccaact

SEQ ID NO: 15020 - DNA, 40 bp, Bradyrhizobium diazoefficiens
  source 1..40: mol_type = genomic DNA
atccagcaggccaagtaagataaaggccgacagggccggg

SEQ ID NO: 15021 - protein, 550 aa, Burkholderia sp AU31652
MKNSRVYSYLRFSDPKQAAGTSADRQTEYAARWAAERGLSLDASLSLRDEGLSAYHQKHVKQGALGAFLLAIDEGRIPSGSVLIVEALDRLSRAEPIMAQAQLAQIINAGITVVTASDGREYNFERLKAQPMDLVYSLLVMIRAHEESDTKSKRVKAALRRQCIGWIAGTFRGQIGGTKTDPGWVVKSADGSYSLHPEASLAVRAMVDLMMKGYGAPRILDTLNERGLFVMPGSPNQVDRFRQIANRRTLIGEKTLEIDGETYNLPGYYPALLTEHEFAELQHVIAQRGRKPGRSQIPALFTGMGIARCGYCGAPLVSQNGFKQRARKENGLPHDGHRRLVCTSYKGAIKCAVGGSCSVVPIERALMNYCSDQINLNSLLSGDSSAHALHRRLSLARTNAADIERKIHRVTDALLSDDGDTPVAIVRRIRDLESELTRARHDIDALENELAATPQTPAAADAWAELAKGVEQLDYDSRLKARNLVAETFSQVVVYRAGLDVGVDESSIALTLVAKRGTARNILIDRISGEWRAADEIDHAVLEQIDAPSL

SEQ ID NO: 15022 - DNA, 50 bp, Burkholderia sp AU31652
  source 1..50: mol_type = genomic DNA
ggtttatttacgcgtagcgcggggcagcttgccatacactgagataaact

SEQ ID NO: 15023 - DNA, 40 bp, Burkholderia sp AU31652
  source 1..40: mol_type = genomic DNA
cgggaactcgctggcgggccagctggcgctggagtggctg

SEQ ID NO: 15024 - DNA, 50 bp, Burkholderia sp AU31652
  source 1..50: mol_type = genomic DNA
ggtttatttacgcgtagcgcggggaggcttgccatacactgagataaact

SEQ ID NO: 15025 - DNA, 40 bp, Burkholderia sp AU31652
  source 1..40: mol_type = genomic DNA
cgggaagtgggtggggtgcaggcaggggcaggagtgggtg

SEQ ID NO: 15026 - protein, 503 aa, Roseburia hominis; identical to SEQ ID NO: 341

SEQ ID NO: 15027 - DNA, 50 bp, Roseburia hominis; identical to SEQ ID NO: 12
  source 1..50: mol_type = genomic DNA

SEQ ID NO: 15028 - DNA, 40 bp, Roseburia hominis
  source 1..40: mol_type = genomic DNA
ctgttcttaatacatcacattattacctttaaaaccacag

SEQ ID NO: 15029 - DNA, 50 bp, Roseburia hominis; identical to SEQ ID NO: 1784
  source 1..50: mol_type = genomic DNA

SEQ ID NO: 15030 - DNA, 40 bp, Roseburia hominis
  source 1..40: mol_type = genomic DNA
ctgatctcaaaacttctcagtaataccatttaaaccactg

SEQ ID NO: 15031 - protein, 530 aa, Anaerobutyricum hallii; identical to SEQ ID NO: 1636

SEQ ID NO: 15032 - DNA, 50 bp, Anaerobutyricum hallii; identical to SEQ ID NO: 1637
  source 1..50: mol_type = genomic DNA

SEQ ID NO: 15033 - DNA, 40 bp, Anaerobutyricum hallii
  source 1..40: mol_type = genomic DNA
tggaaataattatggttcacatcagggggattccttgctg

SEQ ID NO: 15034 - DNA, 50 bp, Anaerobutyricum hallii; identical to SEQ ID NO: 1639
  source 1..50: mol_type = genomic DNA

SEQ ID NO: 15035 - DNA, 40 bp, Anaerobutyricum hallii
  source 1..40: mol_type = genomic DNA
aggaaataattatgtatcatttcaggaggatcttttactt

SEQ ID NO: 15036 - protein, 559 aa, Bacillus aerophilus
MLILKKDEKLPSEEIMNLIGKINGLIYVRVSTNDQAEKGYSIESQIEMCKERAIKKFGYKENELIVLVEPGGMGDDPNRPALNHALFLLEKGLGKKIFILHPDRLTRDNTLQGVVSRKIWNMGVDIEFIEFEVDPTDPESMLMYNIQGSIAQYNKAKILANSKRGRTAKAKKGEFPSFKRLYGYTFNKETDKPEINEDEKSVLLKMKDMLLYEDMSSNEIAKHLSRKGIPAPEGEAWHQATVSRMFNNLDYTGDFYYGKTQVVQVNGEKKQVPRPREEWILIKIPQIWSHETRESILEALKKNTKNSGRKSNNYLLKGVVKCGRCGGTCGSGITSKNKSGVYRYYSCSNKRRKTYINGVKIITCEGKNWRVDLVDEVLWKWIVKLLKNPEFFVEEFANKTGSAQKIKQLMATISENEKRLSQIEQEITNYVLLFGKGKIDEAMFDNLTSSLNEKKTHLQEDLTLLTNTLESLKDSTDKKEKILKYIKSINKLLDTEMETRDKQRIIELLIERVILNENDTIQIILKNNSSNSPNALDDHQGSYKVATSNNQHKNQNLIQ

SEQ ID NO: 15037 - DNA, 50 bp, Bacillus aerophilus
  source 1..50: mol_type = genomic DNA
aacataaaaaccaaaacctcattcaagaacagggtttaggtttttatgcg

SEQ ID NO: 15038 - DNA, 40 bp, Bacillus aerophilus; identical to SEQ ID NO: 5783
  source 1..40: mol_type = genomic DNA

SEQ ID NO: 15039 - DNA, 50 bp, Bacillus aerophilus
  source 1..50: mol_type = genomic DNA
aacataaaaaccaaaacctcattcaggaacagggtttaggtttttatgcg

SEQ ID NO: 15040 - DNA, 40 bp, Bacillus aerophilus
  source 1..40: mol_type = genomic DNA
agcccttcataaccttgtgagacaactgtagtatatgcag

SEQ ID NO: 15041 - protein, 535 aa, Faecalicoccus pleomorphus
MKKLYLYIRLSDADDDLKFKTESESIANQRTLLYRFIRARREFDGYEVVEFIDDGYSGTNGNRPSFERMIESLKNGEANVVICKDFSRFFRDYVEIGDYLERIFPFLGVRFIAVNDGYDSDDYKGSTAGMEVVMKYIVYSYYSRDLSQKIKTVMSTRKSKGEFVAAQAPYGYMKDPNVKRKIIPNPDTAPVVRKIFDLALEGKTPAEIAVVLNDYKLETPSAYFMRMNPDSKKFRTASQEACWTVSNVREILKRREYTGVMVMNQRRWKGLDNPRTVWTDESEWQIIPDCHEAIVSESEYEEAQKVFRKIRKGYDRSPDQYLLRSLVHCGACGRTMQRQKHSPVIYYTCLKSVSNRETACPVGERFIEADLERIVKNDLLEKLRLLVDADDRLYAAAAASEGTEENLRFRLEQIEKRIKQISVSRVSAYERYAEGRLQRDIYLMERDKLNAENDSLSTEKERLEKELLALSQSRNRELTETCDMARRTLTADELTNEMLLFFIDRVNVYSGMRVEIIYRFSDEIARLIEQENTAE

SEQ ID NO: 15042 - DNA, 50 bp, Faecalicoccus pleomorphus
  source 1..50: mol_type = genomic DNA
tttagtctttgcttaacatcagcaaatgaggctgttatttgtggactaac

SEQ ID NO: 15043 - DNA, 40 bp, Faecalicoccus pleomorphus
  source 1..40: mol_type = genomic DNA
agctgactttataatggccaatcccccattcaatctttca

SEQ ID NO: 15044 - DNA, 50 bp, Faecalicoccus pleomorphus
  source 1..50: mol_type = genomic DNA
tttagtctttgcttaacatcagcatttgaggctgttatttgtggactaac

SEQ ID NO: 15045 - DNA, 40 bp, Faecalicoccus pleomorphus
  source 1..40: mol_type = genomic DNA
agcttactttttcattggctttccctcattgaatcttacc

SEQ ID NO: 15046 - protein, 503 aa, Enterocloster aldenensis; identical to SEQ ID NO: 341

SEQ ID NO: 15047 - DNA, 50 bp, Enterocloster aldenensis; identical to SEQ ID NO: 12
  source 1..50: mol_type = genomic DNA

SEQ ID NO: 15048 - DNA, 40 bp, Enterocloster aldenensis
  source 1..40: mol_type = genomic DNA
aagattcttagcaacagcattaagaaggtataaagataag

SEQ ID NO: 15049 - DNA, 50 bp, Enterocloster aldenensis
  source 1..50: mol_type = genomic DNA
gtgtagtcccttgtaaactgtactataggtcagtttacaaggaactacac

SEQ ID NO: 15050 - DNA, 40 bp, Enterocloster aldenensis
  source 1..40: mol_type = genomic DNA
caaattctgagaaacagaaataaaaaggagtaaagaaaag

SEQ ID NO: 15051 - protein, 575 aa, Ruminococcus torques; identical to SEQ ID NO: 3726

SEQ ID NO: 15052 - DNA, 50 bp, Ruminococcus torques; identical to SEQ ID NO: 277
  source 1..50: mol_type = genomic DNA

SEQ ID NO: 15053 - DNA, 40 bp, Ruminococcus torques
  source 1..40: mol_type = genomic DNA
aagataggtgcaaaaaaccttgattttatggggcttttca

SEQ ID NO: 15054 - DNA, 50 bp, Ruminococcus torques; identical to SEQ ID NO: 279
  source 1..50: mol_type = genomic DNA

SEQ ID NO: 15055 - DNA, 40 bp, Ruminococcus torques
  source 1..40: mol_type = genomic DNA
aggataggtgcagacatacctcattttattgtgctttgca

SEQ ID NO: 15056 - protein, 536 aa, Clostridium diolis
MIWNTIHPQALTVRWMKKMNKIWNIAIYARVSTDKKEQSESIPVQVENLKKWILNKSREDVSAIYNLIDVYQDQGTSGSSFDRESFIRMKEDIENKKINMIVTRDLSRFSRNYILAGYYLEDYFKVNNIRFISVLDNVDTESEFDNDIIPFKNILNEMYIKDCSRKVRSALLTRMERGSSIASKPPYGYKFQEVYEGNQKNIKLISAEDESTQVVKEIFTLYLSGWGAGKIASSLNKQGIEPPSNRIKNFARKKFGKWANNTILSILRNPKYGGYMIQGKYKKVSYKVKKINIMPAEQCIHGGEFEGIISKDIFERTQQMMKDRSNSNYRYRNGVIHPFSGVLKCGKCGGSMSYRKKYKGYKCTNSQQGSRRCSPHSVKETRVIDIISNEIKSMIDEKIDKSKVYDRFNNIKIENDFENELKSVEKQLNALDGKFKKIYEDKLEGVINQRNFDFMLQDVQEKQDKLIERKDQLVNMLKKNNGDNNLLKKYKIEIDNLLEGKTIDRRLVETLVDKIVIDEDDGNKEKKITIYYKFSK

SEQ ID NO: 15057 - DNA, 50 bp, Clostridium diolis
  source 1..50: mol_type = genomic DNA
aagatacttattgtccaaaaagggactgctttgtagacgataaaggtctt

SEQ ID NO: 15058 - DNA, 40 bp, Clostridium diolis
  source 1..40: mol_type = genomic DNA
agagcctgctaataaagaaactgcaacttgtataggtttg

SEQ ID NO: 15059 - DNA, 50 bp, Clostridium diolis
  source 1..50: mol_type = genomic DNA
aagatacttattgtccaaaaagggaatgctttgtagacgataaaggtctt

SEQ ID NO: 15060 - DNA, 40 bp, Clostridium diolis
  source 1..40: mol_type = genomic DNA
tgagcgtgctacttagaaaaatgcatcttatgtaggtttg

SEQ ID NO: 15061 - protein, 526 aa, Vibrio parahaemolyticus
MKVAAYVRVSSYNQKQTGDSISGQKEYIKNWAYLTGNEIIKWYIDESASAFRDLRRYNFNLMLQDIENPNSEIEAIVVYNLSRFSRNLKNQLTAQNLLETYNVRLISASEGIPDDHNTARLHTSFLGILNEHYSRQNSAVVTDRLQDTARKGYFCGGPIPLGYISVEIEGDTSKKRKVLAVNDDEAPIVKEIFSLAEKGIDGKPMGVKAISIYMNNKGVLNRGKRWNRNSIDRVLTRRDYFGEHIHGKNRDPRKGLEPIIVNVPAIINKDQFFNVQDGLKSRGLKNNENKCYRSDSLLVGMLKCSICNSNMVVVSGKGGKYKYYECSKKIRQDVKSCSSKMLPKPLIDNAVRRLLSERVITEDNINYIYKDLKSRIRNLVEKSARNVASINRRINNNNFKVNNIIEQIASRQLEPNAQINKYITDKRNELESLNRELVTALKGTKLPIKQFGQTQVAQLVKNLKEIVLTGDEARVKQILLILLKEVEITPQKKISILGFNMALVFLASHAKTGTDFSVPVIDTIWR

SEQ ID NO: 15062 - DNA, 50 bp, Vibrio parahaemolyticus
  source 1..50: mol_type = genomic DNA
ttcccgtaatcgacactatatggcgggctacatgggacgattatgggaac

SEQ ID NO: 15063 - DNA, 40 bp, Vibrio parahaemolyticus
  source 1..40: mol_type = genomic DNA
gcttttttctaaatgtggcggagagatagggatttgaacc

SEQ ID NO: 15064 - DNA, 50 bp, Vibrio parahaemolyticus
  source 1..50: mol_type = genomic DNA
ttcccgtaatcgacactatatggcccgctacatgggacgattatgggaac

SEQ ID NO: 15065 - DNA, 40 bp, Vibrio parahaemolyticus
  source 1..40: mol_type = genomic DNA
gctttttttaaaatgtaaaccagagctagggatctcaatc

SEQ ID NO: 15066 - protein, 493 aa, Vibrio parahaemolyticus
MTGNEIIKWYIDESASAFRDLRRYNFNLMLQDIENPNSEIEAIVVYNLSRFSRNLKNQLTAQNLLETYNVRLISASEGIPDDHNTARLHTSFLGILNEHYSRQNSAVVTDRLQDTARKGYFCGGPIPLGYISVEIEGDTSKKRKVLAVNDDEAPIVKEIFSLAEKGIDGKPMGVKAISIYMNNKGVLNRGKRWNRNSIDRVLTRRDYFGEHIHGKNRDPRKGLEPIIVNVPAIINKDQFFNVQDGLKSRGLKNNENKCYRSDSLLVGMLKCSICNSNMVVVSGKGGKYKYYECSKKIRQDVKSCSSKMLPKPLIDNAVRRLLSERVITEDNINYIYKDLKSRIRNLVEKSARNVASINRRVNNNNFKVNNIIEQIASRQLEPNAQINKYITDKRNELESLNRELVTALKGTKLPIKQFGQTQVAQLVKNLKEIVLTGDEARVKQILLILLKEVEITPQKKISILGFNMALVFLASHAKTGTDFSVPVIDTIWR

SEQ ID NO: 15067 - DNA, 50 bp, Vibrio parahaemolyticus; identical to SEQ ID NO: 15062
  source 1..50: mol_type = genomic DNA

SEQ ID NO: 15068 - DNA, 40 bp, Vibrio parahaemolyticus; identical to SEQ ID NO: 15063
  source 1..40: mol_type = genomic DNA

SEQ ID NO: 15069 - DNA, 50 bp, Vibrio parahaemolyticus; identical to SEQ ID NO: 15064
  source 1..50: mol_type = genomic DNA

SEQ ID NO: 15070 - DNA, 40 bp, Vibrio parahaemolyticus; identical to SEQ ID NO: 15065
  source 1..40: mol_type = genomic DNA

SEQ ID NO: 15071 - protein, 521 aa, Vibrio parahaemolyticus
MEYVAYLRISSFNQKEKGDSIDGQRKSITRWATERGGNIIKWYIDDGVSAYKGKRNNFDLMLQELENDIVKVDGLIVYSLSRFSRNLLAQLEATKVLQRKEIRLISATEALPESYEESYVMSTILGLMNEHSSMQNGKVVRDRLRDTALKQYFTGGPIPFGYHSVTVSGVTSKCRKKLQILEEEAELVLEIFNLSEKGVNGKPLGVKSIAEMLNKRKSYRRGTKWNRNSVCRILNNRAYIGEFIYNSSDSEPIVVNIPNIISKDQFYNVQEGLKSRDIFSFESRRIRSKCLLTGLLKCAVCGASMVVTSGKSGKYSYYQCSKKVRHAPDSCTSKRIRRDKAELLVKDKFMNELLAEAHLKTIHCQAKQRLKETSKLLLVEKTKLSKRISNLETRYSRLITMIADGDLVPDVRINKTITDLSTQLDVLEAEMAKLAVRINLPVKNFGEARLVEVAAAVQKYLQQIDNEALKQLMLATVTSVKVVDAKKKLIFEGSNMAVLYLIANAKTGTDFSVPAFITKWR

SEQ ID NO: 15072 - DNA, 50 bp, Vibrio parahaemolyticus
  source 1..50: mol_type = genomic DNA
ttcccgctttcatcacaaagtggcgggctacatgggacgattatgggaac

SEQ ID NO: 15073 - DNA, 40 bp, Vibrio parahaemolyticus; identical to SEQ ID NO: 15063
  source 1..40: mol_type = genomic DNA

SEQ ID NO: 15074 - DNA, 50 bp, Vibrio parahaemolyticus
  source 1..50: mol_type = genomic DNA
ttcccgctttcatcacaaagtggcccgctacatgggacgattatgggaac

SEQ ID NO: 15075 - DNA, 40 bp, Vibrio parahaemolyticus; identical to SEQ ID NO: 15065
  source 1..40: mol_type = genomic DNA

SEQ ID NO: 15076 - protein, 521 aa, Vibrio parahaemolyticus
MNCIAYLRVSSHGQLEKGDSIDGQKNHIESWAKNNGHNIAKWYIDDGRSAFNGKREQFELMLYELDNDIFQTEAIVVYSLSRFSRNLRSQLSSLEKLNSLGIKLISTTESLPEAEDDNYMMSTILGLMNEQYSRQNAKVVCHRLKDTARKGYFTGGPIPFGYKSVEVNGDTSKHRKVLQILDEEAVVVKDIFQMSDQGDSGLGIGVKNIAKILNQRGDKRRGTVWNRNSVHRILTNPAYYGNFIFGKKNSEPISVPIPQIISEEQFIRVQDGLKERDFTSLENKKFRSNSLLTGILICPKCGSSMVVITGKSGRYKYYQCSLQVRQSPDKCSSKRIRKDIIEPIVKEKFCNQLLTEERLKTICKLAREVHSTAAKELVSEKLKLAKHISQTKEKSYRLISLIAQGTLEPSKQINDQINGYTIALERFEFQLQEVQRKLTLPVKNFGSRRVEEFAIELKQHLIEIDDTSLKQLMLATLNSIEGNVSAKKMRFKGSNMAMLYIIANAKTGTDFSVPVFVTKWR

SEQ ID NO: 15077 - DNA, 50 bp, Vibrio parahaemolyticus
  source 1..50: mol_type = genomic DNA
ttcccgttttcgtcacaaagtggcgggctacatgggacgaatatgggaac

SEQ ID NO: 15078 - DNA, 40 bp, Vibrio parahaemolyticus; identical to SEQ ID NO: 15063
  source 1..40: mol_type = genomic DNA

SEQ ID NO: 15079 - DNA, 50 bp, Vibrio parahaemolyticus
  source 1..50: mol_type = genomic DNA
ttcccgttttcgtcacaaagtggcccgctacatgggacgaatatgggaac

SEQ ID NO: 15080 - DNA, 40 bp, Vibrio parahaemolyticus; identical to SEQ ID NO: 15065
  source 1..40: mol_type = genomic DNA

SEQ ID NO: 15081 - protein, 521 aa, Vibrio parahaemolyticus
MNCIAYLRVSSHGQLEKGDSIDGQKNHIESWAKNNGHNIAKWYIDDGRSAFNGKREQFELMLYELDNDIFQTEAIVVYSLSRFSRNLRSQLSSLEKLNSLGIKLISTTESLPEAEDDNYMMSTILGLMNEQYSRQNAKVVCHRLKDTARKGYFTGGPIPFGYKSVEVNGDTSKHRKVLQILDEEAVVVKDIFQMSDQGDSGLGIGVKNIAKILNQRGDKRRGTVWNRNSVHRILTNPAYYGNFIFGKKNSEPISVPIPQIISEEQFIRVQDGLKERDFTSLENKKFRSNSLLTGILICPKCGSSMVVTTGKSGRYKYYQCSLQVRQSPDKCSSKRIRKDIIEPIVKEKFCNQLLTEERLKTICKLAREVHSTAAKELVSEKLKLAKHISQTKEKSYRLISLIAQGTLEPSKQINDQINGYTIALERFEFQLQEVQRKLTLPVKNFGSRRVEEFAIELKQHLIEIDDTSLKQLMLATLNSIEGNVSAKKMRFKGSNMAMLYIIANAKTGTDFSVPVFVTKWR

SEQ ID NO: 15082 - DNA, 50 bp, Vibrio parahaemolyticus; identical to SEQ ID NO: 15077
  source 1..50: mol_type = genomic DNA

SEQ ID NO: 15083 - DNA, 40 bp, Vibrio parahaemolyticus; identical to SEQ ID NO: 15063
  source 1..40: mol_type = genomic DNA

SEQ ID NO: 15084 - DNA, 50 bp, Vibrio parahaemolyticus; identical to SEQ ID NO: 15079
  source 1..50: mol_type = genomic DNA

SEQ ID NO: 15085 - DNA, 40 bp, Vibrio parahaemolyticus; identical to SEQ ID NO: 15065
  source 1..40: mol_type = genomic DNA

SEQ ID NO: 15086 - protein, 526 aa, Vibrio parahaemolyticus
MKVAAYVRVSSYNQKQTGDSISGQKEYIKNWAYLTGNEIIKWYIDESASAFRDLRRCNFNLMLQDIENPNSEIEAIVVYSLSRFSRNLENQLTAQNLLETYNVRLISASEGIPDDHNTARLHTSFLGILNEHYSRQNSAVVTDRLQDTARKGYFCGGPIPLGYRSVEIEGDTSKKRKVLAVNDDEAPIVKEIFSLAEKGIDGKPMGVKAISIYMNNKGVLNRGKRWNRNSIDRVLTRRDYFGEHIHGKNRDPRKGLEPIIVNVPAIINKDQFFNVQDGLKSRELKNNENKCYRSDSLLVGMLKCSICNSNMVVVSGKGGKYKYYECSKKIRQDVKSCSSKMLPKPLIDNAVRRLLSERVITEENINYIYKDLKSRIRNLVEKSARNVASINRRINNNNFKVNNIIEQIASRQLEPNAQINKYITDKRNELESLNRELVTALKGTKLPIKQFGQTQVAQLVKNLKEIVLTGDEARVKQILLILLKEVEITPQKKISILGFNMALVFLASHAKTGTDFSVPVIDTIWR

SEQ ID NO: 15087 - DNA, 50 bp, Vibrio parahaemolyticus; identical to SEQ ID NO: 15062
  source 1..50: mol_type = genomic DNA

SEQ ID NO: 15088 - DNA, 40 bp, Vibrio parahaemolyticus; identical to SEQ ID NO: 15063
  source 1..40: mol_type = genomic DNA

SEQ ID NO: 15089 - DNA, 50 bp, Vibrio parahaemolyticus; identical to SEQ ID NO: 15064
  source 1..50: mol_type = genomic DNA

SEQ ID NO: 15090 - DNA, 40 bp, Vibrio parahaemolyticus; identical to SEQ ID NO: 15065
  source 1..40: mol_type = genomic DNA

SEQ ID NO: 15091 - protein, 399 aa, Vibrio parahaemolyticus
MNVVLYIRVSSVRQVNEGHSLEGQLKDLRAYCSANSHTIVKEYIESGNSAYKGSRPIFNQMLNEVTSRVFNVDAVVVYSLSRFARDLLYQLSTIKRLEDSGIRLFSATENLPEDDTTFKYLTVMLGLVNEMNSKQNGINVQSRLTQTAKDGYFTGGRVPLGYRSVKCEEGKKNTRKKLVIVEEEAAVVRKIFELSLTGTSGKGLGIKAIADFLNRHGFKYRGSSWSNNTVHKILTSTTYYGEFVFRKKTDSPIVISVPAIIDKNKFIEVRKSLKERDAQQLWVKAIRSNNLLTGLLKCGTCGGGMTVCSGKSGRYKYYACTKKLKKSVDLCQSKWVPKQELDQLVESTIIEHVINVTNIQAIIDEVKTELLSGRERHKRQSLKTYSKAKSYRAKVGKHL

SEQ ID NO: 15092 - DNA, 50 bp, Vibrio parahaemolyticus
  source 1..50: mol_type = genomic DNA
tgccccctttcatatcaaattggcgggcagataaggatgaatacgggcac

SEQ ID NO: 15093 - DNA, 40 bp, Vibrio parahaemolyticus; identical to SEQ ID NO: 15063
  source 1..40: mol_type = genomic DNA

SEQ ID NO: 15094 - DNA, 50 bp, Vibrio parahaemolyticus
  source 1..50: mol_type = genomic DNA
tgccccctttcatatcaaattggcccgcagataaggatgaatacgggcac

SEQ ID NO: 15095 - DNA, 40 bp, Vibrio parahaemolyticus; identical to SEQ ID NO: 15065
  source 1..40: mol_type = genomic DNA

SEQ ID NO: 15096 - protein, 583 aa, Intestinimonas butyriciproducens
MTQTQIHATISPCTPILSADPTVKEDAMLDQQKITILYCRLSNEDALDGESNSIQNQKEFLTRYAAEHGYTNLKILVDDGYTGTNFDRPGVQEGFALVKQGLVGCWLVKDLSRFGRDYLTVGQYTDIIFPSYDVRFIAVNDGVDSERGDSDGFAAIRNLFNEWYPRDTSKKVRVVFRQKGTSGKHLGKPPYGYRTDPTDKDHWIIDENAAPVVKRIFDLAIDGKGPEQIARILEKDKVLTTKALYAKQSENHPDPKKRKKMPERPYHWIGQSVVGILERMEYTGCTCNFKTYSKSYKLKKRIPNATEDMCIFPDTQEAIVSQAQWDRVQELRKNKRRPTKAERQGLFSGLLFCPDCGNKLHFATCKSFDGKQDHYVCSSYKSGRGTCSAHYIREDVLRELVLERIRAVNAYIRQDVEGFQEEWLQCRRSDQERNIREDRKRVEQAKKRLADLDVLLSRLYEDFVLGDLSKERYKKMTADYEAEQERLKLEIEVTEEWLETQETMSADVDAFVALTQKYVDVPELTPTIVNEYIKKIEVFAPDKSSGKRVQKVKIYFNFVDDVEIPVISDPVVAKSTLGRRKTA

SEQ ID NO: 15097 - DNA, 50 bp, Intestinimonas butyriciproducens
  source 1..50: mol_type = genomic DNA
atagtaccttatcactattaagccttagcttaacagtgataaggaagtaa

SEQ ID NO: 15098 - DNA, 40 bp, Intestinimonas butyriciproducens
  source 1..40: mol_type = genomic DNA
agagaaaaccctagaacctttgcggtcctagggtttatgg

SEQ ID NO: 15099 - DNA, 50 bp, Intestinimonas butyriciproducens
  source 1..50: mol_type = genomic DNA
atagtaccttatcactattaagccgcagcttaacagtgataaggaagtaa

SEQ ID NO: 15100 - DNA, 40 bp, Intestinimonas butyriciproducens
  source 1..40: mol_type = genomic DNA
agagaaaaccccagacattgcacggttttagggttttagg

SEQ ID NO: 15101 - protein, 502 aa, Enterococcus faecium
MEFIREDCIYARQSVDRKDSISIESQIEFCKYELKGGNCRVFKDKGYSGKNTDRPEFQKLLGEIRKGKVRRVIVYKLDRISRSILDFATMMELFQEYDVEFVSSTEKFDTSTPMGRAMLNICIVFAQLERETIQKRVTDAYYSRCLKGFHMSGQAPYGYQLEPTVVEGIRTKKMVADPVAADHVRLMFEMYAEPETSFGDITRYFEEHDIKIYGKSMFRTFLSQLLRNPVYAQADLELYEFFKSQGAAIVNDASDFAGTNGCYLYQGRDVKEDKDRCLKDQILVIAPHEALISSDTWLKCRKKLMANTTFQQGRKPKNTWMAGKIKCGHCGYALKATHVPNSTGYFRCTKRTENKGCPGCGKIRKEEFEQFIFSAMQEKFKDFQILHGREEKVNPKLTAYQVELAQVEAEIEKLLDTLTGANATLLAYANKKIEELDTRRQTISKAIAELSVETISPQQIKKLSYYLDNWDSIDFDDKRKAADGLISTIKATSDRVQIEWKI

SEQ ID NO: 15102 - DNA, 50 bp, Enterococcus faecium; identical to SEQ ID NO: 2062
  source 1..50: mol_type = genomic DNA

SEQ ID NO: 15103 - DNA, 40 bp, Enterococcus faecium
  source 1..40: mol_type = genomic DNA
gattgttctttggcttcgtttattttgcctaataaaaaac

SEQ ID NO: 15104 - DNA, 50 bp, Enterococcus faecium; identical to SEQ ID NO: 2062
  source 1..50: mol_type = genomic DNA

SEQ ID NO: 15105 - DNA, 40 bp, Enterococcus faecium
  source 1..40: mol_type = genomic DNA
gatgatttttttgtttcttttgtttttcctaatataaaac

SEQ ID NO: 15106 - protein, 501 aa, Phocaeicola coprocola
MEKNCIIWTRVSTKEQEKNGGSLEAQRLCCTEYAQSNGYNIVKDGYFGGKHESAKTPGIFIKKMISAIKTKRNIKYVIVSVIDRFSRNAGQGINMFNDLLNIGVTIIEATTGLNTADHSQKLMLQMKLCFAEWDNANRTDKFTSGRKNCLKSGVYCGAVPIGYDKEGKSINRTFTINSDGQLIRKAFQWKLQGMANCQIIEKLRPFGLILSKQKLHHILTNVFYAGKIKHKMLNYEIIDGNQPPIVSYSDFLKVQEILSGRTGVYKHKKEATQFPLKRHVLCSKDHTPFTAYTVKKKNINYYKCNCIGCKTNVSAKKMHSKYEELLESYDIPQKFIGIMRKIISKMINSEQDERMQSISLLKKQKSEKESKLKKCKIRYGMGEIDDEIYSMTVEALQSDLANITLELSKFDKDLSNLDNRVNDILAMCCHLGSFWRNADLETAQKLQNLLFPQGILWDKEKDNYRTFNENAALSVIRRISGGYKNKKEENPFGNSSKDNLC

SEQ ID NO: 15107 - DNA, 50 bp, Phocaeicola coprocola
  source 1..50: mol_type = genomic DNA
aaattcctctaaagacaatttgtgcgcagatttgacagattatcgaactt

SEQ ID NO: 15108 - DNA, 40 bp, Phocaeicola coprocola
  source 1..40: mol_type = genomic DNA
attaaatccatttttcgtgcgcctgataggactcgaacct

SEQ ID NO: 15109 - DNA, 50 bp, Phocaeicola coprocola
  source 1..50: mol_type = genomic DNA
aaattcctctaaagacaatttgtggacagatttgacagattatcgaactt

SEQ ID NO: 15110 - DNA, 40 bp, Phocaeicola coprocola
  source 1..40: mol_type = genomic DNA
attaaattccattttggaggacctgataggaataaaaact

SEQ ID NO: 15111 - protein, 482 aa, Cytobacillus oceanisediminis
MYLRISRDKGENVDTLQNHRERLVRLCEDRGYTYTIYEEIVSGQARMEAREALNSLLDELEKYDAVVVTAIDRLSRDLEYSIHIFKRLEKVGIPVITPERIYTEQDFTLYAIESTLAHGEYKQIRKRMLQGKRDKALRGEIVASRPPYGYDSVMVDKKRTFVPNKDADTVKKIFNLAINGYGGKSISDITGKPYKSVQNIIRNEAYTGTMIYKDIRVEDAFTAIVDKDTFKKANQAMKARFAGDREQRTRTKGKVRTILKDLVYCDNCDRKISFQLKRRELYEDAMVTKKCECGMPGVKEETLLAEFYAQFYWVELHFRKEWQKALETPLEDKKGIIEGRLTELTKKQEKLNRRLKNAREMRLDGELSKAEFEEIKAESEKELIALSSKIAELNEELLSLDTTKLSQGYQEKLKLIGMIKEELNLPEGKGQLNYTKIEECTNKEEANRLLKLLIDKIYYFRGIEANAFGEEEEVIKLTIAPR

SEQ ID NO: 15112 - DNA, 50 bp, Cytobacillus oceanisediminis
  source 1..50: mol_type = genomic DNA
ttggtatatgtaaatgcacttaatccattaaaagcacttatagacaccac

SEQ ID NO: 15113 - DNA, 40 bp, Cytobacillus oceanisediminis
  source 1..40: mol_type = genomic DNA
caggagatggccaaaaaaaccatgagatgaccatcatcaa

SEQ ID NO: 15114 - DNA, 50 bp, Cytobacillus oceanisediminis
  source 1..50: mol_type = genomic DNA
ttggtatatgtaaatgcacttaatgaattaaaagcacttatagacaccac

SEQ ID NO: 15115 - DNA, 40 bp, Cytobacillus oceanisediminis
  source 1..40: mol_type = genomic DNA
caggatatggcatgaacaagattgagatgctcaccatcaa

SEQ ID NO: 15116 - protein, 583 aa, Streptococcus suis
MKTNNVEIIKADSLVRRRGVNVERHLKRVAAYCRVSSDSEDQKNSYESQVRHYKDYISQRSDWELADIYADEGISGTQVGKRQDFQRLINDCVNGEIDYIVTKAIARFARNTLDTLKYVRMLKDMQIGVYFEEENIDTLTMDGELLLTILSSVAQQEVENTSAHVKKGLKMKMQRGELIGFQGCLGYDYDVETKQLSINKKEAKIVRYIFERYLEGIGGKVIARELDELGYKSPRGLDHWNDTTVLGIIKNEKYKGDILMGKTFTVDPISKRRLSNFGEEDKYYIKDNHEPIISKEDFEKAQEIRLRRAGNKKTVANVNGKRERYSKMYAFSSMLECGFCGSILSRRSWHCRSDYRKVVWHCVTSIKKGKKFCKHSKGLEELAIEGAFMEAYRQLYHSNENLMTDLLETIESELNDNSLNKELKRITNKLRTLLKKEENLVNLRLEGKISDTIYNEKYNEISSEKEFLTEEKVNIETTLKSEIDVKKRLTEFKHLLSSQKMLTEFDRAVFESIVEKIIVGGVNSDGEIDPAMLTIIFKTGETQNKDGKQFKSKRKNAKLETDKLCPQNSDEDKKMYSQGTDYT

SEQ ID NO: 15117 - DNA, 50 bp, Streptococcus suis
  source 1..50: mol_type = genomic DNA
gtattctcaaggaacagactacacacgtggagtgcgtagtgttgctacaa

SEQ ID NO: 15118 - DNA, 40 bp, Streptococcus suis
  source 1..40: mol_type = genomic DNA
ttatttccaaatacgcatcacatagaagttgtgggattat

SEQ ID NO: 15119 - DNA, 50 bp, Streptococcus suis
  source 1..50: mol_type = genomic DNA
gtattctcaaggaacagactacacccgtggagtgcgtagtgttgctacaa

SEQ ID NO: 15120 - DNA, 40 bp, Streptococcus suis
  source 1..40: mol_type = genomic DNA
ttactcccaaattctcttcccacagaaattgtgagatgat

SEQ ID NO: 15121 - protein, 583 aa, Streptococcus suis
MKKNNVEIIKADSLVRRRGDNFERESKRVAAYCRVSSDSEDQKNSYESQVRHYKDYISQRSDWELAGIYADEGISGTQVGKRQDFQRLINDCVNGEIDYIVTKAIARFARNTLDTLKYVRMLKDMQIGVYFEEENIDTLTMDGELLLTILSSVAQQEVENTSAHVKKGLKMKMQRGELIGFQGCLGYDYDVETKQLSINKKEAKIVRYIFERYLEGIGGKVIARELDELGYKSPRGLDHWNDTTVLGIIKNEKYKGDILMGKTFTVDPISKRRLSNFGEEDKYYIKDNHEPIISKEDFEKAQEIRLRRAGNKKTAANVNGKRERYSKMYAFSSMLECGFCGSILSRRSWHCRSDYRKVVWHCVTSIKKGKKFCKHSKGLEELAIEGAFMEAYRKLYHSNENLMTDLLETIESELNDNSLNKELKRITNKLRTLLKKEENLVNLRLEGKISDTIYNEKYNEISSEKEFLAEEKVNIETTLKSEIDVKKRLTEFKHLLSSQKMLTEFDRAVFESIVEKIIVGGVNSDGEIDPAMLTIIFKTGETQNKDGKQFKSKRKNAKLETDKLCPQNSDEDKKLYSQGTDYT

SEQ ID NO: 15122 - DNA, 50 bp, Streptococcus suis; identical to SEQ ID NO: 15117
  source 1..50: mol_type = genomic DNA

SEQ ID NO: 15123 - DNA, 40 bp, Streptococcus suis; identical to SEQ ID NO: 15118
  source 1..40: mol_type = genomic DNA

SEQ ID NO: 15124 - DNA, 50 bp, Streptococcus suis; identical to SEQ ID NO: 15119
  source 1..50: mol_type = genomic DNA

SEQ ID NO: 15125 - DNA, 40 bp, Streptococcus suis; identical to SEQ ID NO: 15120
  source 1..40: mol_type = genomic DNA

SEQ ID NO: 15126 - protein, 583 aa, Streptococcus suis
MKKNNVEIIKADSLVRRRGDNFERESKRVAAYCRVSSDSEDQKNSYESQVRHYKDYISQRSDWELAGIYADEGISGTQVGKRQDFQRLINDCVNGEIDYIVTKAIARFARNTLDTLKYVRMLKDMQIGVYFEEENIDTLTMDGELLLTILSSVAQQEVENTSAHVKKGLKMKMQRGELIGFQGCLGYDYDVETKQLSINKKEAKIVRYIFERYLEGIGGKVIARELDELGYKSPRGLDHWNDTTVLGIIKNEKYKGDILMGKTFTVDPISKRRLSNFGEEDKYYIKDNHEPIISKEDFEKAQEIRLRRAGNKKTAANVNGKRERYSKMYAFSSMLECGFCGSILSRRSWHCRSDYRKVVWHCVTSIKKGKKFCKHSKGLEELAIEGAFMEAYRQLYHSNENLMTDLLETIESELNDNSLNKELKRITNKLRTLLKKEENLVNLRLEGKISDTIYNEKYNEISSEKEFLAEEKVNIETTLKSEIDVKKRLTEFKHLLSSQKMLTEFDRAVFESIVEKIIVGGVNSDGEIDPAMLTIIFKTGETQNKDGKQFKSKRKNAKLETDKLCPQNSDEDKKLYSQGTDYT

SEQ ID NO: 15127 - DNA, 50 bp, Streptococcus suis; identical to SEQ ID NO: 15117
  source 1..50: mol_type = genomic DNA

SEQ ID NO: 15128 - DNA, 40 bp, Streptococcus suis; identical to SEQ ID NO: 15118
  source 1..40: mol_type = genomic DNA

SEQ ID NO: 15129 - DNA, 50 bp, Streptococcus suis; identical to SEQ ID NO: 15119
  source 1..50: mol_type = genomic DNA

SEQ ID NO: 15130 - DNA, 40 bp, Streptococcus suis; identical to SEQ ID NO: 15120
  source 1..40: mol_type = genomic DNA

SEQ ID NO: 15131 - protein, 583 aa, Streptococcus suis
MKTNNVEIIKADSLVRRRGVKVERHLKRVAAYCRVSSDSEDQKNSYESQVRHYKDYISQRSDWELAGIYADEGISGTQVGKRQDFQRLINDCVNGEIDYIVTKAIARFARNTLDTLKYVRMLKDMQIGVYFEEENIDTLTMDGELLLTILSSVAQQEVENTSAHVKKGLKMKMQRGELIGFQGCLGYDYDVETKQLSINKKEAKIVRYIFERYLEGIGGKVIARELDELGYKSPRGLDHWNDTTVLGIIKNEKYKGDILMGKTFTVDPISKRRLSNFGEEDKYYIKDNHEPIISKEDFEKAQEIRLRRAGNKKTVANVNGKRERYSKMYAFSSMLECGFCGSILSRRSWHCRSDYRKVVWHCVTSIKKGKKFCKHSKGLEELAIEGAFMEAYRQLYHSNENLMTDLLETIESELNDNSLNKELKRITNKLRTLLKKEENLVNLRLEGKISDTIYNEKYNEISSEKEFLAEEKVNIETTLKSEIDVKKRLTEFKHLLSSQKMLTEFDRAVFESIVEKIIVGGVNSDGEIDPAMLTIIFKTGETQNKDGKQFKSKRKNAKLETDKLCPQNSDEDKKLYSQGTDYT

SEQ ID NO: 15132 - DNA, 50 bp, Streptococcus suis; identical to SEQ ID NO: 15117
  source 1..50: mol_type = genomic DNA

SEQ ID NO: 15133 - DNA, 40 bp, Streptococcus suis; identical to SEQ ID NO: 15118
  source 1..40: mol_type = genomic DNA

SEQ ID NO: 15134 - DNA, 50 bp, Streptococcus suis; identical to SEQ ID NO: 15119
  source 1..50: mol_type = genomic DNA

SEQ ID NO: 15135 - DNA, 40 bp, Streptococcus suis; identical to SEQ ID NO: 15120
  source 1..40: mol_type = genomic DNA

SEQ ID NO: 15136 - protein, 500 aa, Paenibacillus amylolyticus
MVVRARETNEEIEAIGYIRQSDQRQDKEDISELTQLRKIEQFCEFNNFKLVKVFKDIDYSGFRIKYTKRPGLMDALKCIEDRPRVRKMVFFNLSRLTRLKKDFQELQGILNSHQVDICSASESVDFSTPNGRLVAGFFVDLNEYYSDNLSEIVNDSKETNAKKGRWNGGPAPFGFVKTVDGLGFEEVPERAYYVREIFRMAKLGKGPYLIARWLNEQKVYSLTGKEWTARRVRYMLTNPTYAAMQRWKGECYKLLVCPVLVSWDDFNYIQSTLFGKDKAWKGKERQLLTSVLICPECGSKMHSRYMSHSKQKRKYVCSRKTSMGTISCSSPNHDQESFEAAVINLIANMAEKKYGYESLIPEMKEDSDNNNSFSKLQDELANINNAEQKIFDDYYLHNKIEEHHYELSMRRYGKRKAEILELLDKIPLPQSKSFGDYNDAIQEFSELINELPDDDKRRSIELLVEKITPGSPAVVHFKWGETREIHPRSIEKFKKKLILY

SEQ ID NO: 15137 - DNA, 50 bp, Paenibacillus amylolyticus
  source 1..50: mol_type = genomic DNA
caacgtagtattaggataggagtggagagtcttgtcctgaaactaaccca

SEQ ID NO: 15138 - DNA, 40 bp, Paenibacillus amylolyticus
  source 1..40: mol_type = genomic DNA
cagttattggataggagtggagagaaaccatactgtaccc

SEQ ID NO: 15139 - DNA, 50 bp, Paenibacillus amylolyticus
  source 1..50: mol_type = genomic DNA
caacgtagtattaggataggagtgctgagtcttgtcctgaaactaaccca

SEQ ID NO: 15140 - DNA, 40 bp, Paenibacillus amylolyticus
  source 1..40: mol_type = genomic DNA
cagttattggcttgaagtgctgataaatcacactctgtcc

SEQ ID NO: 15141 - protein, 500 aa, Paenibacillus amylolyticus
MVVRARETNEEIEAIGYIRQSDQRQDKEDISELTQLRKIEQFCESNNFKLVKVFKDIDYSGFRIKYTKRPGLMDALKCIEDRPKVRKMIFFNLSRLTRLKKDFQELQGILNSHQVDICSASEFVDFSTPNGRLVAGFFVDLNEYYSDNLSEIVNDSKETNAKKGRWNGGPAPFGFVKTADGMGFEEVPERAYYVREIFRMAKLGKGPYLIARWLNEQKVYSLTGKEWTARRVRYMLTNPTYAAMQRWKGECYKLLVCPVLVSWDDFNYIQSTLFGKDKAWKGKERQLLTSVLICPECGSKMHSRYMSHSKQKRKYVCSRKTSMGAISCSSPNHDQESFEAAVINLIANMAEKKYGYESLIPEMKEDSDNNNSFSKLQDELANINNAEQKIFDDYYLHNKIEEHHYELSMRRYGKRKAEILELLDKIPLPQSKSFGDYNDAIQEFSELINELPNDDKRRSIELLVEKITPGAPAVVHFKWGETREIHPRNIEKFKKKLILY

SEQ ID NO: 15142 - DNA, 50 bp, Paenibacillus amylolyticus
  source 1..50: mol_type = genomic DNA
caacgtagtattaggataggagtggagagtattgtcctgaaactaaacct

SEQ ID NO: 15143 - DNA, 40 bp, Paenibacillus amylolyticus; identical to SEQ ID NO: 15138
  source 1..40: mol_type = genomic DNA

SEQ ID NO: 15144 - DNA, 50 bp, Paenibacillus amylolyticus
  source 1..50: mol_type = genomic DNA
caacgtagtattaggataggagtgctgagtattgtcctgaaactaaacct

SEQ ID NO: 15145 - DNA, 40 bp, Paenibacillus amylolyticus; identical to SEQ ID NO: 15140
  source 1..40: mol_type = genomic DNA

SEQ ID NO: 15146 - protein, 510 aa, Bacillus sonorensis
MRAAIYIRVSTKLQEEKYSLRAQTTELNRYVEQQGWRLVDEFQDIESGGKLHKKGLNALLDIVEEGKIDVVVCIDQDRLSRLDTIAWEYLKSTLRENKVKIAEPGTIVDLDDEDQEFVSDIKNLIAKREKKSFVKRMMRGKRQRMREGKGWGQAPYEYYYDKKEEQYKLKKEWAWVIPFIDRLYLEEQLGMSSIADQLNKISKTPSGIMWNEHLVHTRLTTKAYHGVQEKAFANGEVIAAENIYPKLRTKETWEKIQIERNKRGNQYKVTSRKRNDLHLLRRTYFVCGECGRKIHLAAHGTKEAPRYYLKHGRKLRLADGSVCDVSINTVRIEGNIVQAIKDIVTSKELAKQYVNLENEKEEIIQLEQNIKNNEQTIQKHTTKIEKLIDLYLDNHLTKDQLNKKQIEIKNITENLQSQLKRDKAKLETLKSDSWSYDFLSELFESINFFDSDFSPLERAMLMGNIFPEGIVYRDHIILKANIGGLNFDVKVLVDEDPFPWHYSKRSKEQK

SEQ ID NO: 15147 - DNA, 50 bp, Bacillus sonorensis
  source 1..50: mol_type = genomic DNA
aaggggttatcacccctgtttatttcaataaatatgggtaataaccttta

SEQ ID NO: 15148 - DNA, 40 bp, Bacillus sonorensis
  source 1..40: mol_type = genomic DNA
aagcatgacgactagcatttcaatcagcgtaaatcccttt

SEQ ID NO: 15149 - DNA, 50 bp, Bacillus sonorensis
  source 1..50: mol_type = genomic DNA
aaggggttatcacccctgtttattacaataaatatgggtaataaccttta

SEQ ID NO: 15150 - DNA, 40 bp, Bacillus sonorensis
  source 1..40: mol_type = genomic DNA
aaccatgaccactagaatcacaatcattatgaatctcttt

SEQ ID NO: 15151 - protein, 501 aa, Eubacterium rectale; identical to SEQ ID NO: 11481

SEQ ID NO: 15152 - DNA, 50 bp, Eubacterium rectale; identical to SEQ ID NO: 10927
  source 1..50: mol_type = genomic DNA

SEQ ID NO: 15153 - DNA, 40 bp, Eubacterium rectale
  source 1..40: mol_type = genomic DNA
taatcataaccgagattataagatagaacagatataataa

SEQ ID NO: 15154 - DNA, 50 bp, Eubacterium rectale
  source 1..50: mol_type = genomic DNA
ctgtgtgcccttgtcaagcgatgtatacatcgcttgacaagggcacacag

SEQ ID NO: 15155 - DNA, 40 bp, Eubacterium rectale
  source 1..40: mol_type = genomic DNA
taataataacggggattaaatgagataacatatataagta

SEQ ID NO: 15156 - protein, 558 aa, Kocuria sp BT304
MTLLNLPTGLDMQALRSLAGQLAQTTDVPLTDGKVPAISYLRVSTKDQATRNGLEEGLSIPAQREAAARKADQLGAVIVKEFIEPGESAKTAQRKALQKMLDYLAHNPVRYCIINKVDRIARNRLDDAIIHATLRQAGVTLVSVTENIDESPSGMLMHGIMASIAEFYSLNLAQEVTKGLVQKATIGGTPHKAPIGYLNVRTTDGLGHEVRTIETDPDRADLIRYAFTGYATGNYSLATLATELETRGLATRPTPTFPARPVTTKLLHKILTNPYYQGIVTFRDVTYPGTHEPLVTPETFEQVQAILRQNHLVGDKPQKYDHYLKGTIYCACGKRLMFERPRNHQGVTYDYFTCTGRRLKKNDCRRTSLLACHVEDRIEAAYQRISITDDDAARIKDVLWQVFDALAASSSDERASLTTQKTKLEAEQVKLLQAHYADAITIDLLKTEQDRIRASLHAITTRLDELATTYDKAKVGLDTILSILTDLGDLYAKAEPAERRMLNQALFDRITLEDDDTATITPKQAIATILASDPSPHNEQTLPRDHAGQGSNVSDYVE

SEQ ID NO: 15157 - DNA, 50 bp, Kocuria sp BT304
  source 1..50: mol_type = genomic DNA
gggttcgaacgtttccgattacgtggaggtagtccgacagtgctctaacc

SEQ ID NO: 15158 - DNA, 40 bp, Kocuria sp BT304
  source 1..40: mol_type = genomic DNA
ggggatttcccttggtggtggagctaaggggactcgaacc

SEQ ID NO: 15159 - DNA, 50 bp, Kocuria sp BT304
  source 1..50: mol_type = genomic DNA
gggttcgaacgtttccgattacgtcaaggtagtccgacagtgctctaacc

SEQ ID NO: 15160 - DNA, 40 bp, Kocuria sp BT304
  source 1..40: mol_type = genomic DNA
ggggtttcaccatgttggccaggctaaggggtctcgaact

SEQ ID NO: 15161 - protein, 538 aa, Mycobacteroides abscessus
MATAVIYLRVSTKDQATRGNEAEGFSIPAQRDACEKKVQALGATVVHEFVDAGESGRSADRPELQRMLAYLASTPTTYVVVHKLDRLARSRADDVQITLAIQAAGSTLVSVTENIDSTPSGALLHGIMSSIAEFYSRNLANEIMKGTKQKALSGGTPTIAPIGYLNVRETVNGREIRTIRTDPDRAHHIQWAFEQYATGDWTLRTLSAALNSRGLSQRPTPNRPARPLPTNKLHKVLRNRYYLGYVTWQGIEYPGSHEPLIDPATFDRVQHTLTAHQRSGERSYRRKHHLAGSLYCGRCNSKLIYAISTGRHGGKYGYWFCIGRHTLRNDCDLPYLPEERVTRAVIRLWHTTQLPTATVETIRDSLTDDLAAYSAHADQELTLIDRRIKEVERERLKWADLAMDGTVPRDIARDKQAALAIQLGQLEHQMTSLKSTNIDHAEIINTALDLLGRCSDAYENAPETTRRDLNQAYFERILLDSTDGEPIIKSAEQTEIIELIATAERKPELIWSGKTDLALTTYSTVKGSKIASLVELRG

SEQ ID NO: 15162 - DNA, 50 bp, Mycobacteroides abscessus
  source 1..50: mol_type = genomic DNA
cgcctctttggtggagctaaggggaacactctcgaaccccgaaacggccc

SEQ ID NO: 15163 - DNA, 40 bp, Mycobacteroides abscessus
  source 1..40: mol_type = genomic DNA
ttatggtggggctaaggggactcgaacccctgacccccac

SEQ ID NO: 15164 - DNA, 50 bp, Mycobacteroides abscessus
  source 1..50: mol_type = genomic DNA
cgcctctttggtggagctaaggggtccactctcgaaccccgaaacggccc

SEQ ID NO: 15165 - DNA, 40 bp, Mycobacteroides abscessus
  source 1..40: mol_type = genomic DNA
tgttggccaggctaaggggtctcgaactcctgacctcaag

SEQ ID NO: 15166 - protein, 538 aa, Mycobacteroides abscessus
MATAVIYLRVSTKDQATRGNEAEGFSIPAQRDACERKAQTLSATVVHEFVDAGESARSADRPELQRMLTYLAANPTTYVIVHKLDRLARSRADDVQITLAIQASGSTLVSVTENIDSTPSGALLHGIMSSIAEFYSRNLANEIMKGTKQKALSGGTPTIAPIGYLNVRETVNGREIRTIRTDPDRAHHIQWAFEQYATGDWTLRTLSNALNSRGLSQRPTPNRPARPLPTNKLHKVLRNRYYLGYVTWQGIEYPGSHEPLIDPATFDQVQHTLTAHQRSGERSSRRKHHLAGSLYCGRCNSKLIYAVSTGRHGGKYGYWFCIGRHTLRNGCDLPYLPEERVTAAVVGLWHATQLPTTTTETIRAALTDDLAAYSAHTDQELTLLGRRIKEVERERLKWADLAMDGAVPRDIARDKQAALAIQLGQLEHQRTSLTSTNIDHAQVINTALDLLGRCSEAYENAPEATRRDLNQAYFERILLDSTDGAPTIKSAEQTEIIELIATAERKPEMTTPGKADLALTTYSTVKGSKIASLVELRG

SEQ ID NO: 15167 - DNA, 50 bp, Mycobacteroides abscessus
  source 1..50: mol_type = genomic DNA
cgcctctttggtggagctaaggggaacactctcgaacccagaaacggccc

SEQ ID NO: 15168 - DNA, 40 bp, Mycobacteroides abscessus; identical to SEQ ID NO: 15163
  source 1..40: mol_type = genomic DNA

SEQ ID NO: 15169 - DNA, 50 bp, Mycobacteroides abscessus
  source 1..50: mol_type = genomic DNA
cgcctctttggtggagctaaggggtccactctcgaacccagaaacggccc

SEQ ID NO: 15170 - DNA, 40 bp, Mycobacteroides abscessus; identical to SEQ ID NO: 15165
  source 1..40: mol_type = genomic DNA

SEQ ID NO: 15171 - protein, 490 aa, Microbacterium paraoxydans
MRALRDAAAPRARRRGIGMIRVSKEREGMTSPEMQRTAIQQCADQNGVEIVDWVEGIDESGSDRKSAWWPRLDESIARMEAGEYEVILVWRFSRVGRQRLRWAVALDRVDTLGGAILSATEPIESATASGRFARGMLGELNAYQSELIGEQWKETHDRRRRAGLPHGGHQRFGYQLVDGRFEPDPVTGPILAEIYRRALRGDGSGRITRWLNEQGILTSQGLPWVNSNLFQMLDGGFGAGLIVHRPGWKNKRLPKAQWNFYPGAHEAVISAEEWATYWARRLELSEPSRSIEARHLLTGLIYCADCGGRMHYSHHRYICTTAARSKGLGRTVVTISDEIAEAAVTEWVLALAEDTDALLAARVATTKRRVRSVNDAEAIDRKVARIDERMATLTIQAIDKTIPEAAYQATIRKLDAERSSLTSRQKSLELVNAQREADVRQVAVTLAAAWRSLETFERRQALMKVAAAVLITQGRGIGRVRIVPKWDLRS

SEQ ID NO: 15172 - DNA, 50 bp, Microbacterium paraoxydans
  source 1..50: mol_type = genomic DNA
ctccgtagttagttattgtccgtcaacacggggtataactatgcacaccc

SEQ ID NO: 15173 - DNA, 40 bp, Microbacterium paraoxydans
  source 1..40: mol_type = genomic DNA
gcgcggggcgtgggcggtcaacatccgcaagttccttccc

SEQ ID NO: 15174 - DNA, 50 bp, Microbacterium paraoxydans
  source 1..50: mol_type = genomic DNA
ctccgtagttagttattgtccgtcaccacggggtataactatgcacaccc

SEQ ID NO: 15175 - DNA, 40 bp, Microbacterium paraoxydans
  source 1..40: mol_type = genomic DNA
gccctgggcgagggcaggcaccatcctcaggttccttact

SEQ ID NO: 15176 - protein, 604 aa, Bacteroides ovatus
MIKIIGYARVSTTKQDLSRQKLKIKEFCENNNYELIEIIEDFGISGVVADRKGYIELQSKTYKDADMIVISELSRLSRQEDVTETVYNIQQIINKGLSVILLDSPSKIYEANKLLDITEILILTIKAWAAAQERLDIKKKNQDGKQALFQAYPYAVVDQKIPYGYKAVPNPNGKRPKYILEEVPEEVENIKRLFALVNSGKTLGAVARYFNERNITFRGYYSTVAILSNYIHSDIYRGIRRRTQRLGREEPYTIEVRIKPIISEEDFMKAQELIKNNYKSTPTGKVNHNPLKGIIRCRCGRAMTVKDKKPAAGISKLTYRCSCVDRKSHPDFCKYNIDEVSYDLTNEILYSLFKSMHTAEYINFFRNQTDNRVTELQEEIAGIEKRLSALYLDKENLSNESQDNANKFLLTTNPTLLNIIQEKQNQLDEKIKSIDKEIIRYKKSQSKKMADIERIKDNNGKEKLQNLSIEEQGELYHKYLERVNYIPVTTMQGYYIVQFLNGIKFYIAITKVRSIAMASLLLDNWTIDEKGIITANYDTLKSSDMKNFSIEMIRKTKTMTLQEYLKSDLAKERALHLDLSYREKYLEELHKAGLDGRLRPFKKE

SEQ ID NO: 15177 - DNA, 50 bp, Bacteroides ovatus; identical to SEQ ID NO: 3312
  source 1..50: mol_type = genomic DNA

SEQ ID NO: 15178 - DNA, 40 bp, Bacteroides ovatus
  source 1..40: mol_type = genomic DNA
cggtatctgacaggaatattcaaaaaaagcgattgcccaa

SEQ ID NO: 15179 - DNA, 50 bp, Bacteroides ovatus
  source 1..50: mol_type = genomic DNA
ttgggtttttccgttttattatacctacttaactaaatagacttgcccaa

SEQ ID NO: 15180 - DNA, 40 bp, Bacteroides ovatus
  source 1..40: mol_type = genomic DNA
ctgaatcagacaggaatgtctgaaaaaatcaattggtcaa

SEQ ID NO: 15181 - protein, 587 aa, Bacteroides ovatus
MNHKKAIAYIRVSTTHQDVERQKIKFKEYCKNNNLQANEEIIDFGISGAKSDRPGYLRLQALTGKDADILVVSELSRLSRQEEILETINIIQNIVYNGLSLIFLDAPSKVYEAHSTLDITELIILLVGAFRAAQDRKEIKRKNQEGKQALLSQNPYAVVDAKIPYGYNAIYNPNGSRPKKILIENEEEVANVKKIFQLALEGYSLGKIAKYFNNRNILFRGHFVTRQLLSVLVRNILYKGIRRRIHSFDRKDNPNIIENKITPIISESDFERVNQMLKDNHKFCSTGNNYFNTLRGIIKCRCGRGMMVKDKGYASGIKKMVYRCNDVSAKDNPIHCQYKDEISYQFTNEVIFNVFKYIHNTDEIFIFMAKTEQKIYEIDEEIKGIERKIENKNIEIESLNKDNKRLIERYIHAKSQSIANAIQDEQLTIENKIHKLEDEISHCNKEKVKLITNKESLINYIDTEELSSLGNEERAELFKKHLEKVIYLPVTLMQGFYIITFKSKMQRIVAIRKTAKSPIAAILPDGYTVDMNTKLITEYYQSIQTGGCSYPISSSFKQLTIQEYFKKLPQIGNFGILEIDYSYRKGK

SEQ ID NO: 15182 - DNA, 50 bp, Bacteroides ovatus; identical to SEQ ID NO: 2392
  source 1..50: mol_type = genomic DNA

SEQ ID NO: 15183 - DNA, 40 bp, Bacteroides ovatus; identical to SEQ ID NO: 15178
  source 1..40: mol_type = genomic DNA

SEQ ID NO: 15184 - DNA, 50 bp, Bacteroides ovatus; identical to SEQ ID NO: 2394
  source 1..50: mol_type = genomic DNA

SEQ ID NO: 15185 - DNA, 40 bp, Bacteroides ovatus; identical to SEQ ID NO: 15180
  source 1..40: mol_type = genomic DNA

SEQ ID NO: 15186 - protein, 587 aa, Bacteroides ovatus
MNHKKAIAYIRVSTTHQDVERQRIKFKEYCKNNNLQANEEIIDFGISGAKSDRPGYLRLQALTGKDADILVVSELSRLSRQEEILETINIIQNIVYNGLSLIFLDAPSKVYEAHSTLDITELIILLVGAFRAAQDRKEIKRKNQEGKQALLSQNPYAVVDAKIPYGYNAIYNPNGSRPKKILIENEEEVANVKKIFQLALEGYSLGKIAKYFNNRNILFRGHFVTRQLLSVLVRNILYKGIRRRIHSFDRKDNPNIIENKITPIISESDFERVNQMLKDNHKFCSTGNNYFNTLRGIIKCRCGRGMMVKDKGYASGIKKMVYRCNDVSAKDNPIHCQYKDEISYQFTNEVIFNVFKYIHNTDEIFIFMAKTEQKIYEIDEEIKGIERKIENKNIEIESLNKDNKRLIERYIHAKSQSIANAIQDEQLTIENKIHKLEDEISHCNKEKVKLITNKESLINYIDTEELSSLGNEERAELFKKHLEKVIYLPVTLMQGFYIITFKSKMQRIVAIRKTAKSPIAAILPDGYTVDMNTKLITEYYQSIQTGGCSYPISSSFKQLTIQEYFKKLPQIGNFGILEIDYSYRKGK

SEQ ID NO: 15187 - DNA, 50 bp, Bacteroides ovatus
  source 1..50: mol_type = genomic DNA
atgggtatttttgactatttatattcgtttaacataacgtacttgcccat

SEQ ID NO: 15188 - DNA, 40 bp, Bacteroides ovatus; identical to SEQ ID NO: 15178
  source 1..40: mol_type = genomic DNA

SEQ ID NO: 15189 - DNA, 50 bp, Bacteroides ovatus
  source 1..50: mol_type = genomic DNA
atgggtatttttgactatttatatctgtttaacataacgtacttgcccat

SEQ ID NO: 15190 - DNA, 40 bp, Bacteroides ovatus; identical to SEQ ID NO: 15180
  source 1..40: mol_type = genomic DNA

SEQ ID NO: 15191 - protein, 545 aa, Anaerobutyricum hallii
MDAILAGSFRAAIYCRLSKDDDLDGESASIANQRDMLENYCEKQGWEVVAVYQDDGYTGLNMERPDLKRMLKAIERRQANLVITKDLSRLGRNYLQTGFLIEDFFPRHGVRYIAMNDGIDTMRDNNDIAPFKNILNEMYSKDISKKVHSSYLLKAQKGQFTGCLAPFGYQKDPEDKNHLLIDEETAPIVRRLFAWALEGHGPNYIRRRLEEEKIPCPTYWNRVRGLRNVSTKWEKKDPVNGRYIWDFTVIKDILMNPVYTGAIASQKKEYRFKIGTIGEKKPEEWIVVENQHEPLVDRKTFDIVQRKLKSRQRPRQTGEISLFAGLIKCGECGKSLTIRYTNEKHPKQIYSCKTYNAYGKQHCSQHRVEYDTLYRLVLNKIRECARAALMDGEAVAGKLSDTCEAEQKGQREALERSLAKDEERIDVLEKMVLRLYEDMVAGRISEANFNLLMEKTQKEQAELKARVEEGRKKLADEIRLAYDARQWVEAIQEYADITELDAATLNRLIKEIVVHESIDSDKTRHISIEIHFNLKPLPEVEQVTA

SEQ ID NO: 15192 - DNA, 50 bp, Anaerobutyricum hallii
  source 1..50: mol_type = genomic DNA
tcctacacctatttgggtatgaaacagcttatggctaagtagatgtaatc

SEQ ID NO: 15193 - DNA, 40 bp, Anaerobutyricum hallii
  source 1..40: mol_type = genomic DNA
aaaatcccaggggattaagcagctgatggcgggaggtggt

SEQ ID NO: 15194 - DNA, 50 bp, Anaerobutyricum hallii
  source 1..50: mol_type = genomic DNA
tcctacacctatttgggtatgaaaaagcttatggctaagtagatgtaatc

SEQ ID NO: 15195 - DNA, 40 bp, Anaerobutyricum hallii
  source 1..40: mol_type = genomic DNA
aaaaccccagtggaggaagaagatggtggtcagaggtggt

SEQ ID NO: 15196 - protein, 497 aa, Lactobacillus jensenii
MSKIALYIRLSVEDMIKTDESESIINQRAYLNDYLDKNEEFNNFTREEYVDDGYSGTNENRPAFQRMLEDVKKNNIQTIIVKDLSRFMRDYITLGDYLENIFPFLGVRFIAINDGYDSDKEKGNGTDLDIQFKGLLYDFYTKDISEKVKSSMTTLKKQGKFLAWSPPLGYMKDPNDRHKIIVDEETAWIVKKIFKLALDGISSRNIAKILNEEKIPTPSKRKSELTNLDFEYSIIRTAKKPRPTWTNGNVIDVLANENYTGTYTFNMQDKSVLNPSSFKFKPKEEWGRVENNHEAIISKEDFEKVQKIKEKNLFMKGKNTDYEWRKKSPLQGFAKCPTCNHILGCTQSKRKRQDGTIRVHTYFSCRICKCNNVKHKNSRAGILEEQVFEAIKEKYGLEAPNKDEKVKVKPMEKSIEDLEAKKMQNFEKYKLGKMNRQKFIDSKNLIDEEIQAIKEKIQKAKEEKEVIDNTKLTRELMEKYIESVFCEGNEVLNIIWK

SEQ ID NO: 15197 - DNA, 50 bp, Lactobacillus jensenii; identical to SEQ ID NO: 2317
  source 1..50: mol_type = genomic DNA

SEQ ID NO: 15198 - DNA, 40 bp, Lactobacillus jensenii
  source 1..40: mol_type = genomic DNA
agtttttgatccagctagcggtacagctggctttctaacc

SEQ ID NO: 15199 - DNA, 50 bp, Lactobacillus jensenii
  source 1..50: mol_type = genomic DNA
tttgtcataagcttgacatgagagtagtttcgtgtcataatagtgataga

SEQ ID NO: 15200 - DNA, 40 bp, Lactobacillus jensenii
  source 1..40: mol_type = genomic DNA
acttttttctcaagttacctacagagctggctttctcacc

SEQ ID NO: 15201 - protein, 481 aa, Streptococcus agalactiae; identical to SEQ ID NO: 2986

SEQ ID NO: 15202 - DNA, 50 bp, Streptococcus agalactiae; identical to SEQ ID NO: 1812
  source 1..50: mol_type = genomic DNA

SEQ ID NO: 15203 - DNA, 40 bp, Streptococcus agalactiae
  source 1..40: mol_type = genomic DNA
gatgaataatgacaacatttcatctctaattgttctcact

SEQ ID NO: 15204 - DNA, 50 bp, Streptococcus agalactiae
  source 1..50: mol_type = genomic DNA
taaagaaatttactatccttgattaaaatcaaggttactaaaattattga

SEQ ID NO: 15205 - DNA, 40 bp, Streptococcus agalactiae
  source 1..40: mol_type = genomic DNA
gacttattatgacaacattaaatctttgatagttgtcagt

SEQ ID NO: 15206 - protein, 481 aa, Streptococcus agalactiae; identical to SEQ ID NO: 2986

SEQ ID NO: 15207 - DNA, 50 bp, Streptococcus agalactiae; identical to SEQ ID NO: 2997
  source 1..50: mol_type = genomic DNA

SEQ ID NO: 15208 - DNA, 40 bp, Streptococcus agalactiae; identical to SEQ ID NO: 15203
  source 1..40: mol_type = genomic DNA

SEQ ID NO: 15209 - DNA, 50 bp, Streptococcus agalactiae
  source 1..50: mol_type = genomic DNA
taaagaaatttactatccttggttaaaatcaaggttactaaaattattga

SEQ ID NO: 15210 - DNA, 40 bp, Streptococcus agalactiae; identical to SEQ ID NO: 15205
  source 1..40: mol_type = genomic DNA

SEQ ID NO: 15211 - protein, 548 aa, Amedibacillus dolichus; identical to SEQ ID NO: 3731

SEQ ID NO: 15212 - DNA, 50 bp, Amedibacillus dolichus; identical to SEQ ID NO: 277
  source 1..50: mol_type = genomic DNA

SEQ ID NO: 15213 - DNA, 40 bp, Amedibacillus dolichus
  source 1..40: mol_type = genomic DNA
ggaaaaggtggatatgccattggttttacagtatatgcag

SEQ ID NO: 15214 - DNA, 50 bp, Amedibacillus dolichus
  source 1..50: mol_type = genomic DNA
atagttacttgtcactattaagcccaggcttaacagtgataaggaactaa

SEQ ID NO: 15215 - DNA, 40 bp, Amedibacillus dolichus
  source 1..40: mol_type = genomic DNA
aggaatggtggatttggcacaggtattatactatatacag

SEQ ID NO: 15216 - protein, 603 aa, Phocaeicola plebeius
MVKIIGYARVSTTKQDLSRQKLKIKEFCEKNNYELIEIIEDFGISGVVADRKGYIELQSKTYKDADMIVISELSRLSRQEDVTETVYNIQQIINKGLSVILLDSPNKIYEANKLLDITEILILTIKAWAAAQERLDIKKKNQDGKQALFQANPYAVVDQKIPYGYRAIPNPNGKRPKYILEEVPEEVENIKKLFDLVNSGKTLGAVARYFNERNITFRGYYSTVAILSNYIHSDIYRGIRRRTQKLGREEPYTIEVRIKPIISEEDFMMAQELVKRNYKSTPTGKVNHNPLKGILRCRCGRAMTVKDKKPAAGISKLTYRCSCVERKSHPDFCKYNIDEVSYDLTNEILYSLFKSMHTTEYINFFKNQTDYRITELQEEITGIENRLTTLYLDKENLLNESKDNANKFLITTNHTLLDSIQNKQNIIDEKIKSIDKEITKYKKSQSKKIADIERIKDYNAKEKLQNLTIEEQGELYHKYLERVNYIPVTTMKGYYIVQFLNGVKFYIVITKVRSTAMASLLLDNWTIDEKGIITANYDIFKSSDMKNFSIEMVRKTKTMTLQEYLKSDLAKERALHLDLSYRERYLEKLHEAGLDGRHRPLKK

SEQ ID NO: 15217 - DNA, 50 bp, Phocaeicola plebeius
  source 1..50: mol_type = genomic DNA
ttgggtaatttcattttgttatactcacttaacaaaataaacttgcccaa

SEQ ID NO: 15218 - DNA, 40 bp, Phocaeicola plebeius
  source 1..40: mol_type = genomic DNA
cggaacctgcagacagtattcaaaaaaagcaatggcccag

SEQ ID NO: 15219 - DNA, 50 bp, Phocaeicola plebeius
  source 1..50: mol_type = genomic DNA
ttgggtaatttcattttgttatacacacttaacaaaataaacttgcccaa

SEQ ID NO: 15220 - DNA, 40 bp, Phocaeicola plebeius
  source 1..40: mol_type = genomic DNA
tggaatgtgcaaaaaatatacaaaaaaaccaatggaacag

SEQ ID NO: 15221 - protein, 541 aa, Enterocloster bolteae
MRIYIYSRKSVYTGKGESVENQIEMCREYISAKIPESDKAEIVVYEDEGFSAKNTNRPQFQKMLRDIKLNKPEYVVCYRLDRISRNVSDFSSLIEDLNSYNISFVCIKEEFDTSKPMGKAMMYIASVFAQLERETIAERVRDNMLMLARTGRWLGGTTPTGFTSEKIQEIIIDGKIKTSCKLKDNPEELKTIDCILEKFLELRSISGVSKYLIKQGIKSRTGKIFSLLGIKEILQNPVYCIADEDAWEYFTEHHSDVCFEKAECSNKYGLLTYNKRDYRKKNAPRQGMDKWIVAIGKHKGRISGKKWVAIQNILKDNIPTGTKPAIMHNDYSLLSGLIFCDKCQSRMFAKQRSGKGGNRELYDYICNNKLRGGLKLCDCQNLNGQQADDIVCEYLMQYTDENSGIYKLLEKLKQDLQGQTQKSPLSIIDDKITKCNSEMDNLINTLSHGNLGTAFIERVNARIMELDKELASMKEEKKRLQKDVSVITDREIQVDMLSTALSSFKDNFHTLAIEEKRTLIKLMVKKIVWDGKDLHIFIDGE

SEQ ID NO: 15222 - DNA, 50 bp, Enterocloster bolteae
  source 1..50: mol_type = genomic DNA
tgccttttggctggtggcgcattcccgccaccatacaaagggaaacaaaa

SEQ ID NO: 15223 - DNA, 40 bp, Enterocloster bolteae
  source 1..40: mol_type = genomic DNA
gccatgcaatggaaggtttcccacactcatcgccatcatc

SEQ ID NO: 15224 - DNA, 50 bp, Enterocloster bolteae
  source 1..50: mol_type = genomic DNA
tgccttttggctggtggcgcattcctgccaccatacaaagggaaacaaaa

SEQ ID NO: 15225 - DNA, 40 bp, Enterocloster bolteae
  source 1..40: mol_type = genomic DNA
gccaagctattcaacgtttctcactctcagtgccctcatc

SEQ ID NO: 15226 - protein, 521 aa, Streptococcus ruminantium
MKKVITIEPAKQVIHKIDLPSFTKRRVAGYARVSTDHEDQTTSYEAQMTYYTDYINSRSDWEFVKMYSDEGISGTNTKKRLGFQEMVEDALDGKIDLILTKSVSRFARNTVDSLSTVRKLKEAGVEIYFEKENIWTFDSKGELLITIMSSLAQEESRSISENVTWGRRRQLAEGQVTFSYSQVLGFKKSDTSGFEIDHEEAKIVRYIFHQVLLGNNPNKIARELTAQGIPTPQGKRQWSYGTVKRMLRNEKYKGDALLQKSFTTDFLTKSTKPNEGELPQYYVENNHEAIIKRDVFDLIQVELDKLEKKRQTSNIFTGRLFCGDCGSAFGSKVWHSTSKYKRTIYQCNAKYKGEHKCQTPHVTEEEIKVWFLSAINQLLSNRDEIIANTELLIDMAKDTSPLENKIDDLEQQLETIRQDVGDLVDRNARKAQNQDLYQEQYDTLVTAYQEKQKELQEATSSFEEQKSRSISLDGFIQELKQQDSLITNFNQELWQTSVERLDIMEDKKISLTFKNGVKIDL

SEQ ID NO: 15227 - DNA, 50 bp, Streptococcus ruminantium
  source 1..50: mol_type = genomic DNA
tgtatgattaaattgatagcaacagaaatcggaataagaaaattgataca

SEQ ID NO: 15228 - DNA, 40 bp, Streptococcus ruminantium
  source 1..40: mol_type = genomic DNA
caaaaagctttatgctagtgatatggatggtactttttta

SEQ ID NO: 15229 - DNA, 50 bp, Streptococcus ruminantium
  source 1..50: mol_type = genomic DNA
tgtatgattaaattgatagcaacagcaatcggaataagaaaattgataca

SEQ ID NO: 15230 - DNA, 40 bp, Streptococcus ruminantium
  source 1..40: mol_type = genomic DNA
caaaacactatttgcttgcgctatggatggtatttgttga

SEQ ID NO: 15231 - protein, 468 aa, Enterococcus faecium
MKRAALYERVSTTTQAEEGYSIDAQINKLTKFAESKDYIVVNHYTDAGYSGSKMDRPGLQNMIQHIKEKKIDIVIVYRLDRLSRSQKDTIYLIDDVFLKNNVEFVSMSESFDTTTPYGRAMLGLLSVFAQLERENIRERIKMTFAERARQGLYHGGSSIPSGYYMENGMLKVNETEAFVVRRVFELYSEGFSYDKIGDYIVDNYSGMFSFSPRSIPHMLRNSIFNQKIKHYEKEYQGVHERIISEELWDKVQARLNRNSKIVRSGNFTFLLTGIIYCAHCGAKMMAMRGPKLKSGKRYGYYQCYSKRGTPKYMVVDPNCPAQKTYRSDMIEKHVIDSLNKLTLEKFEEMIDDTQTDTQSMKKEIEELDKKLDKLIDLYTIGSIPKDMLSVRATDLSKKKASLIKTVNEIENKNIRKKERFALDQTKKIEELKDLDWENTSVQEKRKIIYPLIDKIEVSKTDVIIHWNV

SEQ ID NO: 15232 - DNA, 50 bp, Enterococcus faecium
  source 1..50: mol_type = genomic DNA
ttgttttatcaagatgtttcagctacagccgaagtgtttgataaaacgga

SEQ ID NO: 15233 - DNA, 40 bp, Enterococcus faecium
  source 1..40: mol_type = genomic DNA
tgttttccctgcacctgttacagcccaaataagatgatgt

SEQ ID NO: 15234 - DNA, 50 bp, Enterococcus faecium
  source 1..50: mol_type = genomic DNA
ttgttttatcaagatgtttcagcttcagccgaagtgtttgataaaacgga

SEQ ID NO: 15235 - DNA, 40 bp, Enterococcus faecium
  source 1..40: mol_type = genomic DNA
agttttccctgctcctgtttctgcccttctaggatgattc

SEQ ID NO: 15236 - protein, 539 aa, Pseudomonas monteilii
MAKNGARVYSYLRFSDPRQATGSSADRQLQYAQNWAASKGLVLDDTLSLRDEGLSAYHERHVKQGALGVFLEAIENGRIAHGSVLVVEGLDRLSRAEPIQAQAQLAQIINAGITVVTASDGREYNRAGLKAQPMDLVYSLLVMIRAHEESDTKSKRVKAAIRRQCEGWKAGTYRGLIRNGKDPQWVRWTGDTWELIPERVAAVQRALALYRQGMGASRAAKLMHQEGHELTDWGISGLQIYRLIKLPALRGIKRLSLDGEEYELEDYYPRILSEVEWADLQHLAGQRLRRRGHGEIPGIITGVGLAICGYCGTALVAQNLMNRQREDGTLADGHRRLHCTSYSKNGGCSAGGSCSIVPIERALLNYCSDQFNLQRLLQDGDDGLGLQHQLVAARAEVEKLSSQLGKVTDALLADDSGAAPLAFVRKARELEQLQAVAQHKVRELEHQLSAVSSVAKPAHAERWAELAIEVEAGSHAAREQVRQLVMDTFERIVIYMRGIGASDRSSRMIDVQLFSRTGQFRVLQINRKTGAWMASEDWA

SEQ ID NO: 15237 - DNA, 50 bp, Pseudomonas monteilii
  source 1..50: mol_type = genomic DNA
agtatattttgattatcgttggggcaccccaacgatatcattcctatacg

SEQ ID NO: 15238 - DNA, 40 bp, Pseudomonas monteilii
  source 1..40: mol_type = genomic DNA
atcgaccagggctttagggcaacccaggcttacgaaacct

SEQ ID NO: 15239 - DNA, 50 bp, Pseudomonas monteilii
  source 1..50: mol_type = genomic DNA
agtatattttgattatcgttggggaaccccaacgatatcattcctatacg

SEQ ID NO: 15240 - DNA, 40 bp, Pseudomonas monteilii
  source 1..40: mol_type = genomic DNA
atagaccaaggtcttagggaaaggcaggcttcggaaacat

SEQ ID NO: 15241 - protein, 604 aa, Bacteroides fragilis
MIKIIGYARVSTTKQDLSRQKLKIKEFCENNNYELIEIIEDFGISGVVADRKGYIELQSKTYKDADMIVISELSRLSRQEDVTETVYNIQQIINKGLSVILLDSPSKIYEANKLLDITEILILTIKAWAAAQERLDIKKKNQDGKQALFQAYPYAVVDQKIPYGYKAVPNPNGKRPKYILEEVPEEVENIKRLFALVNSGKTLGAVARYFNERNITFRGYYSTVAILSNYIHSDIYRGIRRRTQRLGREEPYTIEVRIKPIISEEDFMKAQELIKNNYKNTPTGKVNHNPLKGIIRCRCGRAMTVKDKKPAAGISKLTYRCSCVDRKSHPDFCKYNIDEVSYDLTNEILYSLFKSMHTAEYINFFRNQTDNRVTELQEEIAGIEKRLSTLYLDKENLSNESQENANKFLLTTNPTLLNIIQEKQNQLDEKIKSINKEIIRYKKSQSKKIADIERIKDNNGKEKLQNLSIEEQGELYHKYLERVNYIPVTTMQGYYIVQFLNGIKFYIAITKVRSIAMASLLLDNWTIDEKGIITANYDTLKSSDMKNFSIEMIRKTKTMTLQEYLKSDLAKERALHLDLSYRERYLEELHKAGLDGRLRPLKKE

SEQ ID NO: 15242 - DNA, 50 bp, Bacteroides fragilis; identical to SEQ ID NO: 3302
  source 1..50: mol_type = genomic DNA

SEQ ID NO: 15243 - DNA, 40 bp, Bacteroides fragilis
  source 1..40: mol_type = genomic DNA
cggtacttggcatgaatactcggcaagagcaatcagccag

SEQ ID NO: 15244 - DNA, 50 bp, Bacteroides fragilis
  source 1..50: mol_type = genomic DNA
ttgggtttttctattttattatacgaacttaactaaatagacttgcccaa

SEQ ID NO: 15245 - DNA, 40 bp, Bacteroides fragilis
  source 1..40: mol_type = genomic DNA
ctgagcttggcctgcataggaggcaggaggactcagccag

SEQ ID NO: 15246 - protein, 590 aa, Bacteroides ovatus
MGNKFYLCKELNIRHMRGVIYSRVSTIDQDYSKQTNELKDFAKKNNIDIVHIFEEKESGFNNDRPEFKKVQQLTKDDVDILLVWELSRLSRRSIYIQQQVKDFADKGICIYTKKENLYTLNEDGTENKSAMLLIGFTSIIAEQEVATLKERTISSKRNRIIKEGYSYTYNAPYGYIYDKETKKLSINPIEAEVVKRIFELSANGYSAYRIPVLLNADGIPTKTGKKWTLPTIATILTNTVYKGEAHYKLKGEKPKEGKRYSRTTEYATVETPAIVTSELFDLSRKMMKERLSRSKSSGVKYNPLLRGLIVCPYCNVKYIFNRRDNLYSCHERYEKATNKTIQCFSKSISINKIDEIIWNLVKILFSKELAAGKTDEQIEPINRELESYRLQVVNLEHKQNELTQKANIIANAAIDIKIQFPNLPDLYLNKLKEVESINKEAGKYLNEIKHLEKLMESCRNKIQAINTLSDESIVVESIIDETEKYDLVHKVIDNIIIYGEGHYTLVVVTFQTGQVAYIGYYSFKRYKYYTIFYPSQSVWFDTEKRLGYITTMKDPKSLELSLETVTKEYSITDFINMFDTPENRHYYENH

SEQ ID NO: 15247 - DNA, 50 bp, Bacteroides ovatus
  source 1..50: mol_type = genomic DNA
atacatacctgtaaatgttaaatagtaaacaaacatttgcaggtatgggt

SEQ ID NO: 15248 - DNA, 40 bp, Bacteroides ovatus
  source 1..40: mol_type = genomic DNA
ggcttctttctggagcgtggtcaggtcgtacagcaacggg

SEQ ID NO: 15249 - DNA, 50 bp, Bacteroides ovatus
  source 1..50: mol_type = genomic DNA
atacatacctgtaaatgttaaataccaaacaaacatttgcaggtatgggt

SEQ ID NO: 15250 - DNA, 40 bp, Bacteroides ovatus
  source 1..40: mol_type = genomic DNA
gggctgtaggccgagcgtgcccacgtcgtacagcaacggg

SEQ ID NO: 15251 - protein, 489 aa, Pseudomonas aeruginosa
MAKAYSYIRFSSAKQAQGSSLERQQENLSRFLAENPQYELAETRFEDLGISGWSGEHLGHGLGKLQAAVNAGIIEAGDIIVIEAIDRISRLPLEDAVSLTSGILNKGVAIHTVEDRTTYDKTTYRQGHTALALILKTFASWEYSERLSERVKASYSKRAEAVRKGETIRRKNACWHTSDGKVVEEVAVHIRWMFEEYIAGAGVRKLAGEMMGRHPAFARVNPSHIRRWLRDKSLIGTWAKRDGEEVPGAFEPVLTPDVFYQAQALMNPQKNYTHPAKNFLTGLVKCQECGGNFAVKSQGTGNPFMGCYARTYHRCTNGTSIPLLVLHRVVMEEALDYIEDGIRASRLGEHDKHRLVVQGKLEEVQRGINGLSEAIAAHGFMPELNAKLAELKVTRTSLEAELARIPQKGDKEPVTNRELMAVWNGDKLKLNAMLQRAGFAVWCTGRKMKIGADGPEYEYLRYARRAKDFIVKTPVGEWELDGSQGNYHD

SEQ ID NO: 15252 - DNA, 50 bp, Pseudomonas aeruginosa
  source 1..50: mol_type = genomic DNA
cccggttatagcgtgcatcattgcccgctgcgtgatacactctaactgag

SEQ ID NO: 15253 - DNA, 40 bp, Pseudomonas aeruginosa
  source 1..40: mol_type = genomic DNA
gcccgccgggtcgcgcaggccgcagtagtagccgaccgga

SEQ ID NO: 15254 - DNA, 50 bp, Pseudomonas aeruginosa
  source 1..50: mol_type = genomic DNA
cccggttatagcgtgcatcattgctggctgcgtgatacactctaactgag

SEQ ID NO: 15255 - DNA, 40 bp, Pseudomonas aeruginosa
  source 1..40: mol_type = genomic DNA
gcccgcccggccgcccacctggcagttggagccgactcga

SEQ ID NO: 15256 - protein, 452 aa, Rhodococcus fascians
MRAAIYTRISSDPSGEGLGVARQLEDCEQLADRLQWEVVKRYSDNDVSAFSGRVRPQYEAMLKDIADGRVDAVVAWHTDRLHRSPVELETFIPIIDTHGVEIRTVSGGMLDLSTSAGRMVARIVGSVARQESEHTSERRRRSNDQKAALGVWQTARRPFGYSPDGEPLEPEASAVRSAVADVLAGKSLRQVAREWNAQGLRTSRDGKEWVSTSVRRVLKNPRYAALRVHRGAVVGAGEWTPLIDVDAHRGILAYLSDPGRAGKVSFERKWQGSGVYTCGVCGGRLVVHVDAKQRRAYKCSSNHVRRQGEALDAYVDGLVIGRLSRPDARLMIETPEFDSVSLQVERDVLRARSNDAALKFARGVLDSENFEIVSNELRSLLDDVDGKLGAARMGSPLADLILSETDIEERWSELSADLRGKVIDALMVVTVELSPKGLRKFDPEYVRIDWRS

SEQ ID NO: 15257 - DNA, 50 bp, Rhodococcus fascians
  source 1..50: mol_type = genomic DNA
cagtgcacaaccctgacattcactggaatggactgtcaagtaccacacac

SEQ ID NO: 15258 - DNA, 40 bp, Rhodococcus fascians
  source 1..40: mol_type = genomic DNA
gggcggggcgaccttcgcggggctcgaggccgcgccgcac

SEQ ID NO: 15259 - DNA, 50 bp, Rhodococcus fascians
  source 1..50: mol_type = genomic DNA
cagtgcacaaccctgacattcactgtaatggactgtcaagtaccacacac

SEQ ID NO: 15260 - DNA, 40 bp, Rhodococcus fascians
  source 1..40: mol_type = genomic DNA
gggcggggcaacttccggagtgctcggggccccgcccccc

SEQ ID NO: 15261 - protein, 553 aa, Pectobacterium aquaticum
MTKAYSYKRISSLKQAEGQGLDRQEDSVNKWLAAHPDVVLDTRFSFSDIGKSAFKGRHLAADAGLGMFLDAIEKGHIEKGSYLLIEAFDRFGRDDVDDARNRMVTIIKAGVSIVTLMDGREHNESNRGDIAYMITSLLQMHAAHDYSLKLAERVGKAKRAKRIAAKESLTVMSKQCPSWLDIVKDKCGKETFIHNAGAKTVQLIYAMREKNSGLPAITAYLNEHIEQYPPLTRQKKTRVWSQTTVRDILRAVSVLGTLPESRLKDSNGQPKYPAVAGYYGLPVISLDQWNKVQSLNVNGGGYKERSFPHGINLFRGLIRCSKCDGLMTIEGCRAGYHGSITCRKLSGKGCDAPRLPMRLFEAAIVNRLLINMTTEEYDKTLQKSLNTLVTEISVLGDEMKALHTAMRYARSEVVIEDIVSSIESITSLITEKQKQLDLLRQQSTSTKKHLFRDCNLKTNEGRIEARGLVFSYVKNITLNTTMKSCDVIFHNGKRVNNFSLVEVITGSEQALPILEGGYLDGWSNLMEDTGTLDFKDLNDFKSESEAVKIILGK

SEQ ID NO: 15262 - DNA, 50 bp, Pectobacterium aquaticum
  source 1..50: mol_type = genomic DNA
gtgttactatagaataatcacatttcgatgtgccgcatctgtagtaacct

SEQ ID NO: 15263 - DNA, 40 bp, Pectobacterium aquaticum
  source 1..40: mol_type = genomic DNA
catgactgcatggaaaatctcgatgtgtcgtagggatact

SEQ ID NO: 15264 - DNA, 50 bp, Pectobacterium aquaticum
  source 1..50: mol_type = genomic DNA
gtgttactatagaataatcacatttagatgtgccgcatctgtagtaacct

SEQ ID NO: 15265 - DNA, 40 bp, Pectobacterium aquaticum
  source 1..40: mol_type = genomic DNA
aatgagtgcaaggtaaatctagatgggtcaatggcatact

SEQ ID NO: 15266 - protein, 590 aa, Edwardsiella tarda
MKGATPVIPAYLYARVSSLTQTSDGHHGIERQVETLTQWLEHANSCIDEASQRANTQLPHIDVENVTQLTDQGYSAYKSANFEHGKLGLLYQQCVEGRLGSCWLIVENIDRISRATGIIAIHRISTMLLNGVNIFEIETNSCFSTLINDSCVGLSISLQRAFQESERKSIMSKKSFYRRIKEYRECKKPLINSKKHIPRWIDIVDGEYQPNELAKTINFIFEMYNEGHGNAVIVQRLKELSLKDHNETNWNTIKISQLLRDERVIGVLKNKNKKNKENYHKIEGIWPKIISENLFNSVQSKINRHPSSHIDRTTKKQQNLFNGIIKCLFCNKSIAAIPNGKGVVYLRCTTHRSKDDACKLGLSLNADIIDPAIINFINGINWEEVYSISNKEKSDVEKLRLEYVNLTNEISELISEINDADDRIIMRLSRLLGKKQQQQSKIESKINSIKVNYNIKNVDIKTTQNIFNRKNISIRQNLNLELKKIIKTLKLGKLSDTFALCELEYFTDKISHLLIINLKKSIVTSWGVYRKRNDDSIWFESNFITFEVNNPTNTGWPKDIIAFKESLSSSDLVLFTIMENTIIRAYELIN

SEQ ID NO: 15267 - DNA, 50 bp, Edwardsiella tarda
  source 1..50: mol_type = genomic DNA
aggtttttagtgatatcaaacaccaaggtgttttcatatactacacaccc

SEQ ID NO: 15268 - DNA, 40 bp, Edwardsiella tarda
  source 1..40: mol_type = genomic DNA
cagaggctttatgcacaccaacaagttggcaaatcccggc

SEQ ID NO: 15269 - DNA, 50 bp, Edwardsiella tarda
  source 1..50: mol_type = genomic DNA
aggtttttagtgatatcaaacacctaggtgttttcatatactacacaccc

SEQ ID NO: 15270 - DNA, 40 bp, Edwardsiella tarda
  source 1..40: mol_type = genomic DNA
caggtgctttgtgcacacatagaagtttgataatctcggc

SEQ ID NO: 15271 - protein, 515 aa, Vibrio parahaemolyticus; identical to SEQ ID NO: 3256

SEQ ID NO: 15272 - DNA, 50 bp, Vibrio parahaemolyticus; identical to SEQ ID NO: 3257
  source 1..50: mol_type = genomic DNA

SEQ ID NO: 15273 - DNA, 40 bp, Vibrio parahaemolyticus
  source 1..40: mol_type = genomic DNA
accaggaggaccaagaaaaagtaggttgtggtttccagcc

SEQ ID NO: 15274 - DNA, 50 bp, Vibrio parahaemolyticus
  source 1..50: mol_type = genomic DNA
atgggtcttttaggtactaaaagccttaatattggatataatagacctac

SEQ ID NO: 15275 - DNA, 40 bp, Vibrio parahaemolyticus
  source 1..40: mol_type = genomic DNA
accaggagaaccaggagaactgatgatgtgagttccagtc

SEQ ID NO: 15276 - protein, 556 aa, Vibrio parahaemolyticus
MSTQIAYSYVRFSSLEQAKGDSFRRQTEAAQKYCFENGLELADFTLRDLGLSAYHGNHVKDGALGEFIKAVEQGQIPKGAYLLVESMDRLSRERISIALRRFMQLLELGINIVTLQDKRVFTIDSLDNIGDLMMSLVLMMRAHEESATKSKRLKEAHKEKRKQARENLKPTRYNTPHWIKLTESGYELIPERVELLKRIFQMTIDGLGAIAIHKQLNQEAIKPWGRSKTGWHTTYIKKILRARTVLGEYQPFKTENGKRIEDGEPIQGYYPEAIDVDTFKRANLAIESRNGKSSGTRKNAINNLFTGLVVCKNCGATMHYLNKGSGSKGGQYLVCSRARQGAHHDGIICKYASMRYPVIEDAVLSIAATLNLRLHTAHNEEESAQLKEQLSSVSRNLKTVEASIVRLVDLLDSSSGSKALLTKLEQREVEQQELEQQYRELEKRLDEIELTPKSNNVWKELKHTLKTLKVEAADRTNVPLRAKINSQLVQCIEKIKFDASAKVVTIKIDESREVLLKFDNKQHSYVVKPSWDVREFLPATFIVKETARRASDLIYR

SEQ ID NO: 15277 - DNA, 50 bp, Vibrio parahaemolyticus
  source 1..50: mol_type = genomic DNA
tggggtgataccagttacagcaagctattagagtgtctgaaataacccca

SEQ ID NO: 15278 - DNA, 40 bp, Vibrio parahaemolyticus
  source 1..40: mol_type = genomic DNA
ggctggaaaccacaacctactttttcttggtcctcctggt

SEQ ID NO: 15279 - DNA, 50 bp, Vibrio parahaemolyticus
  source 1..50: mol_type = genomic DNA
tggggtgataccagttacagcaagagattagagtgtctgaaataacccca

SEQ ID NO: 15280 - DNA, 40 bp, Vibrio parahaemolyticus
  source 1..40: mol_type = genomic DNA
gactggaactcacatcatcagttctcctggttctcctggt

SEQ ID NO: 15281 - protein, 555 aa, Vibrio parahaemolyticus
MKLAYSYVRFSSPEQAKGDSLRRQTESARDYCERKGLKLADLTLKDLGLSAYHGVHFKDGALGEFIKAVEAEQIPKGAYLLVESIDRFSREKIHVAYRRFSELLELGINIVTLQDERVYTEASLNNLGDIMISLVTMSRAFEESDVKAKRLREAHAAKRAAARKNKTPTGYRPPDWLVQASQGYDLIPERVAIIRRIFQLTIDGLGAIAISKLLNREGVPTWGRSKTGWQTTYIKKLLRTRTVLGEYQPHKTVNRKREPDGEPIHGYYPPIIDPQTFRKADLAIRSRDRRPVSVRKAAVNNIFTGLVKCKNCGNTMHYVNKGRDSVKGGQYLVCSMARTGALVNGQKCSYSSMRYQVIEDAVLQIASIISLDLSPPDNSQELQSLRNELAVAESVRAELESTVESLIDKLEKVDDDELLLNRYNKRSQELKEQRQSCTEILKAIDELECKPTESHIFKKLSETLKKLKTEAADRENVVLRTRINSQLVSMLESIDIDGSNKLVSIQVDGTKTIDLRFDKRQKNYMVKPSWDEREFPPKTFAVKYATGSFRTQLFS

SEQ ID NO: 15282 - DNA, 50 bp, Vibrio parahaemolyticus
  source 1..50: mol_type = genomic DNA
tggggtgattccagttatcaaattcttatagattgtctggaataaccccg

SEQ ID NO: 15283 - DNA, 40 bp, Vibrio parahaemolyticus; identical to SEQ ID NO: 15278
  source 1..40: mol_type = genomic DNA

SEQ ID NO: 15284 - DNA, 50 bp, Vibrio parahaemolyticus
  source 1..50: mol_type = genomic DNA
tggggtgattccagttatcaaattagtatagattgtctggaataaccccg

SEQ ID NO: 15285 - DNA, 40 bp, Vibrio parahaemolyticus; identical to SEQ ID NO: 15280
  source 1..40: mol_type = genomic DNA

SEQ ID NO: 15286 - protein, 607 aa, Bacillus amyloliquefaciens
MRAALYYRVSTKMQEHKYSLKAQKQELRKYAESQNWIIAKEFRDVDSGAKLDKSGLNALLDFVEEGGCDVVLCIDQDRLSRLDTVSWEFLKSALRENNVRIAEPGSITDLDNEDDEFISDIKNLIARREKRAINRRMMRGKRQRTREGKGWGKTPIEYNYDKNTGTYSVNEKWSWVIPFIDDLYLNKGYSFKRIAKELNKITLTPTGKKWSDTVIASKLKNKAYHGVMRKTFSNGETIEIENIYPKLRSAESYEKLQEMRELKYQKKTRENEVPQLLRRTHMTCGLCGRKLTIHMSGTKEYGIHFYITHGRPERQKDDFKCDLSINMIRVEQNIVSAIKNIIKSEELARDHIQMDFDESDAVRLRDEVKAAKKSLADAREKVDRLLPLYLDGKFPKEQLDKQHGFLMNEITTHEKRVKQLNAQLSIVESQQFNYDLILEYFKIAERFDTWLTQNEQMDMIGKLFPQTTVYSDHIVMAGELPNGAPLEISVKVDPNPYERRNANQKDNRDPWGKYQKIQQLMKDKPGIPQSKIAAELNIAPSTIVRLRNKYGEFENQIKAIKHDPEGKRKILEEYVQKNPNASLRQISRDTRMSTTTVRRIKEKFDMQ

SEQ ID NO: 15287 - DNA, 50 bp, Bacillus amyloliquefaciens
  source 1..50: mol_type = genomic DNA
ggtgggtaagtgactaagtttattttaattaagctatgtacttacccacc

SEQ ID NO: 15288 - DNA, 40 bp, Bacillus amyloliquefaciens
  source 1..40: mol_type = genomic DNA
aaatgtcgtcattttaatttttttaaatatcgtcggcagg

SEQ ID NO: 15289 - DNA, 50 bp, Bacillus amyloliquefaciens
  source 1..50: mol_type = genomic DNA
ggtgggtaagtgactaagtttattaaaattaagctatgtacttacccacc

SEQ ID NO: 15290 - DNA, 40 bp, Bacillus amyloliquefaciens; identical to SEQ ID NO: 3045
  source 1..40: mol_type = genomic DNA

SEQ ID NO: 15291 - protein, 476 aa, Mycobacterium kubicae
MRQATAIYTRISLDRSGQRHGVTRQLEDCTALAERLGWNVVARFDDNDLSAYNGKTRPQFEALLDAMKRGEIDSLICWHPDRLYRRLADLVRLLDVAAGVEIRTVNGGDMDLSNATGRMLATIIGSVSTQESEHKGERQRAAAKQLAASGAPKWRRAFGYIGDTYQPDPAVAPLVREAYAAVLAGASLGDVCRMWNDAGALTQRWVKPKNADGQTIRDAQPVVERRKWTQPQVSNFLRKPRNAGLRDHNGVVVGKGTWPALVDEDTWRAVQGVLEAPGRAPGRKTVRRHLLTGVLQCGKDGCGGYLSGMQTLDKRITYACKTCRGVSVRAEHVEPLVYGVVAGRLAQPDAVDLLKAELHDTTEAERLRGERATLLARLDDIAIERADGLIDGKGYRAMTDRINEQLAGIERRQHDQERLRVFDGLPLGTPEVAERVRALSADRLRAVIDVLVEFEVAPVGKGGKVFNPERVKVNWK

SEQ ID NO: 15292 - DNA, 50 bp, Mycobacterium kubicae
  source 1..50: mol_type = genomic DNA
aaatgtacttcgcgccgctagtgccatcacctgatatccgtagtacattt

SEQ ID NO: 15293 - DNA, 40 bp, Mycobacterium kubicae
  source 1..40: mol_type = genomic DNA
gaagtgcctgtgccggcaccatcatctgctgaagacgttc

SEQ ID NO: 15294 - DNA, 50 bp, Mycobacterium kubicae
  source 1..50: mol_type = genomic DNA
aaatgtacttcgcgccgctagtgctgtcacctgatatccgtagtacattt

SEQ ID NO: 15295 - DNA, 40 bp, Mycobacterium kubicae
  source 1..40: mol_type = genomic DNA
gaagtgccagagcctgtcctggcatctcatgaagactttc

SEQ ID NO: 15296 - protein, 548 aa, Clostridium botulinum
MKKELIKVACYCRVSTKADEQEQSFEAQQKYFKEKLSKKKGFDLVEVYADKGLSGTDFSKRDQFNKMLDDCGIIKKEVKARKTEIRKKYISIDYVADANVKPKFTLIYVKDSSRFARNTEVNRIISRLRDKGVYVYFEDLNKSTENPSEKMLIDFMFSMNEQESISRSIKVRFGNMQSAKDGIVRSIKLYGYHYNKEENSLRIIDDEANIVKLIFKLSLEGNGGRAIATILNSKGIKNRKGNEWRPNTINGMLQNPTYCGKVVRNRWYSSRMYGKDIVKLNDTKEWIVEDSNKVDKIIDEETFTIIQDIIEKNRNKVGRPTGKYHGRSEFAGKIKCEKCGKYYVRNTDRGRVFYNCSTKKQHGLKKCNSRNIQEYEIENLINPYLEKDGYKNLTKKYIDILIEKEEEKKASLYRDACTDEINNIKEEVFKYKGKLSKLTDILLADDSESVRDVFNIKKKEINNKLKELESELDKLTTTDKQKEEKLNNMNMCIKTLQERYNDIPNEITREYFINNCLDEIRVSEKGELKLLTYTHYAFEKIMNLMDEY

SEQ ID NO: 15297 - DNA, 50 bp, Clostridium botulinum
  source 1..50: mol_type = genomic DNA
accatgattacgtatccatatattttaatgttatgatacagtatcaaggt

SEQ ID NO: 15298 - DNA, 40 bp, Clostridium botulinum
  source 1..40: mol_type = genomic DNA
agctggaaaacataatattttattgtatggtgagcctgga

SEQ ID NO: 15299 - DNA, 50 bp, Clostridium botulinum
  source 1..50: mol_type = genomic DNA
accatgattacgtatccatatatttgaatgttatgatacagtatcaaggt

SEQ ID NO: 15300 - DNA, 40 bp, Clostridium botulinum
  source 1..40: mol_type = genomic DNA
agctggaaaacaaaatatttgttttcttggctagtctgaa

SEQ ID NO: 15301 - protein, 548 aa, Clostridium botulinum
MKKELIKVACYCRVSTKADEQEQSFEAQQKYFKEKLSKKKGFDLVEVYADKGLSGTDFSKRDQFNKMLDDCGIIKKEVKARKTEIRKKYISIDYVADANVKPKFTLIYVKDSSRFARNTEVNRIISRLRDKGVYVYFEDLNKSTENPSEKMLIDFMFSMNEQESISRSIKVRFGNMQSAKDGIVRSIKLYGYLYNKEENSLRIIKDEEEVVKLIFKLRLEGNGGRAIATILNSKGIKNRKGNEWRPNTINSMLQNPTYCGKVVRNRWYSSRMYGKDIVKLNDTNEWIVEDSNKVDKIIDEETFTIIQDMIEKNRNKVGRPRGKYHGRSEFAGKIKCEKCGKYYVRNTDRGRVFYNCSTKKQHGLKKCNSRNIQEYEIENLINPYLEKDGYKNLTKKYIDILIEKEEEKKASLYRDACTDEINNIKEEVFKHKGKLSKLTDILLADDSESVRDVFNIKKKEINNKLKELESELDKLTTTDKQKEEKLNNMNMCIKTLQERYNDIPNEITREYFINNCLNEIRVSEKGELKLLTYTHYLFEKIMNLMDEY

SEQ ID NO: 15302 - DNA, 50 bp, Clostridium botulinum
  source 1..50: mol_type = genomic DNA
accatgattacgtatccatatattttattgttatgatacagtatcaaggt

SEQ ID NO: 15303 - DNA, 40 bp, Clostridium botulinum
  source 1..40: mol_type = genomic DNA
agctggaaaacataatattttattgtatggggagcctgga

SEQ ID NO: 15304 - DNA, 50 bp, Clostridium botulinum
  source 1..50: mol_type = genomic DNA
accatgattacgtatccatatatttgattgttatgatacagtatcaaggt

SEQ ID NO: 15305 - DNA, 40 bp, Clostridium botulinum; identical to SEQ ID NO: 15300
  source 1..40: mol_type = genomic DNA

SEQ ID NO: 15306 - protein, 537 aa, Clostridioides difficile; identical to SEQ ID NO: 13731

SEQ ID NO: 15307 - DNA, 50 bp, Clostridioides difficile; identical to SEQ ID NO: 13727
  source 1..50: mol_type = genomic DNA

SEQ ID NO: 15308 - DNA, 40 bp, Clostridioides difficile
  source 1..40: mol_type = genomic DNA
atatgttcatccttttagtgatggtaatggaagaacatca

SEQ ID NO: 15309 - DNA, 50 bp, Clostridioides difficile
  source 1..50: mol_type = genomic DNA
caggttctcaatgtggtattgcatcatggtaatgtaacattgagatattg

SEQ ID NO: 15310 - DNA, 40 bp, Clostridioides difficile
  source 1..40: mol_type = genomic DNA
ctttattcttccttttaatcatggtaatgacagaaaataa

SEQ ID NO: 15311 - protein, 533 aa, Clostridioides difficile; identical to SEQ ID NO: 12191

SEQ ID NO: 15312 - DNA, 50 bp, Clostridioides difficile; identical to SEQ ID NO: 12192
  source 1..50: mol_type = genomic DNA

SEQ ID NO: 15313 - DNA, 40 bp, Clostridioides difficile; identical to SEQ ID NO: 15308
  source 1..40: mol_type = genomic DNA

SEQ ID NO: 15314 - DNA, 50 bp, Clostridioides difficile
  source 1..50: mol_type = genomic DNA
cagtgtctcattgatacattctctcatggaaatgtaccatcaagacacct

SEQ ID NO: 15315 - DNA, 40 bp, Clostridioides difficile; identical to SEQ ID NO: 15310
  source 1..40: mol_type = genomic DNA

SEQ ID NO: 15316 - protein, 543 aa, Clostridioides difficile; identical to SEQ ID NO: 13721

SEQ ID NO: 15317 - DNA, 50 bp, Clostridioides difficile; identical to SEQ ID NO: 12192
  source 1..50: mol_type = genomic DNA

SEQ ID NO: 15318 - DNA, 40 bp, Clostridioides difficile; identical to SEQ ID NO: 15308
  source 1..40: mol_type = genomic DNA

SEQ ID NO: 15319 - DNA, 50 bp, Clostridioides difficile; identical to SEQ ID NO: 15314
  source 1..50: mol_type = genomic DNA

SEQ ID NO: 15320 - DNA, 40 bp, Clostridioides difficile; identical to SEQ ID NO: 15310
  source 1..40: mol_type = genomic DNA

SEQ ID NO: 15321 - protein, 537 aa, Clostridioides difficile
MLKQQTRLRVRLYARLSKDDGDADKESNSIKNQLQMLRYNAKEKGFIVVGEYVDDGYSGTTFNRPDLNRMIKDAMEDTEPSGIMVKDMSRFGRNNAMFMYYVEEIFPNNDILFIALNDDVDTRFDENEMMPFKSIMNEYYARDTSKKIRSVKKTTALNGGFCGSFAPYGYRLDPQNKQKLLIDEETAPIVKRIFELSKQGNGIHQIARILCEDGILIPRAYRALKNGTLETSTGFKFPTDWVAKNVKMILENQVYLGHMVSHKTQIKSFKNRKLVPVPKEDWIIVKNTHEPIIDEDTFELVQKFISVKKQPNKTRKPNMFVGLVKCPDCGRNMALSGRADSSRWLRCRTYTRNTNLCTSHSISYNALQQIVMNDIQKHIKNMEALGDQFLEEMKELSEKGGNEKIQHLKQSLEVAEKRIEEIDNVIMKLFEQNALGKISDERFEKMSISYENEQSELKLKRNDLKDKIESEEKKTQSTNQFLETIRKYENVTELNRAMLVELIDSIYVYQAEGTGQEKTQKVEINYRFLAGSQCGIA

SEQ ID NO: 15322 - DNA, 50 bp, Clostridioides difficile; identical to SEQ ID NO: 13727
  source 1..50: mol_type = genomic DNA

SEQ ID NO: 15323 - DNA, 40 bp, Clostridioides difficile; identical to SEQ ID NO: 15308
  source 1..40: mol_type = genomic DNA

SEQ ID NO: 15324 - DNA, 50 bp, Clostridioides difficile; identical to SEQ ID NO: 15309
  source 1..50: mol_type = genomic DNA

SEQ ID NO: 15325 - DNA, 40 bp, Clostridioides difficile; identical to SEQ ID NO: 15310
  source 1..40: mol_type = genomic DNA

SEQ ID NO: 15326 - protein, 575 aa, Phocaeicola vulgatus
MRGAIYSRVSTLDQDYKRQTNELKEYAQYMGIEITHVFEEKESGFNDDRPEFAKLKELTKDDIDIVLVWELSRLSRRSLYLQQQIEYFTKKGICVYAKKENLRTLDEKGEEDRNTKFIIGIIAMIAEQEVATLKSRSISSKRNKIINEGNSYTYKAPYGYDYSTETKKLSINEEEAKTVRRVIELSANGYSSARIALILNAENIPTRSKTKIWTMGTINTMLSNPVYKGKAEYMLKGTEPKKGKRYKRPIDVAIVNTPAIVSAELYDLSREKMKGRAFRSKSTGVKHFQLLRGLIYCPYCKIKYTYEGGRDLYVCHDKHKKSKNKPDCFSKAIKATRIEKIVWELVKLLFSQELATGKAQEQEEPLRQEIEAHKKLLMGIEEKLNDLTAQTNAIVNAAIDIKREMPNMPDLYINKIREAASLDKESKKYQYEKDRLNKLILSCEDKIKAINSLSNEKVLVDSITDDMERYELIHKVIDHMIIYGEDSAYSLVVVTFKTGQEVYIGYKSKGYQYYTIFYPSQSVWVDTKKRLGCIMTMKAPTSLEFSLETLTKEYSITDFVKMFNTPENRHYYENQ

SEQ ID NO: 15327 - DNA, 50 bp, Phocaeicola vulgatus; identical to SEQ ID NO: 13317
  source 1..50: mol_type = genomic DNA

SEQ ID NO: 15328 - DNA, 40 bp, Phocaeicola vulgatus
  source 1..40: mol_type = genomic DNA
gtgatatagaacaaatgtagtggattcatggcattatgcc

SEQ ID NO: 15329 - DNA, 50 bp, Phocaeicola vulgatus
  source 1..50: mol_type = genomic DNA
agtagtacctactaatgttaaatagagacaacacatttgcaggtacaact

SEQ ID NO: 15330 - DNA, 40 bp, Phocaeicola vulgatus
  source 1..40: mol_type = genomic DNA
ttcatataaaacaaaaatagaggattcctggcaagatgtc

SEQ ID NO: 15331 - protein, 575 aa, Phocaeicola vulgatus; identical to SEQ ID NO: 13316

SEQ ID NO: 15332 - DNA, 50 bp, Phocaeicola vulgatus
  source 1..50: mol_type = genomic DNA
agtagtacttactaatgttaaatagtgacaacacatttgcaggtacaact

SEQ ID NO: 15333 - DNA, 40 bp, Phocaeicola vulgatus; identical to SEQ ID NO: 15328
  source 1..40: mol_type = genomic DNA

SEQ ID NO: 15334 - DNA, 50 bp, Phocaeicola vulgatus
  source 1..50: mol_type = genomic DNA
agtagtacttactaatgttaaatagagacaacacatttgcaggtacaact

SEQ ID NO: 15335 - DNA, 40 bp, Phocaeicola vulgatus; identical to SEQ ID NO: 15330
  source 1..40: mol_type = genomic DNA

SEQ ID NO: 15336 - protein, 575 aa, Phocaeicola vulgatus; identical to SEQ ID NO: 13316

SEQ ID NO: 15337 - DNA, 50 bp, Phocaeicola vulgatus; identical to SEQ ID NO: 13317
  source 1..50: mol_type = genomic DNA

SEQ ID NO: 15338 - DNA, 40 bp, Phocaeicola vulgatus; identical to SEQ ID NO: 15328
  source 1..40: mol_type = genomic DNA

SEQ ID NO: 15339 - DNA, 50 bp, Phocaeicola vulgatus; identical to SEQ ID NO: 15329
  source 1..50: mol_type = genomic DNA

SEQ ID NO: 15340 - DNA, 40 bp, Phocaeicola vulgatus; identical to SEQ ID NO: 15330
  source 1..40: mol_type = genomic DNA

SEQ ID NO: 15341 - protein, 481 aa, Streptococcus pneumoniae; identical to SEQ ID NO: 2171

SEQ ID NO: 15342 - DNA, 50 bp, Streptococcus pneumoniae
  source 1..50: mol_type = genomic DNA
aaaatataaataattttagtaacctacatctcaaagagtttcaagtccat

SEQ ID NO: 15343 - DNA, 40 bp, Streptococcus pneumoniae
  source 1..40: mol_type = genomic DNA
gataatcagcaagaccaccaacatttccaccaatgtaaaa

SEQ ID NO: 15344 - DNA, 50 bp, Streptococcus pneumoniae; identical to SEQ ID NO: 15342
  source 1..50: mol_type = genomic DNA

SEQ ID NO: 15345 - DNA, 40 bp, Streptococcus pneumoniae
  source 1..40: mol_type = genomic DNA
gataaaacacaaaaccacctacatttccatcactctcaaa

SEQ ID NO: 15346 - protein, 537 aa, Clostridium scindens
MKQQIYNTALYLRLSRDDELQGESSSITTQRSMLRLYAKEHHLNIIDEYIDDGWSGTNFDRPSFQRMIEDIEAGKINCVVTKDLSRLGRNYIMTGQYTELYFPSHNVRYIAIDDGVDSEKGESEIAPFKNIINEWVARDTSRKVKSAFKTKFAEGAHYGAYAPLGYKKHPDTKGKLLIDDETKWIVEKIFSLAYQGYGSAKITKILREEKVPTASWLNFTRYGTFAHIFEGKPKSKRYEWTIAHVKAILKSEVYIGNSVHNMQSTVSFKSKKKVRKPESEWFRVENTHEPIIDKEVFYRVQEQIKSRRRQTKEKATPIFAGLVKCADCGWSMRFATNTSNKTPYSYYACSYYGQFGKGNCSMHYIRYDVLYQAVLERLQYWAKAVQQDEEKVLNKIQKAGNAERIREKKKKASALKKAENRQNEIDRLFAKMYEDRACEKITERNFIMLSGKYQKEQIELEQQITNLREELSKMEQDMIGAEKWIELIKEYSVPKELTAPLLNAMIEKILIHEATTNEDNERIQEIEIYYRFIGKVD

SEQ ID NO: 15347 - DNA, 50 bp, Clostridium scindens; identical to SEQ ID NO: 1657
  source 1..50: mol_type = genomic DNA

SEQ ID NO: 15348 - DNA, 40 bp, Clostridium scindens
  source 1..40: mol_type = genomic DNA
gatttcaaaatgggaatcaggagcaacctatccggagatg

SEQ ID NO: 15349 - DNA, 50 bp, Clostridium scindens
  source 1..50: mol_type = genomic DNA
tcatatctttaactaagggaaagcaaagtttcccaaacaaaaggatatta

SEQ ID NO: 15350 - DNA, 40 bp, Clostridium scindens
  source 1..40: mol_type = genomic DNA
gacttcttcctgggaattaaaagcaacctatcccaggatg

SEQ ID NO: 15351 - protein, 540 aa, Blautia pseudococcoides
MPTGTVVRAARAVTVIPAKQNQLPLDVLSMEARKKVAAYARVSTNSEEQLTSYEAQVDYYTRYIQAQGEWDFVKVYTDEGISATNTKKRDGFNNMIADALAGKIDIIITKSISRFARNTVDTLTTVRKLKEKGIEVYFEKENIHTLDGKGELLITIMSSLAQEESRSISENVTWGQRKRFADGKVNMPYKHFLGFEKGTDNTPQIVPEQAEVAQLIYRLAFYRKSPSYIATLLTDEGIPSPAGKKRWRPNTVESILTNEKYKGDALLQKSFTVDFLTKKIKANEGEVPQYYVENSHPAIIEPEFFDLIQYEIKQCRERGLWKSCAYPFSSRIICGHCGGFYGPKVWHSNSEYRSRIWQCNEKHRGQHCTTPHLTEAEIEAAFLIAFNMLLENRDEILEAYEEVIEALTDVSDLDAEQEQLQSEIEIVVEMIRKLIGENTQMAMEQAEYERKYNGYCARYEEGNKRLAEISELRMERIVKRAKIRICMDRISQQENLVTEFDEELWYSMVDYVTVYEGKSMVFTFRDGREVKLSADVWRVV

SEQ ID NO: 15352 - DNA, 50 bp, Blautia pseudococcoides
  source 1..50: mol_type = genomic DNA
gtattaaagtttgtcggtaaataaaatatctaccgacaaactttaataca

SEQ ID NO: 15353 - DNA, 40 bp, Blautia pseudococcoides
  source 1..40: mol_type = genomic DNA
acggtcaaaaaacaaaaaaaggatgcaggagatgggactt

SEQ ID NO: 15354 - DNA, 50 bp, Blautia pseudococcoides; identical to SEQ ID NO: 15352
  source 1..50: mol_type = genomic DNA

SEQ ID NO: 15355 - DNA, 40 bp, Blautia pseudococcoides
  source 1..40: mol_type = genomic DNA
gcatcaaaaaaaaaaaaaaaaaatactggagatgggactt

SEQ ID NO: 15356 - protein, 511 aa, Clostridium botulinum
MKIAIYSRKSVSTDKGESIKNQIEICKEYFLRRNTNIEFEIFEDEGFSGGNTNRPAFKFMMSKIKMFDVVACYKIDRIARNIVDFVNVYDELNKLGIKLISVTEGFDPSTPLGKLIMMILASFAEMERENIRQRVKDNMKELAKAGRWTGGNVPFGFISQRIEEGGKKATYLKLDENKKQLIKEIFDMYISANSMHKVQKQLYIIHNIKWSLSTIKNILTSPVYVKADKDVVKYLNNFGKVFGEPNGANGMITYNRRPYTNGKHRWNDKGMFYSISRHEGIIDSSTWLKVQSIQEKTKVAPRPKNSKVSYLTGILKCAKCGSPMTISYNHKNKDGSITYVYLCTGRKTYGKEYCTCKQVKQTIMDKEIENALNSYIQLNIEEFKKVIGSPNDTENFNKNILCIEKKIETNKVKINNLVDKISILSNTASAPLLSKIEELTKLNEDLKKELLFIQQEHINSTFVSPEEKYERLKQFSYTLNTNDIDLKRELLSFSVQEIKWDSDEKCIDIII

SEQ ID NO: 15357 - DNA, 50 bp, Clostridium botulinum
  source 1..50: mol_type = genomic DNA
tactgttgttctatatggattggagttgcaacacaactacaaatgcagta

SEQ ID NO: 15358 - DNA, 40 bp, Clostridium botulinum
  source 1..40: mol_type = genomic DNA
cactgttggctggattggagttgcatgcactcaccctcct

SEQ ID NO: 15359 - DNA, 50 bp, Clostridium botulinum
  source 1..50: mol_type = genomic DNA
tactgttgttctatatggattggagatgcaacacaactacaaatgcagta

SEQ ID NO: 15360 - DNA, 40 bp, Clostridium botulinum
  source 1..40: mol_type = genomic DNA
cactgtttcctgaatgtgggatgcatgcaccaacgctcct

SEQ ID NO: 15361 - protein, 546 aa, Vallitalea guaymasensis
MGRKGKYNNICTPAKDEWKVGLYVRLSREDDDKKDESNSITNQKLLLEKFMEADEEFKLIKIYQDDGKTGTNFNREGFQQMMTDIRAGKINCVIVKDSSRLARDYAGAGDLVEKQLKELGVRFIAVNDGIDTFGENNYSNDMMPFRFVFNEMYAADISKKVRSSLDIKRRKGEFIGAFAPYGYIKDPGEKNKLLIDDKAAKVIRKIFNFYIQGYNQLTIAKMLNEQGIPCPSEYKKRKGLKYKNCNRLKATVYWTYSTIHRILNNEVYIGHMVQKKSEKISFKIDKRITKPEEEQIIVYNTHEPIIDLHTWEKTQIKLTKDTRISNKNKQISLFAGFLKCNDCGRAMHRKKGKKGKYYYVCGTYKTYGKKQCSSHMIKEDELIEILLKDIQRELVLELMKEEIIELINQNSYICTKNERGQIYLNKLENIREKYSKRILEAYEDFKEELLTKDQYLSIKDKYDKLEFEIDQEIIQIKEKIKYSKDNEVINNIWLEQLKEGKISELNREVLEELLDEIVVYEDGTIEIHYYYSSIMQDIIKEQTGGI

SEQ ID NO: 15362 - DNA, 50 bp, Vallitalea guaymasensis
  source 1..50: mol_type = genomic DNA
ttgagtctataaatattgtcacggtgggctgatgtcatttatagacacaa

SEQ ID NO: 15363 - DNA, 40 bp, Vallitalea guaymasensis
  source 1..40: mol_type = genomic DNA
aataagttttgatgcagcgtgggggaatgatgatactgat

SEQ ID NO: 15364 - DNA, 50 bp, Vallitalea guaymasensis
  source 1..50: mol_type = genomic DNA
ttgagtctataaatattgtcacgggaggctgatgtcatttatagacacaa

SEQ ID NO: 15365 - DNA, 40 bp, Vallitalea guaymasensis
  source 1..40: mol_type = genomic DNA
aataacttatgctgctgctgatgactatgatgatactgat

SEQ ID NO: 15366 - protein, 585 aa, Serratia fonticola
MPKLYSYIRWSSERQAKGTTLKRQMESAKKFALMNDLELVEITDPGVSAFRGKNTKSGKLGDFIDAVRQGAIPADSWLYVEHLDRLTRQDVTTAQKLFIEILELGLTLVTGMDKRSFTLESVNQNPTELMISILMFSRSNEESKTKQSRTISNVKALVECHKEGKPVNIKSCGKHPFWIDDSGPQNEAVRKHPKYWVIAREAIELFLQGHGIYKVKRYLDGNYPDGLNGKEWDYQVLKRMRESRALIGERTINVDGQTYKLHGYYPLLCKNEAEFLKLQELKVQNGNKSKKDVTKDNIKLLSGLSILRCSKCGGTMAGFMNRGKPRYICLNGRHLQKGCVGWSITAPLVDHCVIVALLIGYMDANRQEGQDTSKFVEEIATKQGEVEKIDKRIENISLSIEEGVDITIYSARLKVLSAERELLLRDIGWLKERKILAESKGSFEVTMIDFMDMIHWKVFANSSDETRNRIRSVINSIIEFVVVDKTDGCIAIKIKCHGIDEVFIFRGENRKPHWNFDVEPFTENITYENNDERCELLTSNELVKESLSIRSEIKHAYLGFYKTVKEMLSIAGYPKIDGSLFWPNR

SEQ ID NO: 15367 - DNA, 50 bp, Serratia fonticola
  source 1..50: mol_type = genomic DNA
taatatacttcttgattgttagggcaccctaatgataaaaatccaatctt

SEQ ID NO: 15368 - DNA, 40 bp, Serratia fonticola
  source 1..40: mol_type = genomic DNA
atcaaccaggtttttcgggcaacctagtgagacaaagccg

SEQ ID NO: 15369 - DNA, 50 bp, Serratia fonticola
  source 1..50: mol_type = genomic DNA
taatatacttcttgattgttagggggccctaatgataaaaatccaatctt

SEQ ID NO: 15370 - DNA, 40 bp, Serratia fonticola
  source 1..40: mol_type = genomic DNA
atctaccaggttgttggggggaggcagtgtgacacagcgg

SEQ ID NO: 15371 - protein, 612 aa, Anaerococcus vaginalis; identical to SEQ ID NO: 471

SEQ ID NO: 15372 - DNA, 50 bp, Anaerococcus vaginalis; identical to SEQ ID NO: 9697
  source 1..50: mol_type = genomic DNA

SEQ ID NO: 15373 - DNA, 40 bp, Anaerococcus vaginalis
  source 1..40: mol_type = genomic DNA
agaaatataagctggcagcaggaaaaactgctaagtcaat

SEQ ID NO: 15374 - DNA, 50 bp, Anaerococcus vaginalis; identical to SEQ ID NO: 14064
  source 1..50: mol_type = genomic DNA

SEQ ID NO: 15375 - DNA, 40 bp, Anaerococcus vaginalis
  source 1..40: mol_type = genomic DNA
aggaaaataagctgccagaatggaaaactgctgagacagc

SEQ ID NO: 15376 - protein, 463 aa, Selenomonas ruminantium
MSIKRAALYIRVSSDEQARHGLSLGEQRSDLLSYAKAHKYAVAGVYADEGVSARKSYRSRKELQRLLRDVEAGQVDVIVMKCLDRWFRNVKDYYKVQEILDRHGVLWECSQDRYDTTTAAGRLNLHIRLAIAEEESDRTGERIRYVFRGKKERHELLTGNTPIGYTLKEKHLVPDENAPIVQFMFQHVHAGNSAYSVPKAVMKEFGFSITYRQVWLALRNRTYMGERYGIPGFCPELVPADVFEHVQTLIHSHGHSRFAPSGRVYLFSGLIRCPSCGRNLNANPGEANAQGEYTKFLYRCGSRMSDGPGGKCTFTRSIYEQKIEGYLLEHLQEMIANHIYEVNHIHAQQEKQQGESIESLNAKLARLKDLYVDGLIDKDTYRTDYEKLQAQVSKAARAEDNPPRISPALQEIANEKGFRDTYESLTRENQRIFWHSIIKYIDFDDLPENRGKGKVIHFRVTFL

SEQ ID NO: 15377 - DNA, 50 bp, Selenomonas ruminantium
  source 1..50: mol_type = genomic DNA
tcatgttgttattttacctgttcatttgaaagagtaaaataacaacatgg

SEQ ID NO: 15378 - DNA, 40 bp, Selenomonas ruminantium
  source 1..40: mol_type = genomic DNA
gcctcccatggcatggcccttgaagtgggtaagagccagg

SEQ ID NO: 15379 - DNA, 50 bp, Selenomonas ruminantium
  source 1..50: mol_type = genomic DNA
tcatgttgttattttacctgttcacctgaaagagtaaaataacaacatgg

SEQ ID NO: 15380 - DNA, 40 bp, Selenomonas ruminantium
  source 1..40: mol_type = genomic DNA
ccctcccatggcatggcctcctgagagtctaagatctagg

SEQ ID NO: 15381 - protein, 527 aa, Ruminococcus lactaris
MEKAVLYLRLSKEDIDKISEGDDSASIKNQRLLLTDYALKHDYQIVDVYSDDNESGLYDDRPDFERMIQDAKLGKFSIIIAKTQARFSRNMEHIERYLHHDFPILGIRFIGVTDGVDTADSSNKKARQINGLVNEWYCEDLSKNIRSAFKAKMKDGQYLGSSCPYGYIKDPTNHNHLIVDDYAADIVREIYKLYLQGIGKGRIGRILSDRGVLIPSLYKRNVQGINYHNANAKAETHLWSYQTIHQILNNQMYLGNMVQYRTTTLSYKDKTKKLRLPSEWIIVEGTHEPIISYAIFQRVQELQKIRTKEVNTEQKYTNIFSGLLYCADCNHTMNRNYTRKGVFCGFICSTYKRHGNKAGCRSHRVDYDALCDAVLESIKLEARKILSDKDVDELKKSRLISSREEKIENEIRILENECEKLKQYKQKTYEAYLDDLITMNEYKVYIKKYDTELSDTCKKIDKLYAEKQVTDSLDQKYKEWVNMFSDYINITELTRTVVIELIKRIDVYEDGNIKIHYRFKNPYESSK

SEQ ID NO: 15382 - DNA, 50 bp, Ruminococcus lactaris
  source 1..50: mol_type = genomic DNA
atctcatttttaaacgaaacatgtattacatttaaaaataggaattttac

SEQ ID NO: 15383 - DNA, 40 bp, Ruminococcus lactaris
  source 1..40: mol_type = genomic DNA
cagtgcaaatgatgcctgtgttgctatggctgaatatatt

SEQ ID NO: 15384 - DNA, 50 bp, Ruminococcus lactaris
  source 1..50: mol_type = genomic DNA
atctcatttttaaacgaaacatgtagtacatttaaaaataggaattttac

SEQ ID NO: 15385 - DNA, 40 bp, Ruminococcus lactaris
  source 1..40: mol_type = genomic DNA
cagtactaatgatgcacgtagagctatgggtgaagataca

SEQ ID NO: 15386 - protein, 534 aa, Clostridium butyricum
MKAAIYSRKSKFTGKGESIENQIEMCKKYASDNEYDEIFIYEDEGFSGGNINRPEFKQMMKDAKSHKFDVIICYRLDRISRNVSDFSTLIDKLKLLNIGFVSIKEQFDTTSPMGTAMMFISSVFAQLERETIAERIKDNMYELAKTGRWLGGTPPFGFISEQSLYSDANGKQKKMFQLAPVESECELIKYMYEKYLALGSLGKLQKHLLSKEIKTRNNATWDIKALQLILRNPVYVKSDEVVLSYLESKGAKVFGEVNGNGILSYNKKDSKDKYKDISEWILSVAKHNGLIDSSLWLLVQKKLDKNKSLAPRLVSNDSSGLLSRVLYCKKCGGKMIQKKGHASVKTKEPFRYYVCLNKMNFKSCDSKNIRADILEKHVADKIIEETSDTGSLIKAIDDFKNKLQLDSGKSNNLNFIKKQILLKQTQINNLMENISKNPKLFDLFNSKIEELNSELKSLKFKKFEAESVKENTSNALKEIDASTQMLLNFKKLWLHADFSTKKLLIENIVDSIYYNANDKTADVKLICFKKKGAL

SEQ ID NO: 15387 - DNA, 50 bp, Clostridium butyricum
  source 1..50: mol_type = genomic DNA
aggcgctctttgatgtagcgccaatatgctcactacatgaaaaagcgata

SEQ ID NO: 15388 - DNA, 40 bp, Clostridium butyricum
  source 1..40: mol_type = genomic DNA
gtctccagtaccacctttatatgcaccagcagttgctgaa

SEQ ID NO: 15389 - DNA, 50 bp, Clostridium butyricum
  source 1..50: mol_type = genomic DNA
aggcgctctttgatgtagcgccaatctgctcactacatgaaaaagcgata

SEQ ID NO: 15390 - DNA, 40 bp, Clostridium butyricum
  source 1..40: mol_type = genomic DNA
aactccagtatcagcttcttctgaaacagcagtttctgaa

SEQ ID NO: 15391 - protein, 534 aa, Clostridium butyricum
MKAAIYSRKSKFTGKGESIENQIEMCKKYASDNEYDEIFIYEDEGFSGGNINRPEFKQMMKDAKSHKFDVIICYRLDRISRNVSDFSTLIDKLKLLNIGFISIKEQFDTTSPMGTAMMFISSVFAQLERETIAERIKDNMYELAKTGRWLGGTPPFGFISEQSLYSDTNGKQKKMFQLAPVGSECELIKYMYEKYLALGSLGKLQKHLSSKEIKTRNNATWDIKALQLILRNPVYVKSDEVVLSYLESKGAKVFGEVNGNGILSYNKKDSKDKYKDISEWILSVAKHNGLIDSSLWLLVQKKLDKNKSLAPRLVSNDSSGLLSRVLYCKKCGGKMIQKKGHTSVKTKEPFRYYVCLNKMNFKSCDSKNIRADILEKHVADKIIEETSDTGSLIKAIDDYKNKLQLDSGKSNNLNFIKKQILLKQTQINNLMENISKNPKLFDLFNSKIEELNSELKSLKFKKFEAESVKENTSNALKEIDASTQMLLNFKRLWMYADSSTKKLLIENIVDSVCYDADNKTADVKLICCKKKGAL

SEQ ID NO: 15392 - DNA, 50 bp, Clostridium butyricum
  source 1..50: mol_type = genomic DNA
aggcgctctttgatgtagcgcccatatgctcactacatgaaaaagcgata

SEQ ID NO: 15393 - DNA, 40 bp, Clostridium butyricum; identical to SEQ ID NO: 15388
  source 1..40: mol_type = genomic DNA

SEQ ID NO: 15394 - DNA, 50 bp, Clostridium butyricum
  source 1..50: mol_type = genomic DNA
aggcgctctttgatgtagcgcccatctgctcactacatgaaaaagcgata

SEQ ID NO: 15395 - DNA, 40 bp, Clostridium butyricum; identical to SEQ ID NO: 15390
  source 1..40: mol_type = genomic DNA

SEQ ID NO: 15396 - protein, 534 aa, Clostridium butyricum
MKAAIYSRKSKFTGKGESIENQIEMCKKYASDNEYDEIFIYEDEGFSGGNINRPEFKQMMKDAKSHKFDVIICYRLDRISRNVSDFSTLIDKLKLLNIGFISIKEQFDTTSPMGTAMMFISSVFAQLERETIAERIKDNMYELAKTGRWLGGTPPFGFISEQCLYSEANGKQKKMFQLTPVESECELIKYMYEKYLSLGSLGKLQKHLLSKEIKTRNNATWDIKALQLILRNPVYVKSDEVVLSYLESKGAKVFGEVNGNGILSYNKKDSKDKYKDISEWILSVAKHNGLIDSSLWLLVQKKLDKNKSLAPRLVSNDSSGLLSRVLYCKKCGGKMIQKKGHASVKTKEPFRYYVCLNKMNFKSCDSKNIRADILEKHVADKIIDETSDAGSLIKAIDDYKNKLQLDSSKSTNLNSIKKQIALKQTQINNLMENISKNPKLFDLFNSKIEELNSELKSLKFKKFEAESVKENNSNALKEIDASTQMLLNFKKLWIYADFSTKKLLIENIVDSVYYNANDKTADVKLICFKKKGAL

SEQ ID NO: 15397 - DNA, 50 bp, Clostridium butyricum; identical to SEQ ID NO: 15392
  source 1..50: mol_type = genomic DNA

SEQ ID NO: 15398 - DNA, 40 bp, Clostridium butyricum; identical to SEQ ID NO: 15388
  source 1..40: mol_type = genomic DNA

SEQ ID NO: 15399 - DNA, 50 bp, Clostridium butyricum; identical to SEQ ID NO: 15394
  source 1..50: mol_type = genomic DNA

SEQ ID NO: 15400 - DNA, 40 bp, Clostridium butyricum; identical to SEQ ID NO: 15390
  source 1..40: mol_type = genomic DNA

SEQ ID NO: 15401 - protein, 534 aa, Clostridium butyricum
MKAAIYSRKSKFTGKGESIENQIEMCKKYASDNEYDEIFIYEDEGFSGGNINRPEFKQMMKDAKSHKFDVIICYRLDRISRNVSDFSTLIDKLKLLNIGFISIKEQFDTTSPMGTAMMFISSVFAQLERETIAERIKDNMYELAKTGRWLGGTPPFGFISEQNLYSDANGKQKKMFQLAPVESECELIKYMYEQYLALGSLGKLQKHLSIKEIKTRNNATWDIKALQLILRNPVYVKSDEVVLSYLESKGAKVFGEVNGNGILSYNKKDSKDKYKDISEWILSVAKHKGLIDSSLWLLVQKKLDKNKSLAPRLVSNDSSGLLSHVLYCKKCGGKMIQKKGHTSVKTKEPFRYYVCLNKMNFKSCDSKNIRADILEKHVAHKIIDETSDAGSLIKAIDDYKNKLQLDSSKSTNLNSIKKQIALKQTQINNLMENISKNPKLFDLFNSKIEELNSELKSLKFKKFEAESVKENTSNALKEIDASTQMLLNFKKLWIYADFSTKKLLIENIVDSIYYNANDKTADVKLICFKKKGAL

SEQ ID NO: 15402 - DNA, 50 bp, Clostridium butyricum; identical to SEQ ID NO: 15387
  source 1..50: mol_type = genomic DNA

SEQ ID NO: 15403 - DNA, 40 bp, Clostridium butyricum; identical to SEQ ID NO: 15388
  source 1..40: mol_type = genomic DNA

SEQ ID NO: 15404 - DNA, 50 bp, Clostridium butyricum; identical to SEQ ID NO: 15389
  source 1..50: mol_type = genomic DNA

SEQ ID NO: 15405 - DNA, 40 bp, Clostridium butyricum; identical to SEQ ID NO: 15390
  source 1..40: mol_type = genomic DNA

SEQ ID NO: 15406 - protein, 527 aa, Brevibacillus panacihumi
MKVVIYARVSSDNQAEKELSIPAQLKAIHKFCQEKGWLVVGEYLEKGKSAKSDDRPEFQKMIATAKRPNCHFDAIVVHKFDRFSRKREDHIIYKALLQKHGVKVISATEQTDPDTPHGMLLEGMLEVISEFYNVNLAAEVKKGMSQNAKQGYSNGGNAPYGYRTEHIALSANKTKSVWVLGPREEVDTVKWIFNQYAQEGLGYKAIATLLNQKGVPTLKGGKWSASTIRAIIFNESYIGRRVWNKQDYQTKGKKWKDRSEWIITENAHPSIITKELFDRCQEMAKKRHNGGGQVHNPFQIKPHSPFWLRGIMYCDRCGSKMVGNSNSSRQKGGGQRYYTCGGYQRHGKDYCTYVGWRKERVEEIVSAKLRNALLRLSLADNHLEEELRRYHADQNKNVFMQISSLETEISFLQKRIETMEQDIRSGKGKPYYVDMISEMQHELADKQNEYSALSDSLQTFILPEHYIDSVKYDVQTLIALLDSETSNPETIHQLVAKYVSRVFIQRETKLIHIIIQFQAGDAILYEK

SEQ ID NO: 15407 - DNA, 50 bp, Brevibacillus panacihumi
  source 1..50: mol_type = genomic DNA
aggagatgccatcctgtatgaaaagacttgaatacactaaccgactcgat

SEQ ID NO: 15408 - DNA, 40 bp, Brevibacillus panacihumi
  source 1..40: mol_type = genomic DNA
gatgctatatgtatgaaaagaccgtcgtagctgaatacac

SEQ ID NO: 15409 - DNA, 50 bp, Brevibacillus panacihumi
  source 1..50: mol_type = genomic DNA
aggagatgccatcctgtatgaaaaatcttgaatacactaaccgactcgat

SEQ ID NO: 15410 - DNA, 40 bp, Brevibacillus panacihumi
  source 1..40: mol_type = genomic DNA
gattctatatgtatgaaatatccagaataggtaaatccac

SEQ ID NO: 15411 - protein, 615 aa, Klebsiella pneumoniae
MLIQTKNRRLNMKKVFVYHRVSSDQQLDGSGIARQAELLEGYLERTGICADMDDPAPVVLSDQGVSAFKGLNISEGELGAWMEQVRNGMWDSSILVVESIDRFSRQNPFDVMGYINALMAHNVAIHDVMANIVISRSNSKDLPFVMMNAQRAYDESKYKSDRIRKGWAKKREQAFNKGTVVTNKRPQWIEVENDKYVLNHKAAVVKEIFALYQTGMGCPTIAKQLQKKEGEQYKFNRPWTGELVHKILTNRRVTGKIFISEIIRNHDDIDNPVTQKKYDMDVYPVVINEEEFELVQELLKSRRPNAGRITVKKEGQEEVLIKSNLFSGIARCTECGGSMYHNVVRAKRTPKKGEPKIEEYRYIRCLNERDGLCENKAMTYETVERFVVEHLLGMDLNTVIKAQEFNPEIEVIRIQIDQVKDQITNYENGIERRKNAGKAVSFEMREELDDAKLELEQLLARQASLATVQVDVPVLQDVNVTELYNVNNVDIRTRYENELNKIVSNIRLKRNGNFYTIDIIYKQNELKRHVLFIENKKKEQKLISEVIIDDVDGAKFYYTPSFIISVKDGEIRFQQTKEDLSIVDYSLLLNYVDAGDGIDAVGVWMRNNMSFLFTN

SEQ ID NO: 15412 - DNA, 50 bp, Klebsiella pneumoniae; identical to SEQ ID NO: 3102
  source 1..50: mol_type = genomic DNA

SEQ ID NO: 15413 - DNA, 40 bp, Klebsiella pneumoniae
  source 1..40: mol_type = genomic DNA
tttttgcgtgataatcatacaaataggtgccattacaaca

SEQ ID NO: 15414 - DNA, 50 bp, Klebsiella pneumoniae; identical to SEQ ID NO: 3104
  source 1..50: mol_type = genomic DNA

SEQ ID NO: 15415 - DNA, 40 bp, Klebsiella pneumoniae; identical to SEQ ID NO: 3095
  source 1..40: mol_type = genomic DNA

SEQ ID NO: 15416 - protein, 615 aa, Klebsiella pneumoniae
MLIQTKISRSPMKKVFVYHRVSSDQQLDGSGIARQAELLEGYLERTGICTDMDDPAPVVLSDQGVSAFKGLNISEGELGAWMEQVRNGMWDSSILVVESIDRFSRQNPFDVMGYINALMTHNVAIHDVMANIVISRSNSKDLPFVMMNAQRAYDESKYKSDRIRKGWAKKREQAFNKGTIVTNKRPQWIEVEKDKYVLNEKSAVVKEIFALYQTGMGCPTIAKQLQRKEGKQYKFNRPWTGELVHKILTNRRVTGKIFISEIIRNHDDIENPVTQKKYDMDVYPVVINEEEFELVQELLKSRRPNAGRVTVKKDGQEEVLIKSNLFSGIARCTECGGPMYHNVVRAKRTPKKGDPKIEEYRYIRCLNERDGLCENKAMTYETVERFVVEHLLGIDLSTVMKEQEFNPEIEVLRIQIDQVKDQITNYENGIERRKSAGKPITFDMREDLDDAKFELEQLLARQASLATVQVDVPVLQDINVTELYDVNNVDIRTRYENELNKIVSNIRLKRNGTSYTIDISYKQNELKRHVLFVENKKKEQTLISEVIIEDVDGGKFYYTPSFMIRLEDGEISFQQTNKDLSIVDYSLLLNYVDAVDRNDTVGVWMRNQFNFLTSN

SEQ ID NO: 15417 - DNA, 50 bp, Klebsiella pneumoniae
  source 1..50: mol_type = genomic DNA
atgttgtaataagcgacacacactcaagtgtgttatgcttatacaaacaa

SEQ ID NO: 15418 - DNA, 40 bp, Klebsiella pneumoniae; identical to SEQ ID NO: 15413
  source 1..40: mol_type = genomic DNA

SEQ ID NO: 15419 - DNA, 50 bp, Klebsiella pneumoniae
  source 1..50: mol_type = genomic DNA
atgttgtaataagcgacacacacttcagtgtgttatgcttatacaaacaa

SEQ ID NO: 15420 - DNA, 40 bp, Klebsiella pneumoniae; identical to SEQ ID NO: 3095
  source 1..40: mol_type = genomic DNA

SEQ ID NO: 15421 - protein, 615 aa, Klebsiella pneumoniae
MLIQTKIRRFNMKKVFVYHRVSSDQQLDGSGIARQAELLEGYLERTGICAEMDDPAPVVLSDQGVSAFKGLNISEGELGAWMEQVRNGMWDSSILVVESIDRFSRQNPFDVMGYINALMAHNVAIHDVMANIVISRSNSKDLPFVMMNAQRAYDESKYKSDRIRKGWAKKREHAFNKGTIVTNKRPQWIEVENDKYVLNHKAAVVKEIFALYQTGMGCPTIAKQLQTKEGEQYKFNRPWTGELVHKILTNRRVTGKIFISEIIRNHDDIENPVTQKKYDMDVYPVVINEEEFELVQELLKSRRPNAGRVTVKKDGQEEVLIKSNLFSGIARCTECGGPMYHNVVRAKRTPKKGDPKIEEYRYIRCLNERDGLCKNKSMTYETVEHFVVEHLLGMDLSTVIKEHEFNPEIEVLRIQIDQVKDQITNYENGIERRKSAGKPISFDMREELDDAKSALERLLARQASLATVQVDVPVLQDVNVTELYDVNNVDIRTRYENELNKIVSNIRLKRNGTSYTIDINYKQNELKRHVLFVENKKKEQTLISEVIIEDVDGAKFYYTPSFMIMLKDGEIRFQQTNEDLSIIDYSLLLNYIDAVDRSDAVGVWMRNQFNFLTFN

SEQ ID NO: 15422 - DNA, 50 bp, Klebsiella pneumoniae; identical to SEQ ID NO: 2497
  source 1..50: mol_type = genomic DNA

SEQ ID NO: 15423 - DNA, 40 bp, Klebsiella pneumoniae; identical to SEQ ID NO: 15413
  source 1..40: mol_type = genomic DNA

SEQ ID NO: 15424 - DNA, 50 bp, Klebsiella pneumoniae; identical to SEQ ID NO: 3094
  source 1..50: mol_type = genomic DNA

SEQ ID NO: 15425 - DNA, 40 bp, Klebsiella pneumoniae; identical to SEQ ID NO: 3095
  source 1..40: mol_type = genomic DNA

SEQ ID NO: 15426 - protein, 627 aa, Klebsiella pneumoniae
MKKIFLYHRVSTEQQAEDGSGMARQADLLQSYIDRTRIVESMDDPVPVVLEDGGLSAFKGHNFLHGQLGRWMEEVRAGMWDGSILVVENIDRFSRQNPFNVMGYLHDLINHSVAIHDVNMNMVISRENSAMLPMVMMQAQRAYDESKFKSNRIRAGWAKKRDNAFNNGTIVTNKRPKWIDIVDNQYVLNAKARIVTEIFRLYQTGIGCPTIAKTLREMGDDWRFDRIWTGEAVHKVLRNRRVTGVIFISELIRDYNSTDNPIDQKRYEMNVYPPVIGEDEFNLVQQLLSSRRSGKATGGKRITKKRNDDGSVVTDVNGYPTYDFIDGGKITKSNIFNAVCRCAKCGSPMYHNIVVSKRTPAKATSPVVQEYRYIRCLNERDGLCDNKSLRYDVIERFIMEHIKGLDFNTIIQENRINPEVELIRLKLEQEREHIREYEHGIKRLRNSGKKVPFDVLVELEDAQERLKALEDKQATFADVHVDLDILKHVDLDALYDVTNIELRGRVENELSKVLEKVELHRDGKNYVITFKYRRVDVLKHVLMITASKTPVLVSGVCIETVGDTVAYSTPSFDIIVVDGGDLCFQPIDDEPLSIIDYSFLMNYVDGTEGADVVAAWMKHNMNFLFTR

SEQ ID NO: 15427 - DNA, 50 bp, Klebsiella pneumoniae
  source 1..50: mol_type = genomic DNA
tttttgtacaatgttgccactattcaaatgaatagtacatagttcaaagt

SEQ ID NO: 15428 - DNA, 40 bp, Klebsiella pneumoniae; identical to SEQ ID NO: 15413
  source 1..40: mol_type = genomic DNA

SEQ ID NO: 15429 - DNA, 50 bp, Klebsiella pneumoniae
  source 1..50: mol_type = genomic DNA
tttttgtacaatgttgccactatttcaatgaatagtacatagttcaaagt

SEQ ID NO: 15430 - DNA, 40 bp, Klebsiella pneumoniae; identical to SEQ ID NO: 3095
  source 1..40: mol_type = genomic DNA

SEQ ID NO: 15431 - protein, 615 aa, Klebsiella pneumoniae
MLIQTKNRRLHMKKVFVYHRVSSDQQLDGSGIARQAELLEGYLERTGICAEMDDPAPVVLSDQGVSAFKGLNISEGELGAWMEQVRNGMWDSSILVVESIDRFSRQNPFDVMGYINALMAHNVAIHDVMANIVISRSNSKDLPFVMMNAQRAYDESKYKSDRIRKGWAKKREHAFNKGTIVTNKRPQWIEVENDKYVLNHKAAVVKEIFALYQTGMGCPTIAKQLQTKEGEQYKFNRPWTGELVHKILTNRRVTGKIFISEIIRNHDDIENPVTQKKYDMDVYPVVINEEEFELVQELLKSRRPNAGRVTVKKDGQEEVLIKSNLFSGIARCTECGGSMYHNVVRAKRTPKKGDPKIEEYRYIRCLNERDGLCKNKALTYETVERFVVEHLLGMDLNTVIKEQEFNPEIEVIRIQIDQMKDQVTNYENGIERRKSAGKAVSFEMREELDDAKLELEQLLARQASLATVQVDVPVLQDVNVTELYDVNNVDIRTRYENELNKIVSNIRLKRNGKSYTIDINYKQKELKRHVLFVENKKKEQTLISEVIIEVVDGAKFYYTPAFMIMLKDGEISFQQTKEDLSIIDYSLLLNYVDAVDREDAVGVWMRNQFNFLTSN

SEQ ID NO: 15432 - DNA, 50 bp, Klebsiella pneumoniae; identical to SEQ ID NO: 3122
  source 1..50: mol_type = genomic DNA

SEQ ID NO: 15433 - DNA, 40 bp, Klebsiella pneumoniae; identical to SEQ ID NO: 15413
  source 1..40: mol_type = genomic DNA

SEQ ID NO: 15434 - DNA, 50 bp, Klebsiella pneumoniae; identical to SEQ ID NO: 3124
  source 1..50: mol_type = genomic DNA

SEQ ID NO: 15435 - DNA, 40 bp, Klebsiella pneumoniae; identical to SEQ ID NO: 3095
  source 1..40: mol_type = genomic DNA

SEQ ID NO: 15436 - protein, 627 aa, Klebsiella pneumoniae
MKKIFLYHRVSTEQQAEDGSGMARQADLLQSYIDRTRIVESMDDPVPVVLEDGGLSAFKGHNFLHGQLGRWMEEVRAGMWDGSILVVENIDRFSRQNPFNVMGYLHDLINHSVAIHDVNMNMVISRENSAMLPMVMMQAQRAYDESKFKSNRIRAGWAKKRDNAFNNGTIVTNKRPKWIDIVDNQYVLNAKARIVTEIFRLYQTGIGCPTIAKTLREMGDDWRFDRIWTGEAVHKVLRNRRVTGVIFISELIRDYNSTDNPIDQKRYEMNVYPPVIGEDEFNLVQQLLSSRRSGKATGGKRITKKRNDDGSVVTDVNGYPTYDFIDGGKITKSNIFNAVCRCAKCGSPMYHNIVVSKRTPAKATSPVVQEYRYIRCLNERDGLCDNKSLRYDVIERFIMEHIKGLDFNTIIQENRINPEVELIRLKLEQEREHIREYEHGIKRLRNSGKKVPFDVLVELEDAQERLKALEDKQATFADVHVDLDILKHVDLDALYDVTNIELRGRVENELSKVLEKVELHRDGKNYVITFKYRRVDVLKHVLMITASKTPVLVSAVCIETVGDTVAYSTPSFDIIVVDGGDLCFQPIDDEPLSIIDYSFLMNYVDGTEGADVVAAWMKHNMNFLFTR

SEQ ID NO: 15437 - DNA, 50 bp, Klebsiella pneumoniae; identical to SEQ ID NO: 15427
  source 1..50: mol_type = genomic DNA

SEQ ID NO: 15438 - DNA, 40 bp, Klebsiella pneumoniae; identical to SEQ ID NO: 15413
  source 1..40: mol_type = genomic DNA

SEQ ID NO: 15439 - DNA, 50 bp, Klebsiella pneumoniae; identical to SEQ ID NO: 15429
  source 1..50: mol_type = genomic DNA

SEQ ID NO: 15440 - DNA, 40 bp, Klebsiella pneumoniae; identical to SEQ ID NO: 3095
  source 1..40: mol_type = genomic DNA

SEQ ID NO: 15441 - protein, 615 aa, Klebsiella pneumoniae
MLIQTKIRRSPMKKVFVYHRVSSDQQLDGSGIARQAELLEGYLERTGICAEMDDPAPVVLSDQGVSAFKGLNISEGELGAWMEQVRNGMWDSSILVVESIDRFSRQNPFDVMGYINALMAHNVAIHDVMANIVISRSNSKDLPFVMMNAQRAYDESKYKSDRIRKGWAKKREQAFNKGTIVTNKRPQWIEVENDKYVVNEKAAVVKEIFALYQTGMGCPTIAKQLQRKEGEQYKFNRPWTGELVHKILTNRRVTGKIFISEIIRNHDDIENPVTQKKYDMDVYPVVINEEEFELVQELLKSRRPNAGRVTVKKDGQEEVLIKSNLFSGIARCTECGGPMYHNVVRAKRTPKKGDPKIEEYRYIRCLNERDGLCENKAMTYETVERFVVEHLLGMDLSTVMKEQEFNPEIEVLRIQIDQVKDQITNYENGIERRKSAGKPISFDMREELDDAKSELERLLARQASLATVQVDVPVLQEVNVTELYDVNNVDIRTRYESELNKIVSNIRLKRNGTSYTIDINYKQNELKRHVLFVENKKKEQTLISEVIIEDVDGAKFYYTPSFMIMLKDGEIRFQQTNEDLSIIDYSLLLNYIDAVDRNDAVGVWMRNQFNFLTSN

SEQ ID NO: 15442 - DNA, 50 bp, Klebsiella pneumoniae; identical to SEQ ID NO: 2497
  source 1..50: mol_type = genomic DNA

SEQ ID NO: 15443 - DNA, 40 bp, Klebsiella pneumoniae; identical to SEQ ID NO: 15413
  source 1..40: mol_type = genomic DNA

SEQ ID NO: 15444 - DNA, 50 bp, Klebsiella pneumoniae; identical to SEQ ID NO: 3094
  source 1..50: mol_type = genomic DNA

SEQ ID NO: 15445 - DNA, 40 bp, Klebsiella pneumoniae; identical to SEQ ID NO: 3095
  source 1..40: mol_type = genomic DNA

SEQ ID NO: 15446 - protein, 615 aa, Klebsiella pneumoniae
MLIQTKISRSPMKKVFVYHRVSSDQQLDGSGIARQAELLEGYLERTGICTDMDDPAPVVLSDQGVSAFKGLNISEGELGAWMEQVRNGMWDSSILVVESIDRFSRQNPFDVMGYINALMTHNVAIHDVMANIVISRSNSKDLPFVMMNAQRAYDESKYKSDRIRKGWAKKREQAFNKGTIVTNKRPQWIEVEKDKYVLNEKSAVVKEIFALYQTGMGCPTIAKQLQRKEGKQYKFNRPWTGELVHKILTNRRVTGKIFISEIIRNHDDIENPVTQKKYDMDVYPVVINEEEFELVQELLKSRRPNAGRVTVKKDGQEEVLIKSNLFSGIARCTECGGPMYHNVVRAKRTPKKGDPKIEEYRYIRCLNERDGLCENKAMTYETVERFVVEHLLGIDLSTVMKEQEFNPKIEVLRIQIDQVKDQITNYENGIERRKSAGKPITFDMREDLDDAKFELEQLLARQASLATVQVDVPVLQDINVTELYDVNNVDIRTRYENELNKIVSNIRLKRNGTSYTIDISYKQNELKRHVLFVENKKKEQTLISEVIIEDVDGGKFYYTPSFMIRLEDGEISFQQTNKDLSIVDYSLLLNYVDAVDRNDTVGVWMRNQFNFLTSN

SEQ ID NO: 15447 - DNA, 50 bp, Klebsiella pneumoniae; identical to SEQ ID NO: 15417
  source 1..50: mol_type = genomic DNA

SEQ ID NO: 15448 - DNA, 40 bp, Klebsiella pneumoniae; identical to SEQ ID NO: 15413
  source 1..40: mol_type = genomic DNA

SEQ ID NO: 15449 - DNA, 50 bp, Klebsiella pneumoniae; identical to SEQ ID NO: 15419
  source 1..50: mol_type = genomic DNA

SEQ ID NO: 15450 - DNA, 40 bp, Klebsiella pneumoniae; identical to SEQ ID NO: 3095
  source 1..40: mol_type = genomic DNA

SEQ ID NO: 15451 - protein, 530 aa, Mediterraneibacter faecis
MMYQMGVYCRLSKDDGENKVSESIENQMKLIREYVTKSEDLEIADIYIDDGYSGLYFANRPEFQRMMEDIYKGKIQGVITKDISRLGREHIETSNYIERVFPSLGVRYIAILDGVDSVHHSNEELAQFKMLFNDMYSRDISKKIRGALTAQKKRGQFMSGFAPYGYVKDPADKHHFLVDEEAAKVVRRIFYMSLEGYSRDGIAKKLNQEGILTPSEYKRKVQGLKYANALEKAGAKGWAYPTINVILRNRVYTGAMVQHKSEKISYKVEKYQYIPEEQQYIVEGMHEAIISKDTFEQVQKLMKKRTRTPGFNSEVRKVNPYAGIIVCGDCGYNFQRVTCRDGYECGTYHKKGNTVCYSHFIKKEVLDSIVKNEIQRQAELALKESDKDEILKAADRKKEVLRRCAEANQKIERLQKELVAVQKYKKKTYENYVDGVLDKEEYLSYKSEYEKQDKEIRAKIQLAEQEKDSFGEAEESYENWIEKFIKYGTLSEVTREIVTELIEKIVVNGDKSIDIVFKYQSPYSKEKNAV

SEQ ID NO: 15452 - DNA, 50 bp, Mediterraneibacter faecis
  source 1..50: mol_type = genomic DNA
actttcccctagttataatgaacacatgaaccttataattaagggaaaat

SEQ ID NO: 15453 - DNA, 40 bp, Mediterraneibacter faecis
  source 1..40: mol_type = genomic DNA
tgggaatacatatggttcccatgatggaacaagtcttttg

SEQ ID NO: 15454 - DNA, 50 bp, Mediterraneibacter faecis
  source 1..50: mol_type = genomic DNA
actttcccctagttataatgaacacttgaaccttataattaagggaaaat

SEQ ID NO: 15455 - DNA, 40 bp, Mediterraneibacter faecis
  source 1..40: mol_type = genomic DNA
tggtatgacataaggctcccttgaaataacaagacttttg

SEQ ID NO: 15456 - protein, 533 aa, Enterococcus gallinarum
MLKQQANNKEKVALYSRLSRDDGLDKESNSIANQREMLKRYAKENKFYVYDEYIDDGFSGTTFNRPALNRMFEDIEAGKVNVVLVKDMSRLGRNNALFMYYVEEVFPDLDVRFIAINDMVDTAQDDNEIMPFKSVLNEYYARDISKKIRSSIRTTALTGGFTGVFAPYGYLVDPENKKKLIVDPETAPIVKRIFELSQQGTSTHQIARILCKDGILVPRAYRAKKKGILEQSKGFTFPTDWVGKNVKMILENQVYLGHMVSHKSQTKSFKNKKIVPVPKEDWIVVENTHEAIIDKETFEIVQKFISVKKQPNKTGKPNIFVGLVKCPDCGRNLAYSNPNGNEPRFRCRTYARNTELCTTHAISYKALYEIVQNDIKNHVNSMEELGDHFIKEMRELSETSGSQKIHQFNQELVSLEKRIDEIDSIFTKLIEQNALGKITDERFSKMSMNYETEQAEVVQSYRELKSKIKSEEEKVQGTDRFLETISKYKDVTELNRSMLCELIDSIYVYQAEGIGKERTQKVEINYRFLAVSH

SEQ ID NO: 15457 - DNA, 50 bp, Enterococcus gallinarum; identical to SEQ ID NO: 12192
  source 1..50: mol_type = genomic DNA

SEQ ID NO: 15458 - DNA, 40 bp, Enterococcus gallinarum
  source 1..40: mol_type = genomic DNA
ccagttccatacctttgctgatcggaatggacgaagaagg

SEQ ID NO: 15459 - DNA, 50 bp, Enterococcus gallinarum
  source 1..50: mol_type = genomic DNA
cagtgtctcattgatacattctcttctggaaatgtaccatcaagacacct

SEQ ID NO: 15460 - DNA, 40 bp, Enterococcus gallinarum
  source 1..40: mol_type = genomic DNA
ccagcgggatacctttgcttctcagaaatggcgaagaaag

SEQ ID NO: 15461 - protein, 545 aa, Rhodopirellula baltica
MNGIVRVALYARVSSQQQADANTITSQIQAIEQRVAADGLRIDPDCRFCDEGYSGSELLRPALETLRDRVAASLIDRIYVHSPDRLARKYAHQALLLEEFEKHDCKIIFGDHQGIADNPETNLLIQMQGVIAEYEREKILERTRRGRRHAAASGNLSVFGGAPYGYRYIKKTSAGGKADWQVDPVRSKHVAWMFKLVGQQGYSLAGVCRELQKQGIKTAKGNVKWNTTTVHDILTNTAYHGQARYGKQRMVPRKPGKRAKRGDPPIPRQAKVTQNTPLEEQVVISVPPIVSLSLFEQVEKTMQENRRRQRERQSGVKHLLSGLTVCGQCGSAYCGHRQRGKREYFSYRCIGGDRYRRGDQTICDNRATNGDRLEEYIWSEVCKLLHDPGRLRVELNRRQQESSSGEANYQALSRRVDQVRGRLDRLIDAYESGLLEKQEFEDRIVPLRSEHDREVLALSSLRGELNQQDDAATAEVVLSQLSAEVGAGLSTASIELKRDIIKLLIRRVEIHREEIRLVYKVPQNPFDRRPASQGFLQHCLACAEI

SEQ ID NO: 15462 - DNA, 50 bp, Rhodopirellula baltica
  source 1..50: mol_type = genomic DNA
caacattgtctggcgtgtgctgaaatcccggtagggattttggatggtag

SEQ ID NO: 15463 - DNA, 40 bp, Rhodopirellula baltica
  source 1..40: mol_type = genomic DNA
cccgcgtctgcctttcttcatccctaccgggatgaaaact

SEQ ID NO: 15464 - DNA, 50 bp, Rhodopirellula baltica
  source 1..50: mol_type = genomic DNA
caacattgtctggcgtgtgctgaacccccggtagggattttggatggtag

SEQ ID NO: 15465 - DNA, 40 bp, Rhodopirellula baltica
  source 1..40: mol_type = genomic DNA
ccagaatctccctttctctccccatacctggttgaaaact

SEQ ID NO: 15466 - protein, 528 aa, Clostridium paraputrificum
MSNYRSALYARVSTQNEEQDTSYHNQQKIKVEGYDIVKTYADRGSGTQVYNRENFKKLLYDCGIDLEKIRNTKTYNFIASDREPLYEAIVVSHTSRFLRNQVMMKTCINALRKKNVEIYFADLGKSSLDKDIDFVMNILFLLDEQESLNTSQKVRRGLERARREKQYIQVASIFGYNYIKEENRLIINEPEAEVVRKIYSMYLEGNGYRKIYDYLQEYYPQYPKKLSHIAYILRNEKYAGYNAYGKWSVNKIEGYKKRNKEYEIFKSDRIEPIVSYEDWCKVQEIISGKKLHTRGLKANTYPLSRKIVCDVCGSTYYRQLEVKGNYSRVYWICREKKQYGAKNCHSAPISEKKLIELIMSEDYGIKSFIRTIELQVNCVLNNMEEVDTSEIEEKLKQVKVKQERMFDSYIEGVTPKDIYNRKQLQLNSEENILNEQLSSLKDKNRAIEDIKNISETYKEKLDNYYKLMQEGKYDEVYNDINKIVIGVWLKQINDDGEVKVIPMLKELKFKGFESLDKLFEGSILIKNF

SEQ ID NO: 15467 - DNA, 50 bp, Clostridium paraputrificum
  source 1..50: mol_type = genomic DNA
accattcttttgtacaaatattcagttgagatttgatacaaaagaatggt

SEQ ID NO: 15468 - DNA, 40 bp, Clostridium paraputrificum
  source 1..40: mol_type = genomic DNA
atcaaccctcgaagacccagttgaggtaacaatgaagggg

SEQ ID NO: 15469 - DNA, 50 bp, Clostridium paraputrificum
  source 1..50: mol_type = genomic DNA
accattcttttgtacaaatattcacgtgagatttgatacaaaagaatggt

SEQ ID NO: 15470 - DNA, 40 bp, Clostridium paraputrificum
  source 1..40: mol_type = genomic DNA
atccagcctcaaaaacacacgtcaggaaaaaataaagggg

SEQ ID NO: 15471 - protein, 525 aa, Clostridioides difficile
MTDHRKTAVYIRLSAEDDNVDGRAKKESDSVTSQRILLKSFAIDELGVAESDILEYVDDGVSGTHFKRQGFQQLQDDMKSGEIGCVVVKDFSRFGRDYLEVGFYIEYIFPLLQIRFISINDSYDSAASSGMTGGMNVALQNLVYNMYSLDLSKKISSALQTRTRNGTRLPVNARYGYKKGKDGRLEVDPEAAKVVKMIFKMAAEGTSFADITRELNRQAIATCDEQKLSRGDQVQFQRFDTIKKKHWSPTTVAAIVRDEIYIGTRIWGKTRCSMHTGHKAVLNDETEWVRLENHHTAIIDRALFEKANEMHPKKKRSVAESRTNFTLERRKKQPALLLCANCGHSLLKETEHLLKCSDARTNGDPVCRSLVLQRELLEENILGLVHQYAASMLEKEKKISSKRQCEYKEINTAELQKQSRQLTSEKMKLYDDYKDGRIDRDSYKQRAGKISVQLDEIKRKIEDAENSKKLLEQNELSDKIKLKDFLGIQKFDTEKLREIIKVIRVHSQDEIEIEWNFDDIFSEQR

SEQ ID NO: 15472 - DNA, 50 bp, Clostridioides difficile
  source 1..50: mol_type = genomic DNA
ttatgcaaagtatcttccaaaaagaacatgattgattgccatgtatatag

SEQ ID NO: 15473 - DNA, 40 bp, Clostridioides difficile
  source 1..40: mol_type = genomic DNA
ttccataataaagaatagaaaaatgccgatactccttgta

SEQ ID NO: 15474 - DNA, 50 bp, Clostridioides difficile
  source 1..50: mol_type = genomic DNA
ttatgcaaagtatcttccaaaaagtgcatgattgattgccatgtatatag

SEQ ID NO: 15475 - DNA, 40 bp, Clostridioides difficile
  source 1..40: mol_type = genomic DNA
ttgcaagataaataatatatgaatgcagatacatattgta

SEQ ID NO: 15476 - protein, 525 aa, Clostridioides difficile; identical to SEQ ID NO: 206

SEQ ID NO: 15477 - DNA, 50 bp, Clostridioides difficile; identical to SEQ ID NO: 15472
  source 1..50: mol_type = genomic DNA

SEQ ID NO: 15478 - DNA, 40 bp, Clostridioides difficile; identical to SEQ ID NO: 15473
  source 1..40: mol_type = genomic DNA

SEQ ID NO: 15479 - DNA, 50 bp, Clostridioides difficile; identical to SEQ ID NO: 15474
  source 1..50: mol_type = genomic DNA

SEQ ID NO: 15480 - DNA, 40 bp, Clostridioides difficile; identical to SEQ ID NO: 15475
  source 1..40: mol_type = genomic DNA

SEQ ID NO: 15481 - protein, 599 aa, Eubacterium rectale
MNTAVNEYNYRFKLTDYAQFDRNRARNVAIYGRVSTEHEAQLSALENQLQWYDDQVKYHPNWTVCERYIDEGITGTQAKKRPAFLKMIEDAKQGKFDLIVTREVCRFARNVVDTLVVTRELKGIGVEVFFIDDNIWTMDGDGELRLSLMATLAQEESRKTSERVKAGQKISRDNGVLYGNGNILGYDRVGDTYVINEEQAETVRMIYDLYLQGYGSMKIAKILTERKRKTASGLIKWSVSNIMRAIKNATYTGTKCYNKSRSNNFLEQKRINNLDMSTYEYVEGDFPAIISQEIWDKAQAIRESRIKPVCVSAGKNTHSKRDSRDIWVNKLRCSCGSSYRKNKWHTKLDGKTSYGYQCYNQLNNGIKRKRAEIGLDTEGYCDSRMITDWKLDFMAKALLEHLWTERKESVLIALDLIKCYYKEEKSNETQSDTVTIQAKLDKANSRLTNLIAMRADGEISKDEYQAMRSPVDEEIKKLQKALDEIPQEKSNPKGLDIEGIRSTLNSLVDFSGSTISHDVVNQFVYLITPTSDTTFDWYVNLNGTADVKATFTAEGRKKNCIIKLEEIEKISSVHRGENEDNAHFIKNPHIFTYLHRLLL

SEQ ID NO: 15482 - DNA, 50 bp, Eubacterium rectale
  source 1..50: mol_type = genomic DNA
cccccatatttttacctatctgcacaggcagctattgcaaataggtagga

SEQ ID NO: 15483 - DNA, 40 bp, Eubacterium rectale
  source 1..40: mol_type = genomic DNA
cgctcgtcttgctgcagcacaggctgctattgcagagcag

SEQ ID NO: 15484 - DNA, 50 bp, Eubacterium rectale
  source 1..50: mol_type = genomic DNA
cccccatatttttacctatctgcaccggcagctattgcaaataggtagga

SEQ ID NO: 15485 - DNA, 40 bp, Eubacterium rectale
  source 1..40: mol_type = genomic DNA
cactagtcttgctgctgcacctgttgctattgaaaagcca

SEQ ID NO: 15486 - protein, 554 aa, Alteromonas australica
MTQRACIYARYSSDLQSDASIEDQIRLCSDKASAEGWKLGNCYTDAGISGASLMRPGIQSLLSAAMNGEFDILIAEALDRLSRDQEDIAGIFKRMEFAGVKIITLSEGEISTLHIGLKGTMNAMFLKDLADKTRRGLRGRVEKGKSGGGLAYGYQVVKQFDANGEAIKGDREIDEVQADIIRRIFREYGLENKSPKAIAAQLNEEGIPCPSGKSWGQSTINGNRKRGTGILNNELYIGRLIWNRQRFIKDPTTGKRVTRLNEPSEWIIRDVPEQRIVDSELWEAVKARQKSLDRKSSALWQTNRPQYLLSGLTKCGVCGGGYSKINSTQYGCSAAKNKGDSVCNNRRTIKRETLEGYVLDGLQGHLMREELVNVFCKEYTKHLSTLHAQANAQRKSLESQRDSLFKERERLIQAIKDGIPASMVKDDLESVSERIEKAEQALTVQPALKPLIHPTMASRYHQAIKDLKASLNADGARAEASQHLRGLIEKVVLTPEEGEKGLRIDLYGDLAGILNMSLETKDMKILDKLCLNASNDNKAINGAEAHIDRIGSGS

SEQ ID NO: 15487 - DNA, 50 bp, Alteromonas australica
  source 1..50: mol_type = genomic DNA
cacatagatagaattggtagcgggagctggttgccaacgctgtctaagct

SEQ ID NO: 15488 - DNA, 40 bp, Alteromonas australica
  source 1..40: mol_type = genomic DNA
gcttaaatgtggttgcgggagcaggatttgaacctacgac

SEQ ID NO: 15489 - DNA, 50 bp, Alteromonas australica
  source 1..50: mol_type = genomic DNA
cacatagatagaattggtagcggggtctggttgccaacgctgtctaagct

SEQ ID NO: 15490 - DNA, 40 bp, Alteromonas australica
  source 1..40: mol_type = genomic DNA
tctcacaggtagttagggagtcaggatttgaacctaggac

SEQ ID NO: 15491 - protein, 551 aa, Burkholderia pseudomallei
MKTPTCIATNGLSINLDNPSPKAYSYVRFSTKRQAKGDSLMRQLDKSREYAAEYGLDLQEKSFEDLGVSAFDRSNVTKGALAAFIRAVEASAIERGSFLLVENLDRLSRADVLDAMNLLSTLVKLGVRVVTLVDRRILDEESVKEPMNLMYAVLVFVRANEESATKADRVKKAHKRKRDNCSTFAFGQGPGWLQPNADRTGWEVIPERAESVRRVFEYTAKGYGATAIAKIANEERWPVPGRAADWHKTLPNKLIHNRRVLGEFEPQIKEGKQRRPTGELWQTYYPAIVSEELFNAANAAVERRRLLPKRRDNGYHNVFQGMLRCGHCGATLARKSKSGTRNSAGYGLYVCADRDRGLTNCPNWNARELEDALIPPLMTFVAADVLEGTVKQQARAALEIERTELAREGKAIKHLVGTIERIGTSDTISARILALEASIEARRRRVTQLAAQANDPVTSVWSEDVEVAIGEALRAVRDVTLEMAEEREALHQSLLRVVKQISVWPKTHAAVELHQGNGQVFLPLSEQAPIQDALKGLIAAPRLNNDTIATA

SEQ ID NO: 15492 - DNA, 50 bp, Burkholderia pseudomallei
  source 1..50: mol_type = genomic DNA
gtgtccctatagttgacaaccggcttggcggtcggtaacttaagggctac

SEQ ID NO: 15493 - DNA, 40 bp, Burkholderia pseudomallei
  source 1..40: mol_type = genomic DNA
gcagcgcacgccggccggcttgccgttcggcatgccggga

SEQ ID NO: 15494 - DNA, 50 bp, Burkholderia pseudomallei
  source 1..50: mol_type = genomic DNA
gtgtccctatagttgacaaccggccaggcggtcggtaacttaagggctac

SEQ ID NO: 15495 - DNA, 40 bp, Burkholderia pseudomallei
  source 1..40: mol_type = genomic DNA
gcagggccggccagccggccagccgctctgaatgcggggt

SEQ ID NO: 15496 - protein, 551 aa, Burkholderia pseudomallei
MKTPTCIATNGLSINLDNPSPKAYSYVRFSTKRQAKGDSLMRQLDKSREYAAEYGLDLQEKSFEDLGVSAFDRSNVTKGALAAFIRAVEAGAIERGSFLLVENLDRLSRADVLDAMNLLSTLVKLGVRVVTLVDRRILDEESVKEPMNLMYAVLVFVRANEESATKADRVKKAHKRKRDNCSTFAFGQGPGWLQPNADRTGWEVIPERAESVRRVFEYTAKGYGATAIAKIANEERWPVPGRAADWHKTLPNKLIHNRRVLGEFEPQIKEGKQRRPTGELWQTYYPAIVSEELFNAANAAVERRRLLPKRRDNGYHNVFQGMLRCGHCGATLARKSKSGTRNSAGYGLYVCADRDRGLTNCPNWNARELEDALIPPLMTFVAADVLEGTVKQQARAALEIERTELAREGKAIKHLVGTIERIGTSDTISARILALEASIEARRRRVTQLAAQANDPVTSVWSEDVEVAIGEALRAVRDVTLEMAEEREALHQSLLRVVKQISVWPKTHAAVELHQGNGQVFLPLSEQAPIQDALKGLIAAPRLNNDTIATA

SEQ ID NO: 15497 - DNA, 50 bp, Burkholderia pseudomallei; identical to SEQ ID NO: 15492
  source 1..50: mol_type = genomic DNA

SEQ ID NO: 15498 - DNA, 40 bp, Burkholderia pseudomallei; identical to SEQ ID NO: 15493
  source 1..40: mol_type = genomic DNA

SEQ ID NO: 15499 - DNA, 50 bp, Burkholderia pseudomallei; identical to SEQ ID NO: 15494
  source 1..50: mol_type = genomic DNA

SEQ ID NO: 15500 - DNA, 40 bp, Burkholderia pseudomallei; identical to SEQ ID NO: 15495
  source 1..40: mol_type = genomic DNA

SEQ ID NO: 15501 - protein, 549 aa, Burkholderia pseudomallei
MKRGWTLDEKLSCRDLGVSGFNQANMSKGALSVFLDKVRSRDIPAGSYLIVENLDRLTRAELPVAVSLLLSIVGADIICVTLQDGQEWTKTRLANPADFVLSVMLLYRGHDESNTKSLRIRAVHNKARDERDRSVFGRAPGWLRRTSDGKAWEPEPELVGVVKRVFDLVAAGYGGVAIARRANDEQWPVPSLSAKEKGTTWHVTYPAKLVRNRAVLGELEFHVYQGGQTKPTGQVVKDWYPQVIDEELFFRANAAIDSRRGKPSRRDATYRNLFQGLLFCGHCGATMARKAKAGGQKNSPFYAQYVCSDRHRGASNCPTANARELEAGLIPSIFRLFTEQLGDDARLDPMRKELVAVQGELKELQRRRERLADAIEQAETPIAVLVQRLSECELAIPTFEAREAILKAQLQAGTYTPDDDNDADAVLQALYSEDLASERLRAETHLKMILTIETIWVWPQELAVVQWKSANLLAPLPLYKPEKQRKGRGALKPVTIPASFPLSKRYLDAFQGNIHFPAKRQPCVTNDTTIHTTKKRPKSAPAGHSPEIS

SEQ ID NO: 15502 - DNA, 50 bp, Burkholderia pseudomallei
  source 1..50: mol_type = genomic DNA
aggtcgaattatttgacagacggcttcccctccgtaatataatgggatac

SEQ ID NO: 15503 - DNA, 40 bp, Burkholderia pseudomallei; identical to SEQ ID NO: 15493
  source 1..40: mol_type = genomic DNA

SEQ ID NO: 15504 - DNA, 50 bp, Burkholderia pseudomallei
  source 1..50: mol_type = genomic DNA
aggtcgaattatttgacagacggccacccctccgtaatataatgggatac

SEQ ID NO: 15505 - DNA, 40 bp, Burkholderia pseudomallei; identical to SEQ ID NO: 15495
  source 1..40: mol_type = genomic DNA

SEQ ID NO: 15506 - protein, 457 aa, Bacillus mycoides
MRCAIYRRVSTDEQAEKGFSLENQKLRLESFATSQGWEVVEDYVDDGFSGKDTNRPALQRMFSDVDKFDVILVYKLDRFTRSVKDLNEMFETIKENEIAFKSATESVDTTTATGRMILNMMGTTAQWERETISERIKDVFGKLRENGIFSTGHPPYGYRCSGNKSIEIVEEQAEIVRYIYELSKTMGLFKISVELNRKGIKTRRNNKFGQSAIKRILHNPFYCGYMEVNNKWVPIKNEGYIPIISEEEFKTTQKILTKRNKAQTRSRSVSYYPFSGIVLCPECQRAMRGDRAKYGDYYYRYYRCVYGRENINCTNRKRIRAEQVDKAFAEYISGSFENTTIKLDSRDIKSDIEYELKHLDSKIERLSDIYIEGDITKSKYNEKMNSLLNEKEKLKRDLTSCKENVDAEFVRDQINKLESIWHLIDDKTKSESIRSVFDTIKIKQEKNKVTIMDHTLL

SEQ ID NO: 15507 - DNA, 50 bp, Bacillus mycoides
  source 1..50: mol_type = genomic DNA
ttttgggttaatggtccatttcctctagtaaacgtattattaacccaaaa

SEQ ID NO: 15508 - DNA, 40 bp, Bacillus mycoides; identical to SEQ ID NO: 6813
  source 1..40: mol_type = genomic DNA

SEQ ID NO: 15509 - DNA, 50 bp, Bacillus mycoides
  source 1..50: mol_type = genomic DNA
ttttgggttaatggtccatttcctacagtaaacgtattattaacccaaaa

SEQ ID NO: 15510 - DNA, 40 bp, Bacillus mycoides
  source 1..40: mol_type = genomic DNA
tttgtaactttcaaactcaacatgaaactccattttgaaa

SEQ ID NO: 15511 - protein, 450 aa, Enterococcus durans
MKRVALYMRVSTEQQAKHGDSLREQKETLYEYIEQHKDLKVVNEYVDGGISGQKINRDEFQKLLQDVKENKIDIILFTKLDRWFRNLRHYLNTQEILEKHNVSWNAVSQQYYDTTTAYGRTFIAQVMSFAELEAQIDSERIKAVMANKIIQGEVVSGKTPLGYSIENKKLVINDDAPIVIDIFNYFLSSGSLRKTVYYLGSQYGIVRDYQSVKNMLTNKKYIGELRNNKNYCPPIIDKKLFYAVQKALPKNLKTNAKRDYIFKGLLKCSDCQGSVAGQTIKARYKKKDGTESIYERTCYRCVKRRNNKLRCTNKHAFYEKNLERYIFEATKQKFEQIQINYSKKQPKIIKKKNSKKNIENKLDRLKKAYLNEVIELEEYKKDREALMKELNEIEVEPAKIDIKNVEFILSKEFDEIYTESSKEEKNALWRSIIDDIIVFPDGNITANFLI

SEQ ID NO: 15512 - DNA, 50 bp, Enterococcus durans
  source 1..50: mol_type = genomic DNA
atgtgtactaacttatatattccagatggataatataagttagcacatat

SEQ ID NO: 15513 - DNA, 40 bp, Enterococcus durans
  source 1..40: mol_type = genomic DNA
ggatggaataacatttcccgatgggtgattatgcacaaga

SEQ ID NO: 15514 - DNA, 50 bp, Enterococcus durans
  source 1..50: mol_type = genomic DNA
atgtgtactaacttatatattccacctggataatataagttagcacatat

SEQ ID NO: 15515 - DNA, 40 bp, Enterococcus durans
  source 1..40: mol_type = genomic DNA
ggaaggagtaaggtttccccctgggtaattataataaaga

SEQ ID NO: 15516 - protein, 551 aa, Blautia wexlerae
MHIRNILKKGYSLFCYLQLYFRWYNKVVTERLKYNRKVLDMNIAAYCRVSTDKADQLNSLEAQKQFFSEYTQRTGDNLVRLYADEGISGTKIKNRKEFLRMMADAEHGLFDMVVVKDISRFARNTVDLLQNVRKLKALGIETQFLTANMTSMGNSEFVLTIFGALAQEESANTSKRVKFGKKMNAEKGRVPNIVYGYDKTIGDYFNLAINEEEAAVIRQIYKWYIEEGYGAAKIANMLNAKGIRTKRNCQWSQNATCRILTNELYTGKIINGKQEVADFLTGQRTEKDETEWMVTERPELRIIEPEMYEKAQEILECRSKTFKLTKERQSNKYLFSTLIKCKECGWSFRRTVRTYKNTYIRWVCSGHNGRGADSCPNAQTVDEEELIEVLSEYFSELLKAKKNVIRHVTGEFQRVYKAKDENLNYEKELNAQLHKLQKMRQKYMDMYTDDLITREELNEKIGGTKQEIERLENELKMVAYHLTKGEQLETILNRTFKEIEDISDVHQMTNAQLKRIIQKIEVDKDGNVDIYLRIFGDLGLDETVLISDNQT

SEQ ID NO: 15517 - DNA, 50 bp, Blautia wexlerae
  source 1..50: mol_type = genomic DNA
ccgttctaattagtgacaaccaaacatatagaagtaacaaaatagaacgg

SEQ ID NO: 15518 - DNA, 40 bp, Blautia wexlerae
  source 1..40: mol_type = genomic DNA
aatcagtaagagcactgtacataaggactgcactgaccgt

SEQ ID NO: 15519 - DNA, 50 bp, Blautia wexlerae
  source 1..50: mol_type = genomic DNA
ccgttctaattagtgacaaccaaaactatagaagtaacaaaatagaacgg

SEQ ID NO: 15520 - DNA, 40 bp, Blautia wexlerae
  source 1..40: mol_type = genomic DNA
aatcaggcaaagcactggaaccaaggaatacactgaatgt

SEQ ID NO: 15521 - protein, 554 aa, Blautia wexlerae
MESIISIRLKARENVKVISCFFYLFCYNKVVTERLKYNRKALNMNIAAYCRVSTDKADQLNSLEAQKQFFSEYTQRTGDNLVRLYADEGISGTKIKNRKEFLRMMADAEHGLFDMVVVKDISRFARNTVDLLQNVRKLKALGIETQFLTANMTSMGNSEFVLTIFGALAQEESANTSKRVKFGKKMNAEKGRVPNIVYGYDKTIGDYFNLAINEEEAAVIRQIYKWYIEEGYGAAKIANMLNAKGIRTKRNCQWSQNATCRILTNELYTGKIINGKQEVADFLTGQRTEKDETEWMVTERPELRIIEPEMYEKAQEILECRSKTFKLTKERQSNKYLFSTLIKCKECGWSFRRTVRTYKNTYIRWVCSGHNGRGADSCPNAQTVDEEELIEVLSEYFSELLKAKKNVIRHVTGEFQRVYKAKDENLNYEKELNAQLHKLQKMRQKYMDMYTDDLITREELNEKIGGTKQEIERLENELKMVAYHLTKGEQLETILNRTFKEIEDISDVHQMTNAQLKRIIQKIEVDKDGNVDIYLRIFGDLGLDETVLISDNQT

SEQ ID NO: 15522 - DNA, 50 bp, Blautia wexlerae; identical to SEQ ID NO: 15517
  source 1..50: mol_type = genomic DNA

SEQ ID NO: 15523 - DNA, 40 bp, Blautia wexlerae; identical to SEQ ID NO: 15518
  source 1..40: mol_type = genomic DNA

SEQ ID NO: 15524 - DNA, 50 bp, Blautia wexlerae; identical to SEQ ID NO: 15519
  source 1..50: mol_type = genomic DNA

SEQ ID NO: 15525 - DNA, 40 bp, Blautia wexlerae; identical to SEQ ID NO: 15520
  source 1..40: mol_type = genomic DNA

SEQ ID NO: 15526 - protein, 554 aa, Blautia wexlerae
MESIISIRLKARENVKVISCFFYLFCYNKVVTERLKYNRKALNMNIAAYCRVSTDKADQLNSLEAQKQFFSEYTQRTGDNLVRLYADEGISGTKIKNRKEFLRMMADAEHGLFDMVVVKDISRFARNTVDLLQNVRKLKALGIETQFLAANMTSMGNSEFVLTIFGALAQEESANTSKRVKFGKKMNAEKGRVPNIVYGYDKTIGDYFNLAINEEEAAVIRQIYKWYIEEGYGAAKIANMLNAKGIRTKRNCQWSQNATCRILTNELYTGKIINGKQEVADFLTGQRTEKDETEWMVTERPELRIIEPEMYEKAQEILECRSKTFKLTKERQSNKYLFSTLIKCKECGWSFRRTVRTYKNTYIRWVCSGHNGRGADSCPNAQTVDEEELIEVLSEYFSELLKAKKNVIRHVTGEFQRVYKAKDENLNYEKELNAQLHKLKKMRQKYMDMYTDDLITREELNEKIGGTKQEIERLENELKMVAYHLTKGEQLETILNRTFKEIEDISDVHQMTNAQLKRIIQKIEVDKDGNVDIYLRIFGDLGLDETVLISDNQT

SEQ ID NO: 15527 - DNA, 50 bp, Blautia wexlerae; identical to SEQ ID NO: 15517
  source 1..50: mol_type = genomic DNA

SEQ ID NO: 15528 - DNA, 40 bp, Blautia wexlerae; identical to SEQ ID NO: 15518
  source 1..40: mol_type = genomic DNA

SEQ ID NO: 15529 - DNA, 50 bp, Blautia wexlerae; identical to SEQ ID NO: 15519
  source 1..50: mol_type = genomic DNA

SEQ ID NO: 15530 - DNA, 40 bp, Blautia wexlerae; identical to SEQ ID NO: 15520
  source 1..40: mol_type = genomic DNA

SEQ ID NO: 15531 - protein, 499 aa, Mycobacteroides chelonae
MEKERAVLYARISLDRTGEEVGVARQLRDLRELADARGWEVIAEAVDNDISATKEVKRPGYEQVWTLVRSGKVDHVCVWQTSRFMRSRGDRARVISTFGAHNVDIVAVKGPSLDLRSAYGRGMADMMTAFDTMEGEVKSERVSAAIGDLARRGKSWGICPYGWDRVGKGVHAKQIENRHEADVVRELVDRLLAGESLNELHRDMNTRGEPSPGYIQWMKLSAEDRERRERKGRKQPPREWPKATIRALVLRDANIGVRRYRKRDNGGTEMPGEWQPIVDRIKHDRVVALLNAPDRRCHTGPRPGARKHLLTNGVGCCGVCRGPLRVARRRGSLDQTLIYTCEQRGCTGRNQARVDDLVTRVVLGRLAQPDALDWLLGDDEQARKASDRCEELQLRLDEAADSQADGKITIRQLERITARLTPELEAAQQERDAAVRSMDMHTLRDLAGPEAESRWGGMPVSVRRAVLEALGIEVVVLPRTKHGPGFEPESVHIEWKTGS

SEQ ID NO: 15532 - DNA, 50 bp, Mycobacteroides chelonae
  source 1..50: mol_type = genomic DNA
gcttccctctagtgactgaccaggcaactataatatccctaaagggaagt

SEQ ID NO: 15533 - DNA, 40 bp, Mycobacteroides chelonae
  source 1..40: mol_type = genomic DNA
gcggtcggcgcattccaggcaactggtgatgccaggtaaa

SEQ ID NO: 15534 - DNA, 50 bp, Mycobacteroides chelonae
  source 1..50: mol_type = genomic DNA
gcttccctctagtgactgaccaggtcactataatatccctaaagggaagt

SEQ ID NO: 15535 - DNA, 40 bp, Mycobacteroides chelonae
  source 1..40: mol_type = genomic DNA
gagctggggggattccaggtctttggaaatgccaggtaaa

SEQ ID NO: 15536 - protein, 499 aa, Clostridium phoceensis
MNVVIYARYSSHSQTEQSIEGQLHTCYEYAKNNGYLVVGEYIDRAQSGTTDSRGEFQRMIADSDKHTFEGVLVYQLDRFARNRYDSAINKAKLKKNGVRVISARENISDDASGILVEGVLESMAEYYSAELSQKIRRGMEINAQKCLANGSNPGLGYKVDSERRYYVDEEEAKIVREIFERYASGETVADIIRDLNRRKLTTSLGKPFNKNSVHRILNNRRYIGYYLYKGQETPGGMPRIIEDELFERVHYILDRNKKAPARARGREEYLLTTKLFCGYCREMMTGYGGTGKSGKTYHYYACNNFKRRKCKKKVISKERIEDRVVLECRKLLTDSNIERIAASVSEVCESNRDTASIKRIKAAIQEADTAIENLWKALERGQAADMITERIEKRQHEKEELQAQLAVEMAKQVTLTAPQVRAYLYSLRQGDKNDENIKRGIINIFLRAVYLYDDRFTLVLNGSDTPITIDDILLDEIEEGLEGDLTSCEGCSSLVADAP

SEQ ID NO: 15537 - DNA, 50 bp, Clostridium phoceensis
  source 1..50: mol_type = genomic DNA
gttcatcgttggttgcggacgctccaccagatggacattacacgaacacc

SEQ ID NO: 15538 - DNA, 40 bp, Clostridium phoceensis
  source 1..40: mol_type = genomic DNA
gttcgccggccctctgctccagctgctgggcaccgacccg

SEQ ID NO: 15539 - DNA, 50 bp, Clostridium phoceensis; identical to SEQ ID NO: 15537
  source 1..50: mol_type = genomic DNA

SEQ ID NO: 15540 - DNA, 40 bp, Clostridium phoceensis
  source 1..40: mol_type = genomic DNA
gcccaccggcgctctgctccagctgttggggacagactcc

SEQ ID NO: 15541 - protein, 578 aa, Flavonifractor plautii
MSNDASLDINQKSNPVQTVAPLKEDNNMLRATDKITALYCRLSVEDTKEKGGKDDPSNSIQHQQIMLMEYAKSQHFPNPTFFIDDGYSGVDFSNRPGFQKMLAEIEVGHVEAVITKDLSRLGRNSSLTGLYINYTFPQYGVRYIAVNDHFDTIDPNSTDNDIAGIKNWFNEFFAKDTSRKIRAVNKAKGERGERLTTNIPYGYKRDSDDPKKWVIDEEAAQIVKRIFSLCMEGKGPSQIAALLEKEKVLNPTAYKQREGRKTPHQTPENEYRWHESTVAYILEYMEYTGCTVNFKTYTNSIWDKKQRENPMENRKIFYNTHPAIISLEVFDKVQEIRQQRHRRTATGKSNMFSGLVFCNDCKQKLYYSTTSYFEKRQDFFICSTHRVNKDKCSGHYIRAVVLEQIVWKHIQEVVSVVTRYEAYFRSEMEQKLRIQGEESLRLYQKRLVQAEKRIGELDRLFIRIYEDNVAGKLDDERFAMMSKNYTEEQKNLKAEVKNLQQQIHEQEQQAENIEQFVQRVKRNSTLTELTPYALRELVKAVYVDAPDKSSGKRRQKVHIEYDLVGYIPVDELLKAEQA

SEQ ID NO: 15542 - DNA, 50 bp, Flavonifractor plautii
  source 1..50: mol_type = genomic DNA
ttactgtcttaccagcagggggcctttgccgtgtgccgataagacagtaa

SEQ ID NO: 15543 - DNA, 40 bp, Flavonifractor plautii
  source 1..40: mol_type = genomic DNA
aagcaagagagggaggacattccggcatattttttccaga

SEQ ID NO: 15544 - DNA, 50 bp, Flavonifractor plautii
  source 1..50: mol_type = genomic DNA
ttactgtcttaccagcagggggccaatgccgtgtgccgataagacagtaa

SEQ ID NO: 15545 - DNA, 40 bp, Flavonifractor plautii
  source 1..40: mol_type = genomic DNA
aggcaagagagggaggaataacatgcaattgtgttccaga

SEQ ID NO: 15546 - protein, 638 aa, Enterobacter hormaechei
MKPKLYSYVRFSSVKQREGNSLERQQDTALKIATRYNLELDTTAFHDLGMSAFKGKNAHEGKLSEFIKQIGVKVPVGSWLVVENLDRISRDDAWSALDIFKSILSKGIVVVTGMDEKVYKYADVKNNPTDLIISLLMFTRAHDESLTKKNRVEAQARSLIRHNLTREPGTPAKAIESVGQNVWWVDTKSGYVTPHSIYFAAAQKIIELKQNGETLLGIQRYLNEHYTAPKKRVYKDKTGQALTPKTEQWGKHLIRTFLNPTVHGQKIFTLDKRDESGAIIYDSESDEPLKETFIIPDYYPALMSEVDYLTLSKLDRHRAVTRSSSTYPGGNPEPEIPLLSGIGILFCGKCGSFMFKSGSSENKYRYICGSKIVQGKPCGKKGFTSYQLEHTVLQLIADHVWNNHQEDKTAWYESEIEKASEAVKKLLKLATLTDNIEELADQINANRQKKITLEKEFQQYKISRSEIQTTGWDQFRHFDVHDTKNPERKRIRLKVKQAIKRIDCYDIDGRHSHFEMTFADETKQRIVIKFNRNRSPGISYVEAQTVNDHDLLKMQGLVLHSFIDELISPEKFAQHIKDKHEVSILNPTFITELEDGVTRDEDSGMAIRVDGITSKSYATVNGIKYEINSLEDLEKLSQ

SEQ ID NO: 15547 - DNA, 50 bp, Enterobacter hormaechei
  source 1..50: mol_type = genomic DNA
actatgaataattgactgtcaggtttgcctaaaatatgattattcactgt

SEQ ID NO: 15548 - DNA, 40 bp, Enterobacter hormaechei; identical to SEQ ID NO: 4738
  source 1..40: mol_type = genomic DNA

SEQ ID NO: 15549 - DNA, 50 bp, Enterobacter hormaechei
  source 1..50: mol_type = genomic DNA
actatgaataattgactgtcaggtctgcctaaaatatgattattcactgt

SEQ ID NO: 15550 - DNA, 40 bp, Enterobacter hormaechei
  source 1..40: mol_type = genomic DNA
gcagaggctctgggcctgcctgctctcctgcctgcctgga

SEQ ID NO: 15551 - protein, 638 aa, Enterobacter hormaechei
MKPKLYSYVRFSSMKQREGNSLERQQDTALKIAARYNLELDTTAFHDLGMSAFKGKNAHEGKLSEFIKQIGAKVPVGSWLVVENLDRISRDDAWSALDIFKNILSRGIVVVTGMDEKVYKYADVKNNPTDLIISLLMFTRAHDESLTKKNRVEAQARSLIRHNLTRESGTPAKAIESVGQNVWWVDTKSGYVTPHPLYFTAAQKIIELKRNGETLLGIQRYLNEHYPAPKKRVYKDQTGQALTPKTEQWGKHLIRTFLNPTVHGQKTFTLDKRDESGVIIYDSESDEPLKETFIIPDYYPALMSEVDYLTLSKLDRHRAITRNSSKYPAGNPEPEIPLLSGIGILFCGKCGSFMFKSGSSENKYRYICGSKIVQGKPCGKKGFTSYQLEHTVLQLIADHVWNNHQEDKTAWYESEIEKASEAVKKLLKLATLTDDLEELADQINANKQKKITLEREYQQYKISRSEIQTTGWDQFRNFDVHDTKNPDRKRIRLKIKQAIKRIDCYDMDGRYGHFEVTFADETKQRIVIKFNRNRSPGVSYVEAQTVNDHDLLKMQGLVLHSFIDELISPEKFAQHIKDKHEVSILNPTFITKLEDGVNQNEGNGLAIKVASTKSKSYVTVNGIKYEINSLEDLEKLLQ

SEQ ID NO: 15552 - DNA, 50 bp, Enterobacter hormaechei
  source 1..50: mol_type = genomic DNA
aatgcgaataattgactattaggcttgcctaacatataattattcactgt

SEQ ID NO: 15553 - DNA, 40 bp, Enterobacter hormaechei; identical to SEQ ID NO: 4738
  source 1..40: mol_type = genomic DNA

SEQ ID NO: 15554 - DNA, 50 bp, Enterobacter hormaechei
  source 1..50: mol_type = genomic DNA
aatgcgaataattgactattaggcctgcctaacatataattattcactgt

SEQ ID NO: 15555 - DNA, 40 bp, Enterobacter hormaechei; identical to SEQ ID NO: 15550
  source 1..40: mol_type = genomic DNA

SEQ ID NO: 15556 - protein, 638 aa, Enterobacter hormaechei
MKPKLYSYVRFSSVKQREGNSLERQQDTALKIAARYNLELDTTAFHDLGMSAFKGRNAHEGKLSEFIKQIGVKVPIGSWLVVENLDRISRDDAWTALDIFKSILSKGIVVVTGMDEKVYKYADVKNNPTDLIISLLMFTRAHDESLTKKNRVEAQARSLIRHNLTREPGTPAKAIESVGQNVWWVDTKSGYVTPHSFYFAAAQKIIELKQNGETLLGIQRYLNEHYTAPKKRVYKDKTGQALTPKTEQWGKHLIRTFLNPTVHGQKIFTLDKRDESGAIIYDSESDEPLKETFIIPDYYPALMSEVDYLTLSKLDRHRAVTRSSSTYPGGNPEPEIPLLSGIGILFCGKCGSFMFKSGSSENKYRYICGSKIVQGKPCGKKGFTSYQLEHTVLQLIADHVWNNHQEDKTAWYESEIEKASEAVKKLLKLATLTDNIEELADQINANKQKKITLEKEFQQYKISRSEIQTTGWDQFRHFDVHDTKNPERKRIRLKVKQAIKRIDCYDIDGRHSHFEVTFADETKQRIVIKFNRNRSPGISYVEAQTVNDHDLLKMQGLVLHSFIDELISPEKFAQHIKDKHEVSILNPTFITELEDGVTQDEDSGMAIRVDGITSKSYATVNGIKYEINSLEDLEKLPQ

SEQ ID NO: 15557 - DNA, 50 bp, Enterobacter hormaechei
  source 1..50: mol_type = genomic DNA
aatgcgaataattgactattaggcttgcctaacatataattattcaccgt

SEQ ID NO: 15558 - DNA, 40 bp, Enterobacter hormaechei; identical to SEQ ID NO: 4738
  source 1..40: mol_type = genomic DNA

SEQ ID NO: 15559 - DNA, 50 bp, Enterobacter hormaechei
  source 1..50: mol_type = genomic DNA
aatgcgaataattgactattaggcctgcctaacatataattattcaccgt

SEQ ID NO: 15560 - DNA, 40 bp, Enterobacter hormaechei; identical to SEQ ID NO: 15550
  source 1..40: mol_type = genomic DNA

SEQ ID NO: 15561 - protein, 638 aa, Enterobacter hormaechei; identical to SEQ ID NO: 9771

SEQ ID NO: 15562 - DNA, 50 bp, Enterobacter hormaechei; identical to SEQ ID NO: 9772
  source 1..50: mol_type = genomic DNA

SEQ ID NO: 15563 - DNA, 40 bp, Enterobacter hormaechei; identical to SEQ ID NO: 4738
  source 1..40: mol_type = genomic DNA

SEQ ID NO: 15564 - DNA, 50 bp, Enterobacter hormaechei
  source 1..50: mol_type = genomic DNA
actgtgaataattgactattgggcctgcctaacatataattattcactgt

SEQ ID NO: 15565 - DNA, 40 bp, Enterobacter hormaechei; identical to SEQ ID NO: 15550
  source 1..40: mol_type = genomic DNA

SEQ ID NO: 15566 - protein, 638 aa, Enterobacter hormaechei
MKPKLYSYVRFSSVKQREGNSLERQQDTALKIAARYNLELDTTAFHDLGMSAFKGKNAHEGKLSEFIKQIGAKVPVGSWLVVENLDRISRDDAWSALDIFKNILSRGIVVVTGMDEKVYKYADVKNNPTDLIISLLMFTRAHDESLTKKNRVEAQARSLIRHNLTRESGTPAKAIESVGQNVWWVDTKSGYVTPHPLYFTAAQKIIELKQNGETLLGIQRYLNEHYPAPKKRVYKDQTGQALTPKTEQWGKHLIRTFLNPTVHGQKTFTLDKRDESGVIIYDSESDEPLKETFIIPDYYPALMSEVDYLTLSKLDRHRAITRNSSKYPAGNPEPEIPLLSGIGILFCGKCGSFMFKSGSSENKYRYICGSKIVQGKPCGKKGFTSYQLEHTVLQLIADHVWNNHQEDKTAWYESEIEKASEAVKKLLKLATLTDDLEELADQINANKQKKITLEREYQQYKISRSEIQTTGWVQFRNFDVHDTKNPDRKRIRLKIKQAIKRIDCYDIDGRYGHFEVTFADETKQRIVIKFNRNRSPGVSYVEAQTVNDHDLLKMQGLVLHSFIDELISPEKFAQHIKDKHEVSILNPTFITKLEDGVNQNEGNGLAIKVASTTSKSYATVNGIKYEINSLEDLEKLLQ

SEQ ID NO: 15567 - DNA, 50 bp, Enterobacter hormaechei; identical to SEQ ID NO: 9772
  source 1..50: mol_type = genomic DNA

SEQ ID NO: 15568 - DNA, 40 bp, Enterobacter hormaechei; identical to SEQ ID NO: 4738
  source 1..40: mol_type = genomic DNA

SEQ ID NO: 15569 - DNA, 50 bp, Enterobacter hormaechei; identical to SEQ ID NO: 15564
  source 1..50: mol_type = genomic DNA

SEQ ID NO: 15570 - DNA, 40 bp, Enterobacter hormaechei; identical to SEQ ID NO: 15550
  source 1..40: mol_type = genomic DNA

SEQ ID NO: 15571 - protein, 499 aa, Meiothermus ruber
MKLCALYTRVSTEEQVERYSLEAQQEVLTRWAEALGYEVVKTYTDPGYSGAQEDRPALTRLLADAQEKRFMVVLVYRLDRLARKVRLAYDLIERLERCGVGLMSYSEPNINTTTPIGKAVLGIMAVFAEWERDTFAERSRLGMHKAARMGKYLGGIVPYGYTVEDGRLAPLPEEAAVVQQMFAWVAERGWSTERVAQELNRLGIPPKYRRDGRGVRGKRTAGVWRGGGVLRILKNRTYIGEYTYGKRTTKPQPELVKVAVPPIVEPTLFEAVQEQLTRNALFATRNARSVYLLKGLIRCGMCGRAYVGSADYYACVGRTNRQASPIPEMRCTAPHVRRADLEERIWHDIRSFLLNPGEALQAFINEESPESHEVSLLERRLQALFEARARLLDLYLEGGMEKETYYARLEDLDARVREVQASVESARQRSIVERQRKVALHSLESLSAHLHDRLDRLTLEEKQAVARELVERVTVRPGKGEVEVEVHYRFGQIAPHTGR

SEQ ID NO: 15572 - DNA, 50 bp, Meiothermus ruber
  source 1..50: mol_type = genomic DNA
cgggcagattgcacctcacacgggcaggcgtgtgcagggcaatcggggta

SEQ ID NO: 15573 - DNA, 40 bp, Meiothermus ruber
  source 1..40: mol_type = genomic DNA
gccgtggtggccgcaggggcaggggttcatggccgcaatc

SEQ ID NO: 15574 - DNA, 50 bp, Meiothermus ruber
  source 1..50: mol_type = genomic DNA
cgggcagattgcacctcacacgggtgggcgtgtgcagggcaatcggggta

SEQ ID NO: 15575 - DNA, 40 bp, Meiothermus ruber
  source 1..40: mol_type = genomic DNA
gcagtggagggggcaggtgtggtggttcatgcctgtaatc

SEQ ID NO: 15576 - protein, 485 aa, Microbacterium oxydans
MEQRAVVPSAIYARISHDKTGGGLGVDRQEADCRSLAERMGWDVVAVFVDNDISAYSGAPRPQYRALLDAVRRGEVRGIIAWHTDRLHRRASELEEFVNLAEAHHLQIQTVTAGTVDLSTASGRMVARMLGAAAQHEVEHAKERMKRAKDQMAADGKYRGGQRPFGFEKDGMTVRESEAKVIREATKAILAGRTLAGVAREINASGSRTAPGREWTYGRLKEMLVRPRNAGLLAHGLPGRNANKERRGRSYDLEIVGQAAWPAIVPEDEWRALMTMLTDPSRIRQHGNETRWLGSGIYRCGLCGSSMRPAPYGGTNSNKGRTRKFLYRCTGQAHLTISTDPTDAYVRGAVAEMIRDPRVMAAMRPGEDSVIAADREERAKLSRRLDAFERDYAAGDITAKQLRAATERVSAEIEAVDARMAKALRSSASSTILRADDPGQAFMDAPIDVQRSVLATVLGVTIVPAAKKGAPWTEARVRLSAGVAE

SEQ ID NO: 15577 - DNA, 50 bp, Microbacterium oxydans
  source 1..50: mol_type = genomic DNA
atatgtcaaaatcgtggttttgagatctcaaaaccgtaaaatagacatat

SEQ ID NO: 15578 - DNA, 40 bp, Microbacterium oxydans
  source 1..40: mol_type = genomic DNA
gtcgacgaacggctggctgatgtcgacgcgccgccccgtt

SEQ ID NO: 15579 - DNA, 50 bp, Microbacterium oxydans
  source 1..50: mol_type = genomic DNA
atatgtcaaaatcgtggttttgaggcctcaaaaccgtaaaatagacatat

SEQ ID NO: 15580 - DNA, 40 bp, Microbacterium oxydans
  source 1..40: mol_type = genomic DNA
gtcgtccagcagctggctggcgtcgatgttccgccgcgtc

SEQ ID NO: 15581 - protein, 509 aa, Microbacterium azadirachtae
MTTKNPTRPRAAIYCRISDDKDGEARGVARQERDCRALAERLGYDLSEDLVFIENDISASTRSRKPRPLYDQMIEAAKIGEIQAIIAYSTSRITRRVRELLDLIDLVERHGTKIHTLASGDLDLGTSAGRGLAITLSAWDAREAEEIGDRVKRAKAQAVEQGRWRGGPRPYGFEFDGTTIREEEAEIIRWASRQLLEGRSIRALVHELNERGVPSTSGKEWKTNALRGVVLRPRNAGLISTGQRSHGNFKIHEQKAVWDPIVTEEVWRAVEDKLTHPDRATNGGKSSLTWLGSGVYRCGVVDPDTGKACGAPLRVARKGNTPSDPSPSRWFYRCPDQAHLAIAQPQLDAYVLGVVADVIRDPRIIDALTPKGVDLEPDRQAVAVLRQRLRRTDLDYDNDLIDGQRHRVKTAKLNAEIAVIEKRMAHATQRSTSSPILSAADPGAALLAAPVDIQRAVLATVVRVSVSQSRPEARGKRLNDDLLRERVSIEPAEPEGVAARPEVLLSGLS

SEQ ID NO: 15582 - DNA, 50 bp, Microbacterium azadirachtae
  source 1..50: mol_type = genomic DNA
tgaggcataatcgcaggttttgccttgccgaaacctcgcattatgcctcc

SEQ ID NO: 15583 - DNA, 40 bp, Microbacterium azadirachtae
  source 1..40: mol_type = genomic DNA
agccgccaggagcgtcgtcttgccggcgtgcgtggggccc

SEQ ID NO: 15584 - DNA, 50 bp, Microbacterium azadirachtae
  source 1..50: mol_type = genomic DNA
tgaggcataatcgcaggttttgccaggccgaaacctcgcattatgcctcc

SEQ ID NO: 15585 - DNA, 40 bp, Microbacterium azadirachtae
  source 1..40: mol_type = genomic DNA
aggcgccaggagagccggcagcccggcctgggaggggctc

SEQ ID NO: 15586 - protein, 651 aa, Streptomyces coelicolor
MGKALTRAVDTALRTTGTAPLRAVDYLRVSTEEQADGYGIAYTGKKTVRYIQKKGWKHVGTYADEGFSGSLEADDRPDLRRLMKDARKTPRPFDMVVVNEGRGIGRTGRAFWKWVWDLEDLGVYVAVVKKDYDNSTPAGRSQMRKDADYAEEERELIRERTQGGIQEKAEDGLYPGGMVPFGWDVAERGKKGASHYVVHKEEAATLRRAREVFLEKRSWEETALILNSEKRLTRSGNGWTAKNIRCRLLGDAALESRVTWRGHDAQRDQDGNPIYGETVVINLPSIFTDEEVQELKSAMESRRPSTKTRSRIYLLTGLMTSPCGKTYEGHQHRPTEVIYRCKGRHESYAGAGDRCTCPYLEATSIEKQVWKDVMATLGDADRMKAMAQDWLNATSHKRMDYTKRIAELDQRIAETEDLIDITAATAAKRALRRGLSREEAEEAAERAAKPHEDELAGLEKLRREAEAWQREAAETGRWLQNLERLAEVAGRNLQDVEPAEKAELLRMMKTRAEVLRCAPRRKGVACAVREWFVAAGRCVPVLTDDAWERIAPLMGGPRCTIDRRVMVEALLEKATSGARYKELAPKYGVDWKTLQTQANRWLNRGVWAEAMKVLADAECVPVWQPDPVEIKVTFAPLALESRVGVEERDGS

SEQ ID NO: 15587 - DNA, 50 bp, Streptomyces coelicolor
  source 1..50: mol_type = genomic DNA
agtgggagtcgaggaacgggacggttcggacggattccaagagtcccgcc

SEQ ID NO: 15588 - DNA, 40 bp, Streptomyces coelicolor
  source 1..40: mol_type = genomic DNA
gtgggcgaccatgcgccggttcgaaccgggcccgcccaca

SEQ ID NO: 15589 - DNA, 50 bp, Streptomyces coelicolor
  source 1..50: mol_type = genomic DNA
agtgggagtcgaggaacgggacgggccggacggattccaagagtcccgcc

SEQ ID NO: 15590 - DNA, 40 bp, Streptomyces coelicolor
  source 1..40: mol_type = genomic DNA
gtgggcgcggacgcggcgggcagacccggcccggcccaca

SEQ ID NO: 15591 - protein, 580 aa, Enterocloster bolteae
MYNMSPYSLSRSFRDKPCRAVIYGRASTEHEAQVKALQNQMQWYDDVARFHPQWNVINRYIDQGITGTQVYKRDAFMRMMEDAKQQKFDLIVTREVCRFARNTVDALVCVRQLAAIGIEVYFVNDNIWTLDGDGELRLTIMATMAQEESRKISERSLAGQRVSREKGVLYGNGNIFGYTRNKLTKQFEIDPDQAETVKMIFDLYDSGMGETLVAKELTRLGRKNGVGKVKWDAGKVSKIIKRKNYLGYTVYCQSYSNNYLEQKRIKRDESEFVYVKGGFPQIISEEQYERCNAIRRSRTKRLTDEKGRTRSFGIQQAQNVWGRKMRCRCGSPMLRHRWRTNNVGKPIYGYECKRHHDTPRIRLQNEQGNPTPICEIKPVGQSKLELMASKIFERVWGDQREIVLQTCKMLDACYKPDADRRADLMKAKDDSIQLLQQQLDDLVVVRARGEIEQDKFLQRTIEIQQQMEALRQSKAQIASEDYNPGRLDMEAIEAALCEAVEMHDGLVSEDFIDLFVSQVTPLSDSRFAWCLDFSPQPTVAFLNLAGQRKYTTCSMDSKLHFGPFADEEGHTIPFPGSLRR

SEQ ID NO: 15592 - DNA, 50 bp, Enterocloster bolteae
  source 1..50: mol_type = genomic DNA
atatacacaaggtatgtacggcgcaggctgctatcaagaacccccgcaag

SEQ ID NO: 15593 - DNA, 40 bp, Enterocloster bolteae
  source 1..40: mol_type = genomic DNA
gctcgtctggcagcagctcaggcggctctgaacaacaaat

SEQ ID NO: 15594 - DNA, 50 bp, Enterocloster bolteae; identical to SEQ ID NO: 15592
  source 1..50: mol_type = genomic DNA

SEQ ID NO: 15595 - DNA, 40 bp, Enterocloster bolteae
  source 1..40: mol_type = genomic DNA
cctggactggcagcacctcaggcttctggaaacaacaaat

SEQ ID NO: 15596 - protein, 474 aa, Nocardioides sp JS614
MRVIGYARISRAMDDSTSLAKQRQIIERAAESRGWALVGIAEDEDVSATKSRLNRPGLTEARDAIASGKADAVLCWRLDRVARSVVDMGQLLDEGIEIVSATEPLDTTSPMGRAMVQIIQVFAELESSTTGERARATKAYLRSMRRWGGGPRPYGYRPEPSPDGVGKVLRVDEDEAAVIRRIFSDLLEGVPANRLARTLNAEGVPTATGREWKPASVLNIARALHVSGYLTERVAEGSRSRRPVVDESGSPVIAWTPLVDAATADAVRALVTSEALDEARSAATKAGLEGPRSLLYGLAFCPCGEALIRRVRKGTAYYGCRGIGEGSHVLVDAEKVDAEAVTQFLASFSGVEVVERVVEVSVSEALAEIETALAAASAETTSTATADLPTLFERIAALSAEKDRLTASEDRVTTRRTHTAYGEAWEGWTVEERREHMAALGVRVDVLPARRRGAWDPERVRVEADADYLTGQTD

SEQ ID NO: 15597 - DNA, 50 bp, Nocardioides sp JS614
  source 1..50: mol_type = genomic DNA
ctcatgtcacgttgtaaccactcccccgagtggctactctgtgacatgag

SEQ ID NO: 15598 - DNA, 40 bp, Nocardioides sp JS614
  source 1..40: mol_type = genomic DNA
catcacctcgtcccactccccctcgatgttggtgaacatc

SEQ ID NO: 15599 - DNA, 50 bp, Nocardioides sp JS614
  source 1..50: mol_type = genomic DNA
ctcatgtcacgttgtaaccactcctccgagtggctactctgtgacatgag

SEQ ID NO: 15600 - DNA, 40 bp, Nocardioides sp JS614
  source 1..40: mol_type = genomic DNA
catcaccttgtccccctgctcctggaaggtgatgatgatc

SEQ ID NO: 15601 - protein, 555 aa, Streptococcus suis
MNKSTLTIKEIKTQTLEELPDKITVLYCRLSAEDANEGESNSISSQKQILAQVAEREGLVNPYFFVDDGFSGSNAQRPDFQKALNLVEAGRVANFVVKDLSRLSRDYLLSGQLTEITFPSKNIRFISLNENLDSFKRNSQDAYLTPLVSLFNNWYSLQCSEKIKLSKHTKAKTGEKIGWFAPYGYLKNPENPKEWLVDEYASQIVRRVFKEYLSGKPIASIANGLREDRILTPANYKKKLGVSNYRVLESDPYHWKSQMICQMLEKEEYTGATINLKTAKISYKQRNCRLRPREDWLIFPDTHEAIISKEDFALARKMLGHKRVVQRNTWKDKPGHENIFAGLVFCENGHKLSFCPQQKDHINLDHYKCYHHRRAGDSCSGLHYLRKNVLEELVLTELQQLISSTHLDEEKLLEELKSRFDIREDKRQDSLRKQLNRSKKRSKELDTIIQKLYEKQLLDEISEDRFRKLADGYESEQAELDQQIRELQEVLVGQTESAENIDKFMRTIRQYTNIETLSTQLVNELIDKIVVHQPTGRGKSRQVPIELHYRFIGEI

SEQ ID NO: 15602 - DNA, 50 bp, Streptococcus suis; identical to SEQ ID NO: 9307
  source 1..50: mol_type = genomic DNA

SEQ ID NO: 15603 - DNA, 40 bp, Streptococcus suis
  source 1..40: mol_type = genomic DNA
attttttttcatgtctctattatagcatggatgggggagt

SEQ ID NO: 15604 - DNA, 50 bp, Streptococcus suis
  source 1..50: mol_type = genomic DNA
ggactgctgagggaggtgtggataccataccacaccccacccagcagtcc

SEQ ID NO: 15605 - DNA, 40 bp, Streptococcus suis
  source 1..40: mol_type = genomic DNA
gtttgttttcatctctctaccatggcaatgagggtggtgt

SEQ ID NO: 15606 - protein, 451 aa, Rathayibacter tritici
MIASTVKAAVYLRISQDANADGLAVDRQRGECLALAEARGWTVTEEFSDTVSASKRAVARPAYDSMFAAFEAGRFDALVVWDLDRLTRQPRQLEDWIELAETRSVLIVTASGEADLTTDNGRMFARIKATVARAEIERKGARQRAKNVQNIAQGRPVPGRRRYGYESGNLTPREPEAQDVRDLFTSALAGASLRSLSVARGRRTRWVREVLSNKAYAGWVQHQGVYSPGVVTPLVSLEEWERVQLLLTDPTRKTTPGPTPRHLMSGLASCGVCGAHLFYMRGYLCSAAADHVHITKALLDTAVSDEVFMWAVSTDSTQTDSAALTDLLREHADVERRREAAQDLFLLPGANRASVARTLASLGKESERITRLIDQERARESVSDILGAVRGAWWDRRFEREYTEQEEAAVSAWPEFWASLGLDRQREVVRSLFSVRVDKGRGPERVSIEHV

SEQ ID NO: 15607 - DNA, 50 bp, Rathayibacter tritici
  source 1..50: mol_type = genomic DNA
cgacgcatacattgaccgtacctgtgccaaaccgtaagatgtatgcgtga

SEQ ID NO: 15608 - DNA, 40 bp, Rathayibacter tritici
  source 1..40: mol_type = genomic DNA
ggcgatgaggcggttgcgctgcaggaatcgccagcgagtg

SEQ ID NO: 15609 - DNA, 50 bp, Rathayibacter tritici
  source 1..50: mol_type = genomic DNA
cgacgcatacattgaccgtacctgctccaaaccgtaagatgtatgcgtga

SEQ ID NO: 15610 - DNA, 40 bp, Rathayibacter tritici
  source 1..40: mol_type = genomic DNA
ggggatgggggggttccgcctctgaaaacggcagggagtg

SEQ ID NO: 15611 - protein, 504 aa, Pedobacter suwonensis
MNALGYMRLSSKDQSKSLEYQESTIRDYCRKNSLSLIDLFKDNGESSYTFDRPDYKALENHLKKYRGECQFLIVLDHDRFSRNLPEALLKIAELERKYGVKVLSTSERIDLDTSDPDVFMKRAFDYMMANKELFNIRKRTKQGIRNAKENGRYLGRAPYGYSNILDGTKRNLIEINKAQAIIVERIFQEYLAGIPPYLIYKNVKAIGFKQTGHNAIFNILKNSIYAGLIKVPAYRELPEKYVKGIHEPIITETEYWLVQRMMIESRRRTRLQPEEDFPLRGVLKCSCGKSMTAGWSKGCKNYYLYYRCLEHTNINIPGKLLHESFEKVLKGLSFEKHHINYLLEIYNTLLTEPLKMKQEKGKEKINELREINRKIFKLEERFMNDEIESSTYQTWFKKLKEDKAILEYSISSSSMPKIKKNIDIIQRLLPRLSNLYEIYEKGNITQKHTLIKGVFKHNLHWADGAFRTKYIDPTFYDNLLKIKEKGLLFNEQPFQKSDINPIST

SEQ ID NO: 15612 - DNA, 50 bp, Pedobacter suwonensis
  source 1..50: mol_type = genomic DNA
tcaaaaatcagacataaatccgattagtacccctaatgagaaatactttg

SEQ ID NO: 15613 - DNA, 40 bp, Pedobacter suwonensis
  source 1..40: mol_type = genomic DNA
ttgatctgaaagccatcttaagtaccccggaagggattcg

SEQ ID NO: 15614 - DNA, 50 bp, Pedobacter suwonensis
  source 1..50: mol_type = genomic DNA
tcaaaaatcagacataaatccgatctgtacccctaatgagaaatactttg

SEQ ID NO: 15615 - DNA, 40 bp, Pedobacter suwonensis
  source 1..40: mol_type = genomic DNA
ttcctctgatagccatcttctgttcaccaggagggtttca

SEQ ID NO: 15616 - protein, 564 aa, Streptococcus suis
MNRTLTISDYRQVDTSRLSDITVVYCRLSQDDGLDGDSNSIINQKNILFEVVTREKLPNPVLFVDDGFSGTNFDRPAISEALRLVENGQVSNFIVKDLSRLGRSYIKVGQLTEITFPSFDVRFIALNDGIDSNKPNETNSIFLPIKSLIDEMYAADTSKKIRAVFQAKAKSGVPVTTNPPYGYLKDPDNPKNWIIDPVASEVVKRIFQEAKSGKSLSEIAKDLESDKVFKPDRHRIEIGLKSISASPNVEALPYFWTRETLSAILRREEYLGHTVNLRTRTKSYKDKRSIDLPREDLLIFKNTHEAIIDQETFDIVQKMRSHKRSNQRYKNRVGHENLFAGLVFCGTCGRKHYFCPQEKNGLNHDHYKCSGYRKPIDGCENPHYIQKSALIAIVSDKLRQTIFEAQLDRENFLKKLEQQSQAQFSKDNKRQRQQLQKDEHRFKEIDRIIQQLYEDNLLGKISDERFVKLSQTYEEEQKQLQTSISDLTEKLARQQEDSLNISKFMTRISKYTQVSELTVEMVNELIDKIVIHKPTGTKRNRIIQIDIYYNFIGKLNNEKASQAD

SEQ ID NO: 15617 - DNA, 50 bp, Streptococcus suis
  source 1..50: mol_type = genomic DNA
aaactgctaggtgtcagctcggctaataagggcatgacactcagcagtct

SEQ ID NO: 15618 - DNA, 40 bp, Streptococcus suis
  source 1..40: mol_type = genomic DNA
gaaaaagaaaaacccgacgaaacgggttctctatattata

SEQ ID NO: 15619 - DNA, 50 bp, Streptococcus suis; identical to SEQ ID NO: 15617
  source 1..50: mol_type = genomic DNA

SEQ ID NO: 15620 - DNA, 40 bp, Streptococcus suis
  source 1..40: mol_type = genomic DNA
caagaaaaaaaaccccacgaaactgaatctctaccttata

SEQ ID NO: 15621 - protein, 564 aa, Streptococcus suis
MNRTLTISDYRQVDTSRLSDITVVYCRLSQDDGLDGDSNSIINQKNILFEVVTREKLPNPVLFVDDGFSGTNFDRPAISEALRLVENGQVSNFIVKDLSRLGRSYIKVGQLTEITFPSFDVRFIALNDGIDSNKPNETNSIFLPIKSLMDEMYAADTSKKIRAVFQAKAKSGVPVTTNPPYGYLKDPDNPKNWIIDPVASEVVKRIFQEAKSGKSLSEIAKDLESDKVFKPDRHRIEIGLKSISASPNVEALPYFWTRETLSAILRREEYLGHTVNLRTRTKSYKDKRSIDLPREDWLIFKNTHEAIIDQETFDIVQKMRSHKRSNQRYKNRVGHENLFAGLVFCGTCGRKHYFCPQEKNGLNHDHYKCSGYRKPIDGCENPHYIQKSALIAIVSDKLRQTIFEAQLDRENFLKKLEQQSQAQFSKDNKRQRQQLQKDEHRFKEIDRIIQQLYEDNLLGKISDERFVKLSQTYEEEQKQLQTSISDLTEKLARQQEDSLNISKFMTRISKYTQVSELTVEMVNELIDKIVIHKPTGTKRNRIIQIDIYYNFIGKLNNEKASQAD

SEQ ID NO: 15622 - DNA, 50 bp, Streptococcus suis; identical to SEQ ID NO: 15617
  source 1..50: mol_type = genomic DNA

SEQ ID NO: 15623 - DNA, 40 bp, Streptococcus suis; identical to SEQ ID NO: 15618
  source 1..40: mol_type = genomic DNA

SEQ ID NO: 15624 - DNA, 50 bp, Streptococcus suis; identical to SEQ ID NO: 15617
  source 1..50: mol_type = genomic DNA

SEQ ID NO: 15625 - DNA, 40 bp, Streptococcus suis; identical to SEQ ID NO: 15620
  source 1..40: mol_type = genomic DNA

SEQ ID NO: 15626 - protein, 466 aa, Mycobacterium marseillense
MRAALYLRQSLDRSGDGLGIDRQREDVQRLIKARGWILAAEFVDNDVSALSRKPRPQFTAMMARVDAGEFDVIVARHMDRLLRRLSELESTLERCQRAGVAIVTASDGVDTSTDGGRLVARILSSVAQGEVERKGSRQRSAAIQAARQGRWVGGRRPFGYEKDGVTVCEPEAAMIKQAYVDVLAGESLSEVARRWNASGISPAQSDKRWYRGTVKDVLTNPRHAGLRRYRTPEERAKIRQNPELGIVGKAQWPAIVDETTWRAAVRILTDPSRHTGRTGSKGLLTGVALCGVCEETVHRGGAVGRYPMYRCTTGRHVSRQAGPVDEYVSAVAIDRLQQPDAASLWAAELPDADALMAEADKLRRERDGIDQDRAEGLLDRVRWRTMNERITSRLSQIEAKLAAAGSSSPLSIVASGHVEETWAGLTIAQQRNIIAALMIPVLHLPGRGTRTFRPETVEIRWRQRDG

SEQ ID NO: 15627 - DNA, 50 bp, Mycobacterium marseillense
  source 1..50: mol_type = genomic DNA
gcgacattgttggttttgtagtcgcgtggcatcaaaaatagcagaactgc

SEQ ID NO: 15628 - DNA, 40 bp, Mycobacterium marseillense
  source 1..40: mol_type = genomic DNA
gaccgcacactgcgggtcgcgtggagcctggctgacctgt

SEQ ID NO: 15629 - DNA, 50 bp, Mycobacterium marseillense
  source 1..50: mol_type = genomic DNA
gcgacattgttggttttgtagtcgaatggcatcaaaaatagcagaactgc

SEQ ID NO: 15630 - DNA, 40 bp, Mycobacterium marseillense
  source 1..40: mol_type = genomic DNA
cacctgacactgggggtggaatgcagccaggctcacttgt

SEQ ID NO: 15631 - protein, 545 aa, Flavonifractor plautii
MSQSNQGKITALYCRLSQDDGLDGESNSIQNQKRILEQYAIDHRFPNIQFYVDDGYSGASFNRPDFQRMMSDMEDGKIGIIITKDLSRLGRNQLHTGLYIEERFPQFGVRYIAINDNVDTENAESNDLMPFKNLFNEWFVRDTSRKIRAVQRAKAQRGERLGTRAPYGYKKDENAKGKLVVDEEAAAVVRRIFALCAAGRGPSQIAKQLRAENVLCPAVYTYRKLGSGHTCLDLSQPYNWSDSTIANILENETYLGNTVNMKFTTKSYKDKRYVQHPREECLVFEGTHPALITREVWDIVQRVRQNRKRPTKMEELNKYSGLVICADCGSTMVLHRARTMKPTQNNFTCRTYKKAGSEVCTAHYIRECVLDEIVLEDIRRVTAMAREHTQEFAAYICDRQSAELRREIRRQELELSGMKKREAELEAIFKRLYEDSVLGRITTEQFQTLSASYVAEQEQLKTAIPQKEREVAKLKATVSGADNFIARAKRYTDIQKLTPELLRLFIEKIVVHEKDVKWSKHASQTVEIHYTDIGVIGNMNITKSA

SEQ ID NO: 15632 - DNA, 50 bp, Flavonifractor plautii
  source 1..50: mol_type = genomic DNA
agttgtccctgtcaggccggacctaagggcccggccgcataagggtatca

SEQ ID NO: 15633 - DNA, 40 bp, Flavonifractor plautii
  source 1..40: mol_type = genomic DNA
acagcagcccccggaaccaaaaggttccgggggctgtttt

SEQ ID NO: 15634 - DNA, 50 bp, Flavonifractor plautii
  source 1..50: mol_type = genomic DNA
agttgtccctgtcaggccggacctacgggcccggccgcataagggtatca

SEQ ID NO: 15635 - DNA, 40 bp, Flavonifractor plautii
  source 1..40: mol_type = genomic DNA
gcagcagccacctgaaccaacagcttccaggtgctggtgc

SEQ ID NO: 15636 - protein, 568 aa, Clostridium beijerinckii
MKKVVAIYSRKSKFTGKGDSIENQVEMCKEYIHKNFGTDIEFKIYEDEGFSGGTLDRPRFKKLMNDVQNKKIDILVCYRLDRISRNVADFSSTLELLQSNNCDFISIREQFDTSSPMGRAMIYIASVFAQLERETIAERVKDNMLEMAKNGRWTGGKIPLGFTSKKIVTTDESGLTREMPQLIIDENEMNIVKLLYEKYVELGSLHKLECYATENQIKSRTGIMFEKSTLKIILQNPIYVKANYEVIEYLSNNSWTVYGEPDNVHSLLTYNKTEQSKKNGKITKVNKPVDERIAALSSIKGFIEPELWLSVQKQFEENKDKFPRLGKTNNALLVGKLKCGKCGEYMLVQHGRVSKNGEKLFYYNCSLKRKSHKTLCDNGNAKASHVENLVLLTLKQIGLKKDEFLREFEKQHNASPKNKDIKLEKLSLEKALQTKKGQIDNLVTTLSLAEDISSILIEKIQKLKLECVEIQNKIDNIELTVATSKVEMFNYQIIEQLLDQCANIENLSRDEQKIIIDGLIDEIYWFGNGRGDGDIKIKIVGSNDDGNIIEFNDDELGHAMLQNSSHSM

SEQ ID NO: 15637 - DNA, 50 bp, Clostridium beijerinckii
  source 1..50: mol_type = genomic DNA
tgttgcagaatagttcacatagcatgacctatataaacaaaactgcaaca

SEQ ID NO: 15638 - DNA, 40 bp, Clostridium beijerinckii
  source 1..40: mol_type = genomic DNA
agttgtcattagctttgcatgtccagtatctaaaagtata

SEQ ID NO: 15639 - DNA, 50 bp, Clostridium beijerinckii
  source 1..50: mol_type = genomic DNA
tgttgcagaatagttcacatagcaatacctatataaacaaaactgcaaca

SEQ ID NO: 15640 - DNA, 40 bp, Clostridium beijerinckii
  source 1..40: mol_type = genomic DNA
acttttcttttgacttggaattcaagtatttaaaagtata

SEQ ID NO: 15641 - protein, 514 aa, Dehalococcoides mccartyi
MTRIAIYARVSTEGQAEEEVPINGQIDECRKFAADKGWEVAEVFTDAGFSGRTDDRPSFRHMIEIIKSSTNPKPFDIILCWRSNRLFRSVEHRLAYSRIFRRHSIRFVAMHEPEFEGASAMFMETVLAAADELYVSQVSEDTLRGLKQIAMAGYSTGGKAATGYRNVRKVAGLKPNGEPIMRTGWEIDPDYAPRVKKAFEMCANGSSGPEIIKATGVVTSPSSLVSLLRNRAYLGERIYNVMKQVDGKTRRRANTKPEDIIRKENAHEAIISPELFDNVQAVLERKRPHIQGRAQNSKRTYLLTGLLWCKAHQALYTGNTNASLNYYVCSAKRKLGAKISPCRNVKKETVEKFILDNLKTHAFTSKRIRAGLEYFARENQKNKQEDDRERKDLLIKINKVELELKRFFEAIASGVNPENLTQPIEERSDLKNKLYLQLAEIDRQREIDLLLPDITDSMIEGIRAKYIDMFAASPEKLKAILPEFIDRIELDETTARIKYFAVEEQKVGCNWRPQ

SEQ ID NO: 15642 - DNA, 50 bp, Dehalococcoides mccartyi
  source 1..50: mol_type = genomic DNA
aagtaggctgtaattggcgaccccagggcgtagtagccaacagactatca

SEQ ID NO: 15643 - DNA, 40 bp, Dehalococcoides mccartyi
  source 1..40: mol_type = genomic DNA
gaagctcaatggcgaccccagggggattcgaacccccgat

SEQ ID NO: 15644 - DNA, 50 bp, Dehalococcoides mccartyi
  source 1..50: mol_type = genomic DNA
aagtaggctgtaattggcgaccccacggcgtagtagccaacagactatca

SEQ ID NO: 15645 - DNA, 40 bp, Dehalococcoides mccartyi
  source 1..40: mol_type = genomic DNA
gaagctcggttgaggcaccactgggattcgaacccaggat

SEQ ID NO: 15646 - protein, 502 aa, Salmonella enterica
MTLAFSYARFSTKSQAIGTSLERQLNASRLFCSERGLTLSPKGYHDLGVSGFKQVKRPELEQMLHAIQSGDIPSGSYILIEAIDRLSRKGISHTQDVLKQILQYKVKVAFVGEDAKTLNGQVLDEHSLNDLSSVILVALAADLAHKESVRKSKLVKAAKLIIRKKATEGHKVRGHTMFWIDWSDKKQDFVLNDRVKDVQTIIQLRREGQGPRKIAKTMNELGIKGPRGNLWNHMSVTIVLKSPVLYGAYQTHQIIEGQKVPDVLLENHYPALLTKEEYIKIQADSSKANKGRPSKANPFSGVLRCECGQAMLFSKRTNLDKNGDPLEYEYHFCIGSTEGRCKNKKRIRDLVPLLASIMDKLVINQTPKKNLNTELIKATEQKIEKLNNMLLELDNPPMSVLKTIQKLEQELDILLNTHVEEPVQADVKTLSSISDAQEYNQHLKRLVKQIVVYQINGPKNLRIKVHKTDGHYQNFLVKDNKILFKSDTKALKELIDEFNKAR

SEQ ID NO: 15647 - DNA, 50 bp, Salmonella enterica
  source 1..50: mol_type = genomic DNA
tatgtcaataatgtaaaaaattcccgggatatgtttccattattgacatg

SEQ ID NO: 15648 - DNA, 40 bp, Salmonella enterica
  source 1..40: mol_type = genomic DNA
aatgccggcgaaaaaatcgcggaaaatattggcacctaaa

SEQ ID NO: 15649 - DNA, 50 bp, Salmonella enterica
  source 1..50: mol_type = genomic DNA
tatgtcaataatgtaaaaaattccgtggatatgtttccattattgacatg

SEQ ID NO: 15650 - DNA, 40 bp, Salmonella enterica
  source 1..40: mol_type = genomic DNA
aatgccaccgaagaaatgggtgaaaatattcgcaaattac

SEQ ID NO: 15651 - protein, 538 aa, Nocardia cyriacigeorgica
MAKPQFTAGNGLMLDIYARVSRVGDERQRSTGGQVDDCTVRVHDLGATVGQVHVDDGRSAWNPSVKRPKWDALMARLESGETGGVVVFDMARFSRRPIEGERLILAAERGLVVLDSEGEYDLETANGRKTFRDQLNAAAYESDRLSSRVKRGKRVKVARGESNHAHRPYGYEKDGITVRESEAAIVREIVARVLDKHAAIQAKTEAAGEDTAAEVKEDAVGYKTIAVDLNRRGITTRTGSAWSGEKVKRLVLNPRYAGFVTHHGQIVAAMTGANPLITPEQWERLCLLRDTTRVGRPATADYLCSGLVHCGLCGRGLTGRPQHGRTYPDGQVRRRYLCQKRQTGGGCNRISVDARTLDREVGALVVATLSDPRHADALIAAANDLAKHRRPIADALAEARETATVMSARLGNGEIILDRYDTVMAGVDARIVKLEAELAALDTEYDVDDSPAVRAESAQAWEAQWADAGTADKRAMIKRALRGSRLVVGPATHAGPKFDPSRIRLVDKNTPHPGAQDSPGARVTGDAGTGGRGRGFVA

SEQ ID NO: 15652 - DNA, 50 bp, Nocardia cyriacigeorgica
  source 1..50: mol_type = genomic DNA
gtatgaactaatacaatactgatcggggctagcatgtgattagtagcccc

SEQ ID NO: 15653 - DNA, 40 bp, Nocardia cyriacigeorgica
  source 1..40: mol_type = genomic DNA
ggaactggcagcgttggccggggtgagcatggattactac

SEQ ID NO: 15654 - DNA, 50 bp, Nocardia cyriacigeorgica
  source 1..50: mol_type = genomic DNA
gtatgaactaatacaatactgatcttggctagcatgtgattagtagcccc

SEQ ID NO: 15655 - DNA, 40 bp, Nocardia cyriacigeorgica
  source 1..40: mol_type = genomic DNA
ggaacatgcagcgttggtcttgctgtgcctggcttgctcc

SEQ ID NO: 15656 - protein, 547 aa, Escherichia albertii
MKLLVTYIRWSTKEQDSGDSLRRQTNLIDAFYSKHKNDYYLLPAHRYVDKGKSGFHQQHKNQGSDFRRMFENVMSGAIPEGSLIVVENFDRFSRADIDTAIDDVRQILRKGVSILTLGDGELYDKSALTDPVKLIKHIIIAERAHQESLVKQKRIAQVWNHKTQLARELKKPMGKQAPGWLELSEDGSHYIVDEDKASLVNIIYDKRLSGMSMFAICKWLNEQGYPTINQRKVRISKTKKPDGNWSALSVKHILTSRSVLGYLPAKISTEDRKTVLREEIEGFYPQIVTDSKFYAVQQLLEETGKGKTSSGEHWLYVNILKGLIRCKCGLVMTPTGIRKPVYQGTYRCNGNKESRCSYGTVSRKLLDTQLCSRLFSKLSQLHDEATDTAKLDELQRRLNTVDSELEKLTETLIQLPNITQIQEALRVKQEEKDELIVQLSREKARVKSVSSLDLSGLDMESVEGRTEAQIIIKRLVKEIVVSGNEKLVDIYLHNGNMIRGFPLDGKDDHTLTLEEATDEMQSLDDMLIFGEPVTRIYPAGDMEEVDA

SEQ ID NO: 15657 - DNA, 50 bp, Escherichia albertii; identical to SEQ ID NO: 3502
  source 1..50: mol_type = genomic DNA

SEQ ID NO: 15658 - DNA, 40 bp, Escherichia albertii
  source 1..40: mol_type = genomic DNA
gtacatagaataataaagcaccagaactttagccatttct

SEQ ID NO: 15659 - DNA, 50 bp, Escherichia albertii
  source 1..50: mol_type = genomic DNA
atacgtgtttagctatgtaaaagcaatagtattcttgccttaacactcat

SEQ ID NO: 15660 - DNA, 40 bp, Escherichia albertii; identical to SEQ ID NO: 3245
  source 1..40: mol_type = genomic DNA

SEQ ID NO: 15661 - protein, 547 aa, Escherichia marmotae
MKLLATYIRWSTKEQDSGDSLRRQTNLIDAFYAKHKNDYYLLPAHRYVDKGKSGFHQQHKAQGSDFRRMFENVMSGVIPEGSLIVVENFDRFSRADIDTAIDDVRQILRKGVSILTLGDGELYDKSALTDPVKLIKHIIIAERAHQESLVKQKRIAQVWNHKTQLARELKKPMGKQAPGWLELSEDGSHYIVDEDKASLVNIIYDKRLSGMSMFAICKWLNEQGYPTINQRKVRISKTKKPDGNWSALSVKHILTSRSVLGYLPAKISTEDRKTVLREEIEGFYPQIVTDSKFYAVQQLLEETGKGKTSSGDHWLYVNILKGLIRCKCGLVMTPTGIRKPVYQGTYRCNGNKESRCSYGTVSRKLLDTQLCSRLFSKLSQLHDEATDTAKLDELQRRLNTVDSELEKLTETLIQLPNITQIQEALRVKQEEKDELIVQLSREKARVKSVSSLDLSGLDMESVEGRTEAQIIIKRLVKEIVVSGNEKLVDIYLHNGNMIRGFPLDGKDDHTLTLEEATDEMQSLDDMLIFGEPVTRIYPAGDMEEVDA

SEQ ID NO: 15662 - DNA, 50 bp, Escherichia marmotae; identical to SEQ ID NO: 3242
  source 1..50: mol_type = genomic DNA

SEQ ID NO: 15663 - DNA, 40 bp, Escherichia marmotae
  source 1..40: mol_type = genomic DNA
gtacatggaataataaagcaccagaactttagccatttct

SEQ ID NO: 15664 - DNA, 50 bp, Escherichia marmotae; identical to SEQ ID NO: 3244
  source 1..50: mol_type = genomic DNA

SEQ ID NO: 15665 - DNA, 40 bp, Escherichia marmotae; identical to SEQ ID NO: 3245
  source 1..40: mol_type = genomic DNA

SEQ ID NO: 15666 - protein, 547 aa, Shigella flexneri
MKLLVTYIRWSTKEQDSGDSLRRQTNLIDAFYSKHKNDYYLLPAHRYVDKGKSGFHQQHKAQGSDFRRMFENVMSGAIPEGSLIVVENFDRFSRADIDTAIDDVRQILRKGVSILTLGDGELYDKSALTDPVKLIKHIIIAERAHQESLVKQKRIAQVWNHKTQLARELKKPMGKQAPGWLELSEDGSHYIVDEDKASLVNIIYDKRLSGMSMFAICKWLNEQGYPTINQRKVRISKTKKPDGNWSALSVKHILTSRSVLGYLPAKISSEDRKTVLREEIEGFYPQIVTDSKFYAVQQLLEETGKGKTSSGEHWLYVNILKGLIRCKCGLVMTPTGIRKPVYQGTYRCNGNKESRCNYGTVSRKLLDTQLCSRLFSKLSQLHDEATDTAKLDELQRRLNTVDSELEKLTETLIQLPNITQIQEALRVKQEEKDELIVQLSREKARVKSVSSLDLSGLDMESVEGRTEAQIIIKRLVKEIVVSGNEKLVDIYLHNGNMIRGFPLDGKDDHTLTLEEATDEMQSLDDMLIFGEPVTRIYPAGDMEEVDA

SEQ ID NO: 15667 - DNA, 50 bp, Shigella flexneri; identical to SEQ ID NO: 3242
  source 1..50: mol_type = genomic DNA

SEQ ID NO: 15668 - DNA, 40 bp, Shigella flexneri; identical to SEQ ID NO: 15663
  source 1..40: mol_type = genomic DNA

SEQ ID NO: 15669 - DNA, 50 bp, Shigella flexneri; identical to SEQ ID NO: 3244
  source 1..50: mol_type = genomic DNA

SEQ ID NO: 15670 - DNA, 40 bp, Shigella flexneri; identical to SEQ ID NO: 3245
  source 1..40: mol_type = genomic DNA

SEQ ID NO: 15671 - protein, 547 aa, Escherichia fergusonii
MKLLATYIRWSTKEQDSGDSLRRQINLIDAFYSKHKNDYYLLPAHRYVDKGKSGFHQQHKAQGSDFRRMFENVMSGVIPEGSLIVVENFDRFSRADIDTAIDDVRQILRKGVSILTLGDGELYDKSALTDPVKLIKHIIIAERAHQESLVKQKRIAQVWNHKTQLARELKKPMGKQAPGWLELSEDGSHYIVDEDKASLVNIIYDKRLSGMSMFAICKWLNEQGYPTINQRKVRISKTKKPDGNWSALSVKHILTSRSVLGYLPAKISTEDRKTVLREEIEGFYPQIVTDSKFYAVQQLLEETGKGKTSSGDHWLYVNILKGLIRCKCGLVMTPTGIRKPVYQGTYRCNGNKESRCSYGTVSRKLLDTQLCSRLFSKLSQLHDEATDTAKLDELQRRLNTVDSELEKLTETLIQLPNITQIQEALRVKQEEKDELIVQLSREKARVKSVSSLDLSGLDMESVEGRTEAQIIIKRLVKEIVVSGNEKLVDIYLHNGNMIRGFPLDGKDDHTLTLEEATDEMQSLDDMLIFGEPVTRIYPAGDMEEVDA

SEQ ID NO: 15672 - DNA, 50 bp, Escherichia fergusonii; identical to SEQ ID NO: 3502
  source 1..50: mol_type = genomic DNA

SEQ ID NO: 15673 - DNA, 40 bp, Escherichia fergusonii; identical to SEQ ID NO: 15663
  source 1..40: mol_type = genomic DNA

SEQ ID NO: 15674 - DNA, 50 bp, Escherichia fergusonii; identical to SEQ ID NO: 15659
  source 1..50: mol_type = genomic DNA

SEQ ID NO: 15675 - DNA, 40 bp, Escherichia fergusonii; identical to SEQ ID NO: 3245
  source 1..40: mol_type = genomic DNA

SEQ ID NO: 15676 - protein, 547 aa, Escherichia coli
MKLLVTYIRWSTKEQDSGDSLRRQTNLIDAFYAKHKDDYYLLPAHRYVDKGKSGFHQQHKAQGSDFRRMFENVMSGAIPEGSLIVVENFDRFSRADIDTAIDDVRQILRKGVSILTLGDGELYDKSALTDPVKLIKHIIIAERAHQESLVKQKRIAQVWNHKTQLARELKKPMGKQAPGWLELSEDGSHYIVDEDKASLVNIIYDKRLSGMSMFAICKWLNEQGYPTINQRKVRISKTKKPDGNWSALSVKHILTSRSVLGYLPAKISTEDRKTVLREEIEGFYPQIVTDSKFYAVQQLLEETGKGKTSSGDHWLYVNILKGLIRCKCGLVMTPTGIRKPVYQGTYRCNGNKESRCSYGTVSRKLLDTQLCSRLFSKLSQLHDEATDTAKLDELQRRLNTVDSELEKLTETLIQLPNITQIQEALRVKQEEKDELIVQLSREKARVKSVSSLDLSGLDMESVEGRTEAQIIIKRLVKEIVVSGNEKLVDIYLHNGNMIRGFPLDGKDDHTLTLEEATDEMQSLDDMLIFGEPVTRIYPAGDMEEVDA

SEQ ID NO: 15677 - DNA, 50 bp, Escherichia coli; identical to SEQ ID NO: 3242
  source 1..50: mol_type = genomic DNA

SEQ ID NO: 15678 - DNA, 40 bp, Escherichia coli; identical to SEQ ID NO: 15663
  source 1..40: mol_type = genomic DNA

SEQ ID NO: 15679 - DNA, 50 bp, Escherichia coli; identical to SEQ ID NO: 3244
  source 1..50: mol_type = genomic DNA

SEQ ID NO: 15680 - DNA, 40 bp, Escherichia coli; identical to SEQ ID NO: 3245
  source 1..40: mol_type = genomic DNA

SEQ ID NO: 15681 - protein, 547 aa, Escherichia coli
MKLLVPYIRWSTKEQDSGDSLRRQTNLIDAFYSKHKNDYYLLPAHRYVDKGKSGFHQQHKAQGSDFRRMFENVMSGAIPEGSLIVVENFDRFSRADIDTAIDDVRQILRKGVSILTLGDGELYDKSALTDPVKLIKHIIIAERAHQESLVKQKRIAQVWNHKTQLARELKKPMGKQAPGWLELSEDGSHYIVDEDKASLVNIIYDKRLSGMSMFAICKWLNEQGYPTINQRKVRISKTKKPDGNWSALSVKHILTSRSVLGYLPAKISSEDRKTVLREEIEGFYPQIVTDSKFYAVQQLLEETGKGKTSSGEHWLYVNILKGLIRCKCGLVMTPTGIRKPVYQGTYRCNGNKESRCSYGTVSRKLLDTQLCSRLFSKLSQLHDEATDTAKLDELQRRLNTVDGELEKLTETLIQLPNITQIQEALRVKQEEKDELIVQLSREKARVKSVSSLDLSGLDMESVEGRTEAQIIIKRLVKEIVVSGNEKLVDIYLHNGNMIRGFPLDGKDDHTLTLEEATDEMQSLDDMLIFGEPVTRIYPAGDMEEVDA

SEQ ID NO: 15682 - DNA, 50 bp, Escherichia coli; identical to SEQ ID NO: 3242
  source 1..50: mol_type = genomic DNA

SEQ ID NO: 15683 - DNA, 40 bp, Escherichia coli; identical to SEQ ID NO: 15663
  source 1..40: mol_type = genomic DNA

SEQ ID NO: 15684 - DNA, 50 bp, Escherichia coli; identical to SEQ ID NO: 3244
  source 1..50: mol_type = genomic DNA

SEQ ID NO: 15685 - DNA, 40 bp, Escherichia coli; identical to SEQ ID NO: 3245
  source 1..40: mol_type = genomic DNA

SEQ ID NO: 15686 - protein, 547 aa, Escherichia coli
MKLLVTYIRWSTKEQDSGDSLRRQTNLIDAFYSKHKNDYYLLPAHRYVDKGKSGFHQQHKAQGSDFRRMFENVMSGAIPEGSLIVVENFDRFSRADIDTAIDDVRQILRKGVSILTLGDGELYDKSALTDPVKLIKHIIIAERAHQESLVKQKRIAQVWNHKTQLARELKKPMGKQAPGWLELSEDGSHYIVDEDKASLVNIIYDKRLSGMSMFAICKWLNEQGYPTINQRKVRISKTKKPDGNWSALSVKHILTSRSVLGYLPAKISTEDRKTVLREEIESFYPQIVTDSKFYAVQQLLEETGKGKTSSGEHWLYVNILKGLIRCKCGLVMTPTGIRKPVYQGTYRCNGNKESRCSYGTVSRKLLDTQLCSRLFSKLSQLHDEATDTAKLDELQRRLNTVDSELEKLTETLIQLPNITQIQEALRVKQEEKDELIVQLSREKARVKSVSSLDLSGLDMESVEGRTEAQIIIKRLVKEIVVSGNEKLVDIYLHNGNMIRGFPLDGKDDHTLTLEEATDEMQPLDDMLIFGEPVTRIYPAGDMEEVDA

SEQ ID NO: 15687 - DNA, 50 bp, Escherichia coli; identical to SEQ ID NO: 3502
  source 1..50: mol_type = genomic DNA

SEQ ID NO: 15688 - DNA, 40 bp, Escherichia coli; identical to SEQ ID NO: 15663
  source 1..40: mol_type = genomic DNA

SEQ ID NO: 15689 - DNA, 50 bp, Escherichia coli; identical to SEQ ID NO: 15659
  source 1..50: mol_type = genomic DNA

SEQ ID NO: 15690 - DNA, 40 bp, Escherichia coli; identical to SEQ ID NO: 3245
  source 1..40: mol_type = genomic DNA

SEQ ID NO: 15691 - protein, 547 aa, Escherichia coli
MKLLVTYIRWSTKEQDSGDSLRRQTNLIDAFYSKHKNDYYLLPAHRYVDKGKSGFHQQHKNQGSDFRRMFENVMSGAIPEGSLIVVENFDRFSRADIDTAIDDVRQILRKGVSILTLGDGELYDKSALTDPVKLIKHIIIAERAHQESLVKQKRIAQVWNHKTQLARELKKPMGKQAPGWLELSEDGSHYIVDEDKASLVNIIYDKRLSGMSMFAICKWLNEQGYPTINQRKVRISKTKKPDGNWSALSVKHILTSRSVLGYLPAKISSEDRKTVLREEIEGFYPQIVTDSKFYAVQQLLEETGKGKTSSGEHWLYVNILKGLIRCKCGLVMTPTGIRKPVYQGTYRCNGNKESRCSYGTVSRKLLDTQLCSRLFSKLSQLHDEATDTAKLDELQRRLNTVDGELEKLTETLIQLPNITQIQEALRVKQEEKDELIVQLSREKARVKSVSSLDLSGLDMESVEGRTEAQIIIKRLVKEIVVSGNEKLVDIYLHNGNMIRGFPLDGKDDHTLTLEEATDEMQSLDDMLIFGEPVTRIYPAGDMEEVDA

SEQ ID NO: 15692 - DNA, 50 bp, Escherichia coli; identical to SEQ ID NO: 3242
  source 1..50: mol_type = genomic DNA

SEQ ID NO: 15693 - DNA, 40 bp, Escherichia coli; identical to SEQ ID NO: 15663
  source 1..40: mol_type = genomic DNA

SEQ ID NO: 15694 - DNA, 50 bp, Escherichia coli; identical to SEQ ID NO: 3244
  source 1..50: mol_type = genomic DNA

SEQ ID NO: 15695 - DNA, 40 bp, Escherichia coli; identical to SEQ ID NO: 3245
  source 1..40: mol_type = genomic DNA

SEQ ID NO: 15696 - protein, 547 aa, Escherichia coli
MKLLVTYIRWSTREQDSGDSLRRQTNLIDAFYAKHKDDYYLLPAHRYVDKGKSGFHQQHKNQGSDFRRMFENVMSGVIPEGSLIVVENFDRFSRADIDTAIDDVRQILRKGVSILTLGDGELYDKSALTDPVKLIKHIIIAERAHQESLVKQKRIAQVWNHKTQLARELKKPMGKQAPGWLELSEDGSHYIVDEDKASLVNIIYDKRLSGMSMFAICKWLNEQGYPTINQRKVRISKTKKPDGNWSALSVKHILTSRSVLGYLPAKISTEDRKTVLREEIESFYPQIVTDSKFYAVQQLLEETGKGKTSSGEHWLYVNILKGLIRCKCGLVMTPTGIRKPVYQGTYRCNGNKESRCSYGTVSRKLLDTQLCSRLFSKLSQLHDEATDTAKLDELQRRLNTVDGELEKLTETLIQLPNITQIQEALRVKQEEKDELIVQLSREKARVKSVSSLDLSGLDMESVEGRTEAQIIIKRLVKEIVVSGNEKLVDIYLHNGNMIRGFPLDGKDDHTLTLEEATDEMQSLDDMLIFGEPVTRIYPAGDMEEVDA

SEQ ID NO: 15697 - DNA, 50 bp, Escherichia coli; identical to SEQ ID NO: 3242
  source 1..50: mol_type = genomic DNA

SEQ ID NO: 15698 - DNA, 40 bp, Escherichia coli; identical to SEQ ID NO: 15663
  source 1..40: mol_type = genomic DNA

SEQ ID NO: 15699 - DNA, 50 bp, Escherichia coli; identical to SEQ ID NO: 3244
  source 1..50: mol_type = genomic DNA

SEQ ID NO: 15700 - DNA, 40 bp, Escherichia coli; identical to SEQ ID NO: 3245
  source 1..40: mol_type = genomic DNA

SEQ ID NO: 15701 - protein, 547 aa, Escherichia coli
MKLLVPYIRWSTKEQDSGDSLRRQTNLIDAFYSKHKEEYYLLPAHRYVDKGKSGFHQQHKAQGSDFRRMFENVMSGAIPEGSLIVVENFDRFSRADIDTAIDDVRQILRKGVSILTLGDGELYDKSALTDPVKLIKHIIIAERAHQESLVKQKRIAQVWNHKTQLARELKKPMGKQAPGWLELSEDGSHYIVDEDKASLVNIIYDKRLSGMSMFAICKWLNEQGYPTINQRKVRISKTKKPDGNWSALSVKHILTSRSVLGYLPAKISTEDRKTVLREEIESFYPQIVTDSKFYAVQQLLEETGKGKTSSGEHWLYVNILKGLIRCKCGLVMTPTGIRKPVYQGTYRCNGNKESRCSYGTVSRKLLDTQLCSRLFSKLSQLHDEATDTAKLDELQRRLNTVDGELEKLTETLIQLPNITQIQEALRVKQEEKDELIVQLSREKARVKSVSSLDLSGLDMESVEGRTEAQIIIKRLVKEIVVSGNEKLVDIYLHNGNMIRGFPLDGKDDHTLTLEEATDEMQSLDDMLIFGEPVTRIYPAGDMEEVDA

SEQ ID NO: 15702 - DNA, 50 bp, Escherichia coli; identical to SEQ ID NO: 3242
  source 1..50: mol_type = genomic DNA

SEQ ID NO: 15703 - DNA, 40 bp, Escherichia coli; identical to SEQ ID NO: 15663
  source 1..40: mol_type = genomic DNA

SEQ ID NO: 15704 - DNA, 50 bp, Escherichia coli; identical to SEQ ID NO: 3244
  source 1..50: mol_type = genomic DNA

SEQ ID NO: 15705 - DNA, 40 bp, Escherichia coli; identical to SEQ ID NO: 3245
  source 1..40: mol_type = genomic DNA

SEQ ID NO: 15706 - protein, 547 aa, Escherichia coli
MKLLVTYIRWSTKEQDSGDSLRRQTNLIDAFYSKHKNDYYLLPAHRYVDKGKSGFHQQHKAQGSDFRRMFENVMSGAIPEGSLIVVENFDRFSRADIDTAIDDVRQILRKGVSILTLGDGELYDKSALTDPVKLIKHIIIAERAHQESLVKQKRIAQVWNHKTQLARELKKPMGKQAPGWLELSEDGSHYIVDEDKASLVNIIYDKRLSGMSMFAICKWLNEQGYPTINQRKVRISKTKKPDGNWSALSVKHILTSRSVLGYLPAKISTEDRKTVLREEIEGFYPQIVTDSKFYAVQQLLEETGKGKTSSGDHWLYVNILKGIIRCKCGLVMTPTGIRKPVYQGTYRCNGNKESRCSYGTVSRKLLDTQLCSRLFSKLSQLHDEATDTAKLDELQRRLNTVDSELEKLTETLIQLPNITQIQEALRVKQEEKDELIVQLSREKARVKSVSSLDLSGLDMESVEGRTEAQIIIKRLVKEIVVSGNEKLVDIYLHNGNMIRGFPLDGKDDHTLTLEEATDEMQSLDDMLIFGEPVTRIYPAGDMEEVDA

SEQ ID NO: 15707 - DNA, 50 bp, Escherichia coli; identical to SEQ ID NO: 3242
  source 1..50: mol_type = genomic DNA

SEQ ID NO: 15708 - DNA, 40 bp, Escherichia coli; identical to SEQ ID NO: 15663
  source 1..40: mol_type = genomic DNA

SEQ ID NO: 15709 - DNA, 50 bp, Escherichia coli; identical to SEQ ID NO: 3244
  source 1..50: mol_type = genomic DNA

SEQ ID NO: 15710 - DNA, 40 bp, Escherichia coli; identical to SEQ ID NO: 3245
  source 1..40: mol_type = genomic DNA

SEQ ID NO: 15711 - protein, 547 aa, Escherichia coli
MKLLVTYIRWSTKEQDSGDSLRRQTNLIDAFYSKHKNDYYLLPAHRYVDKGKSGFHQQHKAQGSDFRRMFENVMSGAIPEGSLIVVENFDRFSRADIDTAIDDVRQILRKGVSILTLGDGELYDKSALTDPVKLIKHIIIAERAHQESLVKQKRIAQVWNHKTQLARELKKPMGKQAPGWLELSEDGSHYIVDEDKASLVNIIYDKRLSGMSMFAICKWLNEQGYPTINQRKVRISKTKKPDGNWSALSVKHILTSRSVLGYLPAKISTEDRKTVLREEIEGFYPQIVTDSKFYAVQQLLEETGKGKTSSGEHWLYVNILKGLIRCKCGLVMTPTGIRKPVYQGTYRCNGNKESRCSYGTVSRKLLDTQLCSRLFSKLSQLHDEATDTAKLDELQRRLNTVDSELEKLTETLIQLPNITQIQEALRVKQGEKDELIVQLSREKARVKSVSSLNLSGLDMESVEGRTEAQIIIKRLVKEIVVSGNEKLVDIYLHNGNMIRGFPLDGKDDHTLTLEEATDEMQSLDDMLIFGEPVTRIYPAGDMEEVDA

SEQ ID NO: 15712 - DNA, 50 bp, Escherichia coli; identical to SEQ ID NO: 3502
  source 1..50: mol_type = genomic DNA

SEQ ID NO: 15713 - DNA, 40 bp, Escherichia coli; identical to SEQ ID NO: 15663
  source 1..40: mol_type = genomic DNA

SEQ ID NO: 15714 - DNA, 50 bp, Escherichia coli; identical to SEQ ID NO: 15659
  source 1..50: mol_type = genomic DNA

SEQ ID NO: 15715 - DNA, 40 bp, Escherichia coli; identical to SEQ ID NO: 3245
  source 1..40: mol_type = genomic DNA

SEQ ID NO: 15716 - protein, 547 aa, Escherichia coli
MKLLVTYIRWSTREQDSGDSLRRQTNLIDAFYAKHKDDYYLLPAHRYVDKGKSGFHQQHKAQGSDFRRMFENVMSGVIPEGSLIVVENFDRFSRADIDTAIDDVRQILRKGVSILTLGDGELYDKSALTDPVKLIKHIIIAERAHQESLVKQKRIAQVWNHKTQLARELKKPMGKQAPGWLELSEDGSHYIVDEDKASLVNIIYDKRLSGMSMFAICKWLNEQGYPTINQRKVRISKTKKPDGNWSALSVKHILTSRSVLGYLPAKISTEDRKTVLREEIESFYPQIVTDSKFYAVQQLLEETGKGKTSSGEHWLYVNILKGLIRCKCGLVMTPTGIRKPVYQGTYRCNGNKESRCSYGTVSRKLLDTQLCSRLFSKLSQLHDEATDTAKLDELQRRLNTVDSELEKLTETLIQLPNITQIQEALRVKQEEKDELIVQLSREKARVKSVSSLDLSGLDMESVEGRTEAQIIIKRLVKEIVVSGNEKLVDIYLHNGNMIRGFPLDGKDDHTLTLEEATDEMQSLDDMLIFGEPVTRIYPAGDMEEVDA

SEQ ID NO: 15717 - DNA, 50 bp, Escherichia coli; identical to SEQ ID NO: 3242
  source 1..50: mol_type = genomic DNA

SEQ ID NO: 15718 - DNA, 40 bp, Escherichia coli; identical to SEQ ID NO: 15663
  source 1..40: mol_type = genomic DNA

SEQ ID NO: 15719 - DNA, 50 bp, Escherichia coli; identical to SEQ ID NO: 3244
  source 1..50: mol_type = genomic DNA

SEQ ID NO: 15720 - DNA, 40 bp, Escherichia coli; identical to SEQ ID NO: 3245
  source 1..40: mol_type = genomic DNA

SEQ ID NO: 15721 - protein, 547 aa, Escherichia coli
MKLLATYIRWSTKEQDSGDSLRRQTNLIDAFYSKHKNDYYLLPAHRYVDKGKSGFHQQHKAQGSDFRRMFENVMSGVIPEGSLIVVENFDRFSRADIDTAIDDVRQILRKGVSILTLGDGELYDKSALTDPVKLIKHIIIAERAHQESLVKQKRIAQVWNHKTQLARELKKPMGKQAPGWLELSEDGSHYIVDEDKASLVNIIYDKRLSGMSMFAICKWLNEQGYPTINQRKVRISKTKKPDGNWSALSVKHILTSRSVLGYLPAKISTEDRKTVLREEIESFYPQIVTDSKFYAVQQLLEETGKGKTSSGDHWLYVNILKGLIRCKCGLVMTPTGIRKPVYQGTYRCNGNKESRCSYGTVSRKLLDTQLCSRLFSKLSQLHDEATDTAKLDELQRRLNTVDSELEKLTETLIQLPNITQIQEALRVKQEEKDELIVQLSREKARVKSVSSLDLSGLDMESVEGRTEAQIIIKRLVKEIVVSGNEKLVDIYLHNGNMIRGFPLDGKDDHTLTLEEATDEMQSLDDMLIFGEPVTRIYPAGDMEEVDA

SEQ ID NO: 15722 - DNA, 50 bp, Escherichia coli; identical to SEQ ID NO: 3242
  source 1..50: mol_type = genomic DNA

SEQ ID NO: 15723 - DNA, 40 bp, Escherichia coli; identical to SEQ ID NO: 15663
  source 1..40: mol_type = genomic DNA

SEQ ID NO: 15724 - DNA, 50 bp, Escherichia coli; identical to SEQ ID NO: 3244
  source 1..50: mol_type = genomic DNA

SEQ ID NO: 15725 - DNA, 40 bp, Escherichia coli; identical to SEQ ID NO: 3245
  source 1..40: mol_type = genomic DNA

SEQ ID NO: 15726 - protein, 547 aa, Escherichia coli
MKLLVTYIRWSTKEQDSGDSLRRQTNLIDAFYSKHKNDYYLLPAHRYVDKGKSGFHQQHKNQGSDFRRMFENVMSGAIPEGSLIVVENFDRFSRADIDTAIDDVRQILRKGVSILTLGDGELYDKSALTDPVKLIKHIIIAERAHQESLVKQKRIAQVWNHKTQLARELKKPMGKQAPGWLELSEDGSHYIVDEDKASLVNIIYDKRLSGMSMFAICKWLNEQGYPTINQRKVRISKTKKPDGNWSALSVKHILTSRSVLGYLPAKISTEDRKTVLREEIEGFYPQIVTDSKFYAVQQLLEETGKGKTSSGEHWLYVNILKGLIRCKCGLVMTPTGIRKPVYQGTYRCNGNKESRCSYGTVSRKLLDTQLCSRLFSKLSQLHDEATDTAKLDELQRRLNTVDGELEKLTETLIQLPNITQIQEALRVKQEEKDELIVQLSREKARVKSVSSLDLSGLDMESVEGRTEAQIIIKRLVKEIVVSGNEKLVDIYLHNGNMIRGFPLDGKDDHTLTLEEATDEMQSLDDMLIFGEPVTRIYPAGDMEEVDA

SEQ ID NO: 15727 - DNA, 50 bp, Escherichia coli
  source 1..50: mol_type = genomic DNA
gtgcgtgtttagccatgtaaaagcactagtattcttgccttaacactcat

SEQ ID NO: 15728 - DNA, 40 bp, Escherichia coli; identical to SEQ ID NO: 15663
  source 1..40: mol_type = genomic DNA

SEQ ID NO: 15729 - DNA, 50 bp, Escherichia coli
  source 1..50: mol_type = genomic DNA
gtgcgtgtttagccatgtaaaagcaatagtattcttgccttaacactcat

SEQ ID NO: 15730 - DNA, 40 bp, Escherichia coli; identical to SEQ ID NO: 3245
  source 1..40: mol_type = genomic DNA

SEQ ID NO: 15731 - protein, 547 aa, Escherichia coli
MKLLATYIRWSTKEQDSGDSLRRQTNLIDAFYSKHKNDYYLLPAHRYVDKGKSGFHQQHKAQGSDFRRMFENVMSGAIPEGSLIVVENFDRFSRADIDTAIDDVRQILRKGVSILTLGDGELYDKSALTDPVKLIKHIIIAERAHQESLVKQKRIAQVWNHKTQLTRELKKPMGKQAPGWLELSEDGSHYIVDEDKASLVNIIYDKRLSGMSMFAICKWLNEQGYPTINQRKVRISKTKKPDGNWSALSVKHILTSRSVLGYLPAKISTEDRKTVLREEIEGFYPQIVTDSKFYAVQQLLEETGKGKTSSGDHWLYVNILKGLIRCKCGLVMTPTGIRKPVYQGTYRCNGNKESRCSYGTVSRKLLDTQLCSRLFSKLSQLHDEATDTAKLDELQRRLNTVDGELEKLTETLIQLPNITQIQEALRVKQEEKDELIVQLSREKARVKSVSSLDLSGLDMESVEGRTEAQIIIKRLVKEIVVSGNEKLVDIYLHNGNMIRGFPLDGKDDHTLTLEEATDEMQPLDDMLIFGEPVTRIYPAGDMEEVDA

SEQ ID NO: 15732 - DNA, 50 bp, Escherichia coli; identical to SEQ ID NO: 3242
  source 1..50: mol_type = genomic DNA

SEQ ID NO: 15733 - DNA, 40 bp, Escherichia coli; identical to SEQ ID NO: 15663
  source 1..40: mol_type = genomic DNA

SEQ ID NO: 15734 - DNA, 50 bp, Escherichia coli; identical to SEQ ID NO: 3244
  source 1..50: mol_type = genomic DNA

SEQ ID NO: 15735 - DNA, 40 bp, Escherichia coli; identical to SEQ ID NO: 3245
  source 1..40: mol_type = genomic DNA

SEQ ID NO: 15736 - protein, 547 aa, Escherichia coli
MKLLVTYIRWSTKEQDSGDSLRRQTNLIDAFYSKHKNDYYLLPAHRYVDKGKSGFHQQHKNQGSDFRRMFENVMSGVIPEGSLIVVENFDRFSRADIDTAIDDVRQILRKGVSILTLGDGELYDKSALTDPVKLIKHIIIAERAHQESLVKQKRIAQVWNHKTQLARELKKPMGKQAPGWLELSDDGSHYIVDEDKASLVNIIYDKRLSGMSMFAICKWLNEQGYPTINQRKVRISKTKKPDGNWSALSVKHILTSRSVLGYLPAKISTEDRKTVLREEIEGFYPQIVTDSKFYAVQQLLEETGKGKTSSGEHWLYVNILKGLIRCKCGLVMTPTGIRKPVYQGTYRCNGNKESRCSYGTVSRKLLDTQLCSRLFSKLSQLHDEATDTAKLDELQRRLNTVDSELEKLTETLIQLPNITQIQEALRVKQEEKDELIVQLSREKARVKSVSSLDLSGLDMESVEGRTEAQIIIKRLVKEIVVSGNEKLVDIYLHNGNMIRGFPLDGKDDHTLTLEEATDEMQSLDDMLIFGEPVTRIYPAGDMEEVDA

SEQ ID NO: 15737 - DNA, 50 bp, Escherichia coli; identical to SEQ ID NO: 3242
  source 1..50: mol_type = genomic DNA

SEQ ID NO: 15738 - DNA, 40 bp, Escherichia coli; identical to SEQ ID NO: 15663
  source 1..40: mol_type = genomic DNA

SEQ ID NO: 15739 - DNA, 50 bp, Escherichia coli; identical to SEQ ID NO: 3244
  source 1..50: mol_type = genomic DNA

SEQ ID NO: 15740 - DNA, 40 bp, Escherichia coli; identical to SEQ ID NO: 3245
  source 1..40: mol_type = genomic DNA

SEQ ID NO: 15741 - protein, 547 aa, Escherichia coli
MKLLVTYIRWSTREQDSGDSLRRQTNLIDAFYAKHKDDYYLLPAHRYVDKGKSGFHQQHKAQGSDFRRMFENVMSGAIPEGSLIVVENFDRFSRADIDTAIDDVRQILRKGVSILTLGDGELYDKSALTDPVKLIKHIIIAERAHQESLVKQKRIAQVWNHKTQLARELKKPMGKQAPGWLELSEDGSHYIVDEDKASLVNIIYDKRLSGMSMFAICKWLNEQGYPTINQRKVRISKTKKPDGNWSALSVKHILTSRSVLGYLPAKISTEDRKTVLREEIEGFYPQIVTDSKFYAVQQLLEETGKGKTSSGEHWLYVNILKGLIRCKCGLVMTPTGIRKPVYQGTYRCNGNKESRCSYGTVSRKLLDTQLCSRLFSKLSQLHDEATDTAKLDELQRRLNTVDSELEKLTETLIQLPNITQIQEALRVKQEEKDELIVQLSREKARVKSVSSLDLSGLDMESVEGRTEAQIIIKRLVKEIVVSGNEKLVDIYLHNGNMIRGFPLDGKDDHTLTLEEATDEMQSLDDMLIFGEPVTRIYPAGDMEEVDA

SEQ ID NO: 15742 - DNA, 50 bp, Escherichia coli; identical to SEQ ID NO: 3242
  source 1..50: mol_type = genomic DNA

SEQ ID NO: 15743 - DNA, 40 bp, Escherichia coli; identical to SEQ ID NO: 15663
  source 1..40: mol_type = genomic DNA

SEQ ID NO: 15744 - DNA, 50 bp, Escherichia coli; identical to SEQ ID NO: 3244
  source 1..50: mol_type = genomic DNA

SEQ ID NO: 15745 - DNA, 40 bp, Escherichia coli; identical to SEQ ID NO: 3245
  source 1..40: mol_type = genomic DNA

SEQ ID NO: 15746 - protein, 547 aa, Escherichia coli
MKLLATYIRWSTKEQDSGDSLRRQTNLIDAFYSKHKNDYYLLPAHRYVDKGKSGFHQQHKAQGSDFRRMFENVMSGVIPEGSLIVVENFDRFSRADIDTAIDDVRQILRKGVSILTLGDGELYDKSALTDPVKLIKHIIIAERAHQESLVKQKRIAQVWNHKTQLARELKKPMGKQAPGWLELSEDGSHYIVDEDKASLVNIIYDKRLSGMSMFAICKWLNEQGYPTINQRKVRISKTKKPDGNWSALSVKHILTSRSVLGYLPAKISTDDRKTVLREEIESFYPQIVTDSKFYAVQQLLEETGKGKTSSGEHWLYVNILKGLIRCKCGLVMTPTGIRKPVYQGTYRCNGNKESRCSYGTVSRKLLDTQLCSRLFSKLSQLHDEATDTAKLDELQRRLNTVDSELEKLTETLIQLPNITQIQEALRVKQEEKDELIVQLSREKARVKSVSSLDLSGLDMESVEGRTEAQIIIKRLVKEIVVSGNEKLVDIYLHNGNMIRGFPLDGKDDHTLTLEEATDEMQPLDDMLIFGEPVTRIYPAGDMEEVDA

SEQ ID NO: 15747 - DNA, 50 bp, Escherichia coli; identical to SEQ ID NO: 3242
  source 1..50: mol_type = genomic DNA

SEQ ID NO: 15748 - DNA, 40 bp, Escherichia coli; identical to SEQ ID NO: 15663
  source 1..40: mol_type = genomic DNA

SEQ ID NO: 15749 - DNA, 50 bp, Escherichia coli; identical to SEQ ID NO: 3244
  source 1..50: mol_type = genomic DNA

SEQ ID NO: 15750 - DNA, 40 bp, Escherichia coli; identical to SEQ ID NO: 3245
  source 1..40: mol_type = genomic DNA

SEQ ID NO: 15751 - protein, 547 aa, Escherichia coli
MKLLVTYIRWSTKEQDSGDSLRRQTNLIDAFYSKHKNDYYLLPAHRYVDKGKSGFHQQHKAQGSDFRRMFENVMSGAIPEGSLIVVENFDRFSRADIDTAIDDVRQILRKGVSILTLGDGELYDKSALTDPVKLIKHIIIAERAHQESLVKQKRIAQVWNHKTQLARELKKPMGKQAPGWLELSEDGSHYIVDEDKASLVNIIYDKRLSGMSMFAICKWLNEQGYPTINQRKVRISKTKKPDGNWSALSVKHILTSRSVLGYLPAKISSEDRKTVLREEIEGFYPQIVTDSKFYAVQQLLEETGKGKTSSGEHWLYVNILKGLIRCKCGLVMTPTGIRKPVYQGTYRCNGNKESRCSYGTVSRKLLDTQLCSRLFSKLSQLHDEATDTAKLDELQRRLNTVDGELEKLTETLIQLPNITQIQEALRVKQEEKDELIVQLSREKARVKSVSSLDLSGLDMESVEGRTEAQIIIKRLVKEIVVSGNEKLVDIYLHNGNMIRGFPLDGKDDHTLTLEEATDEMQSLDDMLIFGEPVTRIYPAGDMEEVDA

SEQ ID NO: 15752 - DNA, 50 bp, Escherichia coli; identical to SEQ ID NO: 3242
  source 1..50: mol_type = genomic DNA

SEQ ID NO: 15753 - DNA, 40 bp, Escherichia coli; identical to SEQ ID NO: 15663
  source 1..40: mol_type = genomic DNA

SEQ ID NO: 15754 - DNA, 50 bp, Escherichia coli; identical to SEQ ID NO: 3244
  source 1..50: mol_type = genomic DNA

SEQ ID NO: 15755 - DNA, 40 bp, Escherichia coli; identical to SEQ ID NO: 3245
  source 1..40: mol_type = genomic DNA

SEQ ID NO: 15756 - protein, 547 aa, Escherichia coli
MKLLATYIRWSTKEQDSGDSLRRQTNLIDAFYSKHKNDYYLLPAHRYVDKGKSGFHQQHKAQGSDFRRMFENVMSGAIPEGSLIVVENFDRFSRADIDTAIDDVRQILRKGVSILTLGDGELYDKSALTDPVKLIKHIIIAERAHQESLVKQKRIAQVWNHKTQLARELKKPMGKQAPGWLELSEDGSHYIVDEDKASLVNIIYDKRLSGMSMFAICKWLNEQGYPTINQRKVRISKTKKPDGNWSALSVKHILTSRSVLGYLPAKISTEDRKTVLREEIESFYPQIVTDSKFYAVQQLLEETGKGKTSSGEHWLYVNILKGLIRCKCGLVMTPTGIRKPVYQGTYRCNGNKESRCSYGTVSRKLLDTQLCSRLFSKLSQLHDEATDTAKLDELQRRLNTVDSELEKLTETLIQLPNITQIQEALRVKQGEKDELIVQLSREKARVKSVSSLDLSGLDMESVEGRTEAQIIIKRLVKEIVVSGNEKLVDIYLHNGNMIRGFPLDGKDDHTLTLEEATDEMQPLDDMLIFGEPVTRIYPAGDMEEVDA

SEQ ID NO: 15757 - DNA, 50 bp, Escherichia coli; identical to SEQ ID NO: 3242
  source 1..50: mol_type = genomic DNA

SEQ ID NO: 15758 - DNA, 40 bp, Escherichia coli; identical to SEQ ID NO: 15663
  source 1..40: mol_type = genomic DNA

SEQ ID NO: 15759 - DNA, 50 bp, Escherichia coli; identical to SEQ ID NO: 3244
  source 1..50: mol_type = genomic DNA

SEQ ID NO: 15760 - DNA, 40 bp, Escherichia coli; identical to SEQ ID NO: 3245
  source 1..40: mol_type = genomic DNA

SEQ ID NO: 15761 - protein, 547 aa, Escherichia coli; identical to SEQ ID NO: 9346

SEQ ID NO: 15762 - DNA, 50 bp, Escherichia coli; identical to SEQ ID NO: 3242
  source 1..50: mol_type = genomic DNA

SEQ ID NO: 15763 - DNA, 40 bp, Escherichia coli; identical to SEQ ID NO: 15663
  source 1..40: mol_type = genomic DNA

SEQ ID NO: 15764 - DNA, 50 bp, Escherichia coli; identical to SEQ ID NO: 3244
  source 1..50: mol_type = genomic DNA

SEQ ID NO: 15765 - DNA, 40 bp, Escherichia coli; identical to SEQ ID NO: 3245
  source 1..40: mol_type = genomic DNA

SEQ ID NO: 15766 - protein, 547 aa, Escherichia coli
MKLLVTYIRWSTKEQDSGDSLRRQTNLIDAFYSKHKEEYYLLPAHRYVDKGKSGFHQQHKNQGSDFRRMFENVMSGVIPEGSLIVVENFDRFSRADIDTAIDDVRQILRKGVSILTLGDGELYDKSALTDPVKLIKHIIIAERAHQESLVKQKRIAQVWNHKTQLARELKKPMGKQAPGWLELSEDGSHYIVDEDKASLVNIIYDKRLSGMSMFAICKWLNEQGYPTINQRKVRISKTKKPDGNWSALSVKHILTSRSVLGYLPAKISTEDRKTVLREEIESFYPQIVTDSKFYAVQQLLEETGKGKTSSGEHWLYVNILKGLIRCKCGLVMTPTGIRKPVYQGTYRCNGNKESRCNYGTVSRKLLDTQLCSRLFSKLSQLHDEATDTAKLDELQRRLNTVDSELEKLTETLIQLPNITQIQEALRVKQEEKDELIVQLSREKARVKSVSSLDLSGLDMESVEGRTEAQIIIKRLVKEIVVSGNEKLVDIYLHNGNMIRGFPLDGKDDHTLTLEEATDEMQSLDDMLIFGEPVTRIYPAGDMEEVDA

SEQ ID NO: 15767 - DNA, 50 bp, Escherichia coli; identical to SEQ ID NO: 3242
  source 1..50: mol_type = genomic DNA

SEQ ID NO: 15768 - DNA, 40 bp, Escherichia coli; identical to SEQ ID NO: 15663
  source 1..40: mol_type = genomic DNA

SEQ ID NO: 15769 - DNA, 50 bp, Escherichia coli; identical to SEQ ID NO: 3244
  source 1..50: mol_type = genomic DNA

SEQ ID NO: 15770 - DNA, 40 bp, Escherichia coli; identical to SEQ ID NO: 3245
  source 1..40: mol_type = genomic DNA

SEQ ID NO: 15771 - protein, 547 aa, Escherichia coli
MKLLVTYIRWSTKEQDSGDSLRRQTNLIDAFYSKHKNDYYLLPAHRYVDKGKSGFHQQHKAQGSDFRRMFENVMSGAIPEGSLIVVENFDRFSRADIDTAIDDVRQILRKGVSILTLGDGELYDKSALTDPVKLIKHIIIAERAHQESLVKQKRIAQVWNHKTQLARELKKPMGKQAPGWLELSEDGSHYIVDEDKASLVNIIYDKRLSGMSMFAICKWLNEQGYPTINQRKVRISKTKKPDGNWSALSVKHILTSRSVLGYLPAKISTEDRKTVLREEIEGFYPQIVTDSKFYAVQQLLEETGKGKTSSGEHWLYVNILKGLIRCKCGLVMTPTGIRKPVYQGTYRCNGNKESRCNYGTVSRKLLDTQLCSRLFSKLSQLHDEATDTAKLDELQRRLNTVDGELEKLTETLIQLPNITQIQEALRVKQEEKDELIVQLSREKARVKSVSSLDLSGLDMESVEGRTEAQIIIKRLVKEIVVSGNEKLVDIYLHNGNMIRGFPLDGKDDHTLTLEEATDEMQSLDDMLIFGEPVTRIYPAGDMEEVDA

SEQ ID NO: 15772 - DNA, 50 bp, Escherichia coli; identical to SEQ ID NO: 10667
  source 1..50: mol_type = genomic DNA

SEQ ID NO: 15773 - DNA, 40 bp, Escherichia coli; identical to SEQ ID NO: 15663
  source 1..40: mol_type = genomic DNA

SEQ ID NO: 15774 - DNA, 50 bp, Escherichia coli
  source 1..50: mol_type = genomic DNA
gtgcgtgtttagctatgtaaaagcaatagtattcttgccttaacactcat

SEQ ID NO: 15775 - DNA, 40 bp, Escherichia coli; identical to SEQ ID NO: 3245
  source 1..40: mol_type = genomic DNA

SEQ ID NO: 15776 - protein, 547 aa, Escherichia coli
MKLLVTYIRWSTKEQDSGDSLRRQTNLIDAFYSKHKNDYYLLPAHRYVDKGKSGFHQQHKNQGSDFRRMFENVMSGAIPEGSLIVVENFDRFSRADIDTAIDDVRQILRKGVSILTLGDGELYDKSALTDPVKLIKHIIIAERAHQESLVKQKRIAQVWNHKTQLARELKKPMGKQAPGWLELSDDGSHYIVDEDKASLVNIIYDKRLSGMSMFAICKWLNEQGYPTINQRKVRISKTKKPDGNWSALSVKHILTSRSVLGYLPAKISTEDRKTVLREEIEGFYPQIVTDSKFYAVQQLLEETGKGKTSSGEHWLYVNILKGLIRCKCGLVMTPTGIRKPVYQGTYRCNGNKESRCSYGTVSRKLLDTQLCSRLFSKLSQLHDEATDTAKLDELQRRLNTVDGELEKLTETLIQLPNITQIQEALRVKQEEKDELIVQLSREKARVKSVSSLDLSGLDMESVEGRTEAQIIIKRLVKEIVVSGNEKLVDIYLHNGNMIRGFPLDGKDDHTLTLEEATDEMQSLDDMLIFGEPVTRIYPAGDMEEVDA

SEQ ID NO: 15777 - DNA, 50 bp, Escherichia coli; identical to SEQ ID NO: 3242
  source 1..50: mol_type = genomic DNA

SEQ ID NO: 15778 - DNA, 40 bp, Escherichia coli; identical to SEQ ID NO: 15663
  source 1..40: mol_type = genomic DNA

SEQ ID NO: 15779 - DNA, 50 bp, Escherichia coli; identical to SEQ ID NO: 3244
  source 1..50: mol_type = genomic DNA

SEQ ID NO: 15780 - DNA, 40 bp, Escherichia coli; identical to SEQ ID NO: 3245
  source 1..40: mol_type = genomic DNA

SEQ ID NO: 15781 - protein, 547 aa, Escherichia coli
MKLLVTYIRWSTKEQDSGDSLRRQTNLIDAFYAKHKEEYYLLPAHRYVDKGKSGFHQQHKNQGSDFRRMFENVMSGAIPEGSLIVVENFDRFSRADIDTAIDDVRQILRKGVSILTLGDGELYDKSALTDPVKLIKHIIIAERAHQESLVKQKRIAQVWNHKTQLARELKKPMGKQAPGWLELSDDGSHYIVDEDKASLVNIIYDKRLSGMSMFAICKWLNEQGYPTINQRKVRISKTKKPDGNWSALSVKHILTSRSVLGYLPAKISSEDRKTVLREEIEGFYPQIVTDSKFYAVQQLLEETGKGKTSSGEHWLYVNILKGLIRCKCGLVMTPTGIRKPVYQGTYRCNGNKESRCSYGTVSRKLLDTQLCSRLFSKLSQLHDEATDTAKLDELQRRLNTVDSELEKLTETLIQLPNITQIQEALRVKQEEKDELTFQLSREKARVKSVSSLDLSGLDMESVEGRTEAQIIIKRLVKEIVVSGNEKLVDIYLHNGNMIRGFPLDGKDDHTLTLEEATDEMQPLDDMLIFGEPVTRIYPAGDMEEVDA

SEQ ID NO: 15782 - DNA, 50 bp, Escherichia coli; identical to SEQ ID NO: 3242
  source 1..50: mol_type = genomic DNA

SEQ ID NO: 15783 - DNA, 40 bp, Escherichia coli; identical to SEQ ID NO: 15663
  source 1..40: mol_type = genomic DNA

SEQ ID NO: 15784 - DNA, 50 bp, Escherichia coli; identical to SEQ ID NO: 3244
  source 1..50: mol_type = genomic DNA

SEQ ID NO: 15785 - DNA, 40 bp, Escherichia coli; identical to SEQ ID NO: 3245
  source 1..40: mol_type = genomic DNA

SEQ ID NO: 15786 - protein, 547 aa, Escherichia coli
MKLLVTYIRWSTKEQDSGDSLRRQTNLIDAFYAKHKDDYYLLPAHRYVDKGKSGFHQQHKNQGSDFRRMFENVMSGAIPEGSLIVVENFDRFSRADIDTAIDDVRQILRKGVSILTLGDGELYDKSALTDPVKLIKHIIIAERAHQESLVKQKRIAQVWNHKTQLARELKKPMGKQAPGWLELSDDGSHYIVDEDKASLVNIIYDKRLSGMSMFAICKWLNEQGYPTINQRKVRISKTKKPDGNWSALSVKHILTSRSVLGYLPAKISTEDRKTVLREEIESFYPQIVTDSKFYAVQQLLEETGKGKTSSGEHWLYVNILKGLIRCKCGLVMTPTGIRKPVYQGTYRCNGNKESRCSYGTVSRKLLDTQLCSRLFSKLSQLHDEATDTAKLDELQRRLNTVDSELEKLTETLIQLPNITQIQEALRVKQEEKDELIVQLSREKARVKSVSSLDLSGLDMESVEGRTEAQIIIKRLVKEIVVSGNEKLVDIYLHNGNMIRGFPLDGKDDHTLTLEEATDEMQPLDDMLIFGEPVTRIYPAGDMEEVDA

SEQ ID NO: 15787 - DNA, 50 bp, Escherichia coli; identical to SEQ ID NO: 3242
  source 1..50: mol_type = genomic DNA

SEQ ID NO: 15788 - DNA, 40 bp, Escherichia coli; identical to SEQ ID NO: 15663
  source 1..40: mol_type = genomic DNA

SEQ ID NO: 15789 - DNA, 50 bp, Escherichia coli; identical to SEQ ID NO: 3244
  source 1..50: mol_type = genomic DNA

SEQ ID NO: 15790 - DNA, 40 bp, Escherichia coli; identical to SEQ ID NO: 3245
  source 1..40: mol_type = genomic DNA

SEQ ID NO: 15791 - protein, 547 aa, Escherichia coli
MKLLATYIRWSTREQDSGDSLRRQTNLIDAFYSKHKNDYYLLPAHRYVDKGKSGFHQQHKAQGSDFRRMFENVMSGAIPEGSLIVVENFDRFSRADIDTAIDDVRQILRKGVSILTLGDGELYDKSALTDPVKLIKHIIIAERAHQESLVKQKRIAQVWNHKTQLARELKKPMGKQAPGWLELSEDGSHYIVDEDKASLVNIIYDKRLSGMSMFAICKWLNEQGYPTINQRKVRISKTKKPDGNWSALSVKHILTSRSVLGYLPAKISTEDRKTVLREEIESFYPQIVTDSKFYAVQQLLEETGKGKTSSGEHWLYVNILKGLIRCKCGLVMTPTGIRKPVYQGTYRCNGNKESRCSYGTVSRKLLDTQLCSRLFSKLSQLHDEATDTAKLDELQRRLNTVDSELEKLTETLIQLPNITQIQEALRVKQEEKDELIVQLSREKARVKSVSSLDLSGLDMESVEGRTEAQIIIKRLVKEIVVSGNEKLVDIYLHNGNMIRGFPLDGKDDHTLTLEEATDEMQPLDDMLIFGEPVTRIYPAGDMEEVDA

SEQ ID NO: 15792 - DNA, 50 bp, Escherichia coli; identical to SEQ ID NO: 3242
  source 1..50: mol_type = genomic DNA

SEQ ID NO: 15793 - DNA, 40 bp, Escherichia coli; identical to SEQ ID NO: 15663
  source 1..40: mol_type = genomic DNA

SEQ ID NO: 15794 - DNA, 50 bp, Escherichia coli; identical to SEQ ID NO: 3244
  source 1..50: mol_type = genomic DNA

SEQ ID NO: 15795 - DNA, 40 bp, Escherichia coli; identical to SEQ ID NO: 3245
  source 1..40: mol_type = genomic DNA

SEQ ID NO: 15796 - protein, 547 aa, Escherichia coli
MKLLVTYIRWSTKEQDSGDSLRRQTNLIDAFYSKHKNDYYLLPAHRYVDKGKSGFHQQHKNQGSDFRRMFENVMSGAIPEGSLIVVENFDRFSRADIDTAIDDVRQILRKGVSILTLGDGELYDKSALTDPVKLIKHIIIAERAHQESLVKQKRIAQVWNHKTQLARELKKPMGKQAPGWLELSEDGSHYIVDEDKASLVNIIYDKRLSGMSMFAICKWLNEQGYPTINQRKVRISKTKKPDGNWSALSVKHILTSRSVLGYLPAKISTEDRKTVLREEIEGFYPQIVTDSKFYAVQQLLEETGKGKTSSGDHWLYVNILKGLIRCKCGLVMTPTGIRKPVYQGTYRCNGNKESRCSYGTVSRKLLDTQLCSRLFSKLSQLHDEATDTAKLDELQRRLNTVDGELEKLTETLIQLPNITQIQEALRVKQEEKDELIVQLSREKARVKSVSSLDLSGLDMESVEGRTEAQIIIKRLVKEIVVSGNEKLVDIYLHNGNMIRGFPLDGKDDHTLTLEEATDEMQSLDDMLIFGEPVTRIYPAGDMEEVDA

SEQ ID NO: 15797 - DNA, 50 bp, Escherichia coli; identical to SEQ ID NO: 3502
  source 1..50: mol_type = genomic DNA

SEQ ID NO: 15798 - DNA, 40 bp, Escherichia coli; identical to SEQ ID NO: 15663
  source 1..40: mol_type = genomic DNA

SEQ ID NO: 15799 - DNA, 50 bp, Escherichia coli; identical to SEQ ID NO: 15659
  source 1..50: mol_type = genomic DNA

SEQ ID NO: 15800 - DNA, 40 bp, Escherichia coli; identical to SEQ ID NO: 3245
  source 1..40: mol_type = genomic DNA

SEQ ID NO: 15801 - protein, 547 aa, Escherichia coli
MKLLVTYIRWSTREQDSGDSLRRQTNLIDAFYAKHKDDYYLLPAHRYVDKGKSGFHQQHKAQGSDFRRMFENVMSGAIPEGSLIVVENFDRFSRADIDTAIDDVRQILRKGVSILTLGDGELYDKSALTDPVKLIKHIIIAERAHQESLVKQKRIAQVWNHKTQLARELKKPMGKQAPGWLELSEDGSHYIVDEDKASLVNIIYDKRLSGMSMFAICKWLNEQGYPTINQRKVRISKTKKPDGNWSALSVKHILTSRSVLGYLPAKISTEDRKTVLREEIESFYPQIVTDSKFYAVQQLLEETGKGKTSSGEHWLYVNILKGLIRCKCGLVMTPTGIRKPVYQGTYRCNGNKESRCSYGTVSRKLLDTQLCSRLFSKLSQLHDEATDTAKLDELQRRLNTVDSELEKLTETLIQLPNITQIQEALRVKQEEKDELIVQLSREKARVKSVSSLDLSGLDMESVEGRTEAQIIIKRLVKEIVVSGNEKLVDIYLHNGNMIRGFQIDGKDDHTLTLEEATDEMQSLDDMLIFGEPVTRIYPAGDMEEVDA

SEQ ID NO: 15802 - DNA, 50 bp, Escherichia coli; identical to SEQ ID NO: 3242
  source 1..50: mol_type = genomic DNA

SEQ ID NO: 15803 - DNA, 40 bp, Escherichia coli; identical to SEQ ID NO: 15663
  source 1..40: mol_type = genomic DNA

SEQ ID NO: 15804 - DNA, 50 bp, Escherichia coli; identical to SEQ ID NO: 3244
  source 1..50: mol_type = genomic DNA

SEQ ID NO: 15805 - DNA, 40 bp, Escherichia coli; identical to SEQ ID NO: 3245
  source 1..40: mol_type = genomic DNA

SEQ ID NO: 15806 - protein, 547 aa, Escherichia coli; identical to SEQ ID NO: 10661

SEQ ID NO: 15807 - DNA, 50 bp, Escherichia coli; identical to SEQ ID NO: 3242
  source 1..50: mol_type = genomic DNA

SEQ ID NO: 15808 - DNA, 40 bp, Escherichia coli; identical to SEQ ID NO: 15663
  source 1..40: mol_type = genomic DNA

SEQ ID NO: 15809 - DNA, 50 bp, Escherichia coli; identical to SEQ ID NO: 3244
  source 1..50: mol_type = genomic DNA

SEQ ID NO: 15810 - DNA, 40 bp, Escherichia coli; identical to SEQ ID NO: 3245
  source 1..40: mol_type = genomic DNA

SEQ ID NO: 15811 - protein, 547 aa, Escherichia coli
MKLLVTYIRWSTKEQDSGDSLRRQTNLIDAFYAKHKDDYYLLPAHRYVDKGKSGFHQQHKNQGSDFRRMFENVMSGVIPEGSLIVVENFDRFSRADIDTAIDDVRQILRKGVSILTLGDGELYDKSALTDPVKLIKHIIIAERAHQESLVKQKRIAQVWNHKTQLARELKKPMGKQAPGWLELSEDGSHYIVDEDKASLVNIIYDKRLSGMSMFAICKWLNEQGYPTINQRKVRISKTKKPDGNWSALSVKHILTSRSVLGYLPAKISTEDRKTVLREEIESFYPQIVTDSKFYAVQQLLEETGKGKTSSGEHWLYVNILKGLIRCKCGLVMTPTGIRKPVYQGTYRCNGNKESRCNYGTVSRKLLDTQLCSRLFSKLSQLHDEATDTAKLDELQRRLNTVDSELEKLTETLIQLPNITQIQEALRVKQEEKDELIVQLSREKARVKSVSSLDLSGLDMESVEGRTEAQIIIKRLVKEIVVSGNEKLVDIYLHNGNMIRGFPLDGKDDHTLTLEEATDEMQSLDDMLIFGEPVTRIYPAGDMEEVDA

SEQ ID NO: 15812 - DNA, 50 bp, Escherichia coli; identical to SEQ ID NO: 3242
  source 1..50: mol_type = genomic DNA

SEQ ID NO: 15813 - DNA, 40 bp, Escherichia coli; identical to SEQ ID NO: 15663
  source 1..40: mol_type = genomic DNA

SEQ ID NO: 15814 - DNA, 50 bp, Escherichia coli; identical to SEQ ID NO: 3244
  source 1..50: mol_type = genomic DNA

SEQ ID NO: 15815 - DNA, 40 bp, Escherichia coli; identical to SEQ ID NO: 3245
  source 1..40: mol_type = genomic DNA

SEQ ID NO: 15816 - protein, 547 aa, Escherichia coli
MKLLVPYIRWSTKEQDSGDSLRRQTNLIDAFYSKHKNDYYLLPAHRYVDKGKSGFHQQHKNQGSDFRRMFENVMSGAIPEGSLIVVENFDRFSRADIDTAIDDVRQILRKGVSILTLGDGELYDKSALTDPVKLIKHIIIAERAHQESLVKQKRIAQVWNHKTQLARELKKPMGKQAPGWLELSEDGSHYIVDEDKASLVNIIYDKRLSGMSMFAICKWLNEQGYPTINQRKVRISKTKKPDGNWSALSVKHILTSRSVLGYLPAKISTEDRKTVLREEIEGFYPQIVTDSKFYAVQQLLEETGKGKTSSGEHWLYVNILKGLIRCKCGLVMTPTGIRKPVYQGTYRCNGNKESRCSYGTVSRKLLDTQLCSRLFSKLSQLHDEATDTAKLDELQRRLNTVDSELEKLTETLIQLPNITQIQEALRVKQEEKDELIVQLSREKARVKSVSSLDLSGLDMESVEGRTEAQIIIKRLVKEIVVSGNEKLVDIYLHNGNMIRGFPLDGKDDHTLTLEEATDEMQSLDDMLIFGEPVTRIYPAGDMEEVDA

SEQ ID NO: 15817 - DNA, 50 bp, Escherichia coli; identical to SEQ ID NO: 3242
  source 1..50: mol_type = genomic DNA

SEQ ID NO: 15818 - DNA, 40 bp, Escherichia coli; identical to SEQ ID NO: 15663
  source 1..40: mol_type = genomic DNA

SEQ ID NO: 15819 - DNA, 50 bp, Escherichia coli; identical to SEQ ID NO: 3244
  source 1..50: mol_type = genomic DNA

SEQ ID NO: 15820 - DNA, 40 bp, Escherichia coli; identical to SEQ ID NO: 3245
  source 1..40: mol_type = genomic DNA

SEQ ID NO: 15821 - protein, 547 aa, Escherichia coli; identical to SEQ ID NO: 15726

SEQ ID NO: 15822 - DNA, 50 bp, Escherichia coli
  source 1..50: mol_type = genomic DNA
gtatgtgtttagctatgtaaaagcactagtattcttgccttaacactcat

SEQ ID NO: 15823 - DNA, 40 bp, Escherichia coli; identical to SEQ ID NO: 15663
  source 1..40: mol_type = genomic DNA

SEQ ID NO: 15824 - DNA, 50 bp, Escherichia coli
  source 1..50: mol_type = genomic DNA
gtatgtgtttagctatgtaaaagcaatagtattcttgccttaacactcat

SEQ ID NO: 15825 - DNA, 40 bp, Escherichia coli; identical to SEQ ID NO: 3245
  source 1..40: mol_type = genomic DNA

SEQ ID NO: 15826 - protein, 547 aa, Escherichia coli; identical to SEQ ID NO: 10681

SEQ ID NO: 15827 - DNA, 50 bp, Escherichia coli; identical to SEQ ID NO: 3242
  source 1..50: mol_type = genomic DNA

SEQ ID NO: 15828 - DNA, 40 bp, Escherichia coli; identical to SEQ ID NO: 15663
  source 1..40: mol_type = genomic DNA

SEQ ID NO: 15829 - DNA, 50 bp, Escherichia coli; identical to SEQ ID NO: 3244
  source 1..50: mol_type = genomic DNA

SEQ ID NO: 15830 - DNA, 40 bp, Escherichia coli; identical to SEQ ID NO: 3245
  source 1..40: mol_type = genomic DNA

SEQ ID NO: 15831 - protein, 547 aa, Escherichia coli
MKLLVTYIRWSTKEQDSGDSLRRQTNLIDAFYAKHKDDYYLLPAHRYVDKGKSGFHQQHKNQGSDFRRMFENVMSGVIPEGSLIVVENFDRFSRADIDTAIDDVRQILRKGVSILTLGDGELYDKSALTDPVKLIKHIIIAERAHQESLVKQKRIAQVWNHKTQLARELKKPMGKQAPGWLELSDDGSHYIVDEDKASLVNIIYDKRLSGMSMFAICKWLNEQGYPTINQRKVRISKTKKPDGNWSALSVKHILTSRSVLGYLPAKISTEDRKTVLREEIESFYPQIVTDSKFYAVQQLLEETGKGKTSSGEHWLYVNILKGLIRCKCGLVMTPTGIRKPVYQGTYRCNGNKESRCSYGTVSRKLLDTQLCSRLFSKLSQLHDEATDTAKLDELQRRLNTVDSELEKLTETLIQLPNITQIQEALRVKQEEKDELIVQLSREKARVKSVSSLDLSGLDMESVEGRTEAQIIIKRLVKEIVVSGNEKLVDIYLHNGNMIRGFPLDGKDDHTLTLEEATDEMQSLDDMLIFGEPVTRIYPAGDMEEVDA

SEQ ID NO: 15832 - DNA, 50 bp, Escherichia coli; identical to SEQ ID NO: 3242
  source 1..50: mol_type = genomic DNA

SEQ ID NO: 15833 - DNA, 40 bp, Escherichia coli; identical to SEQ ID NO: 15663
  source 1..40: mol_type = genomic DNA

SEQ ID NO: 15834 - DNA, 50 bp, Escherichia coli; identical to SEQ ID NO: 3244
  source 1..50: mol_type = genomic DNA

SEQ ID NO: 15835 - DNA, 40 bp, Escherichia coli; identical to SEQ ID NO: 3245
  source 1..40: mol_type = genomic DNA

SEQ ID NO: 15836 - protein, 547 aa, Escherichia coli
MKLLVTYIRWSTKEQDSGDSLRRQTNLIDAFYAKHKEEYYLLPAHRYVDKGKSGFHQQHKNQGSDFRRMFENVMSGVIPEGSLIVVENFDRFSRADIDTAIDDVRQILRKGVSILTLGDGELYDKSALTDPVKLIKHIIIAERAHQESLVKQKRIAQVWNHKTQLARELKKPMGKQAPGWLELSEDGSHYIVDEDKASLVNIIYDKRLSGMSMFAICKWLNEQGYPTINQRKVRISKTKKPDGNWSALSVKHILTSRSVLGYLPAKISTEDRKTVLREEIEGFYPQIVTDSKFYAVQQLLEETGKGKTSSGEHWLYVNILKGLIRCKCGLVMTPTGIRKPVYQGTYRCNGNKESRCNYGTVSRKLLDTQLCSRLFSKLSQLHDEATDTARLDELQRRLNTVDSELEKLTETLIQLPNITQIQEALRVKQEEKDELIVQLSREKARVKSVSSLDLSGLDMESVEGRTEAQIIIKRLVKEIVVSGNEKLVDIYLHNGNMIRGFPLDGKDDHTLTLEEATDEMQSLDDMLIFGEPVTRIYPAGDMEEVDA

SEQ ID NO: 15837 - DNA, 50 bp, Escherichia coli; identical to SEQ ID NO: 3242
  source 1..50: mol_type = genomic DNA

SEQ ID NO: 15838 - DNA, 40 bp, Escherichia coli; identical to SEQ ID NO: 15663
  source 1..40: mol_type = genomic DNA

SEQ ID NO: 15839 - DNA, 50 bp, Escherichia coli; identical to SEQ ID NO: 3244
  source 1..50: mol_type = genomic DNA

SEQ ID NO: 15840 - DNA, 40 bp, Escherichia coli; identical to SEQ ID NO: 3245
  source 1..40: mol_type = genomic DNA

SEQ ID NO: 15841 - protein, 547 aa, Escherichia coli
MKLLVTYIRWSTKEQDSGDSLRRQTNLIDAFYSKHKEEYYLLPAHRYVDKGKSGFHQQHKNQGSDFRRMFENVMSGVIPEGSLIVVENFDRFSRADIDTAIDDVRQILRKGVSILTLGDGELYDKSALTDPVKLIKHIIIAERAHQESLVKQKRIAQVWNHKTQLARELKKPMGKQAPGWLELSEDGSHYIVDEDKASLVNIIYDKRLSGMSMFAICKWLNEQGYPTINQRKVRISKTKKPDGNWSALSVKHILTSRSVLGYLPAKISTEDRKTVLREEIESFYPQIVTDSKFYAVQQLLEETGKGKTSSGEHWLYVNILKGLIRCKCGLVMTPTGIRKPVYQGTYRCNGNKESRCSYGTVSRKLLDTQLCSRLFSKLSQLHDEATDTAKLDELQRRLNTVDGELEKLTETLIQLPNITQIQEALRVKQEEKDELIVQLSREKARVKSVSSLDLSGLDMESVEGRTEAQIIIKRLVKEIVVSGNEKLVDIYLHNGNMIRGFPLDGKDDHTLTLEEATDEMQSLDDMLIFGEPVTRIYPAGDMEEVDA

SEQ ID NO: 15842 - DNA, 50 bp, Escherichia coli; identical to SEQ ID NO: 3242
  source 1..50: mol_type = genomic DNA

SEQ ID NO: 15843 - DNA, 40 bp, Escherichia coli; identical to SEQ ID NO: 15663
  source 1..40: mol_type = genomic DNA

SEQ ID NO: 15844 - DNA, 50 bp, Escherichia coli; identical to SEQ ID NO: 3244
  source 1..50: mol_type = genomic DNA

SEQ ID NO: 15845 - DNA, 40 bp, Escherichia coli; identical to SEQ ID NO: 3245
  source 1..40: mol_type = genomic DNA

SEQ ID NO: 15846 - protein, 547 aa, Escherichia coli
MKLLVTYIRWSTKEQDSGDSLRRQTNLIDAFYSKHKEEYYLLPAHRYVDKGKSGFHQQHKAQGSDFRRMFENVMSGAIPEGSLIVVENFDRFSRADIDTAIDDVRQILRKGVSILTLGDGELYDKSALTDPVKLIKHIIIAERAHQESLVKQKRIAQVWNHKTQLARELKKPMGKQAPGWLELSEDGSHYIVDEDKASLVNIIYDKRLSGMSMFAICKWLNEQGYPTINQRKVRISKTKKPDGNWSALSVKHILTSRSVLGYLPAKISSEDRKTVLREEIESFYPQIVTDSKFYAVQRLLEETGKGKTSSGEHWLYVNILKGLIRCRCGLVMTPTGIRKPVYQGTYRCNGNKESRCSYGTVSRKLLDTQLCSRLFSKLSQLHDEATDTAKLDEMQRRLNTVDGELEKLTETLIQLPNITQIQEALRVKQEEKDELIVQLSREKARVKSVSSLDLSGLDMESVEGRTEAQIIIKRLVKEIVVSGNEKLVDIYLHNGNMIRGFPLDGKDDHTLTLEEATDEMQSLDDMLIFGEPVTRIYPAGDMEEVDA

SEQ ID NO: 15847 - DNA, 50 bp, Escherichia coli; identical to SEQ ID NO: 3242
  source 1..50: mol_type = genomic DNA

SEQ ID NO: 15848 - DNA, 40 bp, Escherichia coli; identical to SEQ ID NO: 15663
  source 1..40: mol_type = genomic DNA

SEQ ID NO: 15849 - DNA, 50 bp, Escherichia coli; identical to SEQ ID NO: 3244
  source 1..50: mol_type = genomic DNA

SEQ ID NO: 15850 - DNA, 40 bp, Escherichia coli; identical to SEQ ID NO: 3245
  source 1..40: mol_type = genomic DNA

SEQ ID NO: 15851 - protein, 547 aa, Escherichia coli
MKLLVTYIRWSTKEQDSGDSLRRQTNLIDAFYSKHKNDYYLLPAHRYVDKGKSGFHQQHKAQGSDFRRMFENVMSGAIPEGSLIVVENFDRFSRADIDTAIDDVRQILRKGVSILTLGDGELYDKSALTDPVKLIKHIIIAERAHQESLVKQKRIAQVWNHKTQLARELKKPMGKQAPGWLELSEDGSHYIVDEDKASLVNIIYDKRLSGMSMFAICKWLNEQGYPTINQRKVRISKTKKPDGNWSALSVKHILTSRSVLGYLPAKISTEDRKTVLREEIEGFYPQIVTDSKFYAVQQLLEETGKGKTSSGEHWLYVNILKGLIRCKCGLVMTPTGIRKPVYQGTYRCNGNKESRCNYGTVSRKLLDTQLCSRLFSKLSQLHDEATDTAKLDELQRRLNTVDSELEKLTETLIQLPNITQIQEALRVKQEEKDELIVQLSREKARVKSVSSLDLSGLDMESVEGRTEAQIIIKRMVKEIVVSGNEKLVDIYLHNGNMIRGFPLDGKDDHTLTLEEATDEMQSLDDMLIFGEPVTRIYPAGDMEEVDA

SEQ ID NO: 15852 - DNA, 50 bp, Escherichia coli; identical to SEQ ID NO: 3242
  source 1..50: mol_type = genomic DNA

SEQ ID NO: 15853 - DNA, 40 bp, Escherichia coli; identical to SEQ ID NO: 15663
  source 1..40: mol_type = genomic DNA

SEQ ID NO: 15854 - DNA, 50 bp, Escherichia coli; identical to SEQ ID NO: 3244
  source 1..50: mol_type = genomic DNA

SEQ ID NO: 15855 - DNA, 40 bp, Escherichia coli; identical to SEQ ID NO: 3245
  source 1..40: mol_type = genomic DNA

SEQ ID NO: 15856 - protein, 547 aa, Escherichia coli
MKLLVTYIRWSTKEQDSGDSLRRQTNLIDAFYSKHKEEYYLLPAHRYVDKGKSGFHQQHKNQGSDFRRMFENVMSGVIPEGSLIVVENFDRFSRADIDTAIDDVRQILRKGVSILTLGDGELYDKSALTDPVKLIKHIIIAERAHQESLVKQKRIAQVWNHKTQLARELKKPMGKQAPGWLELSEDGSHYIVDEDKASLVNIIYDKRLSGMSMFAICKWLNEQGYPTINQRKVRISKTKKPDGNWSALSVKHILTSRSVLGYLPAKISTEDRKTVLREEIEGFYPQIVTDSKFYAVQQLLEETGKGKTSSGDHWLYVNILKGIIRCKCGLVMTPTGIRKPVYQGTYRCNGNKESRCSYGTVSRKLLDTQLCSRLFSKLSQLHDEATDTAKLDELQRRLNTVDSELEKLTETLIQLPNITQIQEALRVKQEEKDELIVQLSREKARVKSVSSLDLSGLDMESVEGRTEAQIIIKRLVKEIVVSGNEKLVDIYLHNGNMIRGFPLDGKDDHTLTLEEATDEMQSLDDMLIFGEPVTRIYPAGDMEEVDA

SEQ ID NO: 15857 - DNA, 50 bp, Escherichia coli; identical to SEQ ID NO: 3242
  source 1..50: mol_type = genomic DNA

SEQ ID NO: 15858 - DNA, 40 bp, Escherichia coli; identical to SEQ ID NO: 15663
  source 1..40: mol_type = genomic DNA

SEQ ID NO: 15859 - DNA, 50 bp, Escherichia coli; identical to SEQ ID NO: 3244
  source 1..50: mol_type = genomic DNA

SEQ ID NO: 15860 - DNA, 40 bp, Escherichia coli; identical to SEQ ID NO: 3245
  source 1..40: mol_type = genomic DNA

SEQ ID NO: 15861 - protein, 547 aa, Escherichia coli
MKLLATYIRWSTKEQDSGDSLRRQTNLIDAFYSKHKNDYYLLPAHRYVDKGKSGFHQQHKAQGSDFRRMFENVMSGAIPEGSLIVVENFDRFSRADIDTAIDDVRQILRKGVSILTLGDGELYDKSALTDPVKLIKHIIIAERAHQESLVKQKRIAQVWNHKTQLARELKKPMGKQAPGWLELSEDGSHYIVDEDKASLVNIIYDKRLSGMSMFAICKWLNEQGYPTINQRKVRISKTKKPDGNWSALSVKHILTSRSVLGYLPAKISTEDRKTVLREEIEGFYPQIVTDSKFYAVQQLLEETGKGKTSSGDHWLYVNILKGLIRCKCGLVMTPTGIRKPVYQGTYRCNGNKESRCSYGTVSRKLLDTQLCSRLFSKLSQLHDEATDTAKLDELQRRLNTVDSELEKLTETLIQLPNITQIQEALRVKQEEKDELIVQLSREKARVKSVSSLDLSGLDMESVEGRTEAQIIIKRLVKEIVVSGNEKLVDIYLHNGNMIRGFPLDGKDDHTLTLEEATDEMQSLDDMLIFGEPVTRIYPAGDMEEVDA

SEQ ID NO: 15862 - DNA, 50 bp, Escherichia coli; identical to SEQ ID NO: 3242
  source 1..50: mol_type = genomic DNA

SEQ ID NO: 15863 - DNA, 40 bp, Escherichia coli; identical to SEQ ID NO: 15663
  source 1..40: mol_type = genomic DNA

SEQ ID NO: 15864 - DNA, 50 bp, Escherichia coli; identical to SEQ ID NO: 3244
  source 1..50: mol_type = genomic DNA

SEQ ID NO: 15865 - DNA, 40 bp, Escherichia coli; identical to SEQ ID NO: 3245
  source 1..40: mol_type = genomic DNA

SEQ ID NO: 15866 - protein, 547 aa, Escherichia coli; identical to SEQ ID NO: 15796

SEQ ID NO: 15867 - DNA, 50 bp, Escherichia coli; identical to SEQ ID NO: 3242
  source 1..50: mol_type = genomic DNA

SEQ ID NO: 15868 - DNA, 40 bp, Escherichia coli; identical to SEQ ID NO: 15663
  source 1..40: mol_type = genomic DNA

SEQ ID NO: 15869 - DNA, 50 bp, Escherichia coli; identical to SEQ ID NO: 3244
  source 1..50: mol_type = genomic DNA

SEQ ID NO: 15870 - DNA, 40 bp, Escherichia coli; identical to SEQ ID NO: 3245
  source 1..40: mol_type = genomic DNA

SEQ ID NO: 15871 - protein, 547 aa, Escherichia coli
MKLLVPYIRWSTKEQDSGDSLRRQTNLIDAFYAKHKDDYYLLPAHRYVDKGKSGFHQQHKNQGSDFRRMFENVMSGVIPEGSLIVVENFDRFSRADIDTAIDDVRQILRKGVSILTLGDGELYDKSALTDPVKLIKHIIIAERAHQESLVKQKRIAQVWNHKTQLARELKKPMGKQAPGWLELSEDGSHYIVDEDKASLVNIIYDKRLSGMSMFAICKWLNEQGYPTINQRKVRISKTKKPDGNWSALSVKHILTSRSVLGFLPAKISSEDRKTVLREEIEGFYPQIVTDSKFYAVQQLLEETGKGKTSSGDHWLYVNILKGLIRCKCGLVMTPTGIRKPVYQGTYRCNGNKESRCSYGTVSRKLLDTQLCSRLFSKLSQLHDEATDTAKLDELQRRLNTVDSELEKLTETLIQLPNITQIQEALRVKQGEKDELIVQLSREKARVKSVSSLNLSGLDMESVEGRTEAQIIIKRLVKEIVVSGNEKLVDIYLHNGNMIRGFPLDGKDDHTLTLEEATDEMQSLDDMLIFGEPVTRIYPAGDMEEVDA

SEQ ID NO: 15872 - DNA, 50 bp, Escherichia coli; identical to SEQ ID NO: 3242
  source 1..50: mol_type = genomic DNA

SEQ ID NO: 15873 - DNA, 40 bp, Escherichia coli; identical to SEQ ID NO: 15663
  source 1..40: mol_type = genomic DNA

SEQ ID NO: 15874 - DNA, 50 bp, Escherichia coli; identical to SEQ ID NO: 3244
  source 1..50: mol_type = genomic DNA

SEQ ID NO: 15875 - DNA, 40 bp, Escherichia coli; identical to SEQ ID NO: 3245
  source 1..40: mol_type = genomic DNA

SEQ ID NO: 15876 - protein, 547 aa, Escherichia coli
MKLLVPYIRWSTKEQDSGDSLRRQTNLIDAFYSKHKEEYYLLPAHRYVDKGKSGFHQQHKAQGSDFRRMFENVMSGAIPEGSLIVVENFDRFSRADIDTAIDDVRQILRKGVSILTLGDGELYDKSALTDPVKLIKHIIIAERAHQESLVKQKRIAQVWNHKTQLARELKKPMGKQAPGWLELSEDGSHYIVDEDKASLVNIIYDKRLSGMSMFAICKWLNEQGYPTINQRKVRISKTKKPDGNWSALSVKHILTSRSVLGYLPAKISSEDRKTVLREEIESFYPQIVTDSKFYAVQQLLEETGKGKTSSGEHWLYVNILKGLIRCKCGLVMTPTGIRKPVYQGTYRCNGNKESRCNYGTVSRKLLDTQLCSRLFSKLSQLHDEATDTAKLDELQRRLNTVDGELEKLTETLIQLPNITQIQEALRVKQGEKDELIVQLSREKARVKSVSSLDLSGLDMESVEGRTEAQIIIKRLVKEIVVSGNEKLVDIYLHNGNMIRGFPLDGKDDHTLTLEEATDEMQPLDDMLIFGEPVTRIYPAGDMEEVDA

SEQ ID NO: 15877 - DNA, 50 bp, Escherichia coli; identical to SEQ ID NO: 3242
  source 1..50: mol_type = genomic DNA

SEQ ID NO: 15878 - DNA, 40 bp, Escherichia coli; identical to SEQ ID NO: 15663
  source 1..40: mol_type = genomic DNA

SEQ ID NO: 15879 - DNA, 50 bp, Escherichia coli; identical to SEQ ID NO: 3244
  source 1..50: mol_type = genomic DNA

SEQ ID NO: 15880 - DNA, 40 bp, Escherichia coli; identical to SEQ ID NO: 3245
  source 1..40: mol_type = genomic DNA

SEQ ID NO: 15881 - protein, 547 aa, Escherichia coli
MKLLVTYIRWSTKEQDSGDSLRRQTNLIDAFYSKHKNDYYLLPAHRYVDKGKSGFHQQHKNQGSDFRRMFENVMSGAIPEGSLIVVENFDRFSRADIDTAIDDVRQILRKGVSILTLGDGELYDKSALTDPVKLIKHIIIAERAHQESLVKQKRIAQVWNHKTQLARELKKPMGKQAPGWLELSEDGSHYIVDEDKASLVNIIYDKRLSGMSMFAICKWLNEQGYPTINQRKVRISKTKKPDGNWSALSVKHILTSRSVLGYLPAKISSEDRKTVLREEIEGFYPQIVTDSKFYAVQQLLEETGKGKTSSGEHWLYVNILKGLIRCKCGLVMTPTGIRKPVYQGTYRCNGNKESRCSYGTVSRKLLDTQLCSRLFSKLSQLHDEATDTAKLDELQRRLNTVDSELEKLTETLIQLPNITQIQEALRVKQGEKDELIVQLSREKARVKSVSSLNLSGLDMESVEGRTEAQIIIKRLVKEIVVSGNEKLVDIYLHNGNMIRGFPLDGKDDHTLTLEEATDEMQSLDDMLIFGEPVTRIYPAGDMEEVDA

SEQ ID NO: 15882 - DNA, 50 bp, Escherichia coli; identical to SEQ ID NO: 3242
  source 1..50: mol_type = genomic DNA

SEQ ID NO: 15883 - DNA, 40 bp, Escherichia coli; identical to SEQ ID NO: 15663
  source 1..40: mol_type = genomic DNA

SEQ ID NO: 15884 - DNA, 50 bp, Escherichia coli; identical to SEQ ID NO: 3244
  source 1..50: mol_type = genomic DNA

SEQ ID NO: 15885 - DNA, 40 bp, Escherichia coli; identical to SEQ ID NO: 3245
  source 1..40: mol_type = genomic DNA

SEQ ID NO: 15886 - protein, 547 aa, Escherichia coli; identical to SEQ ID NO: 9341

SEQ ID NO: 15887 - DNA, 50 bp, Escherichia coli; identical to SEQ ID NO: 3242
  source 1..50: mol_type = genomic DNA

SEQ ID NO: 15888 - DNA, 40 bp, Escherichia coli; identical to SEQ ID NO: 15663
  source 1..40: mol_type = genomic DNA

SEQ ID NO: 15889 - DNA, 50 bp, Escherichia coli; identical to SEQ ID NO: 3244
  source 1..50: mol_type = genomic DNA

SEQ ID NO: 15890 - DNA, 40 bp, Escherichia coli; identical to SEQ ID NO: 3245
  source 1..40: mol_type = genomic DNA

SEQ ID NO: 15891 - protein, 547 aa, Escherichia coli
MKLLVTYIRWSTKEQDSGDSLRRQTNLIDAFYSKHKNDYYLLPAHRYVDKGKSGFHQQHKAQGSDFRRMFENVMSGAIPEGSLIVVENFDRFSRADIDTAIDDVRQILRKGVSILTLGDGELYDKSALTDPVKLIKHIIIAERAHQESLVKQKRIAQVWNHKTQLARELKKPMGKQAPGWLELSDDGSHYIVDEDKASLVNIIYDKRLSGMSMFAICKWLNEQGYPTINQRKVRISKTKKPDGNWSALSVKHILTSRSVLGYLPAKISTEDRKTVLREEIEGFYPQIVTDSKFYAVQQLLEETGKGKTSSGEHWLYVNILKGLIRCKCGLVMTPTGIRKPVYQGTYRCNGNKESRCSYGTVSRKLLDTQLCSRLFSKLSQLHDEATDTAKLDELQRRLNTVDSELEKLTETLIQLPNITQIQEALRVKQEEKDELIVQLSREKARVKSVSSLDLSGLDMESVEGRTEAQIIIKRLVKEIVVSGNEKLVDIYLHNGNMIRGFPLDGKDDHTLTLEEATDEMQPLDDMLIFGEPVTRIYPAGDMEEVDA

SEQ ID NO: 15892 - DNA, 50 bp, Escherichia coli; identical to SEQ ID NO: 10667
  source 1..50: mol_type = genomic DNA

SEQ ID NO: 15893 - DNA, 40 bp, Escherichia coli; identical to SEQ ID NO: 15663
  source 1..40: mol_type = genomic DNA

SEQ ID NO: 15894 - DNA, 50 bp, Escherichia coli; identical to SEQ ID NO: 15774
  source 1..50: mol_type = genomic DNA

SEQ ID NO: 15895 - DNA, 40 bp, Escherichia coli; identical to SEQ ID NO: 3245
  source 1..40: mol_type = genomic DNA

SEQ ID NO: 15896 - protein, 547 aa, Escherichia coli
MKLLVTYIRWSTKEQDSGDSLRRQTNLIDAFYSKHKNDYYLLPAHRYVDKGKSGFHQQHKAQGSDFRRMFENVMSGAIPEGSLIVVENFDRFSRADIDTAIDDVRQILRKGVSILTLGDGELYDKSALTDPVKLIKHIIIAERAHQESLVKQKRIAQVWNHKTQLARELKKPMGKQAPGWLELSEDGSHYIVDEDKASLVNIIYDKRLSGMSMFAICKWLNEQGYPTINQRKVRISKTKKPDGNWSALSVKHILTSRSVLGYLPAKISTEDRKTVLREEIESFYPRIVTDSKFYAVQQLLEETGKGKTSSGDHWLYVNILKGLIRCKCGLVMTPTGIRKPVYQGTYRCNGNKESRCSYGTVSRKLLDTQLCSRLFSKLSQLHDEATDTAKLDELQRRLNTVDSELEKLTETLIQLPNITQIQEALRAKQEEKDELIVQLSREKARVKSVSSLDLSGLDMESVEGRTEAQIIIKRLVKEIVVSGNEKLVDIYLHNGNIIRGFPLDGKDDHTLTLEEATDEMQSLDDMLIFGEPVTRIYPAGDMEEVDA

SEQ ID NO: 15897 - DNA, 50 bp, Escherichia coli; identical to SEQ ID NO: 3242
  source 1..50: mol_type = genomic DNA

SEQ ID NO: 15898 - DNA, 40 bp, Escherichia coli; identical to SEQ ID NO: 15663
  source 1..40: mol_type = genomic DNA

SEQ ID NO: 15899 - DNA, 50 bp, Escherichia coli; identical to SEQ ID NO: 3244
  source 1..50: mol_type = genomic DNA

SEQ ID NO: 15900 - DNA, 40 bp, Escherichia coli; identical to SEQ ID NO: 3245
  source 1..40: mol_type = genomic DNA

SEQ ID NO: 15901 - protein, 547 aa, Escherichia coli
MKLLVTYIRWSTREQDSGDSLRRQTNLIDAFYAKHKDDYYLLPAHRYVDKGKSGFHQQHKAQGSDFRRMFENVMSGVIPEGSLIVVENFDRFSRADIDTAIDDVRQILRKGVSILTLGDGELYDKSALTDPVKLIKHIIIAERAHQESLVKQKRIAQVWNHKTQLARELKKPMGKQAPGWLELSEDGSHYIVDEDKASLVNIIYDKRLSGMSMFAICKWLNEQGYPTINQRKVRISKTKKPDGNWSALSVKHILTSRSVLGYLPAKISSEDRKTVLREEIEGFYPQIVTDSKFYAVQQLLEETGKGKTSSGEHWLYVNILKGLIRCKCGLVMTPTGIRKPVYQGTYRCNGNKESRCSYGTVSRKLLDTQLCSRLFSKLSQLHDEATDTARLDELQRRLNTVDGELEKLTETLIQLPNITQIQEALRVKQEEKDELIVQLSREKARVKSVSSLDLSGLDMESVEGRTEAQIIIKRLVKEIVVSGNEKLVDIYLHNGNMIRGFPLDGKDDHTLTLEEATDEMQSLDDMLIFGEPVTRIYPAGDMEEVDA

SEQ ID NO: 15902 - DNA, 50 bp, Escherichia coli; identical to SEQ ID NO: 3242
  source 1..50: mol_type = genomic DNA

SEQ ID NO: 15903 - DNA, 40 bp, Escherichia coli; identical to SEQ ID NO: 15663
  source 1..40: mol_type = genomic DNA

SEQ ID NO: 15904 - DNA, 50 bp, Escherichia coli; identical to SEQ ID NO: 3244
  source 1..50: mol_type = genomic DNA

SEQ ID NO: 15905 - DNA, 40 bp, Escherichia coli; identical to SEQ ID NO: 3245
  source 1..40: mol_type = genomic DNA

SEQ ID NO: 15906 - protein, 547 aa, Escherichia coli
MKLLVPYIRWSTKEQDSGDSLRRQTNLIDAFYSKHKNDYYLLPAHRYVDKGKSGFHQQHKNQGSDFRRMFENVMSGAIPEGSLIVVENFDRFSRADIDTAIDDVRQILRKGVSILTLGDGELYDKSALTDPVKLIKHIIIAERAHQESLVKQKRIAQVWNHKTQLARELKKPMGKQAPGWLELSEDGSHYIVDEDKASLVNIIYDKRLSGMSMFAICKWLNEQGYPTINQRKVRISKTKKPDGNWSALSVKHILTSRSVLGYLPAKISTEDRKTVLREEIESFYPQIVTDSKFYAVQQLLEETGKGKTSSGEHWLYVNILKGLIRCKCGLVMTPTGIRKPVYQGTYRCNGNKESRCNYGTVSRKLLDTQLCSRLFSKLSQLHDEATDTAKLDELQRRLNTVDGELEKLTETLIQLPNITQIQEALRVKQEEKDELIVQLSREKARVKSVSSLDLSGLDMESVEGRTEAQIIIKRLVKEIVVSGNEKLVDIYLHNGNMIRGFPLDGKDDHTLTLEEATDEMQSLDDMLIFGEPVTRIYPAGDMEEVDA

SEQ ID NO: 15907 - DNA, 50 bp, Escherichia coli; identical to SEQ ID NO: 3242
  source 1..50: mol_type = genomic DNA

SEQ ID NO: 15908 - DNA, 40 bp, Escherichia coli; identical to SEQ ID NO: 15663
  source 1..40: mol_type = genomic DNA

SEQ ID NO: 15909 - DNA, 50 bp, Escherichia coli; identical to SEQ ID NO: 3244
  source 1..50: mol_type = genomic DNA

SEQ ID NO: 15910 - DNA, 40 bp, Escherichia coli; identical to SEQ ID NO: 3245
  source 1..40: mol_type = genomic DNA

SEQ ID NO: 15911 - protein, 547 aa, Escherichia coli
MKLLVPYIRWSTKEQDSGDSLRRQTNLIDAFYSKHKEEYYLLPAHRYVDKGKSGFHQQHKAQGSDFKRMFENVMSGAIPEGSLIVVENFDRFSRADIDTAIDDVRQILRKGVSILTLGDGELYDKSALTDPVKLIKHIIIAERAHQESLVKQKRIAQVWNHKTQLARELKKPMGKQAPGWLELSEDGSHYIVDEDKASLVNIIYDKRLSGMSMFAICKWLNEQGYPTINQRKVRISKTKKPDGNWSALSVKHILTSRSVLGFLPAKLSSEDRKTVLREEIEGFYPQIVTDSKFYAVQQLLEETGKGKTSSGDHWLYVNILKGIIRCRCGLVMTPTGIRKPVYQGTYRCNGNKESRCSYGTVSRKLLDTQLCSRLFSKLSQLHDEATDTAKLDELQRRLNTVDGELEKLTETLIQLPNITQIQEALRVKQEEKDELIVQLSREKARVKSVSSLDLSGLDMESVEGRTEAQIIIKRLVKEIVVSGNEKLVDIYLHNGNMIRGFPLDGKDDHTLTLEEATDEMQSLDDMLIFGEPVTRIYPAGDMEEVDA

SEQ ID NO: 15912 - DNA, 50 bp, Escherichia coli; identical to SEQ ID NO: 3242
  source 1..50: mol_type = genomic DNA

SEQ ID NO: 15913 - DNA, 40 bp, Escherichia coli; identical to SEQ ID NO: 15663
  source 1..40: mol_type = genomic DNA

SEQ ID NO: 15914 - DNA, 50 bp, Escherichia coli; identical to SEQ ID NO: 3244
  source 1..50: mol_type = genomic DNA

SEQ ID NO: 15915 - DNA, 40 bp, Escherichia coli; identical to SEQ ID NO: 3245
  source 1..40: mol_type = genomic DNA

SEQ ID NO: 15916 - protein, 547 aa, Escherichia coli
MKLLVTYIRWSTKEQDSGDSLRRQTNLIDAFYAKHKDDYYLLPAHRYVDKGKSGFHQQHKNQGSDFRRMFENVMSGAIPEGSLIVVENFDRFSRADIDTAIDDVRQILRKGVSILTLGDGELYDKSALTDPVKLIKHIIIAERAHQESLVKQKRIAQVWNHKTQLARELKKPMGKQAPGWLELSEDGSHYIVDEDKASLVNIIYDKRLSGMSMFAICKWLNEQGYPTINQRKVRISKTKKPDGNWSALSVKHILTSRSVLGYLPAKISSEDRKTVLREEIEGFYPQIVTDSKFYAVQQLLEETGKGKTSSGDHWLYVNILKGIIRCKCGLVMTPTGIRKPAYQGTYRCNGNKESRCSYGTVSRKLLDTQLCSRLFSKLSQLHDEATDTAKLDELQRRLNTVDGELEKLTETLIQLPNITQIQEALRVKQEEKDELIVQLSREKARVKSVSSLDLSGLDMESVEGRTEAQIIIKRLVKEIVVSGNEKLVDIYLHNGNMIRGFPLDGKDDHTLTLEEATDEMQPLDDMLIFGEPVTRIYPAGDMEEVDA

SEQ ID NO: 15917 - DNA, 50 bp, Escherichia coli; identical to SEQ ID NO: 3242
  source 1..50: mol_type = genomic DNA

SEQ ID NO: 15918 - DNA, 40 bp, Escherichia coli; identical to SEQ ID NO: 15663
  source 1..40: mol_type = genomic DNA

SEQ ID NO: 15919 - DNA, 50 bp, Escherichia coli; identical to SEQ ID NO: 3244
  source 1..50: mol_type = genomic DNA

SEQ ID NO: 15920 - DNA, 40 bp, Escherichia coli; identical to SEQ ID NO: 3245
  source 1..40: mol_type = genomic DNA

SEQ ID NO: 15921 - protein, 547 aa, Escherichia coli
MKLLVTYIRWSTKEQDSGDSLRRQTNLIDAFYSKHKEEYYLLPAHRYVDKGKSGFHQQHKNQGSDFRRMFENVMSGVIPEGSLIVVENFDRFSRADIDTAIDDVRQILRKGVSILTLGDGELYDKSALTDPVKLIKHIIIAERAHQESLVKQKRIAQVWNHKTQLARELKKPMGKQAPGWLELSEDGSHYIVDEDKASLVNIIYDKRLSGMSMFAICKWLNEQGYPTINQRKVRISKTKKPDGNWSALSVKHILTSRSVLGYLPAKISTEDRKTVLREEIESFYPQIVTDSKFYAVQQLLEETGKGKTSSGEHWLYVNILKGLIRCKCGLVMTPTGIRKPVYQGTYRCNGNKESRCNYGTVSRKLLDTQLCSRLFSKLSQLHDEATDTAKLDELQRRLNTVDGELEKLTETLIQLPNITQIQEALRVKQEEKDELIVQLSREKARVKSVSSLDLSGLDMESVEGRTEAQIIIKRLVKEIVVSGNEKLVDIYLHNGNMIRGFPLDGKDDHTLTLEEATDEMQSLDDMLIFGEPVTRIYPAGDMEEVDA

SEQ ID NO: 15922 - DNA, 50 bp, Escherichia coli; identical to SEQ ID NO: 3242
  source 1..50: mol_type = genomic DNA

SEQ ID NO: 15923 - DNA, 40 bp, Escherichia coli; identical to SEQ ID NO: 15663
  source 1..40: mol_type = genomic DNA

SEQ ID NO: 15924 - DNA, 50 bp, Escherichia coli; identical to SEQ ID NO: 3244
  source 1..50: mol_type = genomic DNA

SEQ ID NO: 15925 - DNA, 40 bp, Escherichia coli; identical to SEQ ID NO: 3245
  source 1..40: mol_type = genomic DNA

SEQ ID NO: 15926 - protein, 547 aa, Escherichia coli
MKLLVPYIRWSTKEQDSGDSLRRQTNLIDAFYSKHKNDYYLLPAHRYVDKGKSGFHQQHKNQGSDFRRMFENVMSGVIPEGSLIVVENFDRFSRADIDTAIDDVRQILRKGVSILTLGDGELYDKSALTDPVKLIKHIIIAERAHQESLVKQKRIAQVWNHKTQLARELKKPMGKQAPGWLELSEDGSHYIVDEDKASLVNIIYDKRLSGMSMFAICKWLNEQGYPTINQRKVRISKTKKPDGNWSALSVKHILTSRSVLGYLPAKISSEDRKTVLREEIESFYPRIVTDSKFYAVQQLLEETGKGKTSSGDHWLYVNILKGIIRCKCGLVMTPTGIRKPVYQGTYRCNGNKESRCSYGTVSRKLLDTQLCSRLFSKLSQLHDEATDTAKLDELQRRLNTVDGELEKLTETLIQLPNITQIQEALRVKQEEKDELIVQLSREKARVKSVSSLDLSGLDMESVEGRTEAQIIIKRLVKEIVVSGNEKLVDIYLHNGNMIRGFPLDGKDDHTLTLEEATDEMQPLDDMLIFGEPVTRIYPAGDMEEVDA

SEQ ID NO: 15927 - DNA, 50 bp, Escherichia coli; identical to SEQ ID NO: 3242
  source 1..50: mol_type = genomic DNA

SEQ ID NO: 15928 - DNA, 40 bp, Escherichia coli; identical to SEQ ID NO: 15663
  source 1..40: mol_type = genomic DNA

SEQ ID NO: 15929 - DNA, 50 bp, Escherichia coli; identical to SEQ ID NO: 3244
  source 1..50: mol_type = genomic DNA

SEQ ID NO: 15930 - DNA, 40 bp, Escherichia coli; identical to SEQ ID NO: 3245
  source 1..40: mol_type = genomic DNA

SEQ ID NO: 15931 - protein, 547 aa, Escherichia coli
MKLLVTYIRWSTKEQDSGDSLRRQTNLIDAFYAKHKDDYYLLPAHRYVDKGKSGFHQQHKNQGSDFRRMFENVMSGVIPEGSLIVVENFDRFSRADIDTAIDDVRQILRKGVSILTLGDGELYDKSALTDPVKLIKHIIIAERAHQESLVKQKRIAQVWNHKTQLARELKKPMGKQAPGWLELSEDGSHYIVDEDKASLVNIIYDKRLSGMSMFAICKWLNEQGYPTINQRKVRISKTKKPDGNWSALSVKHILTSRSVLGYLPAKISTEDRKTVLREEIESFYPQIVTDSKFYAVQQLLEETGKGKTSSGEHWLYVNILKGLIRCKCGLVMTPTGIRKPVYQGTYRCNGNKESRCSYGTVSRKLLDTQLCSRLFSKLSQLHDEATDTAKLDELQRRLNTVDSELEKLTETLIQLPNITQIQEALRVKQEEKDELIVQLSREKARVKSVSSLDLSGLDMESVEGRTEAQIIIKRLVKEIVVSGNEKLVDIYLHNGNMIRGFPLDGKDDHTLTLEEATDEMQSLDDMLIFGEPVTRIYPAGDMEEVDA

SEQ ID NO: 15932 - DNA, 50 bp, Escherichia coli; identical to SEQ ID NO: 3242
  source 1..50: mol_type = genomic DNA

SEQ ID NO: 15933 - DNA, 40 bp, Escherichia coli; identical to SEQ ID NO: 15663
  source 1..40: mol_type = genomic DNA

SEQ ID NO: 15934 - DNA, 50 bp, Escherichia coli; identical to SEQ ID NO: 3244
  source 1..50: mol_type = genomic DNA

SEQ ID NO: 15935 - DNA, 40 bp, Escherichia coli; identical to SEQ ID NO: 3245
  source 1..40: mol_type = genomic DNA

SEQ ID NO: 15936 - protein, 547 aa, Escherichia coli
MKLLVPYIRWSTKEQDSGDSLRRQTNLIDAFYAKHKDDYYLLPAHRYVDKGKSGFHQQHKAQGSDFRRMFENVMSGAIPEGSLIVVENFDRFSRADIDTAIDDVRQILRKGVSILTLGDGELYDKSALTDPVKLIKHIIIAERAHQESLVKQKRIAQVWNHKTQLARELKKPMGKQAPGWLELSEDGSHYIVDEDKASLVNIIYDKRLSGMSMFAICKWLNEQGYPTINQRKVRISKTKKPDGNWSALSVKHILTSRSVLGYLPAKISTEDRKTVLREEIEGFYPQIVTDSKFYAVQQLLEETGKGKTSSGDHWLYVNILKGLIRCKCGLVMTPTGIRKPVYQGTYRCNGNKESRCNYGTVSRKLLDTQLCSRLFSKLSQLHDEATDTARLDELQRRLNTVDGELEKLTETLIQLPNITQIQEALRVKQGEKDELIVQLSREKARVKSVSSLDLSGLDMESVEGRTEAQIIIKRLVKEIVVSGNEKLVDIYLHNGNMIRGFPLDGKDDHTLTLEEATDEMQSLDDMLIFGEPVTRIYPAGDMEEVDA

SEQ ID NO: 15937 - DNA, 50 bp, Escherichia coli; identical to SEQ ID NO: 3242
  source 1..50: mol_type = genomic DNA

SEQ ID NO: 15938 - DNA, 40 bp, Escherichia coli; identical to SEQ ID NO: 15663
  source 1..40: mol_type = genomic DNA

SEQ ID NO: 15939 - DNA, 50 bp, Escherichia coli; identical to SEQ ID NO: 3244
  source 1..50: mol_type = genomic DNA

SEQ ID NO: 15940 - DNA, 40 bp, Escherichia coli; identical to SEQ ID NO: 3245
  source 1..40: mol_type = genomic DNA

SEQ ID NO: 15941 - protein, 547 aa, Escherichia coli
MKLLVTYIRWSTKEQDSGDSLRRQTNLIDAFYSKHKNDYYLLPAHRYVDKGKSGFHQQHKAQGSDFRRMFENVMSGAIPEGSLIVVENFDRFSRADIDTAIDDVRQILRKGVSILTLGDGELYDKSALTDPVKLIKHIIIAERAHQESLVKQKRIAQVWNHKTQLARELKKPMGKQAPGWLELSEDGSHYIVDEDKASLVNIIYDKRLSGMSMFAICKWLNEQGYPTINQRKVRISKTKKPDGNWSALSVKHILTSRSVLGYLPAKISTEDRKTVLREEIEGFYPQIVTDSKFYAVQQLLEETGKGKTSSGDHWLYVNILKGLIRCKCGLVMTPTGIRKPVYQGTYRCNGNKESRCSYGTVSRKLLDTQLCSRLFSKLSQLHDEATDTAKLDELQRRLNTVDSELEKLTETLIQLPNITQIQEALRVKQEEKDELIVQLSREKARVKSVSSLDLSGLDMESVEGRTEAQIIIKRLVKEIVVSGNEKLVDIYLHNGNMIRGFPLDGKDDHTLTLEEATDEMQSLDDMLIFGEPVTRIYPAGDMEEVDA

SEQ ID NO: 15942 - DNA, 50 bp, Escherichia coli; identical to SEQ ID NO: 3242
  source 1..50: mol_type = genomic DNA

SEQ ID NO: 15943 - DNA, 40 bp, Escherichia coli; identical to SEQ ID NO: 15663
  source 1..40: mol_type = genomic DNA

SEQ ID NO: 15944 - DNA, 50 bp, Escherichia coli; identical to SEQ ID NO: 3244
  source 1..50: mol_type = genomic DNA

SEQ ID NO: 15945 - DNA, 40 bp, Escherichia coli; identical to SEQ ID NO: 3245
  source 1..40: mol_type = genomic DNA

SEQ ID NO: 15946 - protein, 547 aa, Escherichia coli
MKLLVPYIRWSTKEQDSGDSLRRQTNLIDAFYSKHKNDYYLLPAHRYVDKGKSGFHQQHKNQGSDFRRMFENVMSGAIPEGSLIVVENFDRFSRADIDTAIDDVRQILRKGVSILTLGDGELYDKSALTDPVKLIKHIIIAERAHQESLVKQKRIAQVWNHKTQLARELKKPMGKQAPGWLELSEDGSYYIVDEDKASLVNIIYDKRLSGMSMFAICKWLNEQGYPTINQRKVRISKTKKPDGNWSALSVKHILTSRSVLGYLPAKISTEDRKTVLREEIEGFYPQIVTDSKFYAVQQLLEETGKGKTSSGDHWLYVNILKGLIRCKCGLVMTPTGIRKPVYQGTYRCNGNKESRCNYGTVSRKLLDTQLCSRLFSKLSQLHDEATDTAKLDEIQRRLNTVDSELEKLTETLIQLPNITQIQEALRVKQEEKDELIVQLSREKARVKSVSSLDLSGLDMESVEGRTEAQIIIKRLVKEIVVSGNEKLVDIYLHNGNMIRGFPLDGKDDHTLTLEEATDEMQSLDDMLIFGEPVTRIYPAGDMEEVDA

SEQ ID NO: 15947 - DNA, 50 bp, Escherichia coli; identical to SEQ ID NO: 3502
  source 1..50: mol_type = genomic DNA

SEQ ID NO: 15948 - DNA, 40 bp, Escherichia coli; identical to SEQ ID NO: 15663
  source 1..40: mol_type = genomic DNA

SEQ ID NO: 15949 - DNA, 50 bp, Escherichia coli; identical to SEQ ID NO: 15659
  source 1..50: mol_type = genomic DNA

SEQ ID NO: 15950 - DNA, 40 bp, Escherichia coli; identical to SEQ ID NO: 3245
  source 1..40: mol_type = genomic DNA

SEQ ID NO: 15951 - protein, 547 aa, Escherichia coli
MKLLVTYIRWSTKEQDSGDSLRRQTNLIDAFYAKHKDDYYLLPAHRYVDKGKSGFHQQHKNQGSDFRRMFENVMSGAIPEGSLIVVENFDRFSRADIDTAIDDVRQILRKGVSILTLGDGELYDKSALTDPVKLIKHIIIAERAHQESLVKQKRIAQVWNHKTQLARELKKPMGKQAPGWLELSEDGSHYIVDEDKASLVNIIYDKRLSGMSMFAICKWLNEQGYPTINQRKVRISKTKKPDGNWSALSVKHILTSRSVLGYLPAKISSEDRKTVLREEIEGFYPQIVTDSKFYAVQQLLEETGKGKTSSGEHWLYVNILKGLIRCKCGLVMTPTGIRKPVYQGTYRCNGNKESRCSYGTVSRKLLDTQLCSRLFSKLSQLHDEATDTAKLDELQRRLNTVDSELEKLTETLIQLPNITQIQEALRVKQGEKDELIVQLSREKARVKSVSSLNLSGLDMESVEGRTEAQIIIKRLVKEIVVSGNEKLVDIYLHNGNMIRGFPLDGKDDHTLTLEEATDEMQSLDDMLIFGEPVTRIYPAGDMEEVDA

SEQ ID NO: 15952 - DNA, 50 bp, Escherichia coli; identical to SEQ ID NO: 3242
  source 1..50: mol_type = genomic DNA

SEQ ID NO: 15953 - DNA, 40 bp, Escherichia coli; identical to SEQ ID NO: 15663
  source 1..40: mol_type = genomic DNA

SEQ ID NO: 15954 - DNA, 50 bp, Escherichia coli; identical to SEQ ID NO: 3244
  source 1..50: mol_type = genomic DNA

SEQ ID NO: 15955 - DNA, 40 bp, Escherichia coli; identical to SEQ ID NO: 3245
  source 1..40: mol_type = genomic DNA

SEQ ID NO: 15956 - protein, 547 aa, Escherichia coli
MKLLVTYIRWSTKEQDSGDSLRRQTNLIDAFYSKHKNDYYLLPAHRYVDKGKSGFHQQHKNQGSDFRRMFENVMSGVIPEGSLIVVENFDRFSRADIDTAIDDVRQILRKGVSILTLGDGELYDKSALTDPVKLIKHIIIAERAHQESLVKQKRIAQVWNHKTQLARELKKPMGKQAPGWLELSEDGSHYIVDEDKASLVNIIYDKRLSGMSMFAICKWLNEQGYPTINQRKVRISKTKKPDGNWSALSVKHILTSRSVLGYLPAKISTEDRKTVLREEIESFYPQIVTDSKFYAVQQLLEETGKGKTSSGEHWLYVNILKGLIRCKCGLVMTPTGIRKPVYQGTYRCNGNKESRCSYGTVSRKLLDTQLCSRLFSKLSQLHDEATDTAKLDELQRRLNTVDSELEKLTETLIQLPNITQIQEALRVKQGEKDELIVQLSREKARLKSVSSLDLSGLDMESVEGRTEAQIIIKRLVKEIVVSGNKKLVDIYLHNGNMIRGFPLDGKDDHTLTLEEATDEMQSLDDMLIFGEPVTRIYPAGDMEEVDA

SEQ ID NO: 15957 - DNA, 50 bp, Escherichia coli; identical to SEQ ID NO: 3242
  source 1..50: mol_type = genomic DNA

SEQ ID NO: 15958 - DNA, 40 bp, Escherichia coli; identical to SEQ ID NO: 15663
  source 1..40: mol_type = genomic DNA

SEQ ID NO: 15959 - DNA, 50 bp, Escherichia coli; identical to SEQ ID NO: 3244
  source 1..50: mol_type = genomic DNA

SEQ ID NO: 15960 - DNA, 40 bp, Escherichia coli; identical to SEQ ID NO: 3245
  source 1..40: mol_type = genomic DNA

SEQ ID NO: 15961 - protein, 547 aa, Escherichia coli
MKLLVTYIRWSTREQDSGDSLRRQTNLIDAFYSKHKNDYYLLPAHRYVDKGKSGFHQQHKAQGSDFRRMFENVMSGAIPEGSLIVVENFDRFSRADIDTAIDDVRQILRKGVSILTLGDGELYDKSALTDPVKLIKHIIIAERAHQESLVKQKRIAQVWNHKTQLARELKKPMGKQAPGWLELSEDGSHYIVDEDKASLVSIIYDKRLSGMSMFAICKWLNEQGYPTINQRKVRISKTKKPDGNWSALSVKHILTSRSVLGYLPAKISSEDRKTVLREEIESFYPQIVTDSKFYAVQQLLEETGKGKTSSGEHWLYVNILKGLIRCKCGLVMTPTGIRKPVYQGTYRCNGNKESRCSYGTVSRKLLDTQLCSRLFSKLSQLHDEATDTARLDELQRRLNTVDSELEKLTETLIQLPNITQIQEALRVKQEEKDELIVQLSREKARVKSVSSLDLSGLDMESVEGRTEAQIIIKRLVKEIVVSGNEKLVDIYLHNGNMIRGFPLDGKDDHTLTLEEATDEMQSLDDMLIFGEPVTRIYPAGDMEEVDA

SEQ ID NO: 15962 - DNA, 50 bp, Escherichia coli; identical to SEQ ID NO: 3502
  source 1..50: mol_type = genomic DNA

SEQ ID NO: 15963 - DNA, 40 bp, Escherichia coli; identical to SEQ ID NO: 15663
  source 1..40: mol_type = genomic DNA

SEQ ID NO: 15964 - DNA, 50 bp, Escherichia coli; identical to SEQ ID NO: 15659
  source 1..50: mol_type = genomic DNA

SEQ ID NO: 15965 - DNA, 40 bp, Escherichia coli; identical to SEQ ID NO: 3245
  source 1..40: mol_type = genomic DNA

SEQ ID NO: 15966 - protein, 547 aa, Escherichia coli
MKLLATYIRWSTREQDSGDSLRRQTNLIDAFYSKHKNDYYLLPAHRYVDKGKSGFHQQHKAQGSDFRRMFENVMSGAIPEGSLIVVENFDRFSRADIDTAIDDVRQILRKGVSILTLGDGELYDKSALTDPVKLIKHIIIAERAHQESLVKQKRIAQVWNHKTQLARELKKPMGKQAPGWLELSDDGSHYIVDEDKASLVNIIYDKRLSGMSMFAICKWLNEQGYPTINQRKVRISKTKKPDGNWSALSVKHILTSRSVLGYLPAKISTEDRKTVLREEIESFYPQIVTDSKFYAVQQLLEETGKGKTSSGEHWLYVNILKGLIRCKCGLVMTPTGIRKPVYQGTYRCNGNKESRCSYGTVSRKLLDTQLCSRLFSKLSQLHDEATDTAKLDELQRRLNTVDSELEKLTETLIQLPNITQIQEALRVKQEEKDELIVQLSREKARVKSVSSLDLSGLDMESVEGRTEAQIIIKRLVKEIVVSGNEKLVDIYLHNGNMIRGFPLDGKDDHTLTLEEATDEMQSLDDMLIFGEPVTRIYPAGDMEEVDA

SEQ ID NO: 15967 - DNA, 50 bp, Escherichia coli; identical to SEQ ID NO: 3242
  source 1..50: mol_type = genomic DNA

SEQ ID NO: 15968 - DNA, 40 bp, Escherichia coli; identical to SEQ ID NO: 15663
  source 1..40: mol_type = genomic DNA

SEQ ID NO: 15969 - DNA, 50 bp, Escherichia coli; identical to SEQ ID NO: 3244
  source 1..50: mol_type = genomic DNA

SEQ ID NO: 15970 - DNA, 40 bp, Escherichia coli; identical to SEQ ID NO: 3245
  source 1..40: mol_type = genomic DNA

SEQ ID NO: 15971 - protein, 547 aa, Escherichia coli
MKLLVPYIRWSTKEQDSGDSLRRQTNLIDAFYAKHKDDYYLLPAHRYVDKGKSGFHQQHKAQGSDFRRMFENVMSGAIPEGSLIVVENFDRFSRADIDTAIDDVRQILRKGVSILTLGDGELYDKSALTDPVKLIKHIIIAERAHQESLVKQKRIAQVWNHKTQLARELKKPMGKQAPGWLELSEDGSHYIVDEDKASLVNIIYDKRLSGMSMFAICKWLNEQGYPTINQRKVRISKTKKPDGNWSALSVKHILTSRSVLGYLPAKISTEDRKTVLREEIEGFYPQIVTDSKFYAVQQLLEETGKGKTSSGDHWLYVNILKGLIRCKCGLVMTPTGIRKPVYQGTYRCNGNKESRCSYGTVSRKLLDTQLCSRLFSKLSQLHDEATDTAKLDELQRRLNTVDSELEKLTETLIQLPNITQIQEALRVKQEEKDELIVQLSREKARVKSVSSLDLSGLDMESVEGRTEAQVIIKRLVKEIVVSGNEKLVDIYLHNGNMIRGFPLDGKDDHTLTLEEATDEMQPLDDMLIFGEPVTRIYPAGDMEEVDA

SEQ ID NO: 15972 - DNA, 50 bp, Escherichia coli; identical to SEQ ID NO: 3242
  source 1..50: mol_type = genomic DNA

SEQ ID NO: 15973 - DNA, 40 bp, Escherichia coli; identical to SEQ ID NO: 15663
  source 1..40: mol_type = genomic DNA

SEQ ID NO: 15974 - DNA, 50 bp, Escherichia coli; identical to SEQ ID NO: 3244
  source 1..50: mol_type = genomic DNA

SEQ ID NO: 15975 - DNA, 40 bp, Escherichia coli; identical to SEQ ID NO: 3245
  source 1..40: mol_type = genomic DNA

SEQ ID NO: 15976 - protein, 547 aa, Escherichia coli
MKLLVPYIRWSTKEQDSGDSLRRQTNLIDTFYAKHKDDYYLLPAHRYVDKGKSGFHQQHKAQGSDFRRMFENVMSGTIPEGSLIVVENFDRFSRADIDTAIDDVRQILRKGVSILTLGDGELYDKSALTDPVKLIKHIIIAERAHQESLVKQKRIAQVWNHKTQLARELKKPMGKQAPGWLELSEDGSHYIVDEDKASLVNIIYDKRLSGMSMFAICKWLNEQGYPTINQRKVRISKTKKPDGNWSALSVKHILTSRSVLGYLPAKISTEDRKTVLREEIESFYPQIVTDSKFYAVQQLLEETGKGKTSSGEHWLYVNILKGLIRCKCGLVMTPTGIRKPVYQGTYRCNGNKESRCNYGTVSRKLLDTQLCSRLFSKLSQLHDEATDTAKLDELQRRLNTVDSELEKLTETLIQLPNITQIQEALRVKQEEKDELIVQLSREKARVKSVSSLDLSGLDMESVEGRTEAQIIIKRLVKEIVVSGNEKLVDIYLHNGNMIRGFPLDGKDDHTLTLEEATDEMQSLDDMLIFGEPVTRIYPAGDMEEVDA

SEQ ID NO: 15977 - DNA, 50 bp, Escherichia coli; identical to SEQ ID NO: 3242
  source 1..50: mol_type = genomic DNA

SEQ ID NO: 15978 - DNA, 40 bp, Escherichia coli; identical to SEQ ID NO: 15663
  source 1..40: mol_type = genomic DNA

SEQ ID NO: 15979 - DNA, 50 bp, Escherichia coli; identical to SEQ ID NO: 3244
  source 1..50: mol_type = genomic DNA

SEQ ID NO: 15980 - DNA, 40 bp, Escherichia coli; identical to SEQ ID NO: 3245
  source 1..40: mol_type = genomic DNA

SEQ ID NO: 15981 - protein, 547 aa, Escherichia coli
MKLLVTYIRWSTKEQDSGDSLRRQTNLIDAFYAKHKDDYYLLPAHRYVDKGKSGFHQQHKNQGSDFRRMFENVMSGAIPEGSLIVVENFDRFSRADIDTAIDDVRQILRKGVSILTLGDGELYDKSALTDPVKLIKHIIIAERAHQESLVKQKRIAQVWNHKTQLARELKKPMGKQAPGWLELSEDGSHYIVDEDKASLVNIIYDKRLSGMSMFAICKWLNEQGYPTINQRKVRISKTKKPDGNWSALSVKHILTSRSVLGYLPAKISTEDRKTVLREEIEGFYPQIVTDSKFYAVQQLLEETGKGKTSSGEHWLYVNILKGLIRCKCGLVMTPTGIRKPVYQGTYRCNGNKESRCSYGTVSRKLLDTQLCSRLFSKLSQLHDEATDTAKLDELQRRLNTVDSELEKLTETLIQLPNITQIQEALRVKQEEKDELIVQLSREKARVKSVSSLDLSGLDMESVEGRTEAQIIIKRLVKEIVVSGNEKLVDIYLHNGNMIRGFPLDGKDDHTLTLEEATDEMQSLDDMLIFGEPVTRIYPAGDMEEVDA

SEQ ID NO: 15982 - DNA, 50 bp, Escherichia coli; identical to SEQ ID NO: 3242
  source 1..50: mol_type = genomic DNA

SEQ ID NO: 15983 - DNA, 40 bp, Escherichia coli; identical to SEQ ID NO: 15663
  source 1..40: mol_type = genomic DNA

SEQ ID NO: 15984 - DNA, 50 bp, Escherichia coli; identical to SEQ ID NO: 3244
  source 1..50: mol_type = genomic DNA

SEQ ID NO: 15985 - DNA, 40 bp, Escherichia coli; identical to SEQ ID NO: 3245
  source 1..40: mol_type = genomic DNA

SEQ ID NO: 15986 - protein, 547 aa, Escherichia coli
MKLLVTYIRWSTKEQDSGDSLRRQTNLIDAFYAKHKDDYYLLPAHRYVDKGKSGFHQQHKNQGSDFRRMFENVMSGIIPEGSLIVVENFDRFSRADIDTAIDDVRQILRKGVSILTLGDGELYDKSALTDPVKLIKHIIIAERAHQESLVKQKRIAQVWNHKTQLARELKKPMGKQAPGWLELSEDGSHYIVDEDKASLVNIIYDKRLSGMSMFAICKWLNEQGYPTINQRKVRISKTKKPDGNWSALSVKHILTSRSVLGYLPAKISSEDRKTVLREEIEGFYPQIVTDSKFYAVQQLLEETGKGKTSSGEHWLYVNILKGLIRCKCGLVMTPTGIRKPVYQGTYRCNGNKESRCSYGTVSRKLLDTQLCSRLFSKLSQLHDEATDTSKLDELQRRLNTVDSELEKLTETLIQLPNITQIQEALRVKQEEKDELIVQLSREKARVKSVSSLDLSGLDMESVEGRTEAQIIIKRLVKEIVVSGNEKLVDIYLHNGNMIRGFPLDGKDDHTLTLEEATDEMQSLDDMLIFGEPVTRIYPAGDMEEVDA

SEQ ID NO: 15987 - DNA, 50 bp, Escherichia coli; identical to SEQ ID NO: 3242
  source 1..50: mol_type = genomic DNA

SEQ ID NO: 15988 - DNA, 40 bp, Escherichia coli; identical to SEQ ID NO: 15663
  source 1..40: mol_type = genomic DNA

SEQ ID NO: 15989 - DNA, 50 bp, Escherichia coli; identical to SEQ ID NO: 3244
  source 1..50: mol_type = genomic DNA

SEQ ID NO: 15990 - DNA, 40 bp, Escherichia coli; identical to SEQ ID NO: 3245
  source 1..40: mol_type = genomic DNA

SEQ ID NO: 15991 - protein, 547 aa, Escherichia coli
MKLLVPYIRWSTKEQDSGDSLRRQTNLIDTFYAKHKDDYYLLPAHRYVDKGKSGFHQQHKAQGSDFRRMFENVMSGTIPEGSLIVVENFDRFSRADIDTAIDDVRQILRKGVSILTLGDGELYDKSALTDPVKLIKHIIIAERAHQESLVKQKRIAQVWNHKTQLARELKKPMGKQAPGWLELSEDGSHYIVDEDKASLVNIIYDKRLSGMSMFAICKWLNEQGYPTINQRKVRISKTKKPDGNWSALSVKHILTSRSVLGYLPAKISTEDRKTVLREEIESFYPQIVTDSKFYAVQQLLEETGKGKTSSGDHWLYVNILKGLIRCKCGLVMTPTGIRKPVYQGTYRCNGNKESRCSYGTVSRKLLDTQLCSRLFSKLSQLHDEATDTAKLDEIQRRLNTVDSELEKLTETLIQLPNITQIQEALRVKQEEKDELIAQLSREKARVKSVSSLDLSGLDMESVEGRTEAQIIIKRLVKEIVVSGNEKLVDIYLHNGNMIRGFPLDGKDDHTLTLEEATDEMQPLDDMLIFGEPVTRIYPAGDMEEVDA

SEQ ID NO: 15992 - DNA, 50 bp, Escherichia coli; identical to SEQ ID NO: 3242
  source 1..50: mol_type = genomic DNA

SEQ ID NO: 15993 - DNA, 40 bp, Escherichia coli; identical to SEQ ID NO: 15663
  source 1..40: mol_type = genomic DNA

SEQ ID NO: 15994 - DNA, 50 bp, Escherichia coli; identical to SEQ ID NO: 3244
  source 1..50: mol_type = genomic DNA

SEQ ID NO: 15995 - DNA, 40 bp, Escherichia coli; identical to SEQ ID NO: 3245
  source 1..40: mol_type = genomic DNA

SEQ ID NO: 15996 - protein, 547 aa, Escherichia coli
MKLLATYIRWSTKEQDSGDSLRRQTNLIDAFYSKHKNDYYLLPAHRYVDKGKSGFHQQHKAQGSDFRRMFENVMSGVIPEGSLIVVENFDRFSRADIDTAIDDVRQILRKGVSILTLGDGELYDKSALTDPVKLIKHIIIAERAHQESLVKQKRIAQVWNHKTQLARELKKPMGKQAPGWLELSEDGSHYIVDEDKASLVNIIYDKRLSGMSMFAICKWLNEQGYPTINQRKVRISKTKKPDGNWSALSVKHILTSRSVLGYLPAKISSEDRKTVLREEIESFYPQIVTDSKFYAVQQLLEETGKGKTSSGDHWLYVNILKGLIRCKCGLVMTPTGIRKPVYQGTYRCNGNKESRCSYGTVSRKLLDTQLCSRLFSKLSQLHDEATDTAKLDELQRRLNTVDSELEKLTETLIQLPNITQIQEALRVKQEEKDELIVQLSREKARVKSVSSLDLSGLDMESVEGRTEAQIIIKRLVKEIVVSGNEKLVDIYLHNGNMIRGFPLDGKDDHTLTLEEATDEMQSLDDMLIFGEPVTRIYPAGDMEEVDA

SEQ ID NO: 15997 - DNA, 50 bp, Escherichia coli; identical to SEQ ID NO: 3242
  source 1..50: mol_type = genomic DNA

SEQ ID NO: 15998 - DNA, 40 bp, Escherichia coli; identical to SEQ ID NO: 15663
  source 1..40: mol_type = genomic DNA

SEQ ID NO: 15999 - DNA, 50 bp, Escherichia coli; identical to SEQ ID NO: 3244
  source 1..50: mol_type = genomic DNA

SEQ ID NO: 16000 - DNA, 40 bp, Escherichia coli; identical to SEQ ID NO: 3245
  source 1..40: mol_type = genomic DNA

SEQ ID NO: 16001 - protein, 547 aa, Escherichia coli
MKLLVTYIRWSTKEQDSGDSLRRQTNLIDAFYAKHKDDYYLLPAHRYVDKGKSGFHQQHKNQGSDFRRMFENVMSGVIPEGSLIVVENFDRFSRADIDTAIDDVRQILRKGVSILTLGDGELYDKSALTDPVKLIKHIIIAERAHQESLVKQKRIAQVWNHKTQLARELKKPMGKQAPGWLELSDDGSHYIVDEDKASLVNIIYDKRLSGMSMFAICKWLNEQGYPTINQRKVRISKTKKPDGNWSALSVKHILTSRSVLGYLPAKISTEDRKTVLREEIEGFYPQIVTDSKFYAVQQLLEETGKGKTSSGDHWLYVNILKGLIRCKCGLVMTPTGIRKPVYQGTYRCNGNKESRCSYGTVSRKLLDTQLCSRLFSKLSQLHDEATDTAKLDELQRRLNTVDSELEKLTETLIQLPNITQIQEALRVKQEEKDELIVQLSREKARVKSVSSLDLSGLDMESVEGRTEAQIIIKRLVKEIVVSGNEKLVDIYLHNGNMIRGFPLDGKDDHTLTLEEATDEMQSLDDMLIFGEPVTRIYPAGDMEEVDA

SEQ ID NO: 16002 - DNA, 50 bp, Escherichia coli; identical to SEQ ID NO: 3242
  source 1..50: mol_type = genomic DNA

SEQ ID NO: 16003 - DNA, 40 bp, Escherichia coli; identical to SEQ ID NO: 15663
  source 1..40: mol_type = genomic DNA

SEQ ID NO: 16004 - DNA, 50 bp, Escherichia coli; identical to SEQ ID NO: 3244
  source 1..50: mol_type = genomic DNA

SEQ ID NO: 16005 - DNA, 40 bp, Escherichia coli; identical to SEQ ID NO: 3245
  source 1..40: mol_type = genomic DNA

SEQ ID NO: 16006 - protein, 547 aa, Escherichia coli
MKLLVTYIRWSTKEQDSGDSLRRQTNLIDAFYSKHKNDYYLLPAHRYVDKGKSGFHQQHKAQGSDFRRMFENVMSGAIPEGSLIVVENFDRFSRADIDTAIDDVRQILRKGVSILTLGDGELYDKSALTDPVKLIKHIIIAERAHQESLVKQKRIAQVWNHKTQLARELKKPMGKQAPGWLELSEDGSHYIVDEDKASLVNIIYDKRLSGMSMFAICKWLNEQGYPTINQRKVRISKTKKPDGNWSALSVKHILTSRSVLGYLPAKISTEDRKTVLREEIESFYPQIVTDSKFYAVQQLLEETGKGKTSSGEHWLYVNILKGLIRCKCGLVMTPTGIRKPVYQGTYRCNGNKESRCSYGTVSRKLLDTQLCSRLFSKLSQLHDEATDTAKLDELQRRLNTVDGELEKLTETLIQLPNITQIQEALRVKQGEKDELIVQLSREKARVKSVSSLDLSGLDMESVEGRTEAQIIIKRLVKEIVVSGNEKLVDIYLHNGNMIRGFPLDGKDDHTLTLEEATDEMQSLDDMLIFGEPVTRIYPAGDMEEVDA

SEQ ID NO: 16007 - DNA, 50 bp, Escherichia coli; identical to SEQ ID NO: 3242
  source 1..50: mol_type = genomic DNA

SEQ ID NO: 16008 - DNA, 40 bp, Escherichia coli; identical to SEQ ID NO: 15663
  source 1..40: mol_type = genomic DNA

SEQ ID NO: 16009 - DNA, 50 bp, Escherichia coli; identical to SEQ ID NO: 3244
  source 1..50: mol_type = genomic DNA

SEQ ID NO: 16010 - DNA, 40 bp, Escherichia coli; identical to SEQ ID NO: 3245
  source 1..40: mol_type = genomic DNA

SEQ ID NO: 16011 - protein, 547 aa, Escherichia coli
MKLLATYIRWSTKEQDSGDSLRRQTNLIDAFYSKHKNDYYLLPAHRYVDKGKSGFHQQHKAQGSDFRRMFENVMSGAIPEGSLIVVENFDRFSRADIDTAIDDVRQILRKGVSILTLGDGELYDKSALTDPVKLIKHIIIAERAHQESLVKQKRIAQVWNHKTQLARELKKPMGKQAPGWLELSEDGSHYIVDEDKASLVNIIYDKRLSGMSMFAICKWLNEQGYPTINQRKVRISKTKKPDGNWSALSVKHILTSRSVLGYLPAKISTEDRKTVLREEIESFYPQIVTDSKFYAVQQLLEETGKGKTSSGEHWLYVNILKGLIRCKCGLVMTPTGIRKPVYQGTYRCNGNKESRCSYGTVSRKLLDTQLCSRLFSKLSQLHDEATDTAKLDELQRRLNTVDSELEKLTETLIQLPNITQIQEALRVKQEEKDELIVQLSREKARVKSVSSLDLSGLDMESVEGRTEAQIIIKRLVKEIVVSGNEKLVDIYLHNGNMIRGFPLDGKDDHTLTLEEATDEMQPLDDMLIFGEPVTRIYPAGDMEEVDA

SEQ ID NO: 16012 - DNA, 50 bp, Escherichia coli; identical to SEQ ID NO: 3242
  source 1..50: mol_type = genomic DNA

SEQ ID NO: 16013 - DNA, 40 bp, Escherichia coli; identical to SEQ ID NO: 15663
  source 1..40: mol_type = genomic DNA

SEQ ID NO: 16014 - DNA, 50 bp, Escherichia coli; identical to SEQ ID NO: 3244
  source 1..50: mol_type = genomic DNA

SEQ ID NO: 16015 - DNA, 40 bp, Escherichia coli; identical to SEQ ID NO: 3245
  source 1..40: mol_type = genomic DNA

SEQ ID NO: 16016 - protein, 547 aa, Escherichia coli
MKLLVTYIRWSTREQDSGDSLRRQTNLIDAFYAKHKDDYYLLPAHRYVDKGKSGFHQQHKAQGSDFRRMFENVMSGAIPEGSLIVVENFDRFSRADIDTAIDDVRQILRKGVSILTLGDGELYDKSALTDPVKLIKHIIIAERAHQESLVKQKRIAQVWNHKTQLARELKKPMGKQAPGWLELSEDGSHYIVDEDKASLVNIIYDKRLSGMSMFAICKWLNEQGYPTINQRKVRISKTKKPDGNWSALSVKHILTSRSVLGYLPAKISTEDRKTVLREEIESFYPQIVTDSKFYAVQQLLEETGKGKTSSGEHWLYVNILKGLIRCKCGLVMTPTGIRKPVYQGTYRCNGNKESRCNYGTVSRKLLDTQLCSRLFSKLSQLHDEATDTAKLDELQRRLNTVDSELEKLTETLIQLPNITQIQEALRVKQEEKDELIVQLSREKARVKSVSSLDLSGLDMESVEGRTEAQIIIKRLVKEIVVSGNEKLVDIYLHNGNMIRGFPLDGKDDHTLTLEEATDEMQPLDDMLIFGEPVTRIYPAGDMEEVDA

SEQ ID NO: 16017 - DNA, 50 bp, Escherichia coli; identical to SEQ ID NO: 3242
  source 1..50: mol_type = genomic DNA

SEQ ID NO: 16018 - DNA, 40 bp, Escherichia coli; identical to SEQ ID NO: 15663
  source 1..40: mol_type = genomic DNA

SEQ ID NO: 16019 - DNA, 50 bp, Escherichia coli; identical to SEQ ID NO: 3244
  source 1..50: mol_type = genomic DNA

SEQ ID NO: 16020 - DNA, 40 bp, Escherichia coli; identical to SEQ ID NO: 3245
  source 1..40: mol_type = genomic DNA

SEQ ID NO: 16021 - protein, 547 aa, Escherichia coli
MKLLVTYIRWSTKEQDSGDSLRRQTNLIDAFYAKHKDDYYLLPAHRYVDKGKSGFHQQHKAQGSDFRRMFENVMSGAIPEGSLIVVENFDRFSRADIDTAIDDVRQILRKGVSILTLGDGELYDKSALTDPVKLIKHIIIAERAHQESLVKQKRIAQVWNHKTQLARELKKPMGKQAPGWLELSEDGSHYIVDEDKASLVNIIYDKRLSGMSMFAICKWLNEQGYPTINQRKVRISKTKKPDGNWSALSVKHILTSRSVLGYLPAKISTEDRKTVLREEIESFYPQIVTDSKFYAVQQLLEETGKGKTSSGEHWLYVNILKGLIRCKCGLVMTPTGIRKPVYQGTYRCNGNKESRCSYGTVSRKLLDTQLCSRLFSKLSQLHDEATDTAKLDELQRRLNTVDSELEKLTETLIQLPNITQIQEALRIKQEEKDELIVQLSREKARVKSVSSLDLSGLDMESVEGRTEAQIIIKRLVKEIVVSGNEKLVDIYLHNGNMIRGFPLDGKDDHTLTLEEATDEMQSLDDMLIFGEPVTRIYPAGDMEEVDA

SEQ ID NO: 16022 - DNA, 50 bp, Escherichia coli; identical to SEQ ID NO: 3242
  source 1..50: mol_type = genomic DNA

SEQ ID NO: 16023 - DNA, 40 bp, Escherichia coli; identical to SEQ ID NO: 15663
  source 1..40: mol_type = genomic DNA

SEQ ID NO: 16024 - DNA, 50 bp, Escherichia coli; identical to SEQ ID NO: 3244
  source 1..50: mol_type = genomic DNA

SEQ ID NO: 16025 - DNA, 40 bp, Escherichia coli; identical to SEQ ID NO: 3245
  source 1..40: mol_type = genomic DNA

SEQ ID NO: 16026 - protein, 547 aa, Escherichia coli
MKLLVTYIRWSTKEQDSGDSLRRQTNLIDAFYAKHKDDYYLLPAHRYVDKGKSGFHQQHKNQGSDFRRMFENVMSGVIPEGSLIVVENFDRFSRADIDTAIDDVRQILRKGVSILTLGDGELYDKSALTDPVKLIKHIIIAERAHQESLVKQKRIAQVWNHKTQLARELKKPMGKQAPGWLELSEDGSHYIVDEDKASLVNIIYDKRLSGMSMFAICKWLNEQGYPTINQRKVRISKTKKPDGNWSALSVKHILTSRSVLGYLPAKISTEDRKTVLREEIEGFYPQIVTDSKFYAVQQLLEETGKGKTSSGEHWLYVNILKGLIRCKCGLVMTPTGIRKPVYQGTYRCNGNKESRCNYGTVSRKLLDTQLCSRLFSKLSQLHDEATDTAKLDELQRRLNTVDSELEKLTETLIQLPNITQIQEALRVKQEEKDELIVQLSREKARVKSVSSLDLSGLDMESVEGRTEAQIIIKRLVKEIVVSGNEKLVDIYLHNGNMIRGFPLDGKDDHTLTLEEATDEMQSLDDMLIFGEPVTRIYPAGDMEEVDA

SEQ ID NO: 16027 - DNA, 50 bp, Escherichia coli; identical to SEQ ID NO: 3502
  source 1..50: mol_type = genomic DNA

SEQ ID NO: 16028 - DNA, 40 bp, Escherichia coli; identical to SEQ ID NO: 15663
  source 1..40: mol_type = genomic DNA

SEQ ID NO: 16029 - DNA, 50 bp, Escherichia coli; identical to SEQ ID NO: 15659
  source 1..50: mol_type = genomic DNA

SEQ ID NO: 16030 - DNA, 40 bp, Escherichia coli; identical to SEQ ID NO: 3245
  source 1..40: mol_type = genomic DNA

SEQ ID NO: 16031 - protein, 547 aa, Escherichia coli
MKLLVTYIRWSTKEQDSGDSLRRQTNLIDAFYSKHKNDYYLLPAHRYVDKGKSGFHQQHKAQGSDFRRMFENVMSGAIPEGSLIVVENFDRFSRADIDTAIDDVRQILRKGVSILTLGDGELYDKSALTDPVKLIKHIIIAERAHQESLVKQKRIAQVWNHKTQLARELKKPMGKQAPGWLELSEDGSHYIVDEDKASLVNIIYDKRLSGMSMFAICKWLNEQGYPTINQRKVRISKTKKPDGNWSALSVKHILTSRSVLGYLPAKISTEDRKTVLREEIEGFYPQIVTDSKFYAVQQLLEETGKGKTSSGEHWLYVNILKGLIRCKCGLVMTPTGIRKPVYQGTYRCNGNKESRCNYGTVSRKLLDTQLCSRLFSKLSQLHDEATDTAKLDELQRRLNTVDSELEKLTETLIQLPNITQIQEALRVKQEEKDELIVQLSREKARVKSVSSLDLSGLDMESVEGRTEAQIIIKRLVKEIVVSGNEKLVDIYLHNGNMIRGFPLDGKDDHTLTLEEATDEMQSLDDMLIFGEPVTRIYPAGDMEEVDA

SEQ ID NO: 16032 - DNA, 50 bp, Escherichia coli; identical to SEQ ID NO: 3242
  source 1..50: mol_type = genomic DNA

SEQ ID NO: 16033 - DNA, 40 bp, Escherichia coli; identical to SEQ ID NO: 15663
  source 1..40: mol_type = genomic DNA

SEQ ID NO: 16034 - DNA, 50 bp, Escherichia coli; identical to SEQ ID NO: 3244
  source 1..50: mol_type = genomic DNA

SEQ ID NO: 16035 - DNA, 40 bp, Escherichia coli; identical to SEQ ID NO: 3245
  source 1..40: mol_type = genomic DNA

SEQ ID NO: 16036 - protein, 547 aa, Escherichia coli
MKLLATYIRWSTREQDSGDSLRRQTNLIDAFYSKHKEEYYLLPAHRYVDKGKSGFHQQHKAQGSDFRRMFENVMSGAIPEGSLIVVENFDRFSRADIDTAIDDVRQILRKGVSILTLGDGELYDKSALTDPVKLIKHIIIAERAHQESLVKQKRIAQVWNHKTQLARELKKPMGKQAPGWLELSEDGSHYIVDEDKASLVNIIYDKRLSGMSMFAICKWLNEQGYPTINQRKVRISKTKKPDGNWSALSVKHILTSRSVLGYLPAKISSEDRKTVLREEIESFYPQIVTDSKFYAVQQLLEETGKGKTSSGEHWLYVNILKGLIRCKCGLVMTPTGIRKPVYQGTYRCNGNKESRCSYGTVSRKLLDTQLCSRLFSKLSQLHDEATDTAKLDELQRRLNTVDSELEKLTETLIQLPNITQIQEALRVKQEEKDELIVQLSREKARVKSVSSLDLSGLDMESVEGRTEAQIIIKRLVKEIVVSGNEKLVDIYLHNGNMIRGFPLDGKDDHTLTLEEATDEMQSLDDMLIFGEPVTRIYPAGDMEEVDA

SEQ ID NO: 16037 - DNA, 50 bp, Escherichia coli; identical to SEQ ID NO: 3242
  source 1..50: mol_type = genomic DNA

SEQ ID NO: 16038 - DNA, 40 bp, Escherichia coli; identical to SEQ ID NO: 15663
  source 1..40: mol_type = genomic DNA

SEQ ID NO: 16039 - DNA, 50 bp, Escherichia coli; identical to SEQ ID NO: 3244
  source 1..50: mol_type = genomic DNA

SEQ ID NO: 16040 - DNA, 40 bp, Escherichia coli; identical to SEQ ID NO: 3245
  source 1..40: mol_type = genomic DNA

SEQ ID NO: 16041 - protein, 547 aa, Escherichia coli
MKLLVTYIRWSTKEQDSGDSLRRQTNLIDAFYSKHKNDYYLLPAHRYVDKGKSGFHQQHKNQGSDFRRMFENVMSGVIPEGSLIVVENFDRFSRADIDTAIDDVRQILRKGVSILTLGDGELYDKSALTDPVKLIKHIIIAERAHQESLVKQKRIAQVWNHKTQLARELKKPMGKQAPGWLELSDDGSHYIVDEDKASLVNIIYDKRLSGMSMFAICKWLNEQGYPTINQRKVRISKTKKPDGNWSALSVKHILTSRSVLGYLPAKISTEDRKTVLREEIESFYPQIVTDSKFYAVQQLLEETGKGKTSSGEHWLYVNILKGLIRCKCGLVMTPTGIRKPVYQGTYRCNGNKESRCSYGTVSRKLLDTQLCSRLFSKLSQLHDEATDTAKLDELQRRLNIVDSELEKLTETLIQLPNITQIQEALRVKQGEKDELIVQLSREKARVKSVSSLNLSGLDMESVEGRTEAQIIIKRLVKEIVVSGNEKLVDIYLHNGNMIRGFPLDGKDDHTLTLEEATDEMQPLDDMLIFGEPVTRIYPAGDMEEVDA

SEQ ID NO: 16042 - DNA, 50 bp, Escherichia coli; identical to SEQ ID NO: 3242
  source 1..50: mol_type = genomic DNA

SEQ ID NO: 16043 - DNA, 40 bp, Escherichia coli; identical to SEQ ID NO: 15663
  source 1..40: mol_type = genomic DNA

SEQ ID NO: 16044 - DNA, 50 bp, Escherichia coli; identical to SEQ ID NO: 3244
  source 1..50: mol_type = genomic DNA

SEQ ID NO: 16045 - DNA, 40 bp, Escherichia coli; identical to SEQ ID NO: 3245
  source 1..40: mol_type = genomic DNA

SEQ ID NO: 16046 - protein, 547 aa, Escherichia coli
MKLLVTYIRWSTREQDSGDSLRRQTNLIDAFYSKHKNDYYLLPAHRYVDKGKSGFHQQHKNQGSDFRRMFENVMSGAIPEGSLIVVENFDRFSRADIDTAIDDVRQILRKGVSILTLGDGELYDKSALTDPVKLIKHIIIAERAHQESLVKQKRIAQVWNHKTQLARELKKPMGKQAPGWLELSEDGSHYIVDEDKASLVNIIYDKRLSGMSMFAICKWLNEQGYPTINQRKVRISKTKKPDGNWSALSVKHILTSRSVLGYLPAKISSEDRKTVLREEIEGFYPQIVTDSKFYAVQQLLEETGKGKTSSGDHWLYVNILKGLIRCKCGLVMTPTGIRKPVYQGTYRCNGNKESRCSYGTVSRKLLDTQLCSRLFSKLSQLHDEATDTAKLDELQRRLNTVDGELEKLTETLIQLPNITQIQEALRVKQEEKDELIVQLSREKARVKSVSSLDLSGLDMESVEGRTEAQIIIKRLVKEIVVSGNEKLVDIYLHNGNMIRGFPLDGKDDHTLTLEEATDEMQSLDDMLIFGEPVTRIYPAGDMEEVDA

SEQ ID NO: 16047 - DNA, 50 bp, Escherichia coli; identical to SEQ ID NO: 3242
  source 1..50: mol_type = genomic DNA

SEQ ID NO: 16048 - DNA, 40 bp, Escherichia coli; identical to SEQ ID NO: 15663
  source 1..40: mol_type = genomic DNA

SEQ ID NO: 16049 - DNA, 50 bp, Escherichia coli; identical to SEQ ID NO: 3244
  source 1..50: mol_type = genomic DNA

SEQ ID NO: 16050 - DNA, 40 bp, Escherichia coli; identical to SEQ ID NO: 3245
  source 1..40: mol_type = genomic DNA

SEQ ID NO: 16051 - protein, 547 aa, Escherichia coli
MKLLVTYIRWSTKEQDSGDSLRRQTNLIDAFYSKHKNDYYLLPAHRYVDKGKSGFHQQHKNQGSDFRRMFENVMSGVIPEGSLIVVENFDRFSRADIDTAIDDVRQILRKGVSILTLGDGELYDKSALTDPVKLIKHIIIAERAHQESLVKQKRIAQVWNHKTQLARELKKPMGKQAPGWLELSEDGSHYIVDEDKASLVNIIYDKRLSGMSMFAICKWLNEQGYPTINQRKVRISKTKKPDGNWSALSVKHILTSRSVLGYLPAKISSEDRKTVLREEIEGFYPQIVTDSKFYAVQQLLEETGKGKTSSGEHWLYVNILKGLIRCKCGLVMTPTGIRKPVYQGTYRCNGNKESRCSYGTVSRKLLDTQLCSRLFSKLSQLHDEATDTAKLDELQRRLNTVDSELEKLTETLIQLPNITQIQEALRVKQEEKDGLIVQLSREKARLKSVSSLDLSGLDMESVEGRTEAQIIIKRLVKEIVVSGNEKLVDIYLHNGNMIRGFPLDGKDDHTLTLEEATDEMQSLDDMLIFGEPVTRIYPAGDMEEVDA

SEQ ID NO: 16052 - DNA, 50 bp, Escherichia coli; identical to SEQ ID NO: 3242
  source 1..50: mol_type = genomic DNA

SEQ ID NO: 16053 - DNA, 40 bp, Escherichia coli; identical to SEQ ID NO: 15663
  source 1..40: mol_type = genomic DNA

SEQ ID NO: 16054 - DNA, 50 bp, Escherichia coli; identical to SEQ ID NO: 3244
  source 1..50: mol_type = genomic DNA

SEQ ID NO: 16055 - DNA, 40 bp, Escherichia coli; identical to SEQ ID NO: 3245
  source 1..40: mol_type = genomic DNA

SEQ ID NO: 16056 - protein, 547 aa, Escherichia coli
MKLLVTYIRWSTREQDSGDSLRRQTNLIDAFYSKHKNDYYLLPAHRYVDKGKSGFHQQHKNQGSDFRRMFENVMSGAIPEGSLIVVENFDRFSRADIDTAIDDVRQILRKGVSILTLGDGELYDKSALTDPVKLIKHIIIAERAHQESLVKQKRIAQVWNHKTQLARELKKPMGKQAPGWLELSEDGSHYIVDEDKASLVNIIYDKRLSGMSMFAICKWLNEQGYPTINQRKVRISKTKKPDGNWSALSVKHILTSRSVLGYLPAKISTEDRKTVLREEVESFYPQIVTDSKFYAVQQLLEETGKGKTSSGEHWLYVNILKGLIRCKCGLVMTPTGIRKPVYQGTYRCNGNKESRCNYGTVSRKLLDTQLCSRLFSKLSQLHDEATDTAKLDELQRRLNTVDGELEKLTETLIQLPNITQIQEALRVKQEEKDELIVQLSREKARVKSVSSLDLSGLDMESVEGRTEAQIIIKRLVKEIVVSGNEKLVDIYLHNGNMIRGFPLDGKDDHTLTLEEATDEMQSLDDMLIFGEPVTRIYPAGDMEEVDA

SEQ ID NO: 16057 - DNA, 50 bp, Escherichia coli; identical to SEQ ID NO: 3242
  source 1..50: mol_type = genomic DNA

SEQ ID NO: 16058 - DNA, 40 bp, Escherichia coli; identical to SEQ ID NO: 15663
  source 1..40: mol_type = genomic DNA

SEQ ID NO: 16059 - DNA, 50 bp, Escherichia coli; identical to SEQ ID NO: 3244
  source 1..50: mol_type = genomic DNA

SEQ ID NO: 16060 - DNA, 40 bp, Escherichia coli; identical to SEQ ID NO: 3245
  source 1..40: mol_type = genomic DNA

SEQ ID NO: 16061 - protein, 547 aa, Escherichia coli
MKLLVTYIRWSTKEQDSGDSLRRQTNLIDAFYSKHKNDYYLLPAHRYVDKGKSGFHQQHKNQGSDFRRMFENVMSGAIPEGSLIVVENFDRFSRADIDTAIDDVRQILRKGVSILTLGDGELYDKSALTDPVKLIKHIIIAERAHQESLVKQKRIAQVWNHKTQLARELKKPMGKQAPGWLELSDDGSHYIVDEDKASLVNIIYDKRLSGMSMFAICKWLNEQGYPTINQRKVRISKTKKPDGNWSALSVKHILTSRSVLGYLPAKISTEDRKTVLREEIEGFYPQIVTDSKFYAVQQLLEETGKGKTSSGEHWLYVNILKGLIRCKCGLVMTPTGIRKPVYQGTYRCNGNKESRCSYGTVSRKLLDTQLCSRLFSKLSQLHDEATDTAKLDELQRRLNTVDSELEKLTETLIQLPNITQIQEALRVKQEEKDELIVQLSREKARVKSVSSLDLSGLDMESVEGRTEAQIIIKRLVKEIVVSGNEKLVDIYLHNGNMIRGFPLDGKDDHTLTLEEATDEMQSLDDMLIFGEPVTRIYPAGDMEEVDA

SEQ ID NO: 16062 - DNA, 50 bp, Escherichia coli; identical to SEQ ID NO: 3242
  source 1..50: mol_type = genomic DNA

SEQ ID NO: 16063 - DNA, 40 bp, Escherichia coli; identical to SEQ ID NO: 15663
  source 1..40: mol_type = genomic DNA

SEQ ID NO: 16064 - DNA, 50 bp, Escherichia coli; identical to SEQ ID NO: 3244
  source 1..50: mol_type = genomic DNA

SEQ ID NO: 16065 - DNA, 40 bp, Escherichia coli; identical to SEQ ID NO: 3245
  source 1..40: mol_type = genomic DNA

SEQ ID NO: 16066 - protein, 547 aa, Escherichia coli
MKLLVTYIRWSTKEQDSGDSLRRQTNLIDAFYSKHKEEYYLLPAHRYVDKGKSGFHQQHKNQGSDFRRMFENVMSGAIPEGSLIVVENFDRFSRADIDTAIDDVRQILRKGVSILTLGDGELYDKSALTDPVKLIKHIIIAERAHQESLVKQKRIAQVWNHKTQLARELKKPMGKQAPGWLELSEDGSHYIVDEDKASLVNIIYDKRLSGMSMFAICKWLNEQGYPTINQRKVRISKTKKPDGNWSALSVKHILTSRSVLGYLPAKISTEDRKTVLREEIESFYPQIVTDSKFYAVQQLLEETGKGKTSSGEHWLYVNILKGLIRCKCGLVMTPTGIRKPVYQGTYRCNGNKESRCSYGTVSRKLLDTQLCSRLFSKLSQLHDEATDTAKLDELQRRLNTVDSELEKLTETLIQLPNITQIQEALRVKQEEKDELIVQLSREKARVKSVSSLDLSGLDMESVEGRTEAQIIIKRLVKEIVVSGNEKLVDIYLHNGNMIRGFPLDGKDDHTLTLEEATDEMQSLDDMLIFGEPVTRIYPAGDMEEVDA

SEQ ID NO: 16067 - DNA, 50 bp, Escherichia coli; identical to SEQ ID NO: 3242
  source 1..50: mol_type = genomic DNA

SEQ ID NO: 16068 - DNA, 40 bp, Escherichia coli; identical to SEQ ID NO: 15663
  source 1..40: mol_type = genomic DNA

SEQ ID NO: 16069 - DNA, 50 bp, Escherichia coli; identical to SEQ ID NO: 3244
  source 1..50: mol_type = genomic DNA

SEQ ID NO: 16070 - DNA, 40 bp, Escherichia coli; identical to SEQ ID NO: 3245
  source 1..40: mol_type = genomic DNA

SEQ ID NO: 16071 - protein, 547 aa, Escherichia coli
MKLLVTYIRWSTKEQDSGDSLRRQTNLIDAFYAKHKEEYYLLPAHRYVDKGKSGFHQQHKAQGSDFRRMFENVMSGVIPEGSLIVVENFDRFSRADIDTAIDDVRQILRKGVSILTLGDGELYDKSALTDPVKLIKHIIIAERAHQESLVKQKRIAQVWNHKTQLARELKKPMGKQAPGWLELSEDGSHYIVDEDKASLVNIIYDKRLSGMSMFAICKWLNEQGYPTINQRKVRISKTKKPDGNWSALSVKHILTSRSVLGYLPAKISSEDRKTVLREEIEGFYPQIVTDSKFYAVQQLLEETGKGKTSSGEHWLYVNILKGLIRCKCGLVMTPTGIRKPVYQGTYRCNGNKESRCSYGTVSRKLLDTQLCSRLFSKLSQLHDEATDTAKLDELQRRLNNVDSELEKLTETLIQLPNITQIQEALRVKQEEKDELIVQLSREKARVKSVSSLDLSGLDMESVEGRTEAQIIIKRLVKEIVVSGNEKLVDIYLHNGNMIRGFPLDGKDDHTLTLEEATDEMQSLDDMLIFGEPVTRIYPAGDMEEVDA

SEQ ID NO: 16072 - DNA, 50 bp, Escherichia coli; identical to SEQ ID NO: 3242
  source 1..50: mol_type = genomic DNA

SEQ ID NO: 16073 - DNA, 40 bp, Escherichia coli; identical to SEQ ID NO: 15663
  source 1..40: mol_type = genomic DNA

SEQ ID NO: 16074 - DNA, 50 bp, Escherichia coli; identical to SEQ ID NO: 3244
  source 1..50: mol_type = genomic DNA

SEQ ID NO: 16075 - DNA, 40 bp, Escherichia coli; identical to SEQ ID NO: 3245
  source 1..40: mol_type = genomic DNA

SEQ ID NO: 16076 - protein, 547 aa, Escherichia coli; identical to SEQ ID NO: 15656

SEQ ID NO: 16077 - DNA, 50 bp, Escherichia coli; identical to SEQ ID NO: 3242
  source 1..50: mol_type = genomic DNA

SEQ ID NO: 16078 - DNA, 40 bp, Escherichia coli; identical to SEQ ID NO: 15663
  source 1..40: mol_type = genomic DNA

SEQ ID NO: 16079 - DNA, 50 bp, Escherichia coli; identical to SEQ ID NO: 3244
  source 1..50: mol_type = genomic DNA

SEQ ID NO: 16080 - DNA, 40 bp, Escherichia coli; identical to SEQ ID NO: 3245
  source 1..40: mol_type = genomic DNA

SEQ ID NO: 16081 - protein, 547 aa, Escherichia coli
MKLLVTYIRWSTKEQDSGDSLRRQTNLIDAFYAKHKEEYYLLPAHRYVDKGKSGFHQQHKNQGSDFRRMFENVMSGAIPEGSLIVVENFDRFSRADIDTAIDDVRQILRKGVSILTLGDGELYDKSALTDPVKLIKHIIIAERAHQESLVKQKRIAQVWNHKTQLARELKKPMGKQAPGWLELSEDGSHYIVDEDKASLVNIIYDKRLSGMSMFAICKWLNEQGYPTINQRKVRISKTKKPDGNWSALSVKHILTSRSVLGYLPAKISTEDRKTVLREEIESFYPQIVTDSKFYAVQQLLEETGKGKTSSGEHWLYVNILKGLIRCKCGLVMTPTGIRKPVYQGTYRCNGNKESRCSYGTVSRKLLDTQLCSRLFSKLSQLHDEATDTAKLDELQRRLNTVDSELEKLTETLIQLPNITQIQEALRVKQEEKDELIVQLSREKARVKSVSSLDLSGLDMESVEGRTEAQIIIKRLVKEIVVSGNEKLVDIYLHNGNMIRGFPLDGKDDHTLTLEEATDEMQPLDDMLIFGEPVTRIYPAGDMEEVDA

SEQ ID NO: 16082 - DNA, 50 bp, Escherichia coli; identical to SEQ ID NO: 3242
  source 1..50: mol_type = genomic DNA

SEQ ID NO: 16083 - DNA, 40 bp, Escherichia coli; identical to SEQ ID NO: 15663
  source 1..40: mol_type = genomic DNA

SEQ ID NO: 16084 - DNA, 50 bp, Escherichia coli; identical to SEQ ID NO: 3244
  source 1..50: mol_type = genomic DNA

SEQ ID NO: 16085 - DNA, 40 bp, Escherichia coli; identical to SEQ ID NO: 3245
  source 1..40: mol_type = genomic DNA

SEQ ID NO: 16086 - protein, 547 aa, Escherichia coli
MKLLVTYIRWSTKEQDSGDSLRRQTNLIDAFYSKHKNDYYLLPAHRYVDKGKSGFHQQHKNQGSDFRRMFENVMSGVIPEGSLIVVENFDRFSRADIDTAIDDVRQILRKGVSILTLGDGELYDKSALTDPVKLIKHIIIAERAHQESLVKQKRIAQVWNHKTQLARELKKPMGKQAPGWLELSEDGSHYIVDEDKASLVNIIYDKRLSGMSMFAICKWLNEQGYPTINQRKVRISKTKKPDGNWSALSVKHILTSRSVLGYLPAKISTEDRKTVLREEIEGFYPRIVTDSKFYAVQQLLEETGKGKTSSGEHWLYVNILKGLIRCKCGLVMTPTGIRKPVYQGTYRCNGNKESRCSYGTVSRKLLDTQLCSRLFSKLSQLHDEATDTAKLDELQRRLNTVDSELEKLTETLIQLPNITQIQEALRVKQEEKDELIVQLSREKARVKSVSSLDLSGLDMESVEGRTEAQIIIKRLVKEIVVSGNEKLVDIYLHNGNMIRGFPLDGKDDHTLTLEEATDEMQSLDDMLIFGEPVTRIYPAGDMEEVDA

SEQ ID NO: 16087 - DNA, 50 bp, Escherichia coli; identical to SEQ ID NO: 3242
  source 1..50: mol_type = genomic DNA

SEQ ID NO: 16088 - DNA, 40 bp, Escherichia coli; identical to SEQ ID NO: 15663
  source 1..40: mol_type = genomic DNA

SEQ ID NO: 16089 - DNA, 50 bp, Escherichia coli; identical to SEQ ID NO: 3244
  source 1..50: mol_type = genomic DNA

SEQ ID NO: 16090 - DNA, 40 bp, Escherichia coli; identical to SEQ ID NO: 3245
  source 1..40: mol_type = genomic DNA

SEQ ID NO: 16091 - protein, 547 aa, Escherichia coli
MKLLATYIRWSTREQDSGDSLRRQTNLIDAFYSKHKNDYYLLPAHRYVDKGKSGFHQQHKAQGSDFRRMFENVMSGAIPEGSLIVVENFDRFSRADIDTAIDDVRQILRKGVSILTLGDGELYDKSALTDPVKLIKHIIIAERAHQESLVKQKRIAQVWNHKTQLARELKKPMGKQAPGWLELSEDGSHYIVDEDKASLVNIIYDKRLSGMSMFAICKWLNEQGYPTINQRKVRISKTKKPDGNWSALSVKHILTSRSVLGYLPAKISSEDRKTVLREEIESFYPRIVTDSKFYAVQQLLEETGKGKTSSGEHWLYVNILKGLIRCKCGLVMTPTGIRKPVYQGTYRCNGNKESRCSYGTVSRKLLDTQLCSRLFSKLSQLHDEATDTAKLDELQRRLNTVDGELEKLTETLIQLPNITQIQEALRVKQEEKDELIVQLSREKARVKSVSSLDLSGLDMESVEGRTEAQIIIKRLVKEIVVSGNEKLVDIYLHNGNMIRGFPLDGKDDHTLTLEEATDEMQSLDDMLIFGEPVTRIYPAGDMEEVDA

SEQ ID NO: 16092 - DNA, 50 bp, Escherichia coli
  source 1..50: mol_type = genomic DNA
gtacttgtttagctatgtaaaagcactagtattcttgccttaacactcat

SEQ ID NO: 16093 - DNA, 40 bp, Escherichia coli; identical to SEQ ID NO: 15663
  source 1..40: mol_type = genomic DNA

SEQ ID NO: 16094 - DNA, 50 bp, Escherichia coli
  source 1..50: mol_type = genomic DNA
gtacttgtttagctatgtaaaagcaatagtattcttgccttaacactcat

SEQ ID NO: 16095 - DNA, 40 bp, Escherichia coli; identical to SEQ ID NO: 3245
  source 1..40: mol_type = genomic DNA

SEQ ID NO: 16096 - protein, 547 aa, Escherichia coli
MKLLVTYIRWSTREQDSGDSLRRQTNLIDAFYSKHKNDYYLLPAHRYVDKGKSGFHQQHKAQGSDFRRMFENVMSGAIPEGSLIVVENFDRFSRADIDTAIDDVRQILRKGVSILTLGDGELYDKSALTDPVKLIKHIIIAERAHQESLVKQKRIAQVWNHKTQLARELKKPMGKQAPGWLELSEDGSHYIVDEDKASLVNIIYDKRLSGMSMFAICKWLNEQGYPTINQRKVRISKTKKPDGNWSALSVKHILTSRSVLGYLPAKISTEDRKTVLREEIEGFYPQIVTDSKFYAVQQLLEETGKGKTSSGEHWLYVNILKGLIRCKCGLVMTPTGIRKPVYQGTYRCNGNKESRCSYGTVSRKLLDTQLCSRLFSKLSQLHDEATDTAKLDELQRRLNTVDSELEKLTETLIQLPNITQIQEALRVKQEEKDELIVQLSREKARVKSVSSLDLSGLDMESVEGRTEAQIIIKRLVKEIVVSGNEKLVDIYLHNGNMIRGFPLDGKDDHTLTLEEATDEMQSLDDMLIFGEPVTRIYPAGDMEEVDA

SEQ ID NO: 16097 - DNA, 50 bp, Escherichia coli; identical to SEQ ID NO: 3242
  source 1..50: mol_type = genomic DNA

SEQ ID NO: 16098 - DNA, 40 bp, Escherichia coli; identical to SEQ ID NO: 15663
  source 1..40: mol_type = genomic DNA

SEQ ID NO: 16099 - DNA, 50 bp, Escherichia coli; identical to SEQ ID NO: 3244
  source 1..50: mol_type = genomic DNA

SEQ ID NO: 16100 - DNA, 40 bp, Escherichia coli; identical to SEQ ID NO: 3245
  source 1..40: mol_type = genomic DNA

SEQ ID NO: 16101 - protein, 547 aa, Escherichia coli
MKLLVTYIRWSTKEQDSGDSLRRQTNLIDAFYAKHKEEYYLLPAHRYVDKGKSGFHQQHKAQGSDFRRMFENVMSGVIPEGSLIVVENFDRFSRADIDTAIDDVRQILRKGVSILTLGDGELYDKSALTDPVKLIKHIIIAERAHQESLVKQKRIAQVWNHKTQLARELKKPMGKQAPGWLELSEDGSHYIVDEDKASLVNIIYDKRLSGMSMFAICKWLNEQGYPTINQRKVRISKTKKPDGNWSALSVKHILTSRSVLGYLPAKISTEDRKTVLREEIESFYPQIVTDSKFYAVQQLLEETGKGKTSSGEHWLYVNILKGLIRCKCGLVMTPTGIRKPVYQGTYRCNGNKESRCSYGTVSRKLLDTQLCSRLFSKLSQLHDEATDTAKLDELQRRLNTVDGELEKLTETLIQLPNITQIQEALRVKQEEKDELIVQLSREKARVKSVSSLDLSGLDMESVEGRTEAQIIIKRLVKEIVVSGNEKLVDIYLHNGNMIRGFPLDGKDDHTLTLEEATDEMQSLDDMLIFGEPVTRIYPAGDMEEVDA

SEQ ID NO: 16102 - DNA, 50 bp, Escherichia coli; identical to SEQ ID NO: 3242
  source 1..50: mol_type = genomic DNA

SEQ ID NO: 16103 - DNA, 40 bp, Escherichia coli; identical to SEQ ID NO: 15663
  source 1..40: mol_type = genomic DNA

SEQ ID NO: 16104 - DNA, 50 bp, Escherichia coli; identical to SEQ ID NO: 3244
  source 1..50: mol_type = genomic DNA

SEQ ID NO: 16105 - DNA, 40 bp, Escherichia coli; identical to SEQ ID NO: 3245
  source 1..40: mol_type = genomic DNA

SEQ ID NO: 16106 - protein, 547 aa, Escherichia coli
MKLLVTYIRWSTKEQDSGDSLRRQTNLIDAFYSKHKNDYYLLPAHRYVDKGKSGFHQQHKAQGSDFRRMFENVMSGAIPEGSLIVVENFDRFSRADIDTAIDDVRQILRKGVSILTLGDGELYDKSALTDPVKLIKHIIIAERAHQESLVKQKRIAQVWNHKTQLARELKKPMGKQAPGWLELSEDGSHYIVDEDKASLVNIIYDKRLSGMSMFAICKWLNEQGYPTINQRKVRISKTKKPDGNWSALSVKHILTSRSVLGYLPAKISTEDRKTVLREEIEGFYPQIVTDSKFYAVQQLLEETGKGKTSSGDHWLYVNILKGLIRCKCGLVMTPTGIRKPVYQGTYRCNGNKESRCNYGTVSRKLLDTQLCSRLFSKLSQLHDEATDTAKLDELQRRLNTVDGELEKLTETLIQLPNITQIQEALRVKQEEKDELIVQLSREKARVKSVSSLDLSGLDMESVEGRTEAQIIIKRLVKEIVVSGNEKLVDIYLHNGNMIRGFPLDGKDDHTLTLEEATDEMQSLDDMLIFGEPVTRIYPAGDMEEVDA

SEQ ID NO: 16107 - DNA, 50 bp, Escherichia coli; identical to SEQ ID NO: 3242
  source 1..50: mol_type = genomic DNA

SEQ ID NO: 16108 - DNA, 40 bp, Escherichia coli; identical to SEQ ID NO: 15663
  source 1..40: mol_type = genomic DNA

SEQ ID NO: 16109 - DNA, 50 bp, Escherichia coli; identical to SEQ ID NO: 3244
  source 1..50: mol_type = genomic DNA

SEQ ID NO: 16110 - DNA, 40 bp, Escherichia coli; identical to SEQ ID NO: 3245
  source 1..40: mol_type = genomic DNA

SEQ ID NO: 16111 - protein, 547 aa, Escherichia coli
MKLLVTYIRWSTREQDSGDSLRRQTNLIDAFYAKHKDDYYLLPAHRYVDKGKSGFHQQHKNQGSDFRRMFENVMSGAIPEGSLIVVENFDRFSRADIDTAIDDVRQILRKGVSILTLGDGEFYDKSALTDPVKLIKHIIIAERAHQESLVKQKRIAQVWNHKTQLARELKKPMGKQAPGWLELSEDGSHYIVDEDKASLVNIIYDKRLSGMSMFAICKWLNEQGYPTINQRKVRISKTKKPDGNWSALSVKHILTSRSVLGYLPAKISTEDRKTVLREEIEGFYPQIVTDSKFYAVQQLLEETGKGKTSSGDHWLYVNILKGIIRCKCGLVMTPTGIRKPVYQGTYRCNGNKESRCSYGTVSRKLLDTQLCSRLFSKLSQLHDEATDTAKLDALQRRLNTVDSELEKLTETLIQLPNITQIQEALRVKQEEKDELIVQLSREKARVKSVSSLDLSGLDMESVEGRTEAQIIIKRLVKEIVVSGNEKLVDIYLHNGNMIRGFPLDGKDDHTLTLEEATDEMQSLDDMLIFGEPVTRIYPAGDMEEVDA

SEQ ID NO: 16112 - DNA, 50 bp, Escherichia coli; identical to SEQ ID NO: 3242
  source 1..50: mol_type = genomic DNA

SEQ ID NO: 16113 - DNA, 40 bp, Escherichia coli; identical to SEQ ID NO: 15663
  source 1..40: mol_type = genomic DNA

SEQ ID NO: 16114 - DNA, 50 bp, Escherichia coli; identical to SEQ ID NO: 3244
  source 1..50: mol_type = genomic DNA

SEQ ID NO: 16115 - DNA, 40 bp, Escherichia coli; identical to SEQ ID NO: 3245
  source 1..40: mol_type = genomic DNA

SEQ ID NO: 16116 - protein, 547 aa, Escherichia coli
MKLLVTYIRWSTKEQDSGDSLRRQTNLIDAFYSKHKNDYYLLPAHRYVDKGKSGFHQQHKAQGSDFRRMFENVMSGAIPEGSLIVVENFDRFSRADIDTAIDDVRQILRKGVSILTLGDGELYDKSALTDPVKLIKHIIIAERAHQESLVKQKRIAQVWNHKTQLARELKKPMGKQAPGWLELSEDGSHYIVDEDKASLVNIIYDKRLSGMSMFAICKWLNEQGYPTINQRKVRISKTKKPDGNWSALSVKHILTSRSVLGCLPAKISSEDRKTVLREEIESFYPQIVTDSKFYAVQQLLEETGKGKTSSGEHWLYVNILKGLIRCKCGLVMTPTGIRKPVYQGTYRCNGNKESRCSYGTVSRKLLDTQLCSRLFSKLSQLHDEATDTAKLDELQRRLNTVDSELEKLTETLIQLPNITQIQEALRVKQEEKDELIVQLSREKARVKSVSSLDLSGLDMESVEGRTEAQIIIKRLVKEIVVSGNEKLVDIYLHNGNMIRGFPLDGKDDHTLTLEEATDEMQSLDDMLIFGEPVTRIYPAGDMEEVDA

SEQ ID NO: 16117 - DNA, 50 bp, Escherichia coli; identical to SEQ ID NO: 3502
  source 1..50: mol_type = genomic DNA

SEQ ID NO: 16118 - DNA, 40 bp, Escherichia coli; identical to SEQ ID NO: 15663
  source 1..40: mol_type = genomic DNA

SEQ ID NO: 16119 - DNA, 50 bp, Escherichia coli; identical to SEQ ID NO: 15659
  source 1..50: mol_type = genomic DNA

SEQ ID NO: 16120 - DNA, 40 bp, Escherichia coli; identical to SEQ ID NO: 3245
  source 1..40: mol_type = genomic DNA

SEQ ID NO: 16121 - protein, 547 aa, Escherichia coli
MKLLATYIRWSTREQDSGDSLRRQTNLIDAFYSKHKNDYYLLPAHRYVDKGKSGFHQQHKAQGSDFRRMFENVMSGAIPEGSLIVVENFDRFSRADIDTAIDDVRQILRKGVSILTLGDGELYDKSALTDPVKLIKHIIIAERAHQESLVKQKRIAQVWNHKTQLARELKKPMGKQAPGWLELSEDGSHYIVDEDKASLVNIIYDKRLSGMSMFAICKWLNEQGYPTINQRKVRISKTKKPDGNWSALSVKHILTSRSVLGYLPAKISSEDRKTVLREEIEGFYPQIVTDSKFYAVQQLLEETGKGKTSSGDHWLYVNILKGIIRCKCGLVMTPTGIRKPVYQGTYRCNGNKESRCNYGTVSRKLLDTQLCSRLFSKLSQLHDEATDTAKLDELQRRLNTVDGELEKLTETLIQLPNITQIQEALRVKQEEKDELIVQLSREKARVKSVSSLDLSGLDMESVEGRTEAQIIIKRLVKEIVVSGNEKLVDIYLHNGNMIRGFPLDGKDDHTLTLEEATDEMQPLDDMLIFGEPVTRIYPAGDMEEVDA

SEQ ID NO: 16122 - DNA, 50 bp, Escherichia coli; identical to SEQ ID NO: 10667
  source 1..50: mol_type = genomic DNA

SEQ ID NO: 16123 - DNA, 40 bp, Escherichia coli; identical to SEQ ID NO: 15663
  source 1..40: mol_type = genomic DNA

SEQ ID NO: 16124 - DNA, 50 bp, Escherichia coli; identical to SEQ ID NO: 15774
  source 1..50: mol_type = genomic DNA

SEQ ID NO: 16125 - DNA, 40 bp, Escherichia coli; identical to SEQ ID NO: 3245
  source 1..40: mol_type = genomic DNA

SEQ ID NO: 16126 - protein, 547 aa, Escherichia coli; identical to SEQ ID NO: 15676

SEQ ID NO: 16127 - DNA, 50 bp, Escherichia coli
  source 1..50: mol_type = genomic DNA
gtacgtgtttagctatgtaaaagcgctagtattcttgccttaacactcat

SEQ ID NO: 16128 - DNA, 40 bp, Escherichia coli; identical to SEQ ID NO: 15663
  source 1..40: mol_type = genomic DNA

SEQ ID NO: 16129 - DNA, 50 bp, Escherichia coli; identical to SEQ ID NO: 3244
  source 1..50: mol_type = genomic DNA

SEQ ID NO: 16130 - DNA, 40 bp, Escherichia coli; identical to SEQ ID NO: 3245
  source 1..40: mol_type = genomic DNA

SEQ ID NO: 16131 - protein, 547 aa, Escherichia coli; identical to SEQ ID NO: 10611

SEQ ID NO: 16132 - DNA, 50 bp, Escherichia coli; identical to SEQ ID NO: 3242
  source 1..50: mol_type = genomic DNA

SEQ ID NO: 16133 - DNA, 40 bp, Escherichia coli; identical to SEQ ID NO: 15663
  source 1..40: mol_type = genomic DNA

SEQ ID NO: 16134 - DNA, 50 bp, Escherichia coli; identical to SEQ ID NO: 3244
  source 1..50: mol_type = genomic DNA

SEQ ID NO: 16135 - DNA, 40 bp, Escherichia coli; identical to SEQ ID NO: 3245
  source 1..40: mol_type = genomic DNA

SEQ ID NO: 16136 - protein, 547 aa, Escherichia coli
MKLLATYIRWSTKEQDSGDSLRRQTNLIDAFYSKHKNDYYLLPAHRYVDKGKSGFHQQHKAQGSDFRRMFENVMSGAIPEGSLIVVENFDRFSRADIDTAIDDVRQILRKGVSILTLGDGELYDKSALTDPVKLIKHIIIAERAHQESLVKQKRIAQVWNHKTQLARELKKPMGKQAPGWLELSEDGSHYIVDEDKASLVNIIYDKRLSGMSMFAICKWLNEQGYPTINQRKVRISKTKKPDGNWSALSVKHILTSRSVLGYLPAKISTEDRKTVLREEIESFYPQIVTDSKFYAVQQLLEETGKGKTSSGEHWLYVNILKGLIRCKCGLVMTPTGIRKPVYQGTYRCNGNKESRCSYGTVSRKLLDTQLCSRLFSKLSQLHDEATDTAKLDELQRRLNTVDSELEKLTETLIQLPNITQIQEALRVKQGEKDELIVQLSREKARVKSVSSLNLSGLDMESVEGRTEAQIIIKRLVKEIVVSGNEKLVDIYLHNGNMIRGFPLDGKDDHTLTLEEATDEMQSLDDMLIFGEPVTRIYPAGDMEEVDA

SEQ ID NO: 16137 - DNA, 50 bp, Escherichia coli; identical to SEQ ID NO: 3242
  source 1..50: mol_type = genomic DNA

SEQ ID NO: 16138 - DNA, 40 bp, Escherichia coli; identical to SEQ ID NO: 15663
  source 1..40: mol_type = genomic DNA

SEQ ID NO: 16139 - DNA, 50 bp, Escherichia coli; identical to SEQ ID NO: 3244
  source 1..50: mol_type = genomic DNA

SEQ ID NO: 16140 - DNA, 40 bp, Escherichia coli; identical to SEQ ID NO: 3245
  source 1..40: mol_type = genomic DNA

SEQ ID NO: 16141 - protein, 547 aa, Escherichia coli
MKLLATYIRWSTKEQDSGDSLRRQTNLIDAFYSKHKDDYYLLPAHRYVDKGKSGFHQQHKAQGSDFRRMFENVMSGVIPEGSLIVVENFDRFSRADIDTAIDDVRQILRKGVSILTLGDGELYDKSALTDPVKLIKHIIIAERAHQESLVKQKRIAQVWNHKTQLARELKKPMGKQAPGWLELSEDGSHYIVDEDKASLVNIIYDKRLSGMSMFAICKWLNEQGYPTINQRKVRISKTKKPDGNWSALSVKHILTSRSVLGYLPAKISTEDRKTVLREEIESFYPQIVTDSKFYAVQQLLEETGKGKTSSGEHWLYVNILKGLIRCKCGLVMTPTGIRKPVYQGTYRCNGNKESRCSYGTVSRKLLDTQLCSRLFSKLSQLHDEATDTAKLDELQRRLNTVDSELEKLTETLIQLPNITQIQEALRVKQEEKDELIVQLSREKARVKSVSSLDLSGLDMESVEGRTEAQIIIKRLVKEIVVSGNEKLVDIYLHNGNMIRGFPLDGKDDHTLTLEEATDEMQPLDDMLIFGEPVTRIYPAGDMEEVDA

SEQ ID NO: 16142 - DNA, 50 bp, Escherichia coli; identical to SEQ ID NO: 3242
  source 1..50: mol_type = genomic DNA

SEQ ID NO: 16143 - DNA, 40 bp, Escherichia coli; identical to SEQ ID NO: 15663
  source 1..40: mol_type = genomic DNA

SEQ ID NO: 16144 - DNA, 50 bp, Escherichia coli; identical to SEQ ID NO: 3244
  source 1..50: mol_type = genomic DNA

SEQ ID NO: 16145 - DNA, 40 bp, Escherichia coli; identical to SEQ ID NO: 3245
  source 1..40: mol_type = genomic DNA

SEQ ID NO: 16146 - protein, 547 aa, Escherichia coli; identical to SEQ ID NO: 10641

SEQ ID NO: 16147 - DNA, 50 bp, Escherichia coli; identical to SEQ ID NO: 3242
  source 1..50: mol_type = genomic DNA

SEQ ID NO: 16148 - DNA, 40 bp, Escherichia coli; identical to SEQ ID NO: 15663
  source 1..40: mol_type = genomic DNA

SEQ ID NO: 16149 - DNA, 50 bp, Escherichia coli; identical to SEQ ID NO: 3244
  source 1..50: mol_type = genomic DNA

SEQ ID NO: 16150 - DNA, 40 bp, Escherichia coli; identical to SEQ ID NO: 3245
  source 1..40: mol_type = genomic DNA

SEQ ID NO: 16151 - protein, 547 aa, Escherichia coli
MKLLVPYIRWSTKEQDSGDSLRRQTNLIDAFYAKHKDDYYLLPAHRYVDKGKSGFHQQHKAQGSDFRRMFENVMSGAIPEGSLIVVENFDRFSRADIDTAIDDVRQILRKGVSILTLGDGELYDKSALTDPVKLIKHIIIAERAHQESLVKQKRIAQVWNHKTQLARELKKPMGKQAPGWLELSEDGSHYIVDEDKASLVNIIYDKRLSGMSMFAICKWLNEQGYPTINQRKVRISKTKKPDGNWSALSVKHILTSRSVLGYLPAKISTEDRKTVLREEIESFYPQIVTDSKFYAVQQLLEETGKGKTSSGEHWLYVNILKGLIRCKCGLVMTPTGIRKPVYQGTYRCNGNKESRCSYGTVSRKLLDTQLCSRLFSKLSQLHDEATDTAKLDELQRRLNTVDSELEKLTETLIQLPNITQIQEALRVKQEEKDELIVQLSREKARVKSVSSLDLSGLDMESVEGRTEAQIIIKRLVKEIVVSGNEKLVDIYLHNGNMIRGFPLDGKDDHTLTLEEATDEMQSLDDMLIFGEPVTRIYPAGDMEEVDA

SEQ ID NO: 16152 - DNA, 50 bp, Escherichia coli; identical to SEQ ID NO: 3242
  source 1..50: mol_type = genomic DNA

SEQ ID NO: 16153 - DNA, 40 bp, Escherichia coli; identical to SEQ ID NO: 15663
  source 1..40: mol_type = genomic DNA

SEQ ID NO: 16154 - DNA, 50 bp, Escherichia coli; identical to SEQ ID NO: 3244
  source 1..50: mol_type = genomic DNA

SEQ ID NO: 16155 - DNA, 40 bp, Escherichia coli; identical to SEQ ID NO: 3245
  source 1..40: mol_type = genomic DNA

SEQ ID NO: 16156 - protein, 547 aa, Escherichia coli
MKLLVTYIRWSTKEQDSGDSLRRQTNLIDAFYAKHKDDYYLLPAHRYVDKGKSGFHQQHKAQGSDFRRMFENVMSGAIPEGSLIVVENFDRFSRADIDTAIDDVRQILRKGVSILTLGDGELYDKSALTDPVKLIKHIIIAERAHQESLVKQKRIAQVWNHKTQLARELKKPMGKQAPGWLELSEDGSHYIVDEDKASLVNIIYDKRLSGMSMFAICKWLNEQGYPTINQRKVRISKTKKPDGNWSALSVKHILTSRSVLGYLPAKISSEDRKTVLREEIEGFYPQIVTDSKFYAVQQLLEETGKGKTSSGEHWLYVNILKGLIRCKCGLVMTPTGIRKPVYQGTYRCNGNKESRCSYGTVSRKLLDTQLCSRLFSKLSQLHDEATDTARLDELQRRLNTVDSELEKLTETLIQLPNITQIQEALRVKQEEKDELIVQLSREKARVKSVSSLDLSGLDMESVEGRTEAQIIIKRLVKEIVVSGNEKLVDIYLHNGNMIRGFPLDGKDDHTLTLEEATDEMQSLDDMLIFGEPVTRIYPAGDMEEVDA

SEQ ID NO: 16157 - DNA, 50 bp, Escherichia coli; identical to SEQ ID NO: 3242
  source 1..50: mol_type = genomic DNA

SEQ ID NO: 16158 - DNA, 40 bp, Escherichia coli; identical to SEQ ID NO: 15663
  source 1..40: mol_type = genomic DNA

SEQ ID NO: 16159 - DNA, 50 bp, Escherichia coli; identical to SEQ ID NO: 3244
  source 1..50: mol_type = genomic DNA

SEQ ID NO: 16160 - DNA, 40 bp, Escherichia coli; identical to SEQ ID NO: 3245
  source 1..40: mol_type = genomic DNA

SEQ ID NO: 16161 - protein, 547 aa, Escherichia coli
MKLLVTYIRWSTKEQDSGDSLRRQTNLIDAFYSKHKNDYYLLPAHRYVDKGKSGFHQQHKAQGSDFRRMFENVMSGVIPEGSLIVVENFDRFSRADIDTAIDDVRQILRKGVSILTLGDGELYDKSALTDPVKLIKHIIIAERAHQESLVKQKRIAQVWNHKTQLARELKKPMGKQAPGWLELSEDGSHYIVDEDKASLVNIIYDKRLSGMSMFAICKWLNEQGYPTINQRKVRISKTKKPDGNWSALSVKHILTSRSVLGYLPAKISTEDRKTVLREEIESFYPQIVTDSKFYAVQQLLEETGKGKTSSGEHWLYVNILKGLIRCKCGLVMTPTGIRKPVYQGTYRCNGNKESRCNYGTVSRKLLDTQLCSRLFSKLSQLHDEATDTAKLDELQRRLNTVDSELEKLTETLIQLPNITQIQEALRVKQEEKDELIVQLSREKARVKSVSSLDLSGLDMESVEGRTEAQIIIKRLVKEIVVSGNEKLVDIYLHNGNMIRGFPLDGKDDHTLTLEEATDEMQSLDDMLIFGEPVTRIYPAGDMEEVDA

SEQ ID NO: 16162 - DNA, 50 bp, Escherichia coli; identical to SEQ ID NO: 3242
  source 1..50: mol_type = genomic DNA

SEQ ID NO: 16163 - DNA, 40 bp, Escherichia coli; identical to SEQ ID NO: 15663
  source 1..40: mol_type = genomic DNA

SEQ ID NO: 16164 - DNA, 50 bp, Escherichia coli; identical to SEQ ID NO: 3244
  source 1..50: mol_type = genomic DNA

SEQ ID NO: 16165 - DNA, 40 bp, Escherichia coli; identical to SEQ ID NO: 3245
  source 1..40: mol_type = genomic DNA

SEQ ID NO: 16166 - protein, 547 aa, Escherichia coli
MKLLVTYIRWSTKEQDSGDSLRRQTNLIDAFYSKHKNDYYLLPAHRYVDKGKSGFHQQHKNQGSDFRRMFENVMSEAIPEGSLIVVENFDRFSRADIDTAIDDVRQILRKGVSILTLGDGELYDKSALTDPVKLIKHIIIAERAHQESLVKQKRIAQVWNHKTQLARELKKPMGKQAPGWLELSEDGSHYIVDEDKASLVNIIYDKRLSGMSMFAICKWLNEQGYPTINQRKVRISKTKKPDGNWSALSVKHILTSRSVLGYLPAKISTEDRKTVLREEIESFYPQIVTDSKFYAVQQLLEETGKGKTSSGEHWLYVNILKGLIRCKCGLVMTPTGIRKPVYQGTYRCNGNKESRCNYGTVSRKLLDTQLCSRLFSKLSQLHDEATDTAKLDELQRRLNTVDSELEKLTETLIQLPNITQIQEALRVKQGEKDELIVQLSREKARVKSVSSLDLSGLDMESVEGRTEAQIIIKRLVKEIVVSGNEKLVDIYLHNGNMIRGFPLDGKDDHTLTLEEATDEMQPLDDMLIFGEPVTRIYPAGDMEEVDA

SEQ ID NO: 16167 - DNA, 50 bp, Escherichia coli; identical to SEQ ID NO: 3242
  source 1..50: mol_type = genomic DNA

SEQ ID NO: 16168 - DNA, 40 bp, Escherichia coli; identical to SEQ ID NO: 15663
  source 1..40: mol_type = genomic DNA

SEQ ID NO: 16169 - DNA, 50 bp, Escherichia coli; identical to SEQ ID NO: 3244
  source 1..50: mol_type = genomic DNA

SEQ ID NO: 16170 - DNA, 40 bp, Escherichia coli; identical to SEQ ID NO: 3245
  source 1..40: mol_type = genomic DNA

SEQ ID NO: 16171 - protein, 547 aa, Escherichia coli
MKLLVTYIRWSTREQDSGDSLRRQTNLIDAFYAKHKDDYYLLPAHRYVDKGKSGFHQQHKAQGSDFRRMFENVMSGAIPEGSLIVVENFDRFSRADIDTAIDDVRQILRKGVSILTLGDGELYDKSALTDPVKLIKHIIIAERAHQESLVKQKRIAQVWNHKTQLARELKKPMGKQAPGWLELSEDGSHYIVDEDKASLVNIIYDKRLSGMSMFAICKWLNEQGYPTINQRKVRISKTKKPDGNWSALSVKHILTSRSVLGYLPAKISTEDRKTVLREEIEGFYPQIVTDSKFYAVQQLLEETGKGKTSSGDHWLYVNILKGLIRCKCGLVMTPTGIRKPVYQGTYRCNGNKESRCSYGTVSRKLLDTQLCSRLFSKLSQLHDEATDTAKLDELQRRLNTVDSELEKLTETLIQLPNITQIQEALRVKQEEKDELIVQLSREKARVKSVSSLDLSGLDMESVEGRTEAQIIIKRLVKEIVVSGNEKLVDIYLHNGNMIRGFPLDGKDDHTLTLEEATDEMQSLDDMLIFGEPVTRIYPAGDMEEVDA

SEQ ID NO: 16172 - DNA, 50 bp, Escherichia coli; identical to SEQ ID NO: 3242
  source 1..50: mol_type = genomic DNA

SEQ ID NO: 16173 - DNA, 40 bp, Escherichia coli; identical to SEQ ID NO: 15663
  source 1..40: mol_type = genomic DNA

SEQ ID NO: 16174 - DNA, 50 bp, Escherichia coli; identical to SEQ ID NO: 3244
  source 1..50: mol_type = genomic DNA

SEQ ID NO: 16175 - DNA, 40 bp, Escherichia coli; identical to SEQ ID NO: 3245
  source 1..40: mol_type = genomic DNA

SEQ ID NO: 16176 - protein, 547 aa, Escherichia coli
MKLLATYIRWSTKEQDSGDSLRRQTNLIDAFYAKHKNDYYLLPAHRYVDKGKSGFHQQHKAQGSDFRRMFENVMSGVIPEGSLIVVENFDRFSRADIDTAIDDVRQILRKGVSILTLGDGELYDKSALTDPVKLIKHIIIAERAHQESLVKQKRIAQVWNHKTQLARELKKPMGKQAPGWLELSEDGSHYIVDEDKASLVNIIYDKRLSGMSMFAICKWLNEQGYPTINQRKVRISKTKKPDGNWSALSVKHILTSRSVLGYLPAKISTEDRKTVLREEIESFYPQIVTDSKFYAVQQLLEETGKGKTSSGEHWLYVNILKGLIRCKCGLVMTPTGIRKPVYQGTYRCNGNKESRCNYGTVSRKLLDTQLCSRLFSKLSQLHDEATDTAKLDELQRRLNTVDSELEKLTETLIQLPNITQIQEALRVKQGEKDELIVQLSREKARVKSVSSLDLSGLDMESVEGRTEAQIIIKRLVKEIVVSGNEKLVDIYLHNGNMIRGFPLDGKDDHTLTLEEATDEMQSLDDMLIFGEPVTRIYPAGDMEEVDA

SEQ ID NO: 16177 - DNA, 50 bp, Escherichia coli; identical to SEQ ID NO: 3242
  source 1..50: mol_type = genomic DNA

SEQ ID NO: 16178 - DNA, 40 bp, Escherichia coli; identical to SEQ ID NO: 15663
  source 1..40: mol_type = genomic DNA

SEQ ID NO: 16179 - DNA, 50 bp, Escherichia coli; identical to SEQ ID NO: 3244
  source 1..50: mol_type = genomic DNA

SEQ ID NO: 16180 - DNA, 40 bp, Escherichia coli; identical to SEQ ID NO: 3245
  source 1..40: mol_type = genomic DNA

SEQ ID NO: 16181 - protein, 547 aa, Escherichia coli
MKLLVPYIRWSTKEQDSGDSLRRQTNLIDAFYSKHKEEYYLLPAHRYVDKGKSGFHQQHKAQGSDFRRMFENVMSGAIPEGSLIVVENFDRFSRADIDTAIDDVRQILRKGVSILTLGDGELYDKSALTDPVKLIKHIIIAERAHQESLVKQKRIAQVWNHKTQLARELKKPMGKQAPGWLELSEDGSHYIVDEDKASLVNIIYDKRLSGMSMFAICKWLNEQGYPTINQRKVRISKTKKPDGNWSALSVKHILTSRSVLGYLPAKISSEDRKTVLREEIEGFYPQIVTDSKFYAVQQLLEETGKGKTSSGDHWLYVNILKGLIRCKCGLVMTPTGIRKPVYQGTYRCNGNKESRCNYGTVSRKLLDTQLCSRLFSKLSQLHDEATDTAKLDELQRRLNTVDGELEKLTETLIQLPNITQIQEALRVKQEEKDELIVQLSREKARVKSVSSLDLSGLDMESVEGRTEAQIIIKRLVKEIVVSGNEKLVDIYLHNGNMIRGFPLDGKDDHTLTLEEATDEMQSLDDMLIFGEPVTRIYPAGDMEEVDA

SEQ ID NO: 16182 - DNA, 50 bp, Escherichia coli; identical to SEQ ID NO: 3242
  source 1..50: mol_type = genomic DNA

SEQ ID NO: 16183 - DNA, 40 bp, Escherichia coli; identical to SEQ ID NO: 15663
  source 1..40: mol_type = genomic DNA

SEQ ID NO: 16184 - DNA, 50 bp, Escherichia coli; identical to SEQ ID NO: 3244
  source 1..50: mol_type = genomic DNA

SEQ ID NO: 16185 - DNA, 40 bp, Escherichia coli; identical to SEQ ID NO: 3245
  source 1..40: mol_type = genomic DNA

SEQ ID NO: 16186 - protein, 547 aa, Escherichia coli
MKLLVTYIRWSTKEQDSGDSLRRQTNLIDAFYVKHKDEYYLLPAHRYVDKGKSGFHQQHKAQGSDFRRMFENVMSGAIPEGSLIVVENFDRFSRADIDTAIDDVRQILRKGVSILTLGDGELYDKSALTDPVKLIKHIIIAERAHQESLVKQKRIAQVWNHKTQLARELKKPMGKQAPGWLELSEDGSHYIIDEDKAALVNLIYDKRLSGMSMFAITKWLNEQGYPTINQRKVRISKTKRPDGNWSSLSVKHILTSRSVLGYLPAKISSEDHKTVLREEIEGFYPQIVTDSKFYAVQQLLKDTGKGKTSSGEHWLYVNILRGLVRCRCGLVMIPSGIRKPVYQGVYRCNGKHEGRCNYGTVSRKLLDTQLCSRLFSKLSQLHDEATDTAKLDELQRRLNTVDGELEKLTETLIQLPNITQIQEALRVKQEEKDELIVQLSREKARVKSVSSLDLSGLDMESVEGRTEAQIIIKRLVKEIVVSGNERLVDIYLHNGNLIRGFHLDGKDDHTLTLEEATDEMQSLDDMLIFGEPVIRIYPAGDMEEVDA

SEQ ID NO: 16187 - DNA, 50 bp, Escherichia coli; identical to SEQ ID NO: 10622
  source 1..50: mol_type = genomic DNA

SEQ ID NO: 16188 - DNA, 40 bp, Escherichia coli; identical to SEQ ID NO: 15663
  source 1..40: mol_type = genomic DNA

SEQ ID NO: 16189 - DNA, 50 bp, Escherichia coli
  source 1..50: mol_type = genomic DNA
atgcgtgtttagctatgtaaaagcaatagtattcttgccttaacgctcat

SEQ ID NO: 16190 - DNA, 40 bp, Escherichia coli; identical to SEQ ID NO: 3245
  source 1..40: mol_type = genomic DNA

SEQ ID NO: 16191 - protein, 547 aa, Escherichia coli
MKLLATYIRWSTKEQDSGDSLRRQTNLIDAFYSKHKNDYYLLPAHRYVDKGKSGFHQQHKAQGSDFRRMFENVMSGAIPEGSLIVVENFDRFSRADIDTAIDDVRQILRKGVSILTLGDGELYDKSALTDPVKLIKHIIIAERAHQESLVKQKRIAQVWNHKTQLARELKKPMGKQAPGWLELSEDGSHYIVDEDKASLVNIIYDKRLSGMSMFAICKWLNEQGYPTINQRKVRISKTKKPDGNWSALSVKHILTSRSVLGYLPAKISTEDRKTVLREEIEGFYPQIVTDSKFYAVQQLLEETGKGKTSSGDHWLYVNILKGLIRCKCGLVMTPTGIRKPVYQGTYRCNGNKESRCSYGTVSRKLLDTQLCSRLFSKLSQLHDEATDTAKLDELQRRLNTVDSELEKLTETLIQLPNITQIQEALRVKQGEKDELIVQLSREKARVKSVSSLDLSGLDMESVEGRTEAQIIIKRLVKEIVVSGNEKLVDIYLHNGNMIRGFPLDGKDDHTLTLEEATDEMQPLDDMLIFGEPVTRIYPAGDMEEVDA

SEQ ID NO: 16192 - DNA, 50 bp, Escherichia coli; identical to SEQ ID NO: 3242
  source 1..50: mol_type = genomic DNA

SEQ ID NO: 16193 - DNA, 40 bp, Escherichia coli; identical to SEQ ID NO: 15663
  source 1..40: mol_type = genomic DNA

SEQ ID NO: 16194 - DNA, 50 bp, Escherichia coli; identical to SEQ ID NO: 3244
  source 1..50: mol_type = genomic DNA

SEQ ID NO: 16195 - DNA, 40 bp, Escherichia coli; identical to SEQ ID NO: 3245
  source 1..40: mol_type = genomic DNA

SEQ ID NO: 16196 - protein, 547 aa, Escherichia coli
MKLLATYIRWSTKEQDSGDSLRRQTNLIDAFYSKHKNDYYLLPAHRYVDKGKSGFHQQHKAQGSDFRRMFENVMSGAIPEGSLIVVENFDRFSRADIDTAIDDVRQILRKGVSILTLGDGELYDKSALTDPVKLIKHIIIAERAHQESLVKQKRIAQVWNHKTQLARELKKPMGKQAPGWLELSEDGSHYIVDEDKASLVNIIYDKRLSGMSMFAICKWLNEQGYPTINQRKVRISKTKKPDGNWSALSVKHILTSRSVLGYLPAKISTEDRKTVLREEIESFYPQIVTDSKFYAVQQLLEETGKGKTSSGEHWLYVNILKGLIRCKCGLVMTPTGIRKPVYQGTYRCNGNKESRCSYGTVSRKLLDTQLCSRLFSKLSQLHDEATDTAKLDELQRRLNTVDGELEKLTETLIQLPNITQIQEALRVKQEEKDELIVQLSREKARVKSVSSLDLSGLDMESVEGRTEAQIIIKRLVKEIVVSGNEKLVDIYLHNGNMIRGFPLDGKDDHTLTLEEATDEMQSLDDMLIFGEPVTRIYPAGDMEEVDA

SEQ ID NO: 16197 - DNA, 50 bp, Escherichia coli; identical to SEQ ID NO: 3242
  source 1..50: mol_type = genomic DNA

SEQ ID NO: 16198 - DNA, 40 bp, Escherichia coli; identical to SEQ ID NO: 15663
  source 1..40: mol_type = genomic DNA

SEQ ID NO: 16199 - DNA, 50 bp, Escherichia coli; identical to SEQ ID NO: 3244
  source 1..50: mol_type = genomic DNA

SEQ ID NO: 16200 - DNA, 40 bp, Escherichia coli; identical to SEQ ID NO: 3245
  source 1..40: mol_type = genomic DNA

SEQ ID NO: 16201 - protein, 547 aa, Escherichia coli; identical to SEQ ID NO: 15811

SEQ ID NO: 16202 - DNA, 50 bp, Escherichia coli; identical to SEQ ID NO: 3502
  source 1..50: mol_type = genomic DNA

SEQ ID NO: 16203 - DNA, 40 bp, Escherichia coli; identical to SEQ ID NO: 15663
  source 1..40: mol_type = genomic DNA

SEQ ID NO: 16204 - DNA, 50 bp, Escherichia coli; identical to SEQ ID NO: 15659
  source 1..50: mol_type = genomic DNA

SEQ ID NO: 16205 - DNA, 40 bp, Escherichia coli; identical to SEQ ID NO: 3245
  source 1..40: mol_type = genomic DNA

SEQ ID NO: 16206 - protein, 547 aa, Escherichia coli
MKLLVTYIRWSTREQDSGDSLRRQTNLIDAFYSKHKNDYYLLPAHRYVDKGKSGFHQQHKAQGSDFRRMFENVMSGVIPEGSLIVVENFDRFSRADIDTAIDDVRQILRKGVSILTLGDGELYDKSALTDPVKLIKHIIIAERAHQESLVKQKRIAQVWNHKTQLARELKKPMGKQAPGWLELSEDGSHYIVDEDKASLVNIIYDKRLSGMSMFAICKWLNEQGYPTINQRKVRISKTKKPDGNWSALSVKHILTSRSVLGYLPAKISTEDRKTVLREEIEGFYPQIVTDSKFYAVQQLLEETGKGKTSSGEHWLYVNILKGLIRCKCGLVMTPTGIRKPVYQGTYRCNGNKESRCSYGTVSRKLLDTQLCSRLFSKLSQLHDEATDTAKLDELQRRLNTVDSELEKLTETLIQLPNITQIQEALRVKQEEKDELIVQLSREKARVKSVSSLDLSGLDMESVEGRTEAQIIIKRLVKEIVVSGNEKLVDIYLHNGNMIRGFPLDGKDDHTLTLEEATDEMQSLDDMLIFGEPVTRIYPAGDMEEVDA

SEQ ID NO: 16207 - DNA, 50 bp, Escherichia coli; identical to SEQ ID NO: 3242
  source 1..50: mol_type = genomic DNA

SEQ ID NO: 16208 - DNA, 40 bp, Escherichia coli; identical to SEQ ID NO: 15663
  source 1..40: mol_type = genomic DNA

SEQ ID NO: 16209 - DNA, 50 bp, Escherichia coli; identical to SEQ ID NO: 3244
  source 1..50: mol_type = genomic DNA

SEQ ID NO: 16210 - DNA, 40 bp, Escherichia coli; identical to SEQ ID NO: 3245
  source 1..40: mol_type = genomic DNA

SEQ ID NO: 16211 - protein, 547 aa, Escherichia coli; identical to SEQ ID NO: 15941

SEQ ID NO: 16212 - DNA, 50 bp, Escherichia coli
  source 1..50: mol_type = genomic DNA
gtgcgtgtttagctatgtaaaagtactagtattcttgccttaacactcat

SEQ ID NO: 16213 - DNA, 40 bp, Escherichia coli; identical to SEQ ID NO: 15663
  source 1..40: mol_type = genomic DNA

SEQ ID NO: 16214 - DNA, 50 bp, Escherichia coli
  source 1..50: mol_type = genomic DNA
gtgcgtgtttagctatgtaaaagtaatagtattcttgccttaacactcat

SEQ ID NO: 16215 - DNA, 40 bp, Escherichia coli; identical to SEQ ID NO: 3245
  source 1..40: mol_type = genomic DNA

SEQ ID NO: 16216 - protein, 547 aa, Escherichia coli
MKLLVPYIRWSTKEQDSGDSLRRQTNLIDAFYSKHKNDYYLLPAHRYVDKGKSGFHQQHKAQGSDFRRMFENVMSGAIPEGSLIVVENFDRFSRADIDTAIDDVRQILRKGVSILTLGDGELYDKSALTDPVKLIKHIIIAERAHQESLVKQKRIAQVWNHKTQLARELKKPMGKQAPGWLELSEDGSHYIVDEDKASLVNIIYDKRLSGMSMFAICKWLNEQGYPTINQRKVRISKTKKPDGNWSALSVKHILTSRSVLGYLPAKISTEDRKTVLREEIESFYPQIVTDSKFYAVQQLLEETGKGKTSSGEHWLYVNILKGLIRCKCGLVMTPTGIRKPVYQGTYRCNGNKESRCSYGTVSRKLLDTQLCSRLFSKLSQLHDEATDTAKLDELQRRLNTVDSELEKLTETLIQLPNITQIQEALRGKQEEKDELIVQLSREKARVKSVSSLDLSGLDMESVEGRTEAQIIIKRLVKEIVVSGNEKLVDIYLHNGNMIRGFPLDGKDDHTLTLEEATDEMQPLDDMLIFGEPVTRIYPAGDMEEVDA

SEQ ID NO: 16217 - DNA, 50 bp, Escherichia coli; identical to SEQ ID NO: 3242
  source 1..50: mol_type = genomic DNA

SEQ ID NO: 16218 - DNA, 40 bp, Escherichia coli; identical to SEQ ID NO: 15663
  source 1..40: mol_type = genomic DNA

SEQ ID NO: 16219 - DNA, 50 bp, Escherichia coli; identical to SEQ ID NO: 3244
  source 1..50: mol_type = genomic DNA

SEQ ID NO: 16220 - DNA, 40 bp, Escherichia coli; identical to SEQ ID NO: 3245
  source 1..40: mol_type = genomic DNA

SEQ ID NO: 16221 - protein, 547 aa, Escherichia coli
MKLLATYIRWSTKEQDAGDSLRRQTNLIDAFYSKHKNDYYLLPAHRYVDKGKSGFHQQHKAQGSDFRRMFENVMSGVIPEGSLIVVENFDRFSRADIDTAIDDVRQILRKGVSILTLGDGELYDKSALTDPVKLIKHIIIAERAHQESLVKQKRIAQVWNHKTQLARELKKPMGKQAPGWLELSEDGSHYIVDEDKASLVNIIYDKRLSGMSMFAICKWLNEQGYPTINQRKVRISKTKKPDGNWSALSVKHILTSRSVLGYLPAKISSEDRKTVLREEIEGFYPQIVTDSKFYAVQQLLEETGKGKTSSGEHWLYVNILKGLIRCKCGLVMTPTGIRKPVYQGTYRCNGNKESRCSYGTVSRKLLDTQLCSRLFSKLSQLHDEATDTAKLDELQRRLNTVDGELEKLTETLIQLPNITQIQEALRVKQEEKDELIVQLSREKARVKSVSSLDLSGLDMESVEGRTEAQIIIKRLVKEIVVSGNEKLVDIYLHNGNMIRGFPLDGKDDHTLTLEEATDEMQSLDDMLIFGEPVTRIYPAGDMEEVDA

SEQ ID NO: 16222 - DNA, 50 bp, Escherichia coli; identical to SEQ ID NO: 3242
  source 1..50: mol_type = genomic DNA

SEQ ID NO: 16223 - DNA, 40 bp, Escherichia coli; identical to SEQ ID NO: 15663
  source 1..40: mol_type = genomic DNA

SEQ ID NO: 16224 - DNA, 50 bp, Escherichia coli; identical to SEQ ID NO: 3244
  source 1..50: mol_type = genomic DNA

SEQ ID NO: 16225 - DNA, 40 bp, Escherichia coli; identical to SEQ ID NO: 3245
  source 1..40: mol_type = genomic DNA

SEQ ID NO: 16226 - protein, 547 aa, Escherichia coli
MKLLVPYIRWSTKEQDSGDSLRRQTNLIDAFYAKHKDDYYLLPAHRYVDKGKSGFHQQHKAQGSDFRRMFENVMSGAIPEGSLIVVENFDRFSRADIDTAIDDVRQILRKGVSILTLGDGELYDKSALTDPVKLIKHIIIAERAHQESLVKQKRIAQVWNHKTQLARELKKPMGKQAPGWLELSEDGSHYIVDEDKASLVNIIYDKRLSGMSMFAICKWLNEQGYPTINQRKVRISKTKKPDGNWSALSVKHILTSRSVLGYLPAKISTEDRKTVLREEIEGFYPQIVTDSKFYAVQQLLEETGKGKTSSGEHWLYVNILKGLIRCKCGLVMTPTGIRKPVYQGTYRCNGNKESRCNYGTVSRKLLDTQLCSRLFSKLSQLHDEATDTAKLDELQRRLNTVDSELEKLTETLIQLPNITQIQEALRVKQGEKDELIVQLSREKARVKSVSSLDLSGLDMESVEGRTEAQIIIKRLVKEIVVSGNEKLVDIYLHNGNMIRGFPLDGKDDHTLTLEEATDEMQSLDDMLIFGEPVTRIYPAGDMEEVDA

SEQ ID NO: 16227 - DNA, 50 bp, Escherichia coli; identical to SEQ ID NO: 3242
  source 1..50: mol_type = genomic DNA

SEQ ID NO: 16228 - DNA, 40 bp, Escherichia coli; identical to SEQ ID NO: 15663
  source 1..40: mol_type = genomic DNA

SEQ ID NO: 16229 - DNA, 50 bp, Escherichia coli; identical to SEQ ID NO: 3244
  source 1..50: mol_type = genomic DNA

SEQ ID NO: 16230 - DNA, 40 bp, Escherichia coli; identical to SEQ ID NO: 3245
  source 1..40: mol_type = genomic DNA

SEQ ID NO: 16231 - protein, 547 aa, Escherichia coli
MKLLVTYIRWSTKEQDSGDSLRRQTNLIDAFYAKHKEEYYLLPAHRYVDKGKSGFHQQHKNQGSDFRRMFENVMSGAIPEGSLIVVENFDRFSRADIDTAIDDVRQILRKGVSILTLGDGELYDKSALTDPVKLIKHIIIAERAHQESLVKQKRIAQVWNHKTQLARELKKPMGKQAPGWLELSEDGSHYIVDEDKASLVNIIYDKRLSGMSMFAICKWLNEQGYPTINQRKVRISKTKKPDGNWSALSVKHILTSRSVLGYLPAKISTEDRKTVLREEIEGFYPQIVTDSKFYAVQQLLEETGKGKTSSGEHWLYVNILKGLIRCKCGLVMTPTGIRKPVYQGTYRCNGNKESRCSYGTVSRKLLDTQLCSRLFSKLSQLHDEATDTAKLDELQRRLNTVDSELEKLTETLIQLPNITQIQEALRVKQEEKDELIVQLSREKARVKSVSSLDLSGLDMESVEGRTEAQIIIKRLVKEIVVSGNEKLVDIYLHNGNMIRGFPLDGKDDHTLTLEEATDEMQSLDDMLIFGEPVTRIYPAGDMEEVDA

SEQ ID NO: 16232 - DNA, 50 bp, Escherichia coli; identical to SEQ ID NO: 3242
  source 1..50: mol_type = genomic DNA

SEQ ID NO: 16233 - DNA, 40 bp, Escherichia coli; identical to SEQ ID NO: 15663
  source 1..40: mol_type = genomic DNA

SEQ ID NO: 16234 - DNA, 50 bp, Escherichia coli; identical to SEQ ID NO: 3244
  source 1..50: mol_type = genomic DNA

SEQ ID NO: 16235 - DNA, 40 bp, Escherichia coli; identical to SEQ ID NO: 3245
  source 1..40: mol_type = genomic DNA

SEQ ID NO: 16236 - protein, 547 aa, Escherichia coli
MKLLVPYIRWSTKEQDSGDSLRRQTNLIDAFYSKHKNDYYLLPAHRYVDKGKSGFHQQHKNQGSDFRRMFENVMSGAIPEGSLIVVENFDRFSRADIDTAIDDVRQILRKGVSILTLGDGELYDKSALTDPVKLIKHIIIAERAHQESLVKQKRIAQVWNHKTQLARELKKPMGKQAPGWLELSEDGSHYIVDEDKASLVNIIYDKRLSGMSMFAICKWLNEQGYPTINQRKVRISKTKKPDGNWSALSVKHILTSRSVLGYLPAKISTEDRKTVLREEIEGFYPQIVTDSKFYAVQQLLEETGKGKTSSGEHWLYVNILKGLIRCKCGLVMTPTGIRKPVYQGTYRCNGNKESRCSYGTVSRKLLDTQLCSRLFSKLSQLHDEATDTAKLDELQRRLNTVDGELEKLTETLIQLPNITQIQEALRVKQEEKDELIVQLSREKARVKSVSSLDLSGLDMESVEGRTEAQIIIKRLVKEIVVSGNEKLVDIYLHNGNMIRGFPLDGKDDHTLTLEEATDEMQSLDDMLIFGEPVTRIYPAGDMEEVDA

SEQ ID NO: 16237 - DNA, 50 bp, Escherichia coli; identical to SEQ ID NO: 3242
  source 1..50: mol_type = genomic DNA

SEQ ID NO: 16238 - DNA, 40 bp, Escherichia coli; identical to SEQ ID NO: 15663
  source 1..40: mol_type = genomic DNA

SEQ ID NO: 16239 - DNA, 50 bp, Escherichia coli; identical to SEQ ID NO: 3244
  source 1..50: mol_type = genomic DNA

SEQ ID NO: 16240 - DNA, 40 bp, Escherichia coli; identical to SEQ ID NO: 3245
  source 1..40: mol_type = genomic DNA

SEQ ID NO: 16241 - protein, 547 aa, Escherichia coli
MKLLVTYIRWSTKEQDSGDSLRRQTNLIDAFYSKHKNDYYLLPAHRYVDKGKSGFHQQHKAQGSDFRRMFENVMSGAIPEGSLIVVENFDRFSRADIDTAIDDVRQILRKGVSILTLGDGELYDKSALTDPVKLIKHIIIAERAHQESLVKQKRIAQVWNHKTQLARELKKPMGKQAPGWLELSEDGSHYIVDEDKASLVNIIYDKRLSGMSMFAICKWLNEQGYPTINQRKVRISKTKKPDGNWSALSVKHILTSRSVLGYLPAKISTEDRKTVLREEIEGFYPQIVTDSKFYAVQQLLEETGKGKTSSGDHWLYVNILKGLIRCKCGLVMTPTGIRKPVYQGTYRCNGNKESRCSYGTVSRKLLDTQLCSRLFSKLSQLHDEATDTAKLDELQRRLNTVDSELEKLTETLIQLPNITQIQEALRVKQGEKDELIVQLSREKARVKSVSSLNLSGLDMESVEGRTEAQIIIKRLVKEIVVSGNEKLVDIYLHNGNMIRGFPLDGKDDHTLTLEEATDEMQSLDDMLIFGEPVTRIYPAGDMEEVDA

SEQ ID NO: 16242 - DNA, 50 bp, Escherichia coli; identical to SEQ ID NO: 3242
  source 1..50: mol_type = genomic DNA

SEQ ID NO: 16243 - DNA, 40 bp, Escherichia coli; identical to SEQ ID NO: 15663
  source 1..40: mol_type = genomic DNA

SEQ ID NO: 16244 - DNA, 50 bp, Escherichia coli; identical to SEQ ID NO: 3244
  source 1..50: mol_type = genomic DNA

SEQ ID NO: 16245 - DNA, 40 bp, Escherichia coli; identical to SEQ ID NO: 3245
  source 1..40: mol_type = genomic DNA

SEQ ID NO: 16246 - protein, 547 aa, Escherichia coli
MKLLVPYIRWSTKEQDSGDSLRRQTNLIDAFYAKHKEEYYLLPAHRYVDKGKSGFHQQHKAQGSDFRRMFENVMSGVIPEGSLIVVENFDRFSRADIDTAIDDVRQILRKGVSILTLGDGELYDKSALTDPVKLIKHIIIAERAHQESLVKQKRIAQVWNHKTQLARELKKPMGKQAPGWLELSEDGSHYIVDEDKASLVNIIYDKRLSGMSMFAICKWLNEQGYPTINQRKVRISKTKKPDGNWSALSVKHILTSRSVLGYLPAKISSEDRKTVLREEIEGFYPQIVTDSKFYAVQQLLEETGKGKTSSGDHWLYVNILKGLIRCKCGLVMTPTGIRKPVYQGTYRCNGNKESRCNYGTVSRKLLDTQLCSRLFSKLSQLHDEATDTAKLDELQRRLNTVDGELEKLTETLIQLPNITQIQEALRVKQEEKDELIVQLSREKARVKSVSSLDLSGLDMESVEGRTEAQIIIKRLVKEIVVSGNEKLVDIYLHNGNMIRGFPLDGKDDHTLTLEEATDEMQPLDDMLIFGEPVTRIYPAGDMEEVDA

SEQ ID NO: 16247 - DNA, 50 bp, Escherichia coli; identical to SEQ ID NO: 3242
  source 1..50: mol_type = genomic DNA

SEQ ID NO: 16248 - DNA, 40 bp, Escherichia coli; identical to SEQ ID NO: 15663
  source 1..40: mol_type = genomic DNA

SEQ ID NO: 16249 - DNA, 50 bp, Escherichia coli; identical to SEQ ID NO: 3244
  source 1..50: mol_type = genomic DNA

SEQ ID NO: 16250 - DNA, 40 bp, Escherichia coli; identical to SEQ ID NO: 3245
  source 1..40: mol_type = genomic DNA

SEQ ID NO: 16251 - protein, 547 aa, Escherichia coli
MKLLVTYIRWSTKEQDSGDSLRRQTNLIDAFYAKHKDDYYLLPAHRYVDKGKSGFHQQHKNQGSDFRRMFENVMSGVIPEGSLIVVENFDRFSRADIDTAIDDVRQILRKGVSILTLGDGELYDKSALTDPVKLIKHIIIAERAHQESLVKQKRIAQVWNHKTQLARELKKPMGKQAPGWLELSEDGSHYIVDEDKASLVNIIYDKRLSGMSMFAICKWLNEQGYPTINQRKVRISKTKKPDGNWSALSVKHILTSRSVLGYLPAKISTEDRKTVLREEIEGFYPQIVTDSKFYAVQQLLEETGKGKTSSGEHWLYVNILKGLIRCKCGLVMTPTGIRKPVYQGTYRCNGNKESRCNYGTVSRKLLDTQLCSRLFSKLSQLHDEATDTAKLDELQRRLNTVDGELEKLTETLIQLPNITQIQEALRVKQEEKDELIVQLSREKARVKSVSSLDLSGLDMESVEGRTEAQIIIKRLVKEIVVSGNEKLVDIYLHNGNMIRGFPLDGKDDHTLTLEEATDEMQSLDDMLIFGEPVTRIYPAGDMEEVDA

SEQ ID NO: 16252 - DNA, 50 bp, Escherichia coli; identical to SEQ ID NO: 3242
  source 1..50: mol_type = genomic DNA

SEQ ID NO: 16253 - DNA, 40 bp, Escherichia coli; identical to SEQ ID NO: 15663
  source 1..40: mol_type = genomic DNA

SEQ ID NO: 16254 - DNA, 50 bp, Escherichia coli; identical to SEQ ID NO: 3244
  source 1..50: mol_type = genomic DNA

SEQ ID NO: 16255 - DNA, 40 bp, Escherichia coli; identical to SEQ ID NO: 3245
  source 1..40: mol_type = genomic DNA

SEQ ID NO: 16256 - protein, 547 aa, Escherichia coli
MKLLVTYIRWSTREQDSGDSLRRQTNLIDAFYAKHKDDYYLLPAHRYVDKGKSGFHQQHKAQGSDFRRMFENVMSGAIPEGSLIVVENFDRFSRADIDTAIDDVRQILRKGVSILTLGDGELYDKSALTDPVKLIKHIIIAERAHQESLVKQKRIAQVWNHKTQLARELKKPMGKQAPGWLELSEDGSHYIVDEDKASLVNIIYDKRLSGMSMFAICKWLNEQGYPTINQRKVRISKTKKPDGNWSALSVKHILTSRSVLGYLPAKVSSEDRKTVLREEIEGFYPQIVTDSKFYAVQQLLEETGKGKTSSGEHWLYVNILKGLIRCKCGLVMTPTGIRKPVYQGTYRCNGNKESRCSYGTVSRKLLDTQLCSRLFSKLSQLHDEATDTAKLDELQRRLNTVDSELEKLTETLIQLPNITQIQEALRVKQEEKDELIVQLSREKARVKSVSSLDLSGLDMESVEGRTEAQIIIKRLVKEIVVSGNEKLVDIYLHNGNMIRGFPLDGKDDHTLTLEEATDEMQSLDDMLIFGEPVTRIYPAGDMEEVDA

SEQ ID NO: 16257 - DNA, 50 bp, Escherichia coli; identical to SEQ ID NO: 3242
  source 1..50: mol_type = genomic DNA

SEQ ID NO: 16258 - DNA, 40 bp, Escherichia coli; identical to SEQ ID NO: 15663
  source 1..40: mol_type = genomic DNA

SEQ ID NO: 16259 - DNA, 50 bp, Escherichia coli; identical to SEQ ID NO: 3244
  source 1..50: mol_type = genomic DNA

SEQ ID NO: 16260 - DNA, 40 bp, Escherichia coli; identical to SEQ ID NO: 3245
  source 1..40: mol_type = genomic DNA

SEQ ID NO: 16261 - protein, 547 aa, Escherichia coli
MKLLVTYIRWSTKEQDSGDSLRRQTNLIDAFYSKHKEEYYLLPAHRYVDKGKSGFHQQHKNQGSDFRRMFDNVMSGVIPEGSLIVVENFDRFSRADIDTAIDDVRQILRKGVSILTLGDGELYDKSALTDPVKLIKHIIIAERAHQESLVKQKRIAQVWNHKTRLARELRKPMGKQAPGWLELSDDGSHYIVDEDKASLVNLIYDKRLSGMSMFAICKWLNEQGYPTINQRKVRISKTKKPDGNWSALSVKHILTSRSVLGYLPAKISTEDRKTVLREEIEGFYPQIVTDSKFYAVQQLLEETGKGKTSSGEHWLYVNILKGLIRCKCGLVMTPTGIRKPVYQGTYRCNGNKESRCSYGTVSRKLLDTQLCSRLFSKLSQLHDEATDTAKLDELQRRLNTVDSELEKLTETLIQLPNITQIQEALRVKQGEKDELIVQLSREKARVKSVSSLDLSGLDMESVEGRTEAQIIIKRLVKEIVVSGNEKLVDIYLHNGNMIRGFPLDGKDDHTLTLEEATDEMQSLDDMLIFGEPVTRIYPAGDMEEVDA

SEQ ID NO: 16262 - DNA, 50 bp, Escherichia coli; identical to SEQ ID NO: 3242
  source 1..50: mol_type = genomic DNA

SEQ ID NO: 16263 - DNA, 40 bp, Escherichia coli; identical to SEQ ID NO: 15663
  source 1..40: mol_type = genomic DNA

SEQ ID NO: 16264 - DNA, 50 bp, Escherichia coli; identical to SEQ ID NO: 3244
  source 1..50: mol_type = genomic DNA

SEQ ID NO: 16265 - DNA, 40 bp, Escherichia coli; identical to SEQ ID NO: 3245
  source 1..40: mol_type = genomic DNA

SEQ ID NO: 16266 - protein, 547 aa, Escherichia coli
MKLLVPYIRWSTKEQDSGDSLRRQTNLIDAFYAKHKDDYYLLPAHRYVDKGKSGFHQQHKAQGSDFRRMFENVMSGVIPEGSLIVVENFDRFSRADIDTAIDDVRQILRKGVSILTLGDGELYDKSALTDPVKLIKHIIIAERAHQESLVKQKRIAQVWNHKTQLARELKKPMGKQAPGWLELSEDGSHYIVDEDKASLVNIIYDKRLSGMSMFAICKWLNEQGYPTINQRKVRISKTKKPDGNWSALSVKHILTSRSVLGYLPAKISTEDRKTVLREEIESFYPQIVTDSKFYAVQQLLEETGKGKTSSGDHWLYVNMLKGIIRCKCGLVMTPTGIRKPVYQGTYRCNGNKESRCSYGTVSRKLLDTQLCSRLFSKLSQLHDEATDTAKLDELQRRLNTVDSELEKLTETLIQLPNITQIQEALRVKQEEKDELIVQLSREKARVKSVSSLDLSGLDMESVEGRTEAQIIIKRLVKEIVVSGNEKLVDIYLHNGNMIRGFPLDGKDDHTLTLEEATDEMQSLDDMLIFGEPVTRIYPAGDMEEVDA

SEQ ID NO: 16267 - DNA, 50 bp, Escherichia coli; identical to SEQ ID NO: 3242
  source 1..50: mol_type = genomic DNA

SEQ ID NO: 16268 - DNA, 40 bp, Escherichia coli; identical to SEQ ID NO: 15663
  source 1..40: mol_type = genomic DNA

SEQ ID NO: 16269 - DNA, 50 bp, Escherichia coli; identical to SEQ ID NO: 3244
  source 1..50: mol_type = genomic DNA

SEQ ID NO: 16270 - DNA, 40 bp, Escherichia coli; identical to SEQ ID NO: 3245
  source 1..40: mol_type = genomic DNA

SEQ ID NO: 16271 - protein, 547 aa, Escherichia coli
MKLLVPYIRWSTKEQDSGDSLRRQTNLIDAFYAKHKDDYYLLPAHRYVDKGKSGFHQQHKAQGSDFRRMFENVMSGAIPEGSLIVVENFDRFSRADIDTAIDDVRQILRKGVSILTLGDGELYDKSALTDPVKLIKHIIIAERAHQESLVKQKRIAQVWNHKTQLARELKKPMGKQAPGWLELSEDGSHYIVDEDKASLVNIIYDKRLSGMSMFAICKWLNEQGYPTINQRKVRISKTKKPDGNWSALSVKHILTSRSVLGYLPAKISTEDRKTVLREEIEGFYPQIVTDSKFYAVQQLLEETGKGKTSSGEHWLYVNILKGLIRCKCGLVMTPTGIRKPVYQGTYRCNGNKESRCSYGTVSRKLLDTQLCSRLFSKLSQLHDEATDTAKLDGLQRRLNTVDSELEKLTETLIQLPNITQIQEALRVKQEEKDELIVQLSREKARVKSVSSLDLSGLDMESVEGRTEAQIIIKRLVKEIVVSGNEKLVDIYLHNGNMIRGFPLDGKDDHTLTLEEATDEMQSLDDMLIFGEPVTRIYPAGDMEEVDA

SEQ ID NO: 16272 - DNA, 50 bp, Escherichia coli; identical to SEQ ID NO: 3242
  source 1..50: mol_type = genomic DNA

SEQ ID NO: 16273 - DNA, 40 bp, Escherichia coli; identical to SEQ ID NO: 15663
  source 1..40: mol_type = genomic DNA

SEQ ID NO: 16274 - DNA, 50 bp, Escherichia coli; identical to SEQ ID NO: 3244
  source 1..50: mol_type = genomic DNA

SEQ ID NO: 16275 - DNA, 40 bp, Escherichia coli; identical to SEQ ID NO: 3245
  source 1..40: mol_type = genomic DNA

SEQ ID NO: 16276 - protein, 547 aa, Escherichia coli
MKLLVTYIRWSTKEQDSGDSLRRQTNLIDAFYSKHKNDYYLLPAHRYVDKGKSGFHQQHKNQGSDFRRMFENVMSGAIPEGSLIVVENFDRFSRADIDTAIDDVRKILRKGVSILTLGDGELYDKSALTDPVKLIKHIIIAERAHQESLVKQKRIAQVWNHKTQLARELKKPMGKQAPGWLELSEDGSHYIVDEDKASLVNIIYDKRLSGMSMFAICKWLNEQGYPTINQRKVRISKTKKPDGNWSALSVKHILTSRSVLGYLPAKISTEDRKTVLREEIEGFYPQIVTDSKFYAVQQLLEETGKGKTSSGDHWLYVNILKGLIRCKCGLVMTPTGIRKPVYQGTYRCNGNKESRCSYGTVSRKLLDTQLCSRLFSKLSQLHDEATDTAKLDELQRRLNTVDSELEKLTETLIQLPNITQIQEALRVKQEEKDELIVQLSREKARVKSVSSLDLSGLDMESVEGRTEAQIIIKRLVKEIVVSGNEKLVDIYLHNGNMIRGFPLDGKDDHTLTLEEATDEMQSLDDMLIFGEPVTRIYPAGDMEEVDA

SEQ ID NO: 16277 - DNA, 50 bp, Escherichia coli; identical to SEQ ID NO: 3242
  source 1..50: mol_type = genomic DNA

SEQ ID NO: 16278 - DNA, 40 bp, Escherichia coli; identical to SEQ ID NO: 15663
  source 1..40: mol_type = genomic DNA

SEQ ID NO: 16279 - DNA, 50 bp, Escherichia coli; identical to SEQ ID NO: 3244
  source 1..50: mol_type = genomic DNA

SEQ ID NO: 16280 - DNA, 40 bp, Escherichia coli; identical to SEQ ID NO: 3245
  source 1..40: mol_type = genomic DNA

SEQ ID NO: 16281 - protein, 547 aa, Escherichia coli
MKLLVTYIRWSTKEQDSGDSLRRQTNLIDAFYSKHKEEYYLLPAHRYVDKGKSGFHQQHKAQGSDFRRMFENVMSGVIPEGSLIVVENFDRFSRADIDTAIDDVRQILRKGVSILTLGDGELYDKSALTDPVKLIKHIIIAERAHQESLVKQKRIAQVWNHKTQLARELKKPMGKQAPGWLELSEDGSHYIVDEDKASLVNIIYDKRLSGMSMFAICKWLNEQGYPTINQRKVRISKTKKPDGNWSALSVKHILTSRSVLGYLPAKISTEDRKTVLREEIESFYPQIVTDSKFYAVQQLLEETGKGKTSSGDHWLYVNILKGLIRCKCGLVMTPTGIRKPVYQGTYRCNGNKESRCSYGTVSRKLLDTQLCSRLFSKLSQLHDEATDTAKLDELQRRLNTVDSELEKLTETLIQLPNITQIQEALRVKQEEKDELIVQLSREKARVKSVSSLDLSGLDMESVEGRTEAQIIIKRLVKEIVVSGNEKLVDIYLHNGNMIRGFPLDGKDDHTLTLEEATDEMQSLDDILIFGEPVTRIYPAGDMEEVDA

SEQ ID NO: 16282 - DNA, 50 bp, Escherichia coli; identical to SEQ ID NO: 3242
  source 1..50: mol_type = genomic DNA

SEQ ID NO: 16283 - DNA, 40 bp, Escherichia coli; identical to SEQ ID NO: 15663
  source 1..40: mol_type = genomic DNA

SEQ ID NO: 16284 - DNA, 50 bp, Escherichia coli; identical to SEQ ID NO: 3244
  source 1..50: mol_type = genomic DNA

SEQ ID NO: 16285 - DNA, 40 bp, Escherichia coli; identical to SEQ ID NO: 3245
  source 1..40: mol_type = genomic DNA

SEQ ID NO: 16286 - protein, 547 aa, Escherichia coli
MKLLVPYIRWSTKEQDSGDSLRRQTNLIDAFYAKHKDDYYLLPAHRYVDKGKSGFHQQHKAQGSDFRRMFENVMSGVIPEGSLIVVENFDRFSRADIDTAIDDVRQILRKGVSILTLGDGELYDKSALTDPVKLIKHIIIAERAHQESLVKQKRIAQVWNHKTQLARELKKPMGKQAPGWLELSDDGSHYIVDEDKASLVNIIYDKRLSGMSMFAICKWLNEQGYPTINQRKVRISKTKKPDGNWSALSVKHILTSRSVLGYLPAKISSEDRKTVLREEIEGFYPQIVTDSKFYAVQQLLEETGKGKTSSGEHWLYVNILKGLIRCKCGLVMTPTGIRKPVYQGTYRCNGNKESRCNYGTVSRKLLDTQLCSRLFSKLSQLHDEATDTAKLDELQRRLNTVDSELEKLTETLIQLPNITQIQEALRVKQEEKDELIVQLSREKARVKSVSSLDLSGLDMESVEGRTEAQIIIKRLVKEIVVSGNEKLVDIYLHNGNMIRGFPLDGKDDHTLTLEEATDEMQSLDDMLIFGEPVTRIYPAGDMEEVDA

SEQ ID NO: 16287 - DNA, 50 bp, Escherichia coli; identical to SEQ ID NO: 3242
  source 1..50: mol_type = genomic DNA

SEQ ID NO: 16288 - DNA, 40 bp, Escherichia coli; identical to SEQ ID NO: 15663
  source 1..40: mol_type = genomic DNA

SEQ ID NO: 16289 - DNA, 50 bp, Escherichia coli; identical to SEQ ID NO: 3244
  source 1..50: mol_type = genomic DNA

SEQ ID NO: 16290 - DNA, 40 bp, Escherichia coli; identical to SEQ ID NO: 3245
  source 1..40: mol_type = genomic DNA

SEQ ID NO: 16291 - protein, 547 aa, Escherichia coli
MKLLVTYIRWSTKEQDSGDSLRRQTNLIDAFYSKHKEEYYLLPAHRYVDKGKSGFHQQHKNQGSDFRRMFENVMSGVIPEGSLIVVENFDRFSRADIDTAIDDVRQILRKGVSILTLGDGELYDKSALTDPVKLIKHIIIAERAHQESLVKQKRIAQVWNHKTQLARELKKPMGKQAPGWLELSEDGSHYIVDEDKASLVNIIYDKRLSGMSMFAICKWLNEQGYPTINQRKVRISKTKKPDGNWSALSVKHILTSRSVLGYLPAKISTEDRKTVLREEIESFYPQIVTDSKFYAVQQLLEETGKGKTSSGDHWLYVNMLKGIIRCKCGLVMTPTGIRKPVYQGTYRCNGNKESRCSYGTVSRKLLDTQLCSRLFSKLSQLHDEATDTAKLDELQRRLNTVDSELEKLTETLIQLPNITQIQEALRVKQGEKDELTFQLSREKARVKSVSSLDLSGLDMESVEGRTEAQIIIKRLVKEIVVSGNEKLVDIYLHNGNMIRGFPLDGKDDHTLTLEEATDEMQSLDDMLIFGEPVTRIYPAGDMEEVDA

SEQ ID NO: 16292 - DNA, 50 bp, Escherichia coli; identical to SEQ ID NO: 3242
  source 1..50: mol_type = genomic DNA

SEQ ID NO: 16293 - DNA, 40 bp, Escherichia coli; identical to SEQ ID NO: 15663
  source 1..40: mol_type = genomic DNA

SEQ ID NO: 16294 - DNA, 50 bp, Escherichia coli; identical to SEQ ID NO: 3244
  source 1..50: mol_type = genomic DNA

SEQ ID NO: 16295 - DNA, 40 bp, Escherichia coli; identical to SEQ ID NO: 3245
  source 1..40: mol_type = genomic DNA

SEQ ID NO: 16296 - protein, 547 aa, Escherichia coli
MKLLVTYIRWSTKEQDSGDSLRRQTNLIDAFYAKHKDDYYLLPAHRYVDKGKSGFHQQHKAQGSDFRRMFENVMSGAIPEGSLIVVENFDRFSRADIDTAIDDVRQILRKGVSILTLGDGELYDKSALTDPVKLIKHIIIAERAHQESLVKQKRIAQVWNHKTQLARELKKPMGKQAPGWLELSDDGSHYIVDEDKASLVNIIYDKRLSGMSMFAICKWLNEQGYPTINQRKVRISKTKKPDGNWSALSVKHILTSRSVLGYLPAKISTEDRKTVLREEIESFYPQIVTDSKFYAVQQLLEETGKGKTSSGDHWLYVNILKGIIRCKCGLVMTPTGIRKPVYQGTYRCNGNKESRCSYGTVSRKLLDTQLCSRLFSKLSQLHDEATDTAKLDELQRRLNTVDSELEKLTETLIQLPNITQIQEALRVKQGEKDELIVQLSREKARVKSVSSLNLSGLDMESVEGRTEAQIIIKRLVKEIVVSGNEKLVDIYLHNGNMIRGFPLDGKDDHTLTLEEATDEMQSLDDMLIFGEPVTRIYPAGDMEEVDA

SEQ ID NO: 16297 - DNA, 50 bp, Escherichia coli; identical to SEQ ID NO: 3242
  source 1..50: mol_type = genomic DNA

SEQ ID NO: 16298 - DNA, 40 bp, Escherichia coli; identical to SEQ ID NO: 15663
  source 1..40: mol_type = genomic DNA

SEQ ID NO: 16299 - DNA, 50 bp, Escherichia coli; identical to SEQ ID NO: 3244
  source 1..50: mol_type = genomic DNA

SEQ ID NO: 16300 - DNA, 40 bp, Escherichia coli; identical to SEQ ID NO: 3245
  source 1..40: mol_type = genomic DNA

SEQ ID NO: 16301 - protein, 527 aa, Escherichia coli
MRRQTNLIDAFYAKHKDDYYLLPAHRYVDKGKSGFHQQHKNQGSDFRRMFENVMSGVIPEGSLIVVENFDRFSRADIDTAIDDVRQILRKGVSILTLGDGELYDKSALTDPVKLIKHIIIAERAHQESLVKQKRIAQVWNHKTQLARELKKPMGKQAPGWLELSDDGSHYIVDEDKASLVNIIYDKRLSGMSMFAICKWLNEQGYPTINQRKVRISKTKKPDGNWSALSVKHILTSRSVLGYLPAKISTEDRKTVLREEIEGFYPQIVTDSKFYAVQQLLEETGKGKTSSGEHWLYVNILKGLIRCKCGLVMTPTGIRKPVYQGTYRCNGNKESRCSYGTVSRKLLDTQLCSRLFSKLSQLHDEATDTAKLDELQRRLNTVDSELEKLTETLIQLPNITQIQEALRVKQEEKDELIVQLSREKARVKSVSSLDLSGLDMESVEGRTEAQIIIKRLVKEIVVSGNEKLVDIYLHNGNMIRGFPLDGKDDHTLTLEEATDEMQPLDDMLIFGEPVTRIYPAGDMEEVDA

SEQ ID NO: 16302 - DNA, 50 bp, Escherichia coli; identical to SEQ ID NO: 3242
  source 1..50: mol_type = genomic DNA

SEQ ID NO: 16303 - DNA, 40 bp, Escherichia coli; identical to SEQ ID NO: 15663
  source 1..40: mol_type = genomic DNA

SEQ ID NO: 16304 - DNA, 50 bp, Escherichia coli; identical to SEQ ID NO: 3244
  source 1..50: mol_type = genomic DNA

SEQ ID NO: 16305 - DNA, 40 bp, Escherichia coli; identical to SEQ ID NO: 3245
  source 1..40: mol_type = genomic DNA

SEQ ID NO: 16306 - protein, 547 aa, Escherichia coli
MKLLVPYIRWSTKEQDSGDSLRRQTNLIDAFYAKHKDDYYLLPAHRYVDKGKSGFHQQHKAQGSDFRRMFENVMSGVIPEGSLIVVENFDRFSRADIDTAIDDVRQILRKGVSILTLGDGELYDKSALTDPVKLIKHIIIAERAHQESLVKQKRIAQVWNHKTQLARELKKPMGKQAPGWLELSEDGSHYIVDEDKASLVNIIYDKRLSGMSMFAICKWLNEQGYPTINQRKVRISKTKKPDGNWSALSVKHILTSRSVLGYLPAKISTEDRKTVLREEIESFYPQIVTDSKFYAVQQLLEETGKGKTSSGEHWLYVNILKGLIRCKCGLVMTPTGIRKPVYQGTYRCNGNKESRCSYGTVSRKLLDTQLCSRLFSKLSQLHDEATDTAKLDELQRRLNTVDSELEKLTETLIQLPNITQIQEALRVKQEEKDELIVQLSREKARVKSVSSLDLSGLDMESVEGRTEAQIIIKRLVKEIVVSGNEKLVDIYLHNGNMIRGFPLDGKDDHTLTLEEATDEMQPLDDMLIFGEPVTRIYPAGDMEEVDA

SEQ ID NO: 16307 - DNA, 50 bp, Escherichia coli; identical to SEQ ID NO: 3502
  source 1..50: mol_type = genomic DNA

SEQ ID NO: 16308 - DNA, 40 bp, Escherichia coli; identical to SEQ ID NO: 15663
  source 1..40: mol_type = genomic DNA

SEQ ID NO: 16309 - DNA, 50 bp, Escherichia coli; identical to SEQ ID NO: 15659
  source 1..50: mol_type = genomic DNA

SEQ ID NO: 16310 - DNA, 40 bp, Escherichia coli; identical to SEQ ID NO: 3245
  source 1..40: mol_type = genomic DNA

SEQ ID NO: 16311 - protein, 547 aa, Escherichia coli
MKLLATYIRWSTREQDSGDSLRRQTNLIDAFYAKHKDDYYLLPAHRYVDKGKSGFHQQHKAQGSDFRRMFENVMSGVIPEGSLIVVENFDRFSRADIDTAIDDVRQILRKGVSILTLGDGELYDKSALTDPVKLIKHIIIAERAHQESLVKQKRIAQVWNHKTQLARELKKPMGKQAPGWLELSEDGSHYIVDEDKASLVNIIYDKRLSGMSMFAICKWLNEQGYPTINQRKVRISKTKKPDGNWSALSVKHILTSRSVLGYLPAKISTEDRKTVLREEIEGFYPQIVTDSKFYAVQQLLEETGKGKTSSGEHWLYVNILKGLIRCKCGLVMTPTGIRKPVYQGTYRCNGNKESRCSYGTVSRKLLDTQLCSRLFSKLSQLHDEATDTAKLDELQRRLNTVDSELEKLTETLIQLPNITQIQEALRVKQEEKDELIVQLSREKARVKSVSSLDLSGLDMESVEGRTEAQIIIKRLVKEIVVSGNEKLVDIYLHNGNMIRGFPLDGKDDHTLTLEEATDEMQSLDDMLIFGEPVTRIYPAGDMEEVDA

SEQ ID NO: 16312 - DNA, 50 bp, Escherichia coli; identical to SEQ ID NO: 3502
  source 1..50: mol_type = genomic DNA

SEQ ID NO: 16313 - DNA, 40 bp, Escherichia coli; identical to SEQ ID NO: 15663
  source 1..40: mol_type = genomic DNA

SEQ ID NO: 16314 - DNA, 50 bp, Escherichia coli; identical to SEQ ID NO: 15659
  source 1..50: mol_type = genomic DNA

SEQ ID NO: 16315 - DNA, 40 bp, Escherichia coli; identical to SEQ ID NO: 3245
  source 1..40: mol_type = genomic DNA

SEQ ID NO: 16316 - protein, 547 aa, Escherichia coli
MKLLATYIRWSTKEQDSGDSLRRQTNLIDAFYSKHKNDYYLLPAHRYVDKGKSGFHQQHKAQGSDFRRMFENVMSGVIPEGSLIVVENFDRFSRADIDTAIDDVRQILRKGVSILTLGDGELYDKSALTDPVKLIKHIIIAERAHQESLVKQKRIAQVWNHKTQLARELKKPMGKQAPGWLELSEDGSHYIVDEDKASLVNIIYDKRLSGMSMFAICKWLNEQGYPTINQRKVRISKTKKPDGNWSALSVKHILTSRSVLGYLPAKISTEDRKTVLREEIEGFYPQIVTDSKFYAVQQLLEETGKGKTSSGDHWLYVNILKGLIRCKCGLVMTPTGIRKPVYQGTYRCNGNKESRCSYGTVSRKLLDTQLCSRLFSKLSQLHDEATDTAKLDELQRRLNTVDSELEKLTETLIQLPNITQIQEALRVKQEEKDELIVQLSREKARVKSVSSLDLSGLDMESVEGRTEAQIIIKRLVKEIVVSGNEKLVDIYLHNGNMIRGFPLDGKDDHTLTLEEATDEMQPLDDMLIFGEPVTRIYPAGDMEEVDA

SEQ ID NO: 16317 - DNA, 50 bp, Escherichia coli; identical to SEQ ID NO: 3242
  source 1..50: mol_type = genomic DNA

SEQ ID NO: 16318 - DNA, 40 bp, Escherichia coli; identical to SEQ ID NO: 15663
  source 1..40: mol_type = genomic DNA

SEQ ID NO: 16319 - DNA, 50 bp, Escherichia coli; identical to SEQ ID NO: 3244
  source 1..50: mol_type = genomic DNA

SEQ ID NO: 16320 - DNA, 40 bp, Escherichia coli; identical to SEQ ID NO: 3245
  source 1..40: mol_type = genomic DNA

SEQ ID NO: 16321 - protein, 547 aa, Escherichia coli; identical to SEQ ID NO: 16061

SEQ ID NO: 16322 - DNA, 50 bp, Escherichia coli; identical to SEQ ID NO: 10667
  source 1..50: mol_type = genomic DNA

SEQ ID NO: 16323 - DNA, 40 bp, Escherichia coli; identical to SEQ ID NO: 15663
  source 1..40: mol_type = genomic DNA

SEQ ID NO: 16324 - DNA, 50 bp, Escherichia coli; identical to SEQ ID NO: 15774
  source 1..50: mol_type = genomic DNA

SEQ ID NO: 16325 - DNA, 40 bp, Escherichia coli; identical to SEQ ID NO: 3245
  source 1..40: mol_type = genomic DNA

SEQ ID NO: 16326 - protein, 547 aa, Escherichia coli
MKLLVTYIRWSTREQDSGDSLRRQTNLIDAFYAKHKDDYYLLPAHRYVDKGKSGFHQQHKAQGSDFRRMFENVMSGVIPEGSLIVVENFDRFSRADIDTAIDDVRQILRKGVSILTLGDGELYDKSALTDPVKLIKHIIIAERAHQESLVKQKRIAQVWNHKTQLARELKKPMGKQAPGWLELSEDGSHYIVDEDKASLVNIIYDKRLSGMSMFAICKWLNEQGYPTINQRKVRISKTKKPEGNWSALSVKHILTSRSVLGYLPAKISTEDRKTVLREEIEGFYPQIVTDSKFYAVQQLLEETGKGKTSSGDHWLYVNILKGLIRCKCGLVMTPTGIRKPVYQGTYRCNGNKESRCSYGTVSRKLLDTQLCSRLFSKLSQLHDEATDTAKLDELQRRLNTVDGELEKLTETLIQLPNITQIQEALRVKQEEKDELIVQLSREKARVKSVSSLDLSGLDMESVEGRTEAQIIIKRLVKEIVVSGNEKLVDIYLHNGNMIRGFPLDGKDDHTLTLEEATDEMQPLDDMLIFGEPVTRIYPAGDMEEVDA

SEQ ID NO: 16327 - DNA, 50 bp, Escherichia coli; identical to SEQ ID NO: 3242
  source 1..50: mol_type = genomic DNA

SEQ ID NO: 16328 - DNA, 40 bp, Escherichia coli; identical to SEQ ID NO: 15663
  source 1..40: mol_type = genomic DNA

SEQ ID NO: 16329 - DNA, 50 bp, Escherichia coli; identical to SEQ ID NO: 3244
  source 1..50: mol_type = genomic DNA

SEQ ID NO: 16330 - DNA, 40 bp, Escherichia coli; identical to SEQ ID NO: 3245
  source 1..40: mol_type = genomic DNA

SEQ ID NO: 16331 - protein, 547 aa, Escherichia coli
MKLLVPYIRWSTKEQDSGDSLRRQTNLIDAFYSKHKNDYYLLPAHRYVDKGKSGFHQQHKNQGSDFRRMFENVMSGVIPEGSLIVVENFDRFSRADIDTAIDDVRQILRKGVSILTLGDGELYDKSALTDPVKLIKHIIIAERAHQESLVKQKRIAQVWNHKTQLARELKKPMGKQAPGWLELSEDGSHYIVDEYKASLVNIIYDKRLSGMSMFAICKWLNEQGYPTINQRKVRISKTKKPDGNWSALSVKHILTSRSVLGYLPAKISSEDRKTVLREEIEGFYPQIVTDSKFYAVQQLLEETGKGKTSSGDHWLYVNILKGLIRCRCGLVMTPTGIRKPVYQGTYRCNGNKESRCSYGTVSRKLLDTQLCSRLFSKLSQLHDEATDTAKLDELQRRLNTVDGELEKLTETLIQLPNITQIQEALRVKQEEKDELIVQLSREKARVKSVSSLDLSGLDMESVEGRTEAQIIIKRLVKEIVVSGNEKLVDIYLHNGNMIRGFPLDGKDDHTLTLEEATDEMQSLDDMLIFGEPVTRIYPAGDMEEVDA

SEQ ID NO: 16332 - DNA, 50 bp, Escherichia coli; identical to SEQ ID NO: 3242
  source 1..50: mol_type = genomic DNA

SEQ ID NO: 16333 - DNA, 40 bp, Escherichia coli; identical to SEQ ID NO: 15663
  source 1..40: mol_type = genomic DNA

SEQ ID NO: 16334 - DNA, 50 bp, Escherichia coli; identical to SEQ ID NO: 3244
  source 1..50: mol_type = genomic DNA

SEQ ID NO: 16335 - DNA, 40 bp, Escherichia coli; identical to SEQ ID NO: 3245
  source 1..40: mol_type = genomic DNA

SEQ ID NO: 16336 - protein, 547 aa, Escherichia coli
MKLLVTYIRWSTREQDSGDSLRRQTNLIDAFYSKHKNDYYLLPAHRYVDKGKSGFHQQHKAQGSDFRRMFENVMSGAIPEGSLIVVENFDRFSRADIDTAIDDVRQILRKGVSILTLGDGELYDKSALTDPVKLIKHIIIAERAHQESLVKQKRIAQVWNHKTQLARELKKPMGKQAPGWLELSEDGSHYIVDEDKASLVNIIYDKRLSGMSMFAICKWLNEQGYPTINQRKVRISKTKKPDGNWSALSVKHILTSRSVLGYLPAKISTEDRKTVLREEIEGFYPQIVTDSKFYAVQQLLEETGKGKTSSGDHWLYVNILKGLIRCKCGLVMTPTGIRKPVYQGTYRCNGNKESRCNYGTVSRKLLDTQLCSRLFSKLSQLHDEATDTAKLDELQRRLNTVDSELEKLTETLIQLPNITQIQEALRVKQEEKDELIVQLSREKARVKSVSSLDLSGLDMESVEGRTEAQIIIKRLVKEIVVSGNEKLVDIYLHNGNMIRGFPLDGKDDHTLTLEEATDEMQSLDDMLIFGEPVTRIYPAGDMEEVDA

SEQ ID NO: 16337 - DNA, 50 bp, Escherichia coli
  source 1..50: mol_type = genomic DNA
gtacgtgtttagctatgtaaaagcaccagtattcttgccttaacactcat

SEQ ID NO: 16338 - DNA, 40 bp, Escherichia coli; identical to SEQ ID NO: 15663
  source 1..40: mol_type = genomic DNA

SEQ ID NO: 16339 - DNA, 50 bp, Escherichia coli
  source 1..50: mol_type = genomic DNA
gtacgtgtttagctatgtaaaagcaacagtattcttgccttaacactcat

SEQ ID NO: 16340 - DNA, 40 bp, Escherichia coli; identical to SEQ ID NO: 3245
  source 1..40: mol_type = genomic DNA

SEQ ID NO: 16341 - protein, 547 aa, Escherichia coli
MKLLVTYIRWSTKEQDSGDSLRRQTNLIDAFYAKHKDDYYLLPAHRYVDKGKSGFHQQHKAQGSDFRRMFENVMSGVIPEGSLIVVENFDRFSRADIDTAIDDVRQILRKGVSILTLGDGELYDKSALTDPVKLIKHIIIAERAHQESLVKQKRIAQVWNHKTQLARELKKPMGKQAPGWLELSEDGSHYIVDEDKASLVNIIYDKRLSGMSMFAICKWLNEQGYPTINQRKVRISKTKKPDGNWSALSVKHILTSRSVLGYLPAKISTEDRKTVLREEIEGFYPQIVTDSKFYAVQQLLEETGKGKTSSGEHWLYVNILKGLIRCKCGLVMTPTGIRKPVYQGTYRCNGNKESRCSYGTVSRKLLDTQLCSRLFSKLSQLHDEATDTAKLDELQRRLNTVDGELEKLTETLIQLPNITQIQEALRVKQEEKDELIVQLSREKARVKSVSSLDLSGLDMESVEGRTEAQIIIKRLVKEIVVSGNEKLVDIYLHNGNMIRGFPLDGKDDHTLTLEEATDEMQSLDDMLIFGEPVTRIYPAGDMEEVDA

SEQ ID NO: 16342 - DNA, 50 bp, Escherichia coli
  source 1..50: mol_type = genomic DNA
gtacgtgtttagctatgtaaaagtactagtattcttgccttaacactcat

SEQ ID NO: 16343 - DNA, 40 bp, Escherichia coli; identical to SEQ ID NO: 15663
  source 1..40: mol_type = genomic DNA

SEQ ID NO: 16344 - DNA, 50 bp, Escherichia coli
  source 1..50: mol_type = genomic DNA
gtacgtgtttagctatgtaaaagtaatagtattcttgccttaacactcat

SEQ ID NO: 16345 - DNA, 40 bp, Escherichia coli; identical to SEQ ID NO: 3245
  source 1..40: mol_type = genomic DNA

SEQ ID NO: 16346 - protein, 547 aa, Escherichia coli
MKLLVTYIRWSTKEQDSGDSLRRQTNLIDAFYSKHKEEYYLLPAHRYVDKGKSGFHQQHKAQGSDFRRMFENVMSGVIPEGSLIVVENFDRFSRADIDTAIDDVRQILRKEVSILTLGDGELYDKSALTDPVKLIKHIIIAERAHQESLVKQKRIAQVWNHKTQLARELKKPMGKQAPGWLELSEDGSHYIVDEDKASLVNIIYDKRLSGMSMFAICKWLNEQGYPTINQRKVRISKTKKPDGNWSALSVKHILTSRSVLGYLPAKISTEDRKTVLREEIESFYPQIVTDSKFYAVQQLLEETGKGKTSSGEHWLYVNILKGLIRCKCGLVMTPTGIRKPVYQGTYRCNGNKESRCNYGTVSRKLLDTQLCSRLFSKLSQLHDEATDTAKLDELQRRLNTVDGELEKLTETLIQLPNITQIQEALRVKQEEKDELIVQLSREKARVKSVSSLDLSGLDMESVEGRTEAQIIIKRLVKEIVVSGNEKLVDIYLHNGNMIRGFPLDGKDDHTLTLEEATDEMQSLDDMLIFGEPVTRIYPAGDMEEVDA

SEQ ID NO: 16347 - DNA, 50 bp, Escherichia coli; identical to SEQ ID NO: 3242
  source 1..50: mol_type = genomic DNA

SEQ ID NO: 16348 - DNA, 40 bp, Escherichia coli; identical to SEQ ID NO: 15663
  source 1..40: mol_type = genomic DNA

SEQ ID NO: 16349 - DNA, 50 bp, Escherichia coli; identical to SEQ ID NO: 3244
  source 1..50: mol_type = genomic DNA

SEQ ID NO: 16350 - DNA, 40 bp, Escherichia coli; identical to SEQ ID NO: 3245
  source 1..40: mol_type = genomic DNA

SEQ ID NO: 16351 - protein, 547 aa, Escherichia coli
MKLLVTYIRWSTKEQDSGDSLRRQTNLIDAFYAKHKEEYYLLPAHRYVDKGKSGFHQQHKAQGSDFRRMFENVMSGVIPEGSLIVVENFDRFSRADIDTAIDDVRQILRKGVSILTLGDGELYDKSALTDPVKLIKHIIIAERAHQESLVKQKRIAQVWNHKTQLARELKKPMGKQAPGWLELSEDGSHYIVDEDKASLVNIIYDKRLSGMSMFAICKWLNEQGYPTINQRKVRISKTKKPDGNWSALSVKHILTSRSVLGYLPAKISSEDHKTVLREEIEGFYPQIVTDSKFYAVQQLLEETGKGKTSSGEHWLYVNILKGLIRCKCGLVMTPTGIRKPVYQGTYRCNGNKESRCSYGTVSRKLLDTQLCSRLFSKLSQLHDEATDTAKLDELQRRLNTVDSELEKLTETLIQLPNITQIQEALRVKQEEKDELIVQLSREKARVKSVSSLDLSGLDMESVEGRTEAQIIIKRLVKEIVVSGNEKLVDIYLHNGNMIRGFPLDGKDDHTLTLEEATDEMQSLDDMLIFGEPVTRIYPAGDMEEVDA

SEQ ID NO: 16352 - DNA, 50 bp, Escherichia coli; identical to SEQ ID NO: 3242
  source 1..50: mol_type = genomic DNA

SEQ ID NO: 16353 - DNA, 40 bp, Escherichia coli; identical to SEQ ID NO: 15663
  source 1..40: mol_type = genomic DNA

SEQ ID NO: 16354 - DNA, 50 bp, Escherichia coli; identical to SEQ ID NO: 3244
  source 1..50: mol_type = genomic DNA

SEQ ID NO: 16355 - DNA, 40 bp, Escherichia coli; identical to SEQ ID NO: 3245
  source 1..40: mol_type = genomic DNA

SEQ ID NO: 16356 - protein, 547 aa, Escherichia coli
MKLLVTYIRWSTREQDSGDSLRRQTNLIDAFYSKHKNDYYLLPAHRYVDKGKSGFHQQHKAQGSDFRRMFENVMSGAIPEGSLIVVENFDRFSRADIDTAIDDVRQILRKGVSILTLGDGELYDKSALTDPVKLIKHIIIAERAHQESLVKQKRIAQVWNHKTQLARELKKPMGKQAPGWLELSEDGSHYIVDEDKASLVNIIYDKRLSGMSMFAICKWLNEQGYPTINQRKVRISKTKKPDGNWSALSVKHILTSRSVLGYLPAKISTEDRKTVLREEIEGFYPQIVTDSKFYAVQQLLEETGKGKTSSGEHWLYVNILKGLIRCKCGLVMTPTGIRKPVYQGTYRCNGNKESRCSYGTVSRKLLDTQLCSRLFSKLSQLHDEATDTAKLDELQRRLNTVDGELEKLTETLIQLPNITQIQEALRVKQEEKDELIVQLSREKARVKSVSSLDLSGLDMESVEGRTEAQIIIKRLVKEIVVSGNEKLVDIYLHNGNMIRGFPLDGKDDHTLTLEEATDEMQSLDDMLIFGEPVTRIYPAGDMEEVDA

SEQ ID NO: 16357 - DNA, 50 bp, Escherichia coli; identical to SEQ ID NO: 3242
  source 1..50: mol_type = genomic DNA

SEQ ID NO: 16358 - DNA, 40 bp, Escherichia coli; identical to SEQ ID NO: 15663
  source 1..40: mol_type = genomic DNA

SEQ ID NO: 16359 - DNA, 50 bp, Escherichia coli; identical to SEQ ID NO: 3244
  source 1..50: mol_type = genomic DNA

SEQ ID NO: 16360 - DNA, 40 bp, Escherichia coli; identical to SEQ ID NO: 3245
  source 1..40: mol_type = genomic DNA

SEQ ID NO: 16361 - protein, 547 aa, Escherichia coli
MKLLVPYIRWSTKEQDSGDSLRRQTNLIDAFYAKHKDDYYLLPAHRYVDKGKSGFHQQHKNQGSDFRRMFENVMSGAIPEGSLIVVENFDRFSRADIDTAIDDVRQILRKGVSILTLGDGELYDKSALTDPVKLIKHIIIAERAHQESLVKQKRIAQVWNHKTQLARELKKPMGKQAPGWLELSEDGSHYIVDEDKASLVNIIYDKRLSGMSMFAICKWLNEQGYPTINQRKVRISKTKKPDGNWSALSVKHILTSRSVLGYLPAKISTEDRKTVLREEIEGFYPQIVTDSKFYAVQQLLEETGKGKTSSGEHWLYVNILKGLIRCKCGLVMTPTGIRKPVYQGTYRCNGNKESRCSYGTVSRKLLDTQLCSRLFSKLSQLHDEATDTAKLDELQRRLNTVDSELEKLTETLIQLPNITQIQEALRVKQEEKDELIVQLSREKARVKSVSSLDLSGLDMESVEGRTEAQIIIKRLVKEIVVSGNEKLVDIYLHNGNMIRGFPLDGKDDHTLTLEEATDEMQSLDDMLIFGEPVTRIYPAGDMEEVDA

SEQ ID NO: 16362 - DNA, 50 bp, Escherichia coli; identical to SEQ ID NO: 3242
  source 1..50: mol_type = genomic DNA

SEQ ID NO: 16363 - DNA, 40 bp, Escherichia coli; identical to SEQ ID NO: 15663
  source 1..40: mol_type = genomic DNA

SEQ ID NO: 16364 - DNA, 50 bp, Escherichia coli; identical to SEQ ID NO: 3244
  source 1..50: mol_type = genomic DNA

SEQ ID NO: 16365 - DNA, 40 bp, Escherichia coli; identical to SEQ ID NO: 3245
  source 1..40: mol_type = genomic DNA

SEQ ID NO: 16366 - protein, 547 aa, Escherichia coli
MKLLVPYIRWSTKEQDSGDSLRRQTNLIDAFYSKHKNDYYLLPAHRYVDKGKSGFHQQHKNQGSDFRRMFENVMSGAIPEGSLIVVENFDRFSRADIDTAIDDVRQILRKGVSILTLGDGELYDKSALTDPVKLIKHIIIAERAHQESLVKQKRIAQVWNHKTQLARELKKPMGKQAPGWLELSEDGSHYIVDEDKASLVNIIYDKRLSGMSMFAICKWLNEQGYPTINQRKVRISKTKKPDGNWSALSVKHILTSRSVLGYLPAKISTEDRKTVLREEIESFYPQIVTDSKFYAVQQLLEETGKGKTSSGEHWLYVNILKGLIRCKCGLVMTPTGIRKPVYQGTYRCNGNKESRCSYGTVSRKLLDTQLCSRLFSKLSQLHDEATDTAKLDELQRRLNTVDSELEKLTETLIQLPNITQIQEALRVKQEEKDELIVQLSREKARVKSVSSLDLSGLDMESVEGRTEAQIIIKRLVKEIVVSGNEKLVDIYLHNGNMIRGFPLDGKDDHTLTLEEATDEMQPLDDMLIFGEPVTRIYPAGDMEEVDA

SEQ ID NO: 16367 - DNA, 50 bp, Escherichia coli; identical to SEQ ID NO: 3242
  source 1..50: mol_type = genomic DNA

SEQ ID NO: 16368 - DNA, 40 bp, Escherichia coli; identical to SEQ ID NO: 15663
  source 1..40: mol_type = genomic DNA

SEQ ID NO: 16369 - DNA, 50 bp, Escherichia coli; identical to SEQ ID NO: 3244
  source 1..50: mol_type = genomic DNA

SEQ ID NO: 16370 - DNA, 40 bp, Escherichia coli; identical to SEQ ID NO: 3245
  source 1..40: mol_type = genomic DNA

SEQ ID NO: 16371 - protein, 547 aa, Escherichia coli
MKLLVTYIRWSTREQDSGDSLRRQTNLIDAFYAKHKEEYYLLPAHRYVDKGKSGFHQQHKAQGSDFRRMFENVMSGVIPEGSLIVVENFDRFSRADIDTAIDDVRQILRKGVSILTLGDGELYDKSALTDPVKLIKHIIIAERAHQESLVKQKRIAQVWNHKTQLARELKKPMGKQAPGWLELSEDGSHYIVDEDKASLVNIIYDKRLSGMSMFAICKWLNEQGYPTINQRKVRISKTKKPDGNWSALSVKHILTSRSVLGFLPAKISSEDRKTVLREEIEGFYPQIVTDSKFYAVQQLLEETGKGKTSSGEHWLYVNILKGLIRCRCGLVMTPTGIRKPVYQGTYRCNGNKESRCSYGTVSRKLLDTQLCSRLFSKLSQLHDEATDTAKLDELQRRLNTVDSELEKLTETLIQLPNITQIQEALRVKQGEKDELIVQLSREKARVKSVSSLDLSGLDMESVEGRTEAQIIIKRLVKEIVVSGNEKLVDIYLHNGNMIRGFPLDGKDDHTLTLEEATDEMQSLDDMLIFGEPVTRIYPAGDMEEVDA

SEQ ID NO: 16372 - DNA, 50 bp, Escherichia coli; identical to SEQ ID NO: 3242
  source 1..50: mol_type = genomic DNA

SEQ ID NO: 16373 - DNA, 40 bp, Escherichia coli; identical to SEQ ID NO: 15663
  source 1..40: mol_type = genomic DNA

SEQ ID NO: 16374 - DNA, 50 bp, Escherichia coli; identical to SEQ ID NO: 3244
  source 1..50: mol_type = genomic DNA

SEQ ID NO: 16375 - DNA, 40 bp, Escherichia coli; identical to SEQ ID NO: 3245
  source 1..40: mol_type = genomic DNA

SEQ ID NO: 16376 - protein, 547 aa, Escherichia coli
MKLLVTYIRWSTREQDSGDSLRRQTNLIDAFYSKHKNDYYLLPAHRYVDKGKSGFHQQHKNQGSDFRRMFENVMSGAIPEGSLIVVENFDRFSRADIDTAIDDVRQILRKGVSILTLGDGELYDKSALTDPVKLIKHIIIAERAYQESLVKQKRIAQVWNHKTQLARELKKPMGKQAPGWLELSEDGSHYIVDEDKASLVNIIYDKRLSGMSMFAICKWLNEQGYPTINQRKVRISKTKKPDGNWSALSVKHILTSRSVLGYLPAKISTEDRKTVLREEIEGFYPQIVTDSKFYAVQQLLEETGKGKTSSGDHWLYVNILKGLIRCKCGLVMTPTGIRKPVYQGTYRCNGNKESRCSYGTVSRKLLDTQLCSRLFSKLSQLHDEATDTAKLDELQRRLNTVDSELEKLTETLIQLPNITQIQEALRVKQGEKDELIVQLSREKARVKSVSSLNLSGLDMESVEGRTEAQIIIKRLVKEIVVSGNEKLVDIYLHNGNMIRGFPLDGKDDHTLTLEEATDEMQSLDDMLIFGEPVTRIYPAGDMEEVDA

SEQ ID NO: 16377 - DNA, 50 bp, Escherichia coli; identical to SEQ ID NO: 3502
  source 1..50: mol_type = genomic DNA

SEQ ID NO: 16378 - DNA, 40 bp, Escherichia coli; identical to SEQ ID NO: 15663
  source 1..40: mol_type = genomic DNA

SEQ ID NO: 16379 - DNA, 50 bp, Escherichia coli; identical to SEQ ID NO: 15659
  source 1..50: mol_type = genomic DNA

SEQ ID NO: 16380 - DNA, 40 bp, Escherichia coli; identical to SEQ ID NO: 3245
  source 1..40: mol_type = genomic DNA

SEQ ID NO: 16381 - protein, 547 aa, Escherichia coli
MKLLVTYIRWSTREQDSGDSLRRQTNLIDAFYSKHKNDYYLLPAHRYVDKGKSGFHQQHKAQGSDFRRMFENVMSGAIPEGSLIVVENFDRFSRADIDTAIDDVRQILRKGVSILTLGDGELYDKSALTDPVKLIKHIIIAERAHQESLVKQKRIAQVWNHKTQLARELKKPMGKQAPGWLELSEDGSHYIVDEDKASLVNIIYDKRLSGMSMFAICKWLNEQGYPTINQRKVRISKTKKPDGNWSALSVKHILTSRSVLGYLPAKISTEDRKTVLREEIESFYPQIVTDSKFYAVQQLLEETGKGKTSSGEHWLYVNILKGLIRCKCGLVMTPTGIRKPVYQGTYRCNGNKESRCSYGTVSRKLLDTQLCSRLFSKLSQLHDEATDTAKLDELQRRLNTVDSELEKLTETLIQLPNITQIQEALRVKQEEKDELIVQLSREKARVKSVSSLDLSGLDMESVEGRTEAQIIIKRLVKEIVVSGNEKLVDIYLHNGNMIRGFPLDGKDDHTLTLEEATDEMQPLDDMLIFGEPVTRIYPAGDMEEVDA

SEQ ID NO: 16382 - DNA, 50 bp, Escherichia coli; identical to SEQ ID NO: 3242
  source 1..50: mol_type = genomic DNA

SEQ ID NO: 16383 - DNA, 40 bp, Escherichia coli; identical to SEQ ID NO: 15663
  source 1..40: mol_type = genomic DNA

SEQ ID NO: 16384 - DNA, 50 bp, Escherichia coli; identical to SEQ ID NO: 3244
  source 1..50: mol_type = genomic DNA

SEQ ID NO: 16385 - DNA, 40 bp, Escherichia coli; identical to SEQ ID NO: 3245
  source 1..40: mol_type = genomic DNA

SEQ ID NO: 16386 - protein, 547 aa, Escherichia coli
MKLLVTYIRWSTREQDSGDSLRRQTNLIDAFYSKHKNDYYLLPAHRYVDKGKSGFHQQHKAQGSDFRRMFENVMSGAIPEGSLIVVENFDRFSRADIDTAIDDVRQILRKGVSILTLGDGELYDKSALTDPVKLIKHIIIAERAHQESLVKQKRIAQVWNHKTQLARELKKPMGKQAPGWLELSEDGSHYIVDEDKASLVNIIYDKRLSGMSMFAICKWLNEQGYPTINQRKVRISKTKKPDGNWSALSVKHILTSRSVLGYLPAKISTEDRKTVLREEIESFYPQIVTDSKFYAVQQLLEETGKGKTSSGEHWLYVNILKGLIRCKCGLVMTPTGIRKPVYQGTYRCNGNKESRCSYGTVSRKLLDTQLCSRLFSKLSQLHDEATDTAKLDELQRRLNTVDSELEKLTETLIQLPNITQIQEALRVKQEEKDELIVQLSREKARVKSVSSLDLSGLDMESVEGRTEAQIIIKRLVKEIVVSGNEKLVDIYLHNGNMIRGFPLDGKDDHTLTLEEATDEMQSLDDMLIFGEPVTRIYPAGDMEEVDA

SEQ ID NO: 16387 - DNA, 50 bp, Escherichia coli; identical to SEQ ID NO: 3242
  source 1..50: mol_type = genomic DNA

SEQ ID NO: 16388 - DNA, 40 bp, Escherichia coli; identical to SEQ ID NO: 15663
  source 1..40: mol_type = genomic DNA

SEQ ID NO: 16389 - DNA, 50 bp, Escherichia coli; identical to SEQ ID NO: 3244
  source 1..50: mol_type = genomic DNA

SEQ ID NO: 16390 - DNA, 40 bp, Escherichia coli; identical to SEQ ID NO: 3245
  source 1..40: mol_type = genomic DNA

SEQ ID NO: 16391 - protein, 547 aa, Escherichia coli
MKLLVTYIRWSTKEQDSGDSLRRQTNLIDAFYSKHKNDYYLLPAHRYVDKGKSGFHQQHKAQGSDFRRMFENVMSGTIPEGSLIVVENFDRFSRADIDTAIDDVRQILRKGVSILTLGDGELYDKSALTDPVKLIKHIIIAERAHQESLVKQKRIAQVWNHKTQLARELKKPMGKQAPGWLELSEDGSHYIVDEDKASLVNIIYDKRLSGMSMFAICKWLNEQGYPTINQRKVRISKTKKPDGNWSALSVKHILTSRSVLGYLPAKISTEDRKTVLREEIEGFYPQIVTDSKFYAVQQLLEETGKGKTSSGEHWLYVNILKGLIRCKCGLVMTPTGIRKPVYQGTYRCNGNKESRCSYGTVSRKLLDTQLCSRLFSKLSQLHDEATDTAKLDELQRRLNTVDSELEKLTETLIQLPNITQIQEALRVKQEEKDELIVQLSREKARVKSVSSLDLSGLDMESVEGRTEAQIIIKRLVKEIVVSGNEKLVDIYLHNGNMIRGFPLDGKDDHTLTLEEATDEMQSLDDMLIFGEPVTRIYPAGDMEEVDA

SEQ ID NO: 16392 - DNA, 50 bp, Escherichia coli; identical to SEQ ID NO: 3242
  source 1..50: mol_type = genomic DNA

SEQ ID NO: 16393 - DNA, 40 bp, Escherichia coli; identical to SEQ ID NO: 15663
  source 1..40: mol_type = genomic DNA

SEQ ID NO: 16394 - DNA, 50 bp, Escherichia coli; identical to SEQ ID NO: 3244
  source 1..50: mol_type = genomic DNA

SEQ ID NO: 16395 - DNA, 40 bp, Escherichia coli; identical to SEQ ID NO: 3245
  source 1..40: mol_type = genomic DNA

SEQ ID NO: 16396 - protein, 547 aa, Escherichia coli
MKLLVPYIRWSTKEQDSGDSLRRQTNLIDAFYSKHKNDYYLLPAHRYVDKGKSGFHQQHKAQGSDFRRMFENVMSGVIPEGSLIVVENFDRFSRADIDTAIDDVRQILRKGVSILTLGDGELYDKSALTDPVKLIKHIIIAERAHQESLVKQKRIAQVWNHKTQLARELKKPMGKQAPGWLELSEDGSHYIVDEDKASLVNIIYDKRLSGMSMFAICKWLNEQGYPTINQRKVRISKTKKPDGNWSALSVKHILTSRSVLGYLPAKISTEDRKTVLREEIEGFYPQIVTDSKFYAVQQLLEETGKGKTSSGDHWLYVNILKGLIRCKCGLVMTPTGIRKPVYQGTYRCNGNKESRCSYGTVSRKLLDTQLCSRLFSKLSQLHDEATDTAKLDELQRRLNTVDGELEKLTETLIQLPNITQIQEALRVKQEEKDELIVQLSREKARVKSVSSLDLSGLDMESVEGRTEAQIIIKRLVKEIVVSGNEKLVDIYLHNGNMIRGFPLDGKDDHTLTLEEATDEMQSLDDMLIFGEPVTRIYPAGDMEEVDA

SEQ ID NO: 16397 - DNA, 50 bp, Escherichia coli; identical to SEQ ID NO: 3242
  source 1..50: mol_type = genomic DNA

SEQ ID NO: 16398 - DNA, 40 bp, Escherichia coli; identical to SEQ ID NO: 15663
  source 1..40: mol_type = genomic DNA

SEQ ID NO: 16399 - DNA, 50 bp, Escherichia coli; identical to SEQ ID NO: 3244
  source 1..50: mol_type = genomic DNA

SEQ ID NO: 16400 - DNA, 40 bp, Escherichia coli; identical to SEQ ID NO: 3245
  source 1..40: mol_type = genomic DNA

SEQ ID NO: 16401 - protein, 547 aa, Escherichia coli; identical to SEQ ID NO: 10676

SEQ ID NO: 16402 - DNA, 50 bp, Escherichia coli; identical to SEQ ID NO: 3242
  source 1..50: mol_type = genomic DNA

SEQ ID NO: 16403 - DNA, 40 bp, Escherichia coli; identical to SEQ ID NO: 15663
  source 1..40: mol_type = genomic DNA

SEQ ID NO: 16404 - DNA, 50 bp, Escherichia coli; identical to SEQ ID NO: 3244
  source 1..50: mol_type = genomic DNA

SEQ ID NO: 16405 - DNA, 40 bp, Escherichia coli; identical to SEQ ID NO: 3245
  source 1..40: mol_type = genomic DNA

SEQ ID NO: 16406 - protein, 547 aa, Escherichia coli; identical to SEQ ID NO: 10676

SEQ ID NO: 16407 - DNA, 50 bp, Escherichia coli; identical to SEQ ID NO: 10667
  source 1..50: mol_type = genomic DNA

SEQ ID NO: 16408 - DNA, 40 bp, Escherichia coli; identical to SEQ ID NO: 15663
  source 1..40: mol_type = genomic DNA

SEQ ID NO: 16409 - DNA, 50 bp, Escherichia coli; identical to SEQ ID NO: 15774
  source 1..50: mol_type = genomic DNA

SEQ ID NO: 16410 - DNA, 40 bp, Escherichia coli; identical to SEQ ID NO: 3245
  source 1..40: mol_type = genomic DNA

SEQ ID NO: 16411 - protein, 547 aa, Escherichia coli
MKLLVTYIRWSTKEQDSGDSLRRQTNLIDAFYSKHKNDYYLLPAHRYVDKGKSGFHQQHKNQGSDFRRMFENVMSEAIPEGSLIVVENFDRFSRADIDTAIDDVRQILRKGVSILTLGDGELYDKSALTDPVKLIKHIIIAERAHQESLVKQKRIAQVWNHKTQLARELKKPMGKQAPGWLELSEDGSHYIVDEDKASLVNIIYDKRLSGMSMFAICKWLNEQGYPTINQRKVRISKTKKPDGNWSALSVKHILTSRSVLGYLPAKISTEDRKTVLREEIESFYPQIVTDSKFYAVQQLLEETGKGKTSSGDHWLYVNILKGLIRCKCGLVMTPTGIRKPVYQGTYRCNGNKESRCSYGTVSRKLLDTQLCSRLFSKLSQLHDEATDTAKLDELQRRLNTVDGELEKLTETLIQLPNITQIQEALRVKQEEKDELIVQLSREKARVKSVSSLDLSGLDMESVEGRTEAQIIIKRLVKEIVVSGNEKLVDIYLHNGNMIRGFPLDGKDDHTLTLEEATDEMQSLDDMLIFGEPVTRIYPAGDMEEVDA

SEQ ID NO: 16412 - DNA, 50 bp, Escherichia coli; identical to SEQ ID NO: 3242
  source 1..50: mol_type = genomic DNA

SEQ ID NO: 16413 - DNA, 40 bp, Escherichia coli; identical to SEQ ID NO: 15663
  source 1..40: mol_type = genomic DNA

SEQ ID NO: 16414 - DNA, 50 bp, Escherichia coli; identical to SEQ ID NO: 3244
  source 1..50: mol_type = genomic DNA

SEQ ID NO: 16415 - DNA, 40 bp, Escherichia coli; identical to SEQ ID NO: 3245
  source 1..40: mol_type = genomic DNA

SEQ ID NO: 16416 - protein, 547 aa, Escherichia coli
MKLLVTYIRWSTREQDSGDSLRRQTNLIDAFYSKHKEEYYLLPAHRYVDKGKSGFHQQHKNQGSDFRRMFDNVMSGTIPEGSLIVVENFDRFSRADIDTAIDDVRQILRKGVSILTLGDGELYDKSALTDPVKLIKHIIIAERAHQESLVKQKRIAQVWNHKTQLARELKKPMGKQAPGWLELSEDGSHYIVDEDKASLVNIIYDKRLSGMSMFAICKWLNEQGYPTINQRKVRISKTKKPDGNWSALSVKHILTSRSVLGYLPAKISSEDRKTVLREEIEGFYPQIVTDSKFYAVQQLLEETGKGKTSSGDHWLYVNILKGLIRCKCGLVMTPTGIRKPVYQGTYRCNGNKESRCSYGTVSRKLLDTQLCSRLFSKLSQLHDEATDTARLDELQRRLNTVDSELEKLTETLIQLPNITQIQEALRVKQEEKDELIVQLSREKARVKSVSSLDLSGLDMESVEGRTEAQIIIKRLVKEIVVSGNEKLVDIYLHNGNMIRGFPLDGKDDHTLTLEEATDEMQSLDDMLIFGEPVTRIYPAGDMEEVDA

SEQ ID NO: 16417 - DNA, 50 bp, Escherichia coli; identical to SEQ ID NO: 3242
  source 1..50: mol_type = genomic DNA

SEQ ID NO: 16418 - DNA, 40 bp, Escherichia coli; identical to SEQ ID NO: 15663
  source 1..40: mol_type = genomic DNA

SEQ ID NO: 16419 - DNA, 50 bp, Escherichia coli; identical to SEQ ID NO: 3244
  source 1..50: mol_type = genomic DNA

SEQ ID NO: 16420 - DNA, 40 bp, Escherichia coli; identical to SEQ ID NO: 3245
  source 1..40: mol_type = genomic DNA

SEQ ID NO: 16421 - protein, 547 aa, Escherichia coli
MKLLVTYIRWSTKEQDSGDSLRRQTNLIDAFYSKHKNDYYLLPAHRYVDKGKSGFHQQHKNQGSDFRRMFENVMSGVIPEGSLIVVENFDRFSRADIDTAIDDVRQILRKGVSILTLGDGELYDKSALTDPVKLIKHIIIAERAHQESLVKQKRIAQVWNHKTQLARELKKPMGKQAPGWLELSEDGSHYIVDEDKASLVNIIYDKRLSGMSMFAICKWLNEQGYPTINQRKVRISKTKKPDGNWSALSVKHILTSRSVLGYLPAKISTEDRKTVLREEIEGFYPQIVTDSKFYAVQQLLEETGKGKTSSGEHWLYVNILKGLIRCKCGLVMTPTGIRKPVYQGTYRCNGNKESRCSYGTVSRKLLDTQLCSRLFSKLSQLHDEATDTAKLDELQRRLNTVDGELEKLTETLIQLPNITQIQEALRVKQEEKDELIVQLSREKARVKSVSSLDLSGLDMESVEGRTEAQIIIKRLVKEIVVSGNEKLVDIYLHNGNMIRGFPLDGKDDHTLTLEEATDEMQSLDDMLIFGEPVTRIYPAGDMEEVDA

SEQ ID NO: 16422 - DNA, 50 bp, Escherichia coli; identical to SEQ ID NO: 3242
  source 1..50: mol_type = genomic DNA

SEQ ID NO: 16423 - DNA, 40 bp, Escherichia coli; identical to SEQ ID NO: 15663
  source 1..40: mol_type = genomic DNA

SEQ ID NO: 16424 - DNA, 50 bp, Escherichia coli; identical to SEQ ID NO: 3244
  source 1..50: mol_type = genomic DNA

SEQ ID NO: 16425 - DNA, 40 bp, Escherichia coli; identical to SEQ ID NO: 3245
  source 1..40: mol_type = genomic DNA

SEQ ID NO: 16426 - protein, 547 aa, Escherichia coli
MKLLVPYIRWSTKEQDSGDSLRRQTNLIDAFYSKHKEEYYLLPAHRYVDKGKSGFHQQHKAQGSDFRRMFENVMSGTIPEGSLIVVENFDRFSRADIDTAIDDVRQILRKGVSILTLGDGELYDKSALTDPVKLIKHIIIAERAHQESLVKQKRIAQVWNHKTQLARELKKPMGKQAPGWLELSEDGSHYIVDEDKASLVNIIYDKRLSGMSMFAICKWLNEQGYPTINQRKVRISKTKKPDGNWSALSVKHILTSRSVLGYLPAKISTEDRKTVLREEIEGFYPQIVTDSKFYAVQQLLEETGKGKTSSGDHWLYVNILKGLIRCKCGLVMTPTGIRKPVYQGTYRCNGNKESRCSYGTVSRKLLDTQLCSRLFSKLSQLHDEATDTAKLDELQRRLNTVDSELEKLTETLIQLPNITQIQEALRVKQEEKDELIVQLSREKARVKSVSSLDLSGLDMESVEGRTEAQIIIKRLVKEIVVSGNEKLVDIYLHNGNMIRGFPLDGKDDHTLTLEEATDEMQSLDDMLIFGEPVTRIYPAGDMEEVDA

SEQ ID NO: 16427 - DNA, 50 bp, Escherichia coli
  source 1..50: mol_type = genomic DNA
gtacgtgtttagctatgtaaaagcactagtattcttgtcttaacactcat

SEQ ID NO: 16428 - DNA, 40 bp, Escherichia coli; identical to SEQ ID NO: 15663
  source 1..40: mol_type = genomic DNA

SEQ ID NO: 16429 - DNA, 50 bp, Escherichia coli
  source 1..50: mol_type = genomic DNA
gtacgtgtttagctatgtaaaagcaatagtattcttgtcttaacactcat

SEQ ID NO: 16430 - DNA, 40 bp, Escherichia coli; identical to SEQ ID NO: 3245
  source 1..40: mol_type = genomic DNA

SEQ ID NO: 16431 - protein, 547 aa, Escherichia coli
MKLLVPYIRWSTKEQDSGDSLRRQTNLIDAFYSKHKNDYYLLPAHRYVDKGKSGFHQQHKNQGSDFRRMFENVMSGAIPEGSLIVVENFDRFSRADIDTAIDDVRQILRKGVSILTLGDGELYDKSALTDPVKLIKHIIIAERAHQESLVKQKRIAQVWNHKTQLARELKKPMGKQAPGWLELSDDGSHYIVDEDKASLVNIIYDKRLSGMSMFAICKWLNEQGYPTINQRKVRISKTKKPDGNWSALSVKHILTSRSVLGYLPAKISTEDRKTVLREEIEGFYPQIVTDSKFYAVQQLLEETGKGKTSSGEHWLYVNILKGLIRCRCGLVMTPTGIRKPVYQGTYRCNGNKESRCNYGTVSRKLLDTQLCSRLFSKLSQLHDEATDTAKLDELQRRLNIVDGELGKLTETLIQLPNITQIQEALRVKQEEKDELIVQLSREKARVKSVSSLDLSGLDMESVEGRTEAQIIIKRLVKEIVVSGNEKLVDIYLHNGNMIRGFPLDGKDDHTLTLEEATDEMQSLDDMLIFGEPVTRIYPAGDMEEVDA

SEQ ID NO: 16432 - DNA, 50 bp, Escherichia coli; identical to SEQ ID NO: 3242
  source 1..50: mol_type = genomic DNA

SEQ ID NO: 16433 - DNA, 40 bp, Escherichia coli; identical to SEQ ID NO: 15663
  source 1..40: mol_type = genomic DNA

SEQ ID NO: 16434 - DNA, 50 bp, Escherichia coli; identical to SEQ ID NO: 3244
  source 1..50: mol_type = genomic DNA

SEQ ID NO: 16435 - DNA, 40 bp, Escherichia coli; identical to SEQ ID NO: 3245
  source 1..40: mol_type = genomic DNA

SEQ ID NO: 16436 - protein, 547 aa, Escherichia coli
MKLLVTYIRWSTKEQDSGDSLRRQTNLIDAFYSKHKNDYYLLPAHRYVDKGKSGFHQQHKAQGSDFRRMFENVMSGVIPEGSLIVVENFDRFSRADIDTAIDDVRQILRKGVSILTLGDGELYDKSALTDPVKLIKHIIIAERAHQESLVKQKRIAQVWNHKTQLARELKKPMGKQAPGWLELSEDGSHYIVDEDKASLVNIIYDKRLSGMSMFAICKWLNEQGYPTINQRKVRISKTKKPDGNWSALSVKHILTSRSVLGYLPAKISTEDRKTVLREEIEGFYPQIVTDSKFYAVQQLLEETGKGKTSSGDHWLYVNILKGLIRCKCGLVMTPTGIRKPVYQGTYRCNGNKESRCSYGTVSRKLLDTQLCSRLFSKLSQLHDEATDTAKLDELQRRLNTVDSELEKLTETLIQLPNITQIQEALRVKQEEKDELIVQLSREKARVKSVSSLDLSGLDMESVEGRTEAQIIIKRLVKEIVVSGNEKLVDIYLHNGNMIRGFPLDGKDDHTLTLEEATDEMQSLDDMLIFGEPVTRIYPAGDMEEVDA

SEQ ID NO: 16437 - DNA, 50 bp, Escherichia coli; identical to SEQ ID NO: 3242
  source 1..50: mol_type = genomic DNA

SEQ ID NO: 16438 - DNA, 40 bp, Escherichia coli; identical to SEQ ID NO: 15663
  source 1..40: mol_type = genomic DNA

SEQ ID NO: 16439 - DNA, 50 bp, Escherichia coli; identical to SEQ ID NO: 3244
  source 1..50: mol_type = genomic DNA

SEQ ID NO: 16440 - DNA, 40 bp, Escherichia coli; identical to SEQ ID NO: 3245
  source 1..40: mol_type = genomic DNA

SEQ ID NO: 16441 - protein, 547 aa, Escherichia coli
MKLLVPYIRWSTKEQDSGDSLRRQTNLIDAFYSKHKNDYYLLPAHRYVDKGKSGFHQQHKAQGSDFRRMFENVMSGAIPEGSLIVVENFDRFSRADIDTAIDDVRQILRKGVSILTLGDGELYDKSALTDPVKLIKHIIIAERAHQESLVKQKRIAQVWNHKTQLARELKKPMGKQAPGWLELSEDGSHYIVDEDKASLVNIIYDKRLSGMSMFAICKWLNEQGYPTINQRKVRISKTKKPDGNWSALSVKHILTSRSVLGYLPAKISSEDRKTVLREEIEGFYPQIVTDSKFYAVQQLLEETGKGKTSSGDHWLYVNILKGLIRCKCGLVMTPTGIRKPVYQGTYRCNGNKESRCSYGTVSRKLLDTQLCSRLFSKLSQLHDEATDTAKLDELQRRLNTVDSELEKLTETLIQLPNITQIQEALRVKQEEKDELIVQLSREKARVKSVSSLDLSGLDMESVEGRTEAQIIIKRLVKEIVVSGNEKLVDIYLHNGNMIRGFPLDGKDDHTLTLEEATDEMQSLDDMLIFGEPVTRIYPAGDMEEVDA

SEQ ID NO: 16442 - DNA, 50 bp, Escherichia coli; identical to SEQ ID NO: 3242
  source 1..50: mol_type = genomic DNA

SEQ ID NO: 16443 - DNA, 40 bp, Escherichia coli; identical to SEQ ID NO: 15663
  source 1..40: mol_type = genomic DNA

SEQ ID NO: 16444 - DNA, 50 bp, Escherichia coli; identical to SEQ ID NO: 3244
  source 1..50: mol_type = genomic DNA

SEQ ID NO: 16445 - DNA, 40 bp, Escherichia coli; identical to SEQ ID NO: 3245
  source 1..40: mol_type = genomic DNA

SEQ ID NO: 16446 - protein, 547 aa, Escherichia coli
MKLLATYIRWSTKEQDSGDSLRRQTNLIDAFYSKHKNDYYLLPAHRYVDKGKSGFHQQHKAQGSDFRRMFENVMSGAIPEGSLIVVENFDRFSRADIDTAIDDVRQILRKGVSILTLGDGELYDKSALTDPVKLIKHIIIAERAHQESLVKQKRIAQVWNHKTQLARELKKPMGKQAPGWLELSEDGSHYIVDEDKASLVNIIYDKRLSGMSMFAICKWLNEQGYPTINQRKVRISKTKKPDGNWSALSVKHILTSRSVLGYLPAKISSEDRKTVLREEIEGFYPQIVTDSKFYAVQQLLEETGKGKTSSGEHWLYVNILKGLIRCKCGLVMTPTGIRKPVYQGTYRCNGNKESRCSYGTVSRKLLDTQLCSRLFSKLSQLHDEATDTAKLDELQRRLNTVDGELEKLTETLIQLPNITQIQEALRVKQEEKDELIVQLSREKARVKSVSSLDLSGLDMESVEGRTEAQIIIKRLVKEIVVSGNEKLVDIYLHNGNMIRGFPLDGKDDHTLTLEEATDEMQSLDDMLIFGEPVTRIYPAGDMEEVDA

SEQ ID NO: 16447 - DNA, 50 bp, Escherichia coli; identical to SEQ ID NO: 3242
  source 1..50: mol_type = genomic DNA

SEQ ID NO: 16448 - DNA, 40 bp, Escherichia coli; identical to SEQ ID NO: 15663
  source 1..40: mol_type = genomic DNA

SEQ ID NO: 16449 - DNA, 50 bp, Escherichia coli; identical to SEQ ID NO: 3244
  source 1..50: mol_type = genomic DNA

SEQ ID NO: 16450 - DNA, 40 bp, Escherichia coli; identical to SEQ ID NO: 3245
  source 1..40: mol_type = genomic DNA

SEQ ID NO: 16451 - protein, 547 aa, Escherichia coli
MKLLVTYIRWSTKEQDSGDSLRRQTNLIDAFYSKHKNDYYLLPAHRYVDKGKSGFHQQHKAQGSDFRRMFENVMSGAIPEGSLIVVENFDRFSRADIDTAIDDVRQILRKGVSILTLGDGELYDKSALTDPVKLIKHIIIAERAHQESLVKQKRIAQVWNHKTQLARELKKPMGKQAPGWLELSEDGSHYIVDEDKASLVNIIYDKRLSGMSMFAICKWLNEQGYPTINQRKVRISKTKKPDGNWSALSVKHILTSRSVLGYLPAKISSEDRKTVLREEIEGFYPQIVTDSKFYAVQQLLEETGKGKTSSGDHWLYVNILKGLIRCKCGLVMTPTGIRKPVYQGTYRCNGNKESRCSYGTVSRKLLDTQLCSRLFSKLSQLHDEATDTAKLDELQRRLNTVDGELEKLTETLIQLPNITQIQEALRVKQEEKDELIVQLSREKARVKSVSSLDLSGLDMESVEGRTEAQIIIKRLVKEIVVSGNEKLVDIYLHNGNMIRGFPLDGKDDHTLTLEEATDEMQSLDDMLIFGEPVTRIYPAGDMEEVDA

SEQ ID NO: 16452 - DNA, 50 bp, Escherichia coli; identical to SEQ ID NO: 3242
  source 1..50: mol_type = genomic DNA

SEQ ID NO: 16453 - DNA, 40 bp, Escherichia coli; identical to SEQ ID NO: 15663
  source 1..40: mol_type = genomic DNA

SEQ ID NO: 16454 - DNA, 50 bp, Escherichia coli; identical to SEQ ID NO: 3244
  source 1..50: mol_type = genomic DNA

SEQ ID NO: 16455 - DNA, 40 bp, Escherichia coli; identical to SEQ ID NO: 3245
  source 1..40: mol_type = genomic DNA

SEQ ID NO: 16456 - protein, 547 aa, Escherichia coli
MKLLVTYIRWSTKEQDSGDSLRRQTNLIDAFYSKHKEEYYLLPAHRYVDKGKSGFHQQHKNQGSDFRRMFENVMSGVIPEGSLIVVENFDRFSRADIDTAIDDVRQILRKGVSILTLGDGELYDKSALTDPVKLIKHIIIAERAHQESLVKQKRIAQVWNHKTQLARELKKPMGKQAPGWLELSEDGSHYIVDEDKASLVNIIYDKRLSGMSMFAICKWLNEQGYPTINQRKVRISKTKKPDGNWSALSVKHILTSRSVLGYLPAKISTEDRKTVLREEIEGFYPQIVTDSKFYAVQQLLEETGKGKTSSGDHWLYVNMLKGIIRCKCGLVMTPTGIRKPVYQGTYRCNGNKESRCSYGTVSRKLLDTQLCSRLFSKLSQLHDEATDTAKLDELQRRLNTVDSELEKLTETLIQLPNITQIQEALRVKQEEKDELIAQLSREKARVKSVSSLDLSGLDMESVEGRTEAQIIIKRLVKEIVVSGNEKLVDIYLHNGNMIRGFPLDGKDDHTLTLEEATDEMQSLDDMLIFGEPVTRIYPAGDMEEVDA

SEQ ID NO: 16457 - DNA, 50 bp, Escherichia coli; identical to SEQ ID NO: 3242
  source 1..50: mol_type = genomic DNA

SEQ ID NO: 16458 - DNA, 40 bp, Escherichia coli; identical to SEQ ID NO: 15663
  source 1..40: mol_type = genomic DNA

SEQ ID NO: 16459 - DNA, 50 bp, Escherichia coli; identical to SEQ ID NO: 3244
  source 1..50: mol_type = genomic DNA

SEQ ID NO: 16460 - DNA, 40 bp, Escherichia coli; identical to SEQ ID NO: 3245
  source 1..40: mol_type = genomic DNA

SEQ ID NO: 16461 - protein, 547 aa, Escherichia coli
MKLLVPYIRWSTKEQDSGDSLRRQTNLIDAFYAKHKDDYYLLPAHRYVDKGKSGFHQQHKAQGSDFRRMFENVMSGAIPEGSLIVVENFDRFSRADIDTAIDDVRQILRKGVSILTLGDGELYDKSALTDPVKLIKHIIIAERAHQESLVKQKRIAQVWNHKTQLARELKKPMGKQAPGWLELSEDGSHYIVDEDKASLVNIIYDKRLSGMSMFAICKWLNEQGYPTINQRKVRISKTRKPDGNWSALSVKHILTSRSVLGYLPAKISSEDRKTVLREEIEGFYPQIVTDSKFYAVQQLLEETGKGKTSSGDHWLYVNILKGLIRCKCGLVMTPTGIRKPVYQGTYRCNGNKESRCSYGTVSRKLLDTQLCSRLFSKLSQLHDEATDTAKLDELQRRLNTVDSELEKLTETLIQLPNITQIQEALRVKQEEKDELIVQLSREKARVKSVSSLDLSGLDMESVEGRTEAQIIIKRLVKEIVVSGNEKLVDIYLHNGNMIRGFPLDGKDDHTLTLEEATDEMQPLDDMLIFGEPVTRIYPAGDMEEVDA

SEQ ID NO: 16462 - DNA, 50 bp, Escherichia coli; identical to SEQ ID NO: 3242
  source 1..50: mol_type = genomic DNA

SEQ ID NO: 16463 - DNA, 40 bp, Escherichia coli; identical to SEQ ID NO: 15663
  source 1..40: mol_type = genomic DNA

SEQ ID NO: 16464 - DNA, 50 bp, Escherichia coli; identical to SEQ ID NO: 3244
  source 1..50: mol_type = genomic DNA

SEQ ID NO: 16465 - DNA, 40 bp, Escherichia coli; identical to SEQ ID NO: 3245
  source 1..40: mol_type = genomic DNA

SEQ ID NO: 16466 - protein, 547 aa, Escherichia coli
MKLLVPYIRWSTKEQDSGDSLRRQTNLIDAFYSKHKNDYYLLPAHRYVDKGKSGFHQQHKNQGSDFRRMFENVMSGAIPEGSLIVVENFDRFSRADIDTAIDDVRQILRKGVSILTLGDGELYDKSALTDPVKLIKHIIIAERAHQESLVKQKRIAQVWNHKTQLARELKKPMGKQAPGWLELSEDGSHYIVDEDKASLVNIIYDKRLSGMSMFAICKWLNEQGYPTINQRKVRISKTKKPEGNWSALSVKHILTSRSVLGYLPAKISTEDRKTVLREEIEGFYPQIVTDSKFYAVQQLLEETGKGKTSSGEHWLYVNILKGLIRCKCGLVMTPTGIRKPVYQGTYRCNGNKESRCSYGTVSRKLLDTQLCSRLFSKLSQLHDEATDTAKLDEIQRRLNTVDSELEKLTETLIQLPNITQIQEALRVKQEEKDELIVQLSREKARVKSVSSLDLSGLDMESVEGRTEAQIIIKRLVKEIVVSGNKKLVDIYLHNGNMIRGFPLDGKDDHTLTLEEATDEMQSLDDMLIFGEPVTRIYPAGDMEEVDA

SEQ ID NO: 16467 - DNA, 50 bp, Escherichia coli; identical to SEQ ID NO: 3242
  source 1..50: mol_type = genomic DNA

SEQ ID NO: 16468 - DNA, 40 bp, Escherichia coli; identical to SEQ ID NO: 15663
  source 1..40: mol_type = genomic DNA

SEQ ID NO: 16469 - DNA, 50 bp, Escherichia coli; identical to SEQ ID NO: 3244
  source 1..50: mol_type = genomic DNA

SEQ ID NO: 16470 - DNA, 40 bp, Escherichia coli; identical to SEQ ID NO: 3245
  source 1..40: mol_type = genomic DNA

SEQ ID NO: 16471 - protein, 547 aa, Escherichia coli
MKLLVTYIRWSTKEQDSGDSLRRQTNLIDAFYAKHREEYYLLPAHRYVDKGKSGFHQQHKNQGSDFRRMFENVMSGTIPEGSLIVVENFDRFSRADIDTAIDDVRQILRKGVSILTLGDGELYDKSALTDPVKLIKHIIIAERAHQESLVKQKRIAQVWNHKTQLARELKKPMGKQAPGWLELSDDGSHYIVDEDKASLVNLIYDKRLSGMSMFAICKWLNEQGYPTINQRKVRISKTKKPDGNWSALSVKHILTSRSVLGYLPAKISTEDRKTVLREEIEGFYPQIVTDSKFYAVQQLLEETGKGKTSSGEHWLYVNILKGIIRCKCGLVMTPTGIRKPVYQGTYRCNGNKESRCNYGTVSRKLLDTQLCSRLFSKLSQLHDEATDTARLDELQRRLTTVDSELEKLTETLIQLPNITQIQEALRVKQEEKDELIAQLSREKARVKSVSSLDLSGLDMESVEGRTEAQIIIKRLVKEIVVSGNEKLVDIYLHNGNMIRGFPLDGKDDHTLTLEEATDEMQPLDDMLIFGEPVIRVYPAGDMEEVDA

SEQ ID NO: 16472 - DNA, 50 bp, Escherichia coli; identical to SEQ ID NO: 3502
  source 1..50: mol_type = genomic DNA

SEQ ID NO: 16473 - DNA, 40 bp, Escherichia coli; identical to SEQ ID NO: 15663
  source 1..40: mol_type = genomic DNA

SEQ ID NO: 16474 - DNA, 50 bp, Escherichia coli; identical to SEQ ID NO: 15659
  source 1..50: mol_type = genomic DNA

SEQ ID NO: 16475 - DNA, 40 bp, Escherichia coli; identical to SEQ ID NO: 3245
  source 1..40: mol_type = genomic DNA

SEQ ID NO: 16476 - protein, 547 aa, Escherichia coli
MKLLVTYIRWSTKEQDSGDSLRRQTNLIDAFYAKHKDDYYLLPAHRYVDKGKSGFHQQHKAQGSDFRRMFENVMSGAIPEGSLIVVENFDRFSRADIDTAIDDVRQILRKGVSILTLGDGELYDKSALTDPVKLIKHIIIAERAHQESLVKQKRIAQVWNHKTQLARELKKPMGKQAPGWLELSEDGSHYIVDEDKASLVNIIYDKRLSGMSMFAICKWLNEQGYPTINQRKVRISKTKKPDGNWSALSVKHILTSRSVLGYLPAKISSEDRKTVLREEIEGFYPQIVTDSKFYAVQQLLEETGKGKTSSGEHWLYVNILKGLIRCKCGLVMTPTGIRKPVYQGTYRCNGNKESRCSYGTVSRKLLDTQLCSRLFSKLSQLHDEATDTAKLDELQRRLNTVDSELEKLTETLIQLPNITQIQEALRVKQEEKDELIVQLSREKARVKSVSSLDLSGLDMESVEGRTEAQIIIKRLVKEIVVSGNEKLVDIYLHNGNMIRGFPLDGKDDHTLTLEEATDEMQSLDDMLIFGEPVTRIYPAGDMEEVDA

SEQ ID NO: 16477 - DNA, 50 bp, Escherichia coli; identical to SEQ ID NO: 3242
  source 1..50: mol_type = genomic DNA

SEQ ID NO: 16478 - DNA, 40 bp, Escherichia coli; identical to SEQ ID NO: 15663
  source 1..40: mol_type = genomic DNA

SEQ ID NO: 16479 - DNA, 50 bp, Escherichia coli; identical to SEQ ID NO: 3244
  source 1..50: mol_type = genomic DNA

SEQ ID NO: 16480 - DNA, 40 bp, Escherichia coli; identical to SEQ ID NO: 3245
  source 1..40: mol_type = genomic DNA

SEQ ID NO: 16481 - protein, 547 aa, Escherichia coli
MKLLVTYIRWSTKEQDSGDSLRRQTNLIDAFYSKHKNDYYLLPAHRYVDKGKSGFHQQHKNQGSDFRRMFENVMSGAIPEGSLIVVENFDRFSRADIDTAIDDVRQILRKGVSILTLGDGELYDKSALTDPVKLIKHIIIAERAHQESLVKQKRIAQVWNHKTQLARELKKPMGKQAPGWLELSEDGSHYIVDEDKASLVNIIYDKRLSGMSMFAICKWLNEQGYPTINQRKVRISKTKKPDGNWSALSVKHILTSRSVLGYLPAKVSSEDRKTVLREEIEGFYPQIVTDSKFYAVQQLLEETGKGKTSSGEHWLYVNILKGLIRCKCGLVMTPTGIRKPVYQGTYRCNGNKESRCSYGTVSRKLLDTQLCSRLFSKLSQLHDEATDTARLDELQRRLNTVDSELEKLTETLIQLPNITQIQEALRVKQGEKDELIVQLSREKARVKSVSSLDLSGLDMESVEGRTEAQIIIKRLVKEIVVSGNEKLVDIYLHNGNMIRGFPLDGKDDHTLTLEEATDEMQSLDDMLIFGEPVTRIYPAGDMEEVDA

SEQ ID NO: 16482 - DNA, 50 bp, Escherichia coli; identical to SEQ ID NO: 3242
  source 1..50: mol_type = genomic DNA

SEQ ID NO: 16483 - DNA, 40 bp, Escherichia coli; identical to SEQ ID NO: 15663
  source 1..40: mol_type = genomic DNA

SEQ ID NO: 16484 - DNA, 50 bp, Escherichia coli; identical to SEQ ID NO: 3244
  source 1..50: mol_type = genomic DNA

SEQ ID NO: 16485 - DNA, 40 bp, Escherichia coli; identical to SEQ ID NO: 3245
  source 1..40: mol_type = genomic DNA

SEQ ID NO: 16486 - protein, 547 aa, Escherichia coli
MKLLVTYIRWSTKEQDSGDSLRRQTNLIDAFYSKHKNDYYLLPAHRYVDKGKSGFHQQHKNQGSDFRRMFENVMSGAIPEGSLIVVENFDRFSRADIDTAIDDVRQILRKGVSILTLGDGELYDKSALTDPVKLIKHIIIAERAHQESLVKQKRIAQVWNHKTQLARELKKPMGKQAPGWLELSEDGSHYIVDEDKASLVNIIYDKRLSGMSMFAICKWLNEQGYPTINQRKVRISKTKKPDGNWSALSVKHILTSRSVLGYLPAKVSSEDRKTVLREEIEGFYPQIVTDSKFYAVQQLLEETGKGKTSSGEHWLYVNILKGLIRCKCGLVMTPTGIRKPVYQGTYRCNGNKESRCSYGTVSRKLLDTQLCSRLFSKLSQLHDEATDTAKLDELQRRLNTVDSELEKLTETLIQLPNITQIQEALRAKQEEKDELIVQLSREKARVKSVSSLDLSGLDMESVEGRTEAQIIIKRLVKEIVVSGNEKLVDIYLHNGNMIRGFQIDGKDDHTLTLEEATDEMQSLDDMLIFGEPVTRIYPAGDMEEVDA

SEQ ID NO: 16487 - DNA, 50 bp, Escherichia coli; identical to SEQ ID NO: 3242
  source 1..50: mol_type = genomic DNA

SEQ ID NO: 16488 - DNA, 40 bp, Escherichia coli; identical to SEQ ID NO: 15663
  source 1..40: mol_type = genomic DNA

SEQ ID NO: 16489 - DNA, 50 bp, Escherichia coli; identical to SEQ ID NO: 3244
  source 1..50: mol_type = genomic DNA

SEQ ID NO: 16490 - DNA, 40 bp, Escherichia coli; identical to SEQ ID NO: 3245
  source 1..40: mol_type = genomic DNA

SEQ ID NO: 16491 - protein, 547 aa, Escherichia coli
MKLLATYIRWSTREQDSGDSLRRQTNLIDAFYSKHKNDYYLLPAHRYVDKGKSGFHQQHKAQGSDFRRMFENVMSGAIPEGSLIVVENFDRFSRADIDTAIDDVRQILRKGVSILTLGDGELYDKSALTDPVKLIKHIIIAERAHQESLVKQKRIAQVWNHKTQLARELKKPMGKQAPGWLELSEDGSHYIVDEDKASLVNIIYDKRLSGMSMFAICKWLNEQGYPTINQRKVRISKTKKPDGNWSALSVKHILTSRSVLGYLPAKISSEDRKTVLREEIESFYPRIVTDSKFYAVQQLLEETGKGKTSSGDHWLYVNILKGIIRCKCGLVMTPTGIRKPAYQGTYRCNGNKESRCSYGTVSRKLLDTQLCSRLFSKLSQLHDEATDTAKLDELQRRLNTVDSELEKLTETLIQLPNITQIQEALRVKQEEKDELIVQLSREKARVKSVSSLDLSGLDMESVEGRTEAQIIIKRLVKEIVVSGNEKLVDIYLHNGNMIRGFPLDGKDDHTLTLEEATDEMQSLDDMLIFGEPVTRIYPAGDMEEVDA

SEQ ID NO: 16492 - DNA, 50 bp, Escherichia coli; identical to SEQ ID NO: 3242
  source 1..50: mol_type = genomic DNA

SEQ ID NO: 16493 - DNA, 40 bp, Escherichia coli; identical to SEQ ID NO: 15663
  source 1..40: mol_type = genomic DNA

SEQ ID NO: 16494 - DNA, 50 bp, Escherichia coli; identical to SEQ ID NO: 3244
  source 1..50: mol_type = genomic DNA

SEQ ID NO: 16495 - DNA, 40 bp, Escherichia coli; identical to SEQ ID NO: 3245
  source 1..40: mol_type = genomic DNA

SEQ ID NO: 16496 - protein, 547 aa, Escherichia coli
MKLLVTYIRWSTKEQDSGDSLRRQTNLIDAFYAKHKEEYYLLPAHRYVDKGKSGFHQQHKAQGSDFRRMFENVMSGVIPEGSLIVVENFDRFSRADIDTAIDDVRQILRKGVSILTLGDGELYDKSALTDPVKLIKHIIIAERAHQESLVKQKRIAQVWNHKTQLARELKKPMGKQAPGWLELSEDGSHYIVDEDKASLVNIIYDKRLSGMSMFAICKWLNEQGYPTINQRKVRISKTKKPDGNWSALSVKHILTSRSVLGYLPAKISSEDRKTVLREEIEGFYPQIVTDSKFYAVQQLLEETGKGKTSSGEHWLYVNILKGLIRCKCGLVMTPTGIRKPVYQGTYRCNGNKESRCNYGTVSRKLLDTQLCSRLFSKLSQLHDEATDTAKLDELQRRLNTVDGELEKLTETLIQLPNITQIQEALRVKQEEKDELIVQLSREKARVKSVSSLDLSGLDMESVEGRTEAQIIIKRLVKEIVVSGNEKLVDIYLHNGNMIRGFPLDGKDDHTLTLEEATDEMQSLDDMLIFGEPVTRIYPAGDMEEVDA

SEQ ID NO: 16497 - DNA, 50 bp, Escherichia coli; identical to SEQ ID NO: 3242
  source 1..50: mol_type = genomic DNA

SEQ ID NO: 16498 - DNA, 40 bp, Escherichia coli; identical to SEQ ID NO: 15663
  source 1..40: mol_type = genomic DNA

SEQ ID NO: 16499 - DNA, 50 bp, Escherichia coli; identical to SEQ ID NO: 3244
  source 1..50: mol_type = genomic DNA

SEQ ID NO: 16500 - DNA, 40 bp, Escherichia coli; identical to SEQ ID NO: 3245
  source 1..40: mol_type = genomic DNA

SEQ ID NO: 16501 - protein, 547 aa, Escherichia coli
MKLLVTYIRWSTREQDSGDSLRRQTNLIDAFYAKHKDDYYLLPAHRYVDKGKSGFHQQHKAQGSDFKRMFENVMSGVIPEGSLIVVENFDRFSRADIDTAIDDVRQILRKGVSILTLGDGELYDKSALTDPVKLIKHIIIAERAHQESLVKQKRIAQVWNHKTQLARELKKPMGKQAPGWLELSEDGSHYIVDEDKASLVNIIYDKRLSGMSMFAICKWLNEQGYPTINQRKVRISKTKKPDGNWSALSVKHILTSRSVLGYLPAKISTEDRKTVLREEIEGFYPQIVTDSKFYAVQQLLEETGKGKTSSGEHWLYVNILKGLIRCKCGLVMTPTGIRKPVYQGTYRCNGNKESRCSYGTVSRKLLDTQLCSRLFSKLSQLHDEATDTAKLDELQRRLNTVDGELEKLTETLIQLPNITQIQEALRVKQEEKDELIVQLSREKARVKSVSSLDLSGLDMESVEGRTEAQIIIKRLVKEIVVSGNEKLVDIYLHNGNMIRGFPLDGKDDHTLTLEEATDEMQSLDDMLIFGEPVTRIYPAGDMEEVDA

SEQ ID NO: 16502 - DNA, 50 bp, Escherichia coli; identical to SEQ ID NO: 3502
  source 1..50: mol_type = genomic DNA

SEQ ID NO: 16503 - DNA, 40 bp, Escherichia coli; identical to SEQ ID NO: 15663
  source 1..40: mol_type = genomic DNA

SEQ ID NO: 16504 - DNA, 50 bp, Escherichia coli; identical to SEQ ID NO: 15659
  source 1..50: mol_type = genomic DNA

SEQ ID NO: 16505 - DNA, 40 bp, Escherichia coli; identical to SEQ ID NO: 3245
  source 1..40: mol_type = genomic DNA

SEQ ID NO: 16506 - protein, 547 aa, Escherichia coli
MKLLVTYIRWSTKEQDSGDSLRRQTNLIDAFYSKHKEEYYLLPAHRYVDKGKSGFHQQHKNQGSDFRRMFENVMSGVIPEGSLIVVENFDRFSRADIDTAIDDVRQILRKGVSILTLGDGELYDKSALTDPVKLIKHIIIAERAHQESLVKQKRIAQVWNHKTQLARELKKPMGKQAPGWLELSEDGSHYIVDEDKASLVNIIYDKRLSGMSMFAICKWLNEQGYPTINQRKVRISKTKKPDGNWSALSVKHILTSRSVLGFLPAKLSSEDRKTVLREEIEGFYPQIVTDSKFYAVQQLLEETGKGKTSSGEHWLYVNILKGLIRCRCGLVMTPTGIRKPVYQGTYRCNGNKESRCNYGTVSRKLLDTQLCSRLFSKLSQLHDEATDTARLDELQRRLNTVDSELEKLTETLIQLPNITQIQEALRVKQEEKDELTFQLSREKARVKSVSSLDLSGLDMESVEGRTEAQIIIKRLVKEIVVSGNEKLVDIYLHNGNMIRGFPLDGKDDHTLTLEEATDEMQSLDDMLIFGEPVTRIYPAGDMEEVDA

SEQ ID NO: 16507 - DNA, 50 bp, Escherichia coli; identical to SEQ ID NO: 3242
  source 1..50: mol_type = genomic DNA

SEQ ID NO: 16508 - DNA, 40 bp, Escherichia coli; identical to SEQ ID NO: 15663
  source 1..40: mol_type = genomic DNA

SEQ ID NO: 16509 - DNA, 50 bp, Escherichia coli; identical to SEQ ID NO: 3244
  source 1..50: mol_type = genomic DNA

SEQ ID NO: 16510 - DNA, 40 bp, Escherichia coli; identical to SEQ ID NO: 3245
  source 1..40: mol_type = genomic DNA

SEQ ID NO: 16511 - protein, 547 aa, Escherichia coli
MKLLVTYIRWSTKEQDSGDSLRRQTNLIDAFYSKHKNDYYLLPAHRYVDKGKSGFHQQHKNQGSDFRRMFENVMSEAIPEGSLIVVENFDRFSRADIDTAIDDVRQILRKGVSILTLGDGELYDKSALTDPVKLIKHIIIAERAHQESLVKQKRIAQVWNHKTQLARELKKPMGKQAPGWLELSDDGSHYIVDEDKASLVNIIYDKRLSGMSMFAICKWLNEQGYPTINQRKVRISKTKKPDGNWSALSVKHILTSRSVLGYLPAKISSEDRKTVLREEIEGFYPQIVTDSKFYAVQQLLEETGKGKTSSGEHWLYVNILKGLIRCKCGLVMTPTGIRKPVYQGTYRCNGNKESRCSYGTVSRKLLDTQLCSRLFSKLSQLHDEATDTAKLDELQRRLNTVDSELEKLTETLIQLPNITQIQEALRVKQEEKDGLIVQLSREKARLKSVSSLDLSGLDMESVEGRTEAQIIIKRLVKEIVVSGNEKLVDIYLHNGNMIRGFPLDGKDDHTLTLEEATDEMQSLDDMLIFGEPVTRIYPAGDMEEVDA

SEQ ID NO: 16512 - DNA, 50 bp, Escherichia coli; identical to SEQ ID NO: 3242
  source 1..50: mol_type = genomic DNA

SEQ ID NO: 16513 - DNA, 40 bp, Escherichia coli; identical to SEQ ID NO: 15663
  source 1..40: mol_type = genomic DNA

SEQ ID NO: 16514 - DNA, 50 bp, Escherichia coli; identical to SEQ ID NO: 3244
  source 1..50: mol_type = genomic DNA

SEQ ID NO: 16515 - DNA, 40 bp, Escherichia coli; identical to SEQ ID NO: 3245
  source 1..40: mol_type = genomic DNA

SEQ ID NO: 16516 - protein, 547 aa, Escherichia coli
MKLLVPYIRWSTKEQDSGDSLRRQTNLIDAFYSKHKEEYYLLPAHRYVDKGKSGFHQQHKAQGSDFRRMFENVMSGVIPEGSLIVVENFDRFSRADIDTAIDDVRQILRKGVSILTLGDGELYDKSALTDPVKLIKHIIIAERAHQESLVKQKRIAQVWNHKTQLARELKKPMGKQAPGWLELSEDGSHYIVDEDKASLVNIIYDKRLSGMSMFAICKWLNEQGYPTINQRKVRISKTKKPDGNWSALSVKHILTSRSVLGYLPAKISSEDRKTVLREEIEGFYPQIVTDSKFYAVQQLLEETGKGKTSSGEHWLYVNILKGLIRCKCGLVMTPTGIRKPVYQGTYRCNGNKESRCSYGTVSRKLLDTQLCSRLFSKLSQLHDEATDTAKLDELQRRLNTVDSELEKLTETLIQLPNITQIQEALRVKQEEKDELIVQLSREKARVKSVSSLDLSGLDMESVEGRTEAQIIIKRLVKEIVVSGNEKLVDIYLHNGNMIRGFPLDGKDDHTLTLEEATDEMQSLDDMLIFGEPVTRIYPAGDMEEVDA

SEQ ID NO: 16517 - DNA, 50 bp, Escherichia coli; identical to SEQ ID NO: 3242
  source 1..50: mol_type = genomic DNA

SEQ ID NO: 16518 - DNA, 40 bp, Escherichia coli; identical to SEQ ID NO: 15663
  source 1..40: mol_type = genomic DNA

SEQ ID NO: 16519 - DNA, 50 bp, Escherichia coli; identical to SEQ ID NO: 3244
  source 1..50: mol_type = genomic DNA

SEQ ID NO: 16520 - DNA, 40 bp, Escherichia coli; identical to SEQ ID NO: 3245
  source 1..40: mol_type = genomic DNA

SEQ ID NO: 16521 - protein, 547 aa, Escherichia marmotae; identical to SEQ ID NO: 15726

SEQ ID NO: 16522 - DNA, 50 bp, Escherichia marmotae
  source 1..50: mol_type = genomic DNA
gtacgtgtttagccatgtaaaagcactagtattcttgccttaacactcat

SEQ ID NO: 16523 - DNA, 40 bp, Escherichia marmotae; identical to SEQ ID NO: 15663
  source 1..40: mol_type = genomic DNA

SEQ ID NO: 16524 - DNA, 50 bp, Escherichia marmotae
  source 1..50: mol_type = genomic DNA
gtacgtgtttagccatgtaaaagcaatagtattcttgccttaacactcat

SEQ ID NO: 16525 - DNA, 40 bp, Escherichia marmotae; identical to SEQ ID NO: 3245
  source 1..40: mol_type = genomic DNA

SEQ ID NO: 16526 - protein, 547 aa, Escherichia coli
MKLLVTYIRWSTKEQDSGDSLRRQTNLIDAFYSKHKNDYYLLPAHRYVDKGKSGFHQQHKNQGSDFRRMFENVMSGAIPEGSLIVVENFDRFSRADIDTAIDDVRQILRKGVSILTLGDGELYDKSALTDPVKLIKHIIIAERAHQESLVKQKRIAQVWNHKTQLARELKKPMGKQAPGWLELSEDGSHYIVDEDKASLVNIIYDKRLSGMSMFAICKWLNEQGYPTINQRKVRISKTKKPDGNWSALSVKHILTSRSVLGYLPAKVSSEDRKTVLREEIEGFYPQIVTDSKFYAVQQLLEETGKGKTSSGEHWLYVNILKGLIRCKCGLVMTPTGIRKPVYQGTYRCNGNKESRCSYGTVSRKLLDTQLCSRLFSKLSQLHDEATDTAKLDELQRRLNTVDGELEKLTETLIQLPNITQIQEALRVKQGEKDELIVQLSREKARVKSVSSLDLSGLDMESVEGRTEAQIIIKRLVKEIVVSGNERLVDIYLHNGNMIRGFPLDGKDDHTLTLEEATDEMQSLDDMLIFGEPVTRIYPAGDMEEVDA

SEQ ID NO: 16527 - DNA, 50 bp, Escherichia coli; identical to SEQ ID NO: 3242
  source 1..50: mol_type = genomic DNA

SEQ ID NO: 16528 - DNA, 40 bp, Escherichia coli; identical to SEQ ID NO: 15663
  source 1..40: mol_type = genomic DNA

SEQ ID NO: 16529 - DNA, 50 bp, Escherichia coli; identical to SEQ ID NO: 3244
  source 1..50: mol_type = genomic DNA

SEQ ID NO: 16530 - DNA, 40 bp, Escherichia coli; identical to SEQ ID NO: 3245
  source 1..40: mol_type = genomic DNA

SEQ ID NO: 16531 - protein, 547 aa, Escherichia coli
MKLLVTYIRWSTREQDSGDSLRRQTNLIDAFYSKHKNDYYLLPAHRYVDKGKSGFHQQHKAQGSDFRRMFENVMSGAIPEGSLIVVENFDRFSRADIDTAIDDVRQILRKGVSILTLGDGELYDKSALTDPVKLIKHIIIAERAHQESLVKQKRIAQVWNHKTQLARELKKPMGKQAPGWLELSEDGSHYIVDEDKASLVNIIYDKRLSGMSMFAICKWLNEQGYPTINQRKVRISKTKKPDGNWSALSVKHILTSRSVLGFLPAKISTEDRKTVLREEIEGFYPQIVTDSKFYAVQQLLEETGKGKTSSGEHWLYVNILKGLIRCKCGLVMTPTGIRKPVYQGTYRCNGNKESRCSYGTVSRKLLDTQLCSRLFSKLSQLHDEATDTAKLDELQRRLNTVDSELEKLTETLIQLPNITQIQEALRVKQEEKDELIAQLSREKARVKSVSSLDLSGLDMESVEGRTEAQIIIKRLVKEIVVSGNEKLVDIYLHNGNMIRGFPLDGKDDHTLTLEEATDEMQSLDDMLIFGEPVTRIYPAGDMEEVDA

SEQ ID NO: 16532 - DNA, 50 bp, Escherichia coli; identical to SEQ ID NO: 3242
  source 1..50: mol_type = genomic DNA

SEQ ID NO: 16533 - DNA, 40 bp, Escherichia coli; identical to SEQ ID NO: 15663
  source 1..40: mol_type = genomic DNA

SEQ ID NO: 16534 - DNA, 50 bp, Escherichia coli; identical to SEQ ID NO: 3244
  source 1..50: mol_type = genomic DNA

SEQ ID NO: 16535 - DNA, 40 bp, Escherichia coli; identical to SEQ ID NO: 3245
  source 1..40: mol_type = genomic DNA

SEQ ID NO: 16536 - protein, 547 aa, Escherichia coli
MKLLVTYIRWSTREQDSGDSLRRQTNLIDAFYAKHKDDYYLLPAHRYVDKGKSGFHQQHKAQGSDFRRMFENVMSGVIPEGSLIVVENFDRFSRADIDTAIDDVRQILRKGVSILTLGDGELYDKSALTDPVKLIKHIIIAERAHQESLVKQKRIAQVWNHKTQLARELNKPMGKQAPGWLELSEDGSHYIVDEDKASLVNIIYDKRLSGMSMFAICKWLNEQGYPTINQRKVRISKTKKPDGNWSALSVKHILTSRSVLGYLPAKISTEDRKTVLREEIESFYPQIVTDSKFYAVQQLLEETGKGKTSSGEHWLYVNILKGLIRCKCGLVMTPTGIRKPVYQGTYRCNGNKESRCSYGTVSRKLLDTQLCSRLFSKLSQLHDEATDTAKLDELQRRLNTVDSELEKLTETLIQLPNITQIQEALRVKQEEKDELIVQLSREKARVKSVSSLDLSGLDMESVEGRTEAQIIIKRLVKEIVVSGNEKLVDIYLHNGNMIRGFPLDGKDDHTLTLEEATDEMQSLDDMLIFGEPVTRIYPAGDMEEVDA

SEQ ID NO: 16537 - DNA, 50 bp, Escherichia coli; identical to SEQ ID NO: 3242
  source 1..50: mol_type = genomic DNA

SEQ ID NO: 16538 - DNA, 40 bp, Escherichia coli; identical to SEQ ID NO: 15663
  source 1..40: mol_type = genomic DNA

SEQ ID NO: 16539 - DNA, 50 bp, Escherichia coli; identical to SEQ ID NO: 3244
  source 1..50: mol_type = genomic DNA

SEQ ID NO: 16540 - DNA, 40 bp, Escherichia coli; identical to SEQ ID NO: 3245
  source 1..40: mol_type = genomic DNA

SEQ ID NO: 16541 - protein, 547 aa, Escherichia coli
MKLLVTYIRWSTKEQDSGDSLRRQTNLIDAFYSKHKEEYYLLPAHRYVDKGKSGFHQQHKAQGSDFRRMFENVMSGAIPEGSLIVVENFDRFSRADIDTAIDDVRQILRKGVSILTLGDGELYDKSALTDPVKLIKHIIIAERAHQESLVKQKRIAQVWNHKTQLARELKKPMGKQAPGWLELSEDGSHYIVDEDKASLVNIIYDKRLSGMSMFAICKWLNEQGYPTINQRKVRISKTKKPDGNWSALSVKHILTSRSVLGYLPAKISTEDRKTVLREEIESFYPQIVTDSKFYAVQQLLEETGKGKTSSGEHWLYVNILKGLIRCKCGLVMTPTGIRKPVYQGTYRCNGNKESRCSYGTVSRKLLDTQLCSRLFSKLSQLHDEATDTAKLDELQRRLNTVDGELEKLTETLIQLPNITQIQEALRVKQGEKDELIVQLSREKARVKSVSSLDLSGLDMESVEGRTEAQIIIKRLVKEIVVSGNEKLVDIYLHNGNMIRGFPLDGKDDHTLTLEEATDEMQSLDDMLIFGEPVTRIYPAGDMEEVDA

SEQ ID NO: 16542 - DNA, 50 bp, Escherichia coli; identical to SEQ ID NO: 3242
  source 1..50: mol_type = genomic DNA

SEQ ID NO: 16543 - DNA, 40 bp, Escherichia coli; identical to SEQ ID NO: 15663
  source 1..40: mol_type = genomic DNA

SEQ ID NO: 16544 - DNA, 50 bp, Escherichia coli; identical to SEQ ID NO: 3244
  source 1..50: mol_type = genomic DNA

SEQ ID NO: 16545 - DNA, 40 bp, Escherichia coli; identical to SEQ ID NO: 3245
  source 1..40: mol_type = genomic DNA

SEQ ID NO: 16546 - protein, 547 aa, Escherichia coli
MKLLVTYIRWSTKEQDSGDSLRRQTNLIDAFYAKHKDDYYLLPAHRYVDKGKSGFHQQHKAQGSDFRRMFENVMSGAIPEGSLIVVENFDRFSRADIDTAIDDVRQILRKGVSILTLGDGELYDKSALTDPVKLIKHIIIAERAHQESLVKQKRIAQVWNHKTQLARELKKPMGKQAPGWLELSDDGSHYIVDEDKASLVNIIYDKRLSGMSMFAICKWLNEQGYPTINQRKVRISKTKKPDGNWSALSVKHILTSRSVLGYLPAKISTEDRKTVLREEIESFYPQIVTDSKFYAVQQLLEETGKGKTSSGEHWLYVNILKGLIRCKCGLVMTPTGIRKPVYQGTYRCNGNKESRCSYGTVSRKLLDTQLCSRLFSKLSQLHDEATDTAKLDELQRRLNTVDGELEKLTETLIQLPNITQIQEALRVKQEEKDELIVQLSREKARVKSVSSLDLSGLDMESVEGRTEAQIIIKRLVKEIVVSGNEKLVDIYLHNGNMIRGFPLDGKDDHTLTLEEATDEMQSLDDMLIFGEPVTRIYPAGDMEEVDA

SEQ ID NO: 16547 - DNA, 50 bp, Escherichia coli; identical to SEQ ID NO: 3242
  source 1..50: mol_type = genomic DNA

SEQ ID NO: 16548 - DNA, 40 bp, Escherichia coli; identical to SEQ ID NO: 15663
  source 1..40: mol_type = genomic DNA

SEQ ID NO: 16549 - DNA, 50 bp, Escherichia coli; identical to SEQ ID NO: 3244
  source 1..50: mol_type = genomic DNA

SEQ ID NO: 16550 - DNA, 40 bp, Escherichia coli; identical to SEQ ID NO: 3245
  source 1..40: mol_type = genomic DNA

SEQ ID NO: 16551 - protein, 547 aa, Escherichia coli
MKLLVTYIRWSTREQDSGDSLRRQTNLIDAFYAKHKDDYYLLPAHRYVDKGKSGFHQQHKAQGSDFRRMFENVMSGAIPEGSLIVVENFDRFSRADIDTAIDDVRQILRKGVSILTLGDGELYDKSALTDPVKLIKHIIIAERAHQESLVKQKRIAQVWNHKTQLARELKKPMGKQAPGWLELSEDGSHYIVDEDKASLVNIIYDKRLSGMSMFAICKWLNEQGYPTINQRKVRISKTKKPDGNWSALSVKHILTSRSVLGYLPAKISTEDRKTVLREEIEGFYPQIVTDSKFYAVQQLLEETGKGKTSSGDHWLYVNILKGLIRCKCGLVMTPTGIRKPVYQGTYRCNGNKESRCSYGTVSRKLLDTQLCSRLFSKLSQLHDEATDTAKLDELQRRLNTVDSELEKLTETLIQLPNITQIQEALRVKQEEKDELIVQLSREKARVKSVSSLDLSGLDMESVEGRTEAQIIIKRLVKEIVVSGNERLVDIYLHNGNMIRGFPLDGKDDHTLTLEEATDEMQSLDDMLIFGEPVTRIYPAGDMEEVDA

SEQ ID NO: 16552 - DNA, 50 bp, Escherichia coli; identical to SEQ ID NO: 3242
  source 1..50: mol_type = genomic DNA

SEQ ID NO: 16553 - DNA, 40 bp, Escherichia coli; identical to SEQ ID NO: 15663
  source 1..40: mol_type = genomic DNA

SEQ ID NO: 16554 - DNA, 50 bp, Escherichia coli; identical to SEQ ID NO: 3244
  source 1..50: mol_type = genomic DNA

SEQ ID NO: 16555 - DNA, 40 bp, Escherichia coli; identical to SEQ ID NO: 3245
  source 1..40: mol_type = genomic DNA

SEQ ID NO: 16556 - protein, 547 aa, Escherichia coli
MKLLVPYIRWSTKEQDSGDSLRRQTNLIDAFYAKHKDDYYLLPAHRYVDKGKSGFHQQHKNQGSDFRRMFENVMSGVIPEGSLIVVENFDRFSRADIDTAIDDVRQILRKGVSILTLGDGELYDKSALTDPVKLIKHIIIAERAHQESLVKQKRIAQVWNHKTQLARELKKPMGKQAPGWLELSEDGSHYIVDEDKASLVNIIYDKRLSGMSMFAICKWLNEQGYPTINQRKVRISKTKKPDGNWSALSVKHILTSRSVLGYLPAKISSEDRKTVLREEIEGFYPQIVTDSKFYAVQQLLEETGKGKTSSGDHWLYVNILKGLIRCKCGLVMTPTGIRKPVYQGTYRCNGNKESRCSYGTVSRKLLDTQLCSRLFSKLSQLHDEATDTAKLDELQRRLNTVDGELEKLTETLIQLPNITQIQEALRVKQEEKDELIVQLSREKARVKSVSSLDLSGLDMESVEGRTEAQIIIKRLVKEIVVSGNEKLVDIYLHNGNMIRGFPLDGKDDHTLTLEEATDEMQSLDDMLIFGEPVTRIYPAGDMEEVDA

SEQ ID NO: 16557 - DNA, 50 bp, Escherichia coli; identical to SEQ ID NO: 3242
  source 1..50: mol_type = genomic DNA

SEQ ID NO: 16558 - DNA, 40 bp, Escherichia coli; identical to SEQ ID NO: 15663
  source 1..40: mol_type = genomic DNA

SEQ ID NO: 16559 - DNA, 50 bp, Escherichia coli; identical to SEQ ID NO: 3244
  source 1..50: mol_type = genomic DNA

SEQ ID NO: 16560 - DNA, 40 bp, Escherichia coli; identical to SEQ ID NO: 3245
  source 1..40: mol_type = genomic DNA

SEQ ID NO: 16561 - protein, 547 aa, Escherichia coli
MKLLVTYIRWSTREQDSGDSLRRQTNLIDAFYSKHKEEYYLLPAHRYVDKGKSGFHQQHKNQGSDFRRMFENVMSGAIPEGSLIVVENFDRFSRADIDTAIDDVRQILRKGVSILTLGDGELYDKSALTDPVKLIKHIIIAERAHQESLVKQKRIAQVWNHKTQLARELKKPMGKQAPGWLELSEDGSHYIVDEDKASLVNIIYDKRLSGMSMFAICKWLNEQGYPTINQRKVRISKTKKPDGNWSALSVKHILTSRSVLGYLPAKISSEDRKTVLREEIEGFYPQIVTDSKFYAVQQLLEETGKGKTSSGEHWLYVNILKGLIRCKCGLVMTPTGIRKPVYQGTYRCNGNKESRCNYGTVSRKLLDTQLCSRLFSKLSQLHDEATDTAKLDELQRRLNTVDSELEKLTETLIQLPNITQIQEALRVKQGEKDELIVQLSREKARVKSVSSLNLSGLDMESVEGRTEAQIIIKRLVKEIVVSGNEKLVDIYLHNGNMIRGFQIDGKDDHTLTLEEATDEMQSLDDMLIFGEPVTRIYPAGDMEEVDA

SEQ ID NO: 16562 - DNA, 50 bp, Escherichia coli; identical to SEQ ID NO: 3242
  source 1..50: mol_type = genomic DNA

SEQ ID NO: 16563 - DNA, 40 bp, Escherichia coli; identical to SEQ ID NO: 15663
  source 1..40: mol_type = genomic DNA

SEQ ID NO: 16564 - DNA, 50 bp, Escherichia coli; identical to SEQ ID NO: 3244
  source 1..50: mol_type = genomic DNA

SEQ ID NO: 16565 - DNA, 40 bp, Escherichia coli; identical to SEQ ID NO: 3245
  source 1..40: mol_type = genomic DNA

SEQ ID NO: 16566 - protein, 547 aa, Escherichia coli
MKLLVTYIRWSTKEQDSGDSLRRQTNLIDAFYSKHKNDYYLLPAHRYVDKGKSGFHQQHKNQGSDFRRMFENVMSGAIPEGSLIVVENFDRFSRADIDTAIDDVRQILRKGVSILTLGDGELYDKSALTDPVKLIKHIIIAERAHQESLVKQKRIAQVWNHKTQLARELKKPMGKQAPGWLELSEDGSHYIVDEDKASLVNIIYDKRLSGMSMFAICKWLNEQGYPTINQRKVRISKTKKPDGNWSALSVKHILTSRSVLGYLPAKISTEDRKTVLREEIEGFYPQIVTDSKFYAVQQLLEETGKGKTSSGEHWLYVNILKGLIRCKCGLVMTPTGIRKPVYQGTYRCNGNKESRCSYGTVSRKLLDTQLCSRLFSKLSQLHDEATDTAKLDELQRRLNTVDSELEKLTETLIQLPNITQIQEALRVKQGEKDELIVQLSREKARVKSVSSLNLSGLDMESVEGRTEAQIIIKRLVKEIVVSGNEKLVDIYLHNGNMIRGFPLDGKDDHTLTLEEATDEMQSLDDMLIFGEPVTRIYPAGDMEEVDA

SEQ ID NO: 16567 - DNA, 50 bp, Escherichia coli; identical to SEQ ID NO: 3242
  source 1..50: mol_type = genomic DNA

SEQ ID NO: 16568 - DNA, 40 bp, Escherichia coli; identical to SEQ ID NO: 15663
  source 1..40: mol_type = genomic DNA

SEQ ID NO: 16569 - DNA, 50 bp, Escherichia coli; identical to SEQ ID NO: 3244
  source 1..50: mol_type = genomic DNA

SEQ ID NO: 16570 - DNA, 40 bp, Escherichia coli; identical to SEQ ID NO: 3245
  source 1..40: mol_type = genomic DNA

SEQ ID NO: 16571 - protein, 547 aa, Escherichia coli
MKLLVPYIRWSTKEQDSGDSLRRQTNLIDAFYSKHKNDYYLLPAHRYVDKGKSGFHQQHKNQGSDFRRMFENVMSGVIPEGSLIVVENFDRFSRADIDTAIDDVRQILRKGVSILTLGDGELYDKSALTDPVKLIKHIIIAERAHQESLVKQKRIAQVWNHKTQLARELKKPMGKQAPGWLELSEDGSHYIVDEDKASLVNIIYDKRLSGMSMFAICKWLNEQGYPTINQRKVRISKTKKPDGNWSALSVKHILTSRSVLGYLPAKISSEDRKTVLREEIESFYPRIVTDSKFYAVQQLLEETGKGKTSSGDHWLYVNILKGIIRCKCGLVMTPTGIRKPVYQGTYRCNGNKESRCSYGTVSRKLLDTQLCSRLFSKLSQLHDEATDTAKLDELQRRLNTVDSELEKLTETLIQLPNITQIQEALRVKQEEKDELIVQLSREKARLKSVSSLDLSGLDMESVEGRTEAQIIIKRLVKEIVVSGNEKLVDIYLHNGNMIRGFPLDGKDDHTLTLEEATDEMQPLDDMLIFGEPVTRIYPAGDMEEVDA

SEQ ID NO: 16572 - DNA, 50 bp, Escherichia coli; identical to SEQ ID NO: 3242
  source 1..50: mol_type = genomic DNA

SEQ ID NO: 16573 - DNA, 40 bp, Escherichia coli; identical to SEQ ID NO: 15663
  source 1..40: mol_type = genomic DNA

SEQ ID NO: 16574 - DNA, 50 bp, Escherichia coli; identical to SEQ ID NO: 3244
  source 1..50: mol_type = genomic DNA

SEQ ID NO: 16575 - DNA, 40 bp, Escherichia coli; identical to SEQ ID NO: 3245
  source 1..40: mol_type = genomic DNA

SEQ ID NO: 16576 - protein, 547 aa, Shigella flexneri
MKLLVTYIRWSTREQDSGDSLRRQTNLIDAFYSKHKNDYYLLPAHRYVDKGKSGFHQQHKNQGSDFRRMFENVMSGAIPEGSLIVVENFDRFSRADIDTAIDDVRQILRKGVSILTLGDGELYDKSALTDPVKLIKHIIIAERAHQESLVKQKRIAQVWNHKTQLARELKKPMGKQAPGWLELSEDGSHYIVDEDKASLVNIIYDKRLSGMSMFAICKWLNEQGYPTINQRKVRISKTKKPDGNWSALSVKHILTSRSVLGYLPAKISTEDRKTVLREEIESFYPQIVTDSKFYAVQQLLEETGKGKTSSGEHWLYVNILKGLIRCRCGLVMTPTGIRKPVYQGTYRCNGNKESRCSYGTVSRKLLDTQLCSRLFSKLSQLHDEATDTAKLDELQRRLNTVDGELEKLTETLIQLPNITQIQEALRVKQEEKDELIVQLSREKARVKSVSSLDLSGLDMESVEGRTEAQIIIKRLVKEIVVSGNEKLVDIYLHNGNMIRGFPLDGKDDHTLTLEEATDEMQPLDDMLIFGEPVTRIYPAGDMEEVDA

SEQ ID NO: 16577 - DNA, 50 bp, Shigella flexneri; identical to SEQ ID NO: 3242
  source 1..50: mol_type = genomic DNA

SEQ ID NO: 16578 - DNA, 40 bp, Shigella flexneri; identical to SEQ ID NO: 15663
  source 1..40: mol_type = genomic DNA

SEQ ID NO: 16579 - DNA, 50 bp, Shigella flexneri; identical to SEQ ID NO: 3244
  source 1..50: mol_type = genomic DNA

SEQ ID NO: 16580 - DNA, 40 bp, Shigella flexneri; identical to SEQ ID NO: 3245
  source 1..40: mol_type = genomic DNA

SEQ ID NO: 16581 - protein, 547 aa, Escherichia coli
MKLLVTYIRWSTKEQDSGDSLRRQTNLIDAFYSKHKNDYYLLPAHRYVDKGKSGFHQQHKNQGSDFRRMFENVMSGVIPEGSLIVVENFDRFSRADIDTAIDDVRQILRKGVSILTLGDGELYDKSALTDPVKLIKHIIIAERAHQESLVKQKRIAQVWNHKTQLARELKKPMGKQAPGWLELSEDGSHYIVDEDKASLVNIIYDKRLSGMSMFAICKWLNEQGYPTINQRKVRISKTKKPDGNWSALSVKHILTSRSVLGYLPAKISTEDRKTVLREEIESFYPQIVTDSKFYAVQQLLEETGKGKTSSGEHWLYVNILKGLIRCKCGLVMTPTGIRKPVYQGTYRCNGNKESRCNYGTVSRKLLDTQLCSRLFSKLSQLHDEATDTAKLDELQRRLNTVDSELEKLTETLIQLPNITQIQEALRVKQEEKDELIVQLSREKARVKSVSSLDLSGLDMESVEGRTEAQIIIKRLVKEIVVSGNEKLVDIYLHNGNMIRGFPLDGKDDHTLTLEEATDEMQSLDDMLIFGEPVTRIYPAGDMEEVDA

SEQ ID NO: 16582 - DNA, 50 bp, Escherichia coli; identical to SEQ ID NO: 3242
  source 1..50: mol_type = genomic DNA

SEQ ID NO: 16583 - DNA, 40 bp, Escherichia coli; identical to SEQ ID NO: 15663
  source 1..40: mol_type = genomic DNA

SEQ ID NO: 16584 - DNA, 50 bp, Escherichia coli; identical to SEQ ID NO: 3244
  source 1..50: mol_type = genomic DNA

SEQ ID NO: 16585 - DNA, 40 bp, Escherichia coli; identical to SEQ ID NO: 3245
  source 1..40: mol_type = genomic DNA

SEQ ID NO: 16586 - protein, 547 aa, Escherichia coli
MKLLVTYIRWSTKEQDSGDSLRRQTNLIDAFYSKHKNDYYLLPAHRYVDKGKSGFHQQHKNQGSDFRRMFENVMSGAIPEGSLIVVENFDRFSRADIDTAIDDVRQILRKGVSILTLGDGELYDKSALTDPVKLIKHIIIAERAHQESLVKQKRIAQVWNHKTQLARELKKPMGKQAPGWLELSEDGSHYIVDEDKASLVNIIYDKRLSGMSMFAICKWLNEQGYPTINQRKVRISKTKKPDGNWSALSVKHILTSRSVLGYLPAKISTEDRKTVLREEIESFYPQIVTDSKFYAVQQLLEETGKGKTSSGEHWLYVNILKGLIRCKCGLVMTPTGIRKPVYQGTYRCNGNKESRCSYGTVSRKLLDTQLCSRLFSKLSQLHDEATDTAKLDELQRRLNTVDSELEKLTETLIQLPNITQIQEALRIKQEEKDELIVQLSREKARVKSVSSLDLSGLDMESVEGRTEAQIIIKRLVKEIVVSGNEKLVDIYLHNGNMIRGFPLDGKDDHTLTLEEATDEMQSLDDMLIFGEPVTRIYPAGDMEEVDA

SEQ ID NO: 16587 - DNA, 50 bp, Escherichia coli; identical to SEQ ID NO: 3242
  source 1..50: mol_type = genomic DNA

SEQ ID NO: 16588 - DNA, 40 bp, Escherichia coli; identical to SEQ ID NO: 15663
  source 1..40: mol_type = genomic DNA

SEQ ID NO: 16589 - DNA, 50 bp, Escherichia coli; identical to SEQ ID NO: 3244
  source 1..50: mol_type = genomic DNA

SEQ ID NO: 16590 - DNA, 40 bp, Escherichia coli; identical to SEQ ID NO: 3245
  source 1..40: mol_type = genomic DNA

SEQ ID NO: 16591 - protein, 547 aa, Escherichia coli
MKLLATYIRWSTREQDSGDSLRRQTNLIDAFYSKHKNDYYLLPAHRYVDKGKSGFHQQHKAQGSDFRRMFENVMSGAIPEGSLIVVENFDRFSRADIDTAIDDVRQILRKGVSILTLGDGELYDKSALTDPVKLIKHIIIAERAHQESLVKQKRIAQVWNHKTQLARELKKPMGKQAPGWLELSEDGSHYIVDEDKASLVNIIYDKRLSGMSMFAICKWLNEQGYPTINQRKVRISKTKKPDGNWSALSVKHILTSRSVLGYLPAKISTEDRKTVLREEIESFYPQIVTDSKFYAVQQLLEETGKGKTSSGEHWLYVNILKGLIRCKCGLVMTPTGIRKPVYQGTYRCNGNKESRCSYGTVSRKLLDTQLCSRLFSKLSQLHDEATDTAKLDELQRRLNTVDSELEKLTETLIQLPNITQIQEALRVKQEEKDELIVQLSREKARVKSVSSLDLSGLDMESVEGRTEAQIIIKRLVKEIVVSGNEKLVDIYLHNGNMIRGFPLDGKDDHTLTLEEATDEMQSLDDMLIFGEPVTRIYPAGDMEEVDA

SEQ ID NO: 16592 - DNA, 50 bp, Escherichia coli; identical to SEQ ID NO: 3242
  source 1..50: mol_type = genomic DNA

SEQ ID NO: 16593 - DNA, 40 bp, Escherichia coli; identical to SEQ ID NO: 15663
  source 1..40: mol_type = genomic DNA

SEQ ID NO: 16594 - DNA, 50 bp, Escherichia coli; identical to SEQ ID NO: 3244
  source 1..50: mol_type = genomic DNA

SEQ ID NO: 16595 - DNA, 40 bp, Escherichia coli; identical to SEQ ID NO: 3245
  source 1..40: mol_type = genomic DNA

SEQ ID NO: 16596 - protein, 547 aa, Escherichia coli
MKLLVPYIRWSTKEQDSGDSLRRQTNLIDAFYSKHKEEYYLLPAHRYVDKGKSGFHQQHKAQGSDFRRMFENVMSGAIPEGSLIVVENFDRFSRADIDTAIDDVRQILRKGVSILTLGDGELYDKSALTDPVKLIKHIIIAERAHQESLVKQKRIAQVWNHKTQLARELKKPMGKQAPGWLELSEDGSHYIVDEDKASLVNIIYDKRLSGMSMFAICKWLNEQGYPTINQRKVRISKTKKPDGNWSALSVKHILTSRSVLGYLPAKISTEDRKTVLREEIESFYPQIVTDSKFYAVQQLLEETGKGKTSSGEHWLYVNILKGLIRCKCGLVMTPTGIRKPVYQGTYRCNGNKESRCNYGTVSRKLLDTQLCSRLFSKLSQLHDEATDTAKLDELQRRLNTVDSELEKLTETLIQLPNITQIQEALRVKQEEKDELIVQLSREKARVKSVSSLDLSGLDMESVEGRTEAQIIIKRLVKEIVVSGNEKLVDIYLHNGNMIRGFPLDGKDDHTLTLEEATDEMQSLDDMLIFGEPVTRIYPAGDMEEVDA

SEQ ID NO: 16597 - DNA, 50 bp, Escherichia coli; identical to SEQ ID NO: 3242
  source 1..50: mol_type = genomic DNA

SEQ ID NO: 16598 - DNA, 40 bp, Escherichia coli; identical to SEQ ID NO: 15663
  source 1..40: mol_type = genomic DNA

SEQ ID NO: 16599 - DNA, 50 bp, Escherichia coli; identical to SEQ ID NO: 3244
  source 1..50: mol_type = genomic DNA

SEQ ID NO: 16600 - DNA, 40 bp, Escherichia coli; identical to SEQ ID NO: 3245
  source 1..40: mol_type = genomic DNA

SEQ ID NO: 16601 - protein, 547 aa, Escherichia coli
MKLLVTYIRWSTKEQDSGDSLRRQTNLIDAFYSKHKNDYYLLPAHRYVDKGKSGFHQQHKNQGSDFRRMFENVMSGVIPEGSLIVVENFDRFSRADIDTAIDDVRQILRKGVSILTLGDGELYDKSALTDPVKLIKHIIIAERAHQESLVKQKRIAQVWNHKTQLARELKKPMGKQAPGWLELSDDGSHYIVDEDKASLVNIIYDKRLSGMSMFAICKWLNEQGYPTINQRKVRISKTKKPDGNWSALSVKHILTSRSVLGYLPAKISTEDRKTVLREEIESFYPQIVTDSKFYAVQQLLEETGKGKTSSGEHWLYVNILKGLIRCKCGLVMTPTGIRKPVYQGTYRCNGNKESRCSYGTVSRKLLDTQLCSRLFSKLSQLHDEATDTAKLDELQRRLNTVDSELEKLTETLIQLPNITQIQEALRVKQEEKDELIVQLSREKARVKSVSSLDLSGLDMESVEGRTEAQIIIKRLVKEIVVSGNEKLVDIYLHNGNMIRGFPLDGKDDHTLTLEEATDEMQSLDDMLIFGEPVTRIYPAGDMEEVDA

SEQ ID NO: 16602 - DNA, 50 bp, Escherichia coli; identical to SEQ ID NO: 3242
  source 1..50: mol_type = genomic DNA

SEQ ID NO: 16603 - DNA, 40 bp, Escherichia coli; identical to SEQ ID NO: 15663
  source 1..40: mol_type = genomic DNA

SEQ ID NO: 16604 - DNA, 50 bp, Escherichia coli; identical to SEQ ID NO: 3244
  source 1..50: mol_type = genomic DNA

SEQ ID NO: 16605 - DNA, 40 bp, Escherichia coli; identical to SEQ ID NO: 3245
  source 1..40: mol_type = genomic DNA

SEQ ID NO: 16606 - protein, 547 aa, Escherichia coli
MKLLVPYIRWSTKEQDSGDSLRRQTNLIDAFYSKHKEEYYLLPAHRYVDKGKSGFHQQHKAQGSDFRRMFENVMSGAIPEGSLIVVENFDRFSRADIDTAIDDVRQILRKGVSILTLGDGELYDKSALTDPVKLIKHIIIAERAHQESLVKQKRIAQVWNHKTQLARELKKPMGKQAPGWLELSEDGSHYIVDEDKASLVNIIYDKRLSGMSMFAICKWLNEQGYPTINQRKVRISKTKKPDGNWSALSVKHILTSRSVLGYLPAKISSEDRKTVLREEIEGFYPQIVTDSKFYAVQQLLEETGKGKTSSGEHWLYVNILKGLIRCKCGLVMTPTGIRKPVYQGTYRCNGNKESRCNYGTVSRKLLDTQLCSRLFSKLSQLHDEATDTARLDELQRRLNTVDGELEKLTETLIQLPNITQIQEALRVKQEEKDELIVQLSREKARVKSVSSLDLSGLDMESVEGRTEAQIIIKRLVKEIVVSGNEKLVDIYLHNGNMIRGFPLDGKDDHTLTLEEATDEMQSLDDMLIFGEPVTRIYPAGDMEEVDA

SEQ ID NO: 16607 - DNA, 50 bp, Escherichia coli; identical to SEQ ID NO: 3242
  source 1..50: mol_type = genomic DNA

SEQ ID NO: 16608 - DNA, 40 bp, Escherichia coli; identical to SEQ ID NO: 15663
  source 1..40: mol_type = genomic DNA

SEQ ID NO: 16609 - DNA, 50 bp, Escherichia coli; identical to SEQ ID NO: 3244
  source 1..50: mol_type = genomic DNA

SEQ ID NO: 16610 - DNA, 40 bp, Escherichia coli; identical to SEQ ID NO: 3245
  source 1..40: mol_type = genomic DNA

SEQ ID NO: 16611 - protein, 547 aa, Escherichia coli
MKLLVTYIRWSTKEQDSGDSLRRQTNLIDAFYAKHKNDYYLLPAHRYVDKGKSGFHQQHKAQGSDFRRMFENVMSGVIPEGSLIVVENFDRFSRADIDTAIDDVRQILRKGVSILTLGDGELYDKSALTDPVKLIKHIIIAERAHQESLVKQKRIAQVWNHKTQLARELKKPMGKQAPGWLELSEDGSHYIVDEDKASLVNIIYDKRLSGMSMFAICKWLNEQGYPTINQRKVRISKTKKPDGNWSALSVKHILTSRSVLGYLPAKISTEDRKTVLREEIEGFYPQIVTDSKFYAVQQLLEETGKGKTSSGEHWLYVNILKGLIRCKCGLVMTPTGIRKPVYQGTYRCNGNKESRCSYGTVSRKLLDTQLCSRLFSKLSQLHDEATDTAKLDELQRRLNTVDGELEKLTETLIQLPNITQIQEALRVKQEEKDELIVQLSREKARVKSVSSLDLSGLDMESVEGRTEAQIIIKRLVKEIVVSGNEKLVDIYLHNGNMIRGFPLDGKDDHTLTLEEATDEMQSLDDMLIFGEPVTRIYPAGDMEEVDA

SEQ ID NO: 16612 - DNA, 50 bp, Escherichia coli; identical to SEQ ID NO: 3242
  source 1..50: mol_type = genomic DNA

SEQ ID NO: 16613 - DNA, 40 bp, Escherichia coli; identical to SEQ ID NO: 15663
  source 1..40: mol_type = genomic DNA

SEQ ID NO: 16614 - DNA, 50 bp, Escherichia coli; identical to SEQ ID NO: 3244
  source 1..50: mol_type = genomic DNA

SEQ ID NO: 16615 - DNA, 40 bp, Escherichia coli; identical to SEQ ID NO: 3245
  source 1..40: mol_type = genomic DNA

SEQ ID NO: 16616 - protein, 547 aa, Escherichia coli
MKLLVPYIRWSTKEQDSGDSLRRQTNLIDAFYSKHKNDYYLLPAHRYVDKGKSGFHQQHKNQGSDFRRMFENVMSGAIPEGSLIVVENFDRFSRADIDTAIDDVRQILRKGVSILTLGDGELYDKSALTDPVKLIKHIIIAERAHQESLVKQKRIAQVWNHKTQLARELKKPMGKQAPGWLELSEDGSHYIVDEDKASLVNIIYDKRLSGMSMFAICKWLNEQGYPTINQRKVRISKTKKPDGNWSALSVKHILTSRSVLGYLPAKISTEDRKTVLREEIESFYPQIVTDSKFYAVQQLLEETGKGKTSSGEHWLYVNILKGLIRCKCGLVMTPTGIRKPVYQGTYRCNGNKESRCSYGTVSRKLLDTQLCSRLFSKLSQLHDEATDTAKLDELQRRLNTVDGELEKLTETLIQLPNITQIQEALRVKQGEKDELIVQLSREKARVKSVSSLDLSGLDMESVEGRTEAQIIIKRLVKEIVVSGNEKLVDIYLHNGNMIRGFPLDGKDDHTLTLEEATDEMQSLDDMLIFGEPVTRIYPAGDMEEVDA

SEQ ID NO: 16617 - DNA, 50 bp, Escherichia coli; identical to SEQ ID NO: 3242
  source 1..50: mol_type = genomic DNA

SEQ ID NO: 16618 - DNA, 40 bp, Escherichia coli; identical to SEQ ID NO: 15663
  source 1..40: mol_type = genomic DNA

SEQ ID NO: 16619 - DNA, 50 bp, Escherichia coli; identical to SEQ ID NO: 3244
  source 1..50: mol_type = genomic DNA

SEQ ID NO: 16620 - DNA, 40 bp, Escherichia coli; identical to SEQ ID NO: 3245
  source 1..40: mol_type = genomic DNA

SEQ ID NO: 16621 - protein, 547 aa, Escherichia coli
MKLLATYIRWSTKEQDSGDSLRRQTNLIDAFYAKHKDDYYLLPAHRYVDKGKSGFHQQHKAQGSDFRRMFENVMSGAIPEGSLIVVENFDRFSRADIDTAIDDVRQILRKGVSILTLGDGELYDKSALTDPVKLIKHIIIAERAHQESLVKQKRIAQVWNHKTQLARELKKPMGKQAPGWLELSEDGSHYIVDEDKASLVNIIYDKRLSGMSMFAICKWLNEQGYPTINQRKVRISKTKKPDGNWSALSVKHILTSRSVLGYLPAKISTEDRKTVLREEIEGFYPQIVTDSKFYAVQQLLEETGKGKTSSGEHWLYVNILKGLIRCKCGLVMTPTGIRKPVYQGTYRCNGNKESRCSYGTVSRKLLDTQLCSRLFSKLSQLHDEATDTAKLDELQRRLNTVDSELEKLTETLIQLPNITQIQEALRVKQEEKDELIVQLSREKARVKSVSSLDLSGLDMESVEGRTEAQIIIKRLVKEIVVSGNEKLVDIYLHNGNMIRGFPLDGKDDHTLTLEEATDEMQSLDDMLIFGEPVTRIYPAGDMEEVDA

SEQ ID NO: 16622 - DNA, 50 bp, Escherichia coli; identical to SEQ ID NO: 3242
  source 1..50: mol_type = genomic DNA

SEQ ID NO: 16623 - DNA, 40 bp, Escherichia coli; identical to SEQ ID NO: 15663
  source 1..40: mol_type = genomic DNA

SEQ ID NO: 16624 - DNA, 50 bp, Escherichia coli; identical to SEQ ID NO: 3244
  source 1..50: mol_type = genomic DNA

SEQ ID NO: 16625 - DNA, 40 bp, Escherichia coli; identical to SEQ ID NO: 3245
  source 1..40: mol_type = genomic DNA

SEQ ID NO: 16626 - protein, 547 aa, Escherichia coli
MKLLVPYIRWSTKEQDSGDSLRRQTNLIDAFYAKHKDDYYLLPAHRYVDKGKSGFHQQHKNQGSDFRRMFENVMSGAIPEGSLIVVENFDRFSRADIDTAIDDVRQILRKGVSILTLGDGELYDKSALTDPVKLIKHIIIAERAHQESLVKQKRIAQVWNHKTQLARELKKPMGKQAPGWLELSDDGSHYIVDEDKASLVNIIYDKRLSGMSMFAICKWLNEQGYPTINQRKVRISKTKKPDGNWSALSVKHILTSRSVLGYLPAKISTEDRKTVLREEIEGFYPQIVTDSKFYAVQQLLEETGKGKTSSGEHWLYVNILKGIIRCKCGLVMTPTGIRKPVYQGTYRCNGNKESRCSYGTVSRKLLDTQLCSRLFSKLSQLHDEATDTAKLDELQRRLNTVDSELEKLTETLIQLPNITQIQEALRVKQEEKDELIVQLSREKARVKSVSSLNLSGLDMESVEGRTEAQIIIKRLVKEIVVSGNEKLVDIYLHNGNMIRGFPLDGKDDHTLTLEEATDEMQSLDDMLIFGEPVTRIYPAGDMEEVDA

SEQ ID NO: 16627 - DNA, 50 bp, Escherichia coli; identical to SEQ ID NO: 3242
  source 1..50: mol_type = genomic DNA

SEQ ID NO: 16628 - DNA, 40 bp, Escherichia coli; identical to SEQ ID NO: 15663
  source 1..40: mol_type = genomic DNA

SEQ ID NO: 16629 - DNA, 50 bp, Escherichia coli; identical to SEQ ID NO: 3244
  source 1..50: mol_type = genomic DNA

SEQ ID NO: 16630 - DNA, 40 bp, Escherichia coli; identical to SEQ ID NO: 3245
  source 1..40: mol_type = genomic DNA

SEQ ID NO: 16631 - protein, 452 aa, Shigella dysenteriae
MKLLVTYIRWSTKEQDSGDSLRRQTILIDAFYSKHKNDYYLLPAHRYVDKGKSGFHQQHKAQGSDFRRMFENVMSGAIPEGSLIVVENFDRFSRADIDTAIDDVRQILRKGVSILTLGDGELYDKSALTDPVKLIKHIIIAERAHQESLVKQKRIAQVWNHKTQLARELKKPMGKQAPGWLELSEDGSHYIVDEDKASLVNIIYDKRLSGMSMFAICKWLNEQGYPTINQRKVRISKTKKPDGNWSALSVKHILTSRSVLGYLPAKISTEDRKTVLREEIEGFYPQIVTDSKFYAVQRLLEETGKGKTSSGEHWLYVNILKGLIRCRCGLVMTPTGIRKPVYQGTYRCNGNKESRCSYGTVSRKLLDTQLCSRLFSKLSQLHDEATDTAKLDELQRRLNTVDSELEKLTETLIQLPNITQIQEALRVKQEEKDELIVQLSREKGKRPISDVL

SEQ ID NO: 16632 - DNA, 50 bp, Shigella dysenteriae
  source 1..50: mol_type = genomic DNA
atacgtgtttagctatgtaaaagcaccagtattcttgccttaacactcat

SEQ ID NO: 16633 - DNA, 40 bp, Shigella dysenteriae; identical to SEQ ID NO: 15663
  source 1..40: mol_type = genomic DNA

SEQ ID NO: 16634 - DNA, 50 bp, Shigella dysenteriae
  source 1..50: mol_type = genomic DNA
atacgtgtttagctatgtaaaagcaacagtattcttgccttaacactcat

SEQ ID NO: 16635 - DNA, 40 bp, Shigella dysenteriae; identical to SEQ ID NO: 3245
  source 1..40: mol_type = genomic DNA

SEQ ID NO: 16636 - protein, 547 aa, Escherichia coli
MKLLVTYIRWSTKEQDSGDSLRRQTNLIDAFYSKHKNDYYLLPAHRYVDKGKSGFHQQHKNQGSDFRRMFENVMSGAIPEGSLIVVENFDRFSRADIDTAIDDVRQILRKGVSILTLGDGELYDKSALTDPVKLIKHIIIAERAHQESLVKQKRIAQVWNHKTQLARELKKPMGKQAPGWLELSDDGSHYIVDEDKASLVNIIYDKRLSGMSMFAICKWLNEQGYPTINQRKVRISKTKKPDGNWSALSVKHILTSRSVLGYLPAKISTEDRKTVLREEIEGFYPQIVTDSKFYAVQQLLEETGKGKTSSGDHWLYVNILKGLIRCKCGLVMTPTGIRKPVYQGTYRCNGNKESRCNYGTVSRKLLDTQLCSRLFSKLSQLHDEATDTAKLDELQRRLNTVDSELEKLTETLIQLPNITQIQEALRVKQEEKDELIVQLSREKARVKSVSSLDLSGLDMESVEGRTEAQIIIKRLVKEIVVSGNEKLVDIYLHNGNMIRGFPLDGKDDHTLTLEEATDEMQSLDDMLIFGEPVTRIYPAGDMEEVDA

SEQ ID NO: 16637 - DNA, 50 bp, Escherichia coli; identical to SEQ ID NO: 3242
  source 1..50: mol_type = genomic DNA

SEQ ID NO: 16638 - DNA, 40 bp, Escherichia coli; identical to SEQ ID NO: 15663
  source 1..40: mol_type = genomic DNA

SEQ ID NO: 16639 - DNA, 50 bp, Escherichia coli; identical to SEQ ID NO: 3244
  source 1..50: mol_type = genomic DNA

SEQ ID NO: 16640 - DNA, 40 bp, Escherichia coli; identical to SEQ ID NO: 3245
  source 1..40: mol_type = genomic DNA

SEQ ID NO: 16641 - protein, 547 aa, Escherichia coli
MKLLVPYIRWSTKEQDSGDSLRRQTNLIDAFYSKHKEEYYLLPAHRYVDKGKSGFHQQHKAQGSDFRRMFENVMSGAIPEGSLIVVENFDRFSRADIDTAIDDVRQILRKGVSILTLGDGELYDKSALTDPVKLIKHIIIAERAHQESLVKQKRIAQVWNHKTQLARELKKPMGKQAPGWLELSEDGSHYIVDEDKASLVNIIYDKRLSGMSMFAICKWLNEQGYPTINQRKVRISKTKKPDGNWSALSVKHILTSRSVLGYLPAKVSSEDRKTVLREEIEGFYPQIVTDSKFYAVQQLLEETGKGKTSSGEHWLYVNILKGLIRCKCGLVMTPTGIRKPVYQGTYRCNGNKESRCSYGTVSRKLLDTQLCSRLFSKLSQLHDEATDTAKLDELQRRLNTVDSELEKLTETLIQLPNITQIQEALRAKQEEKDELIVQLSREKARVKSVSSLDLSGLDMESVEGRTEAQIIIKRLVKEIVVSGNEKLVDIYLHNGNMIRGFPLDGKDDHTLTLEEATDEMQSLDDMLIFGEPVTRIYPAGDMEEVDA

SEQ ID NO: 16642 - DNA, 50 bp, Escherichia coli; identical to SEQ ID NO: 3242
  source 1..50: mol_type = genomic DNA

SEQ ID NO: 16643 - DNA, 40 bp, Escherichia coli; identical to SEQ ID NO: 15663
  source 1..40: mol_type = genomic DNA

SEQ ID NO: 16644 - DNA, 50 bp, Escherichia coli; identical to SEQ ID NO: 3244
  source 1..50: mol_type = genomic DNA

SEQ ID NO: 16645 - DNA, 40 bp, Escherichia coli; identical to SEQ ID NO: 3245
  source 1..40: mol_type = genomic DNA

SEQ ID NO: 16646 - protein, 547 aa, Escherichia coli
MKLLVTYIRWSTKEQDSGDSLRRQTNLIDAFYSKHKDDYYLLPAHRYVDKGKSGFHQQHKAQGSDFRRMFENVMSGAIPEGSLIVVENFDRFSRADIDTAIDDVRQILRKGVSILTLGDGELYDKSALTDPVKLIKHIIIAERAHQESLVKQKRIAQVWNHKTQLARELKKPMGKQAPGWLELSEDGSHYIVDEDKASLVNIIYDKRLSGMSMFAICKWLNEQGYPTINQRKVRISKTKKPDGNWSALSVKHILTSRSVLGYLPAKISTEDRKTVLREEIEGFYPQIVTDSKFYAVQQLLEETGKGKTSSGEHWLYVNILKGLIRCKCGLVMTPTGIRKPVYQGTYRCNGNKESRCNYGTVSRKLLDTQLCSRLFSKLSQLHDEATDTAKLDELQRRLNTVDSELEKLTETLIQLPNITQIQEALRVKQEEKDELIVQLSREKARVKSVSSLDLSGLDMESVEGRTEAQIIIKRLVKEIVVSGNEKLVDIYLHNGNMIRGFPLDGKDDHTLTLEEATDEMQPLDDMLIFGEPVTRIYPAGDMEEVDA

SEQ ID NO: 16647 - DNA, 50 bp, Escherichia coli; identical to SEQ ID NO: 3242
  source 1..50: mol_type = genomic DNA

SEQ ID NO: 16648 - DNA, 40 bp, Escherichia coli; identical to SEQ ID NO: 15663
  source 1..40: mol_type = genomic DNA

SEQ ID NO: 16649 - DNA, 50 bp, Escherichia coli; identical to SEQ ID NO: 3244
  source 1..50: mol_type = genomic DNA

SEQ ID NO: 16650 - DNA, 40 bp, Escherichia coli; identical to SEQ ID NO: 3245
  source 1..40: mol_type = genomic DNA

SEQ ID NO: 16651 - protein, 547 aa, Escherichia coli
MKLLVTYIRWSTKEQDSGDSLRRQTNLIDAFYAKHKEEYYLLPAHRYVDKGKSGFHQQHKNQGSDFRRMFENVMSGVIPEGSLIVVENFDRFSRADIDTAIDDVRQILRKGVSILTLGDGELYDKSALTDPVKLIKHIIIAERAHQESLVKQKRIAQVWNHKTQLARELKKPMGKQAPGWLELSEDGSHYIVDEDKASLVNIIYDKRLSGMSMFAICKWLNEQGYPTINQRKVRISKTKKPDGNWSALSVKHILTSRSVLGYLPAKISTEDRKTVLREEIEGFYPQIVTDSKFYAVQQLLEETGKGKTSSGEHWLYVNILKGLIRCKCGLVMTPTGIRKPVYQGTYRCNGNKESRCSYGTVSRKLLDTQLCSRLFSKLSQLHDEATDTAKLDELQRRLNTVDSELEKLTETLIQLPNITQIQEALRVKQEEKDELIVQLSREKARVKSVSSLDLSGLDMESVEGRTEAQIIIKRLVKEIVVSGNEKLVDIYLHNGNMIRGFPLDGKDDHTLTLEEATDEMQSLDDMLIFGEPVTRIYPAGDMEEVDA

SEQ ID NO: 16652 - DNA, 50 bp, Escherichia coli; identical to SEQ ID NO: 3242
  source 1..50: mol_type = genomic DNA

SEQ ID NO: 16653 - DNA, 40 bp, Escherichia coli; identical to SEQ ID NO: 15663
  source 1..40: mol_type = genomic DNA

SEQ ID NO: 16654 - DNA, 50 bp, Escherichia coli; identical to SEQ ID NO: 3244
  source 1..50: mol_type = genomic DNA

SEQ ID NO: 16655 - DNA, 40 bp, Escherichia coli; identical to SEQ ID NO: 3245
  source 1..40: mol_type = genomic DNA

SEQ ID NO: 16656 - protein, 547 aa, Escherichia coli
MKLLVTYIRWSTKEQDSGDSLRRQTNLIDAFYSKHKEEYYLLPAHRYVDKGKSGFHQQHKAQGSDFRRMFENVMSGVIPEGSLIVVENFDRFSRADIDTAIDDVRQILRKGVSILTLGDGELYDKSALTDPVKLIKHIIIAERAHQESLVKQKRIAQVWNHKTQLARELKKPMGKQAPGWLELSDDGSHYIVDEDKASLVNIIYDKRLSGMSMFAICKWLNEQGYPTINQRKVRISKTKKPDGNWSALSVKHILTSRSVLGYLPAKISTEDRKTVLREEIEGFYPQIVTDSKFYAVQQLLEETGKGKTSSGEHWLYVNILKGLIRCKCGLVMTPTGIRKPVYQGTYRCNGNKESRCSYGTVSRKLLDTQLCSRLFSKLSQLHDEATDTAKLDELQRRLNTVDGELEKLTETLIQLPNITQIQEALRVKQEEKDELIVQLSREKARVKSVSSLDLSGLDMESVEGRTEAQIIIKRLVKEIVVSGNEKLVDIYLHNGNMIRGFPLDGKDDHTLTLEEATDEMQSLDDMLIFGEPVTRIYPAGDMEEVDA

SEQ ID NO: 16657 - DNA, 50 bp, Escherichia coli; identical to SEQ ID NO: 10667
  source 1..50: mol_type = genomic DNA

SEQ ID NO: 16658 - DNA, 40 bp, Escherichia coli; identical to SEQ ID NO: 15663
  source 1..40: mol_type = genomic DNA

SEQ ID NO: 16659 - DNA, 50 bp, Escherichia coli; identical to SEQ ID NO: 15774
  source 1..50: mol_type = genomic DNA

SEQ ID NO: 16660 - DNA, 40 bp, Escherichia coli; identical to SEQ ID NO: 3245
  source 1..40: mol_type = genomic DNA

SEQ ID NO: 16661 - protein, 547 aa, Escherichia coli
MKLLVPYIRWSTKEQDSGDSLRRQTNLIDAFYAKHKDDYYLLPAHRYVDKGKSGFHQQHKNQGSDFRRMFENVMSGVIPEGSLIVVENFDRFSRADIDTAIDDVRQILRKGVSILTLGDGELYDKSALTDPVKLIKHIIIAERAHQESLVKQKRIAQVWNHKTQLARELKKPMGKQAPGWLELSEDGSHYIVDEDKASLVNIIYDKRLSGMSMFAICKWLNEQGYPTINQRKVRISKTKKPDGNWSALSVKHILTSRSVLGYLPAKISTEDRKTVLREEIEGFYPQIVTDSKFYAVQQLLEETGKGKTSSGDHWLYVNILKGLIRCKCGLVMTPTGIRKPVYQGTYRCNGNKESRCSYGTVSRKLLDTQLCSRLFSKLSQLHDEATDTARLDELQRRLNTVDSELEKLTETLIQLPNITQIQEALRVKQEEKDELIVQLSREKARVKSVSSLDLSGLDMESVEGRTEAQIIIKRLVKEIVVSGNEKLVDIYLHNGNMIRGFPLDGKDDHTLTLEEATDEMQSLDDMLIFGEPVTRIYPAGDMEEVDA

SEQ ID NO: 16662 - DNA, 50 bp, Escherichia coli; identical to SEQ ID NO: 3242
  source 1..50: mol_type = genomic DNA

SEQ ID NO: 16663 - DNA, 40 bp, Escherichia coli; identical to SEQ ID NO: 15663
  source 1..40: mol_type = genomic DNA

SEQ ID NO: 16664 - DNA, 50 bp, Escherichia coli; identical to SEQ ID NO: 3244
  source 1..50: mol_type = genomic DNA

SEQ ID NO: 16665 - DNA, 40 bp, Escherichia coli; identical to SEQ ID NO: 3245
  source 1..40: mol_type = genomic DNA

SEQ ID NO: 16666 - protein, 547 aa, Escherichia coli
MKLLVPYIRWSTKEQDSGDSLRRQTNLIDAFYSKHKEEYYLLPAHRYVDKGKSGFHQQHKNQGSDFRRMFENVMSGVIPEGSLIVVENFDRFSRADIDTAIDDVRQILRKGVSILTLGDGELYDKSALTDPVKLIKHIIIAERAHQESLVKQKRIAQVWNHKTQLARELKKPMGKQAPGWLELSEDGSHYIVDEDKASLVNIIYDKRLSGMSMFAICKWLNEQGYPTINQRKVRISKTKKPDGNWSALSVKHILTSRSVLGYLPAKISTEDRKTVLREEIEGFYPQIVTDSKFYAVQQLLEETGKGKTSSGDHWLYVNILKGIIRCKCGLVMTPTGIRKPVYQGTYRCNGNKESRCSYGTVSRKLLDTQLCSRLFSKLSQLHDEATDTAKLDELQRRLNTVDSELEKLTETLIQLPNITQIQEALRVKQEEKDELIAQLSREKARVKSVSSLDLSGLDMESVEGRTEAQIIIKRLVKEIVVSGNEKLVDIYLHNGNMIRGFQIDGKDDHTLTLEEATDEMQSLDDMLIFGEPVTRIYPAGDMEEVDA

SEQ ID NO: 16667 - DNA, 50 bp, Escherichia coli; identical to SEQ ID NO: 3242
  source 1..50: mol_type = genomic DNA

SEQ ID NO: 16668 - DNA, 40 bp, Escherichia coli; identical to SEQ ID NO: 15663
  source 1..40: mol_type = genomic DNA

SEQ ID NO: 16669 - DNA, 50 bp, Escherichia coli; identical to SEQ ID NO: 3244
  source 1..50: mol_type = genomic DNA

SEQ ID NO: 16670 - DNA, 40 bp, Escherichia coli; identical to SEQ ID NO: 3245
  source 1..40: mol_type = genomic DNA

SEQ ID NO: 16671 - protein, 547 aa, Escherichia coli
MKLLVPYIRWSTKEQDSGDSLRRQTNLIDAFYAKHKDDYYLLPAHRYVDKGKSGFHQQHKAQGSDFRRMFENVMSGVIPEGSLIVVENFDRFSRADIDTAIDDVRQILRKGVSILTLGDGEIYDKSALTDPVKLIKHIIIAERAHQESLVKQKRIAQVWNHKTQLARELKKPMGKQAPGWLELSEDGSHYIVDEDKASLVNIIYDKRLSGMSMFAICKWLNEQGYPTINQRKVRISKTKKPDGNWSALSVKHILTSRSVLGYLPAKISTEDRKTVLREEIESFYPQIVTDSKFYAVQQLLEETGKGKTSSGEHWLYVNILKGLIRCKCGLVMTPTGIRKPVYQGTYRCNGNKESRCSYGTVSRKLLDTQLCSRLFSKLSQLHDEATDTAKLDELQRRLNTVDSELEKLTETLIQLPNITQIQEALRVKQEEKDELIVQLSREKARVKSVSSLDLSGLDMESVEGRTEAQIIIKRLVKEIVVSGNEKLVDIYLHNGNMIRGFPLDGKDDHTLTLEEATDEMQSLDDMLIFGEPVTRIYPAGDMEEVDA

SEQ ID NO: 16672 - DNA, 50 bp, Escherichia coli; identical to SEQ ID NO: 3242
  source 1..50: mol_type = genomic DNA

SEQ ID NO: 16673 - DNA, 40 bp, Escherichia coli; identical to SEQ ID NO: 15663
  source 1..40: mol_type = genomic DNA

SEQ ID NO: 16674 - DNA, 50 bp, Escherichia coli; identical to SEQ ID NO: 3244
  source 1..50: mol_type = genomic DNA

SEQ ID NO: 16675 - DNA, 40 bp, Escherichia coli; identical to SEQ ID NO: 3245
  source 1..40: mol_type = genomic DNA

SEQ ID NO: 16676 - protein, 547 aa, Escherichia coli
MKLLVTYIRWSTKEQDSGDSLRRQTNLIDAFYSKHKNDYYLLPAHRYVDKGKSGFHQQHKNQGSDFRRMFENVMSEAIPEGSLIVVENFDRFSRADIDTAIDDVRQILRKGVSILTLGDGELYDKSALTDPVKLIKHIIIAERAHQESLVKQKRIAQVWNHKTQLARELKKPMGKQAPGWLELSEDGSHYIVDEDKASLVNIIYDKRLSGMSMFAICKWLNEQGYPTINQRKVRISKTKKPDGNWSALSVKHILTSRSVLGYLPAKISTEDRKTVLREEIEGFYPQIVTDSKFYAVQQLLEETGKGKTSSGEHWLYVNILKGLIRCKCGLVMTPTGIRKPVYQGTYRCNGNKESRCNYGTVSRKLLDTQLCSRLFSKLSQLHDEATDTAKLDELQRRLNTVDSELEKLTETLIQLPNITQIQEALRVKQEEKDELIVQLSREKARVKSVSSLDLSGLDMESVEGRTEAQIIIKRLVKEIVVSGNEKLVDIYLHNGNMIRGFPLDGKDDHTLTLEEATDEMQSLDDMLIFGEPVTRIYPAGDMEEVDA

SEQ ID NO: 16677 - DNA, 50 bp, Escherichia coli; identical to SEQ ID NO: 3242
  source 1..50: mol_type = genomic DNA

SEQ ID NO: 16678 - DNA, 40 bp, Escherichia coli; identical to SEQ ID NO: 15663
  source 1..40: mol_type = genomic DNA

SEQ ID NO: 16679 - DNA, 50 bp, Escherichia coli; identical to SEQ ID NO: 3244
  source 1..50: mol_type = genomic DNA

SEQ ID NO: 16680 - DNA, 40 bp, Escherichia coli; identical to SEQ ID NO: 3245
  source 1..40: mol_type = genomic DNA

SEQ ID NO: 16681 - protein, 547 aa, Escherichia coli
MKLLVPYIRWSTKEQDSGDSLRRQTNLIDAFYAKHKDDYYLLPAHRYVDKGKSGFHQQHKAQGSDFRRMFENVMSGVIPEGSLIVVENFDRFSRADIDTAIDDVRQILRKGVSILTLGDGELYDKSALTDPVKLIKHIIIAERAHQESLVKQKRIAQVWNHKTQLARELKKPMGKQAPGWLELSDDGSHYIVDEDKASLVNIIYDKRLSGMSMFAICKWLNEQGYPTINQRKVRISKTKKPDGNWSALSVKHILTSRSVLGYLPAKISTEDRKTVLREEIEGFYPQIVTDSKFYAVQQLLEETGKGKTSSGEHWLYVNILKGLIRCKCGLVMTPTGIRKPVYQGTYRCNGNKESRCNYGTVSRKLLDTQLCSRLFSKLSQLHDEATDTAKLDELQRRLNTVDSELEKLTETLIQLPNITQIQEALRVKQEEKDELIVQLSREKARVKSVSSLDLSGLDMESVEGRTEAQIIIKRLVKEIVVSGNEKLVDIYLHNGNMIRGFPLDGKDDHTLTLEEATDEMQSLDDMLIFGEPVTRIYPAGDMEEVDA

SEQ ID NO: 16682 - DNA, 50 bp, Escherichia coli; identical to SEQ ID NO: 3242
  source 1..50: mol_type = genomic DNA

SEQ ID NO: 16683 - DNA, 40 bp, Escherichia coli; identical to SEQ ID NO: 15663
  source 1..40: mol_type = genomic DNA

SEQ ID NO: 16684 - DNA, 50 bp, Escherichia coli; identical to SEQ ID NO: 3244
  source 1..50: mol_type = genomic DNA

SEQ ID NO: 16685 - DNA, 40 bp, Escherichia coli; identical to SEQ ID NO: 3245
  source 1..40: mol_type = genomic DNA

SEQ ID NO: 16686 - protein, 547 aa, Escherichia coli
MKLLVTYIRWSTKEQDSGDSLRRQTNLIDAFYAKHKEEYYLLPAHRYVDKGKSGFHQQHKAQGSDFRRMFENVMSGVIPEGSLIVVENFDRFSRADIDTAIDDVRQILRKGVSILTLGDGELYDKSALTDPVKLIKHIIIAERAHQESLVKQKRIAQVWNHKTQLARELKKPMGKQAPGWLELSEDGSHYIVDEDKASLVNIIYDKRLSGMSMFAICKWLNEQGYPTINQRKVRISKTKKPDGNWSALSVKHILTSRSVLGYLPAKISTEDRKTVLREEIESFYPQIVTDSKFYAVQQLLEETGKGKTSSGEHWLYVNILKGLIRCKCGLVMTPTGIRKPVYQGTYRCNGNKESRCSYGTVSRKLLDTQLCSRLFSKLSQLHDEATDTAKLDELQRRLNTVDSELEKLTETLIQLPNITQIQEALRIKQEEKDELIVQLSREKARVKSVSSLDLSGLDMESVEGRTEAQIIIKRLVKEIVVSGNEKLVDIYLHNGNMIRGFQIDGKDDHTLTLEEATDEMQSLDDMLIFGEPVTRIYPAGDMEEVDA

SEQ ID NO: 16687 - DNA, 50 bp, Escherichia coli; identical to SEQ ID NO: 3242
  source 1..50: mol_type = genomic DNA

SEQ ID NO: 16688 - DNA, 40 bp, Escherichia coli; identical to SEQ ID NO: 15663
  source 1..40: mol_type = genomic DNA

SEQ ID NO: 16689 - DNA, 50 bp, Escherichia coli; identical to SEQ ID NO: 3244
  source 1..50: mol_type = genomic DNA

SEQ ID NO: 16690 - DNA, 40 bp, Escherichia coli; identical to SEQ ID NO: 3245
  source 1..40: mol_type = genomic DNA

SEQ ID NO: 16691 - protein, 547 aa, Escherichia coli
MKLLVTYIRWSTKEQDSGDSLRRQTNLIDAFYAKHKDDYYLLPAHRYVDKGKSGFHQQHKNQGSDFRRMFENVMSGVIPEGSLIVVENFDRFSRADIDTAIDDVRQILRKGVSILTLGDGELYDKSALTDPVKLIKHIIIAERAHQESLVKQKRIAQVWNHKTQLARELKKPMGKQAPGWLELSEDGSHYIVDEDKASLVNIIYDKRLSGMSMFAICKWLNEQGYPTINQRKVRISKTKKPDGNWSALSVKHILTSRSVLGYLPAKISTEDRKTVLREEIESFYPQIVTDSKFYAVQQLLEETGKGKTSSGDHWLYVNILKGLIRCKCGLVMTPTGIRKPVYQGTYRCNGNKESRCSYGTVSRKLLDTQLCSRLFSKLSQLHDEATDTAKLDELQRRLNTVDGELEKLTETLIQLPNITQIQEALRVKQEEKDELIAQLSREKARVKSVSSLDLSGLDMESVEGRTEAQIIIKRLVKEIVVSGNEKLVDIYLHNGNMIRGFPLDGKDDHTLTLEEATDEMQSLDDMLIFGEPVTRIYPAGDMEEVDA

SEQ ID NO: 16692 - DNA, 50 bp, Escherichia coli; identical to SEQ ID NO: 3242
  source 1..50: mol_type = genomic DNA

SEQ ID NO: 16693 - DNA, 40 bp, Escherichia coli; identical to SEQ ID NO: 15663
  source 1..40: mol_type = genomic DNA

SEQ ID NO: 16694 - DNA, 50 bp, Escherichia coli; identical to SEQ ID NO: 3244
  source 1..50: mol_type = genomic DNA

SEQ ID NO: 16695 - DNA, 40 bp, Escherichia coli; identical to SEQ ID NO: 3245
  source 1..40: mol_type = genomic DNA

SEQ ID NO: 16696 - protein, 547 aa, Escherichia coli
MKLLVTYIRWSTKEQDSGDSLRRQTNLIDAFYSKHKNDYYLLPAHRYVDKGKSGFHQQHKNQGSDFRRMFENVMSGAIPEGSLIVVENFDRFSRADIDTAIDDVRQILRKGVSILTLGDGELYDKSALTDPVKLIKHIIIAERAHQESLVKQKRIAQVWNHKTQLARELKKPMGKQAPGWLELSEDGSHYIVDEDKASLVNIIYDKRLSGMSMFAICKWLNEQGYPTINQRKVRISKTKKPDGNWSALSVKHILTSRSVLGYLPAKISSEDRKTVLREEIEGFYPQIVTDSKFYAVQQLLEETGKGKTSSGEHWLYVNILKGLIRCKCGLVMTPTGIRKPVYQGTYRCNGNKESRCSYGTVSRKLLDTQLCSRLFSKLSQLHDEATDTAKLDELQRRLNTVDSELEKLTETLIQLPNITQIQEALRVKQGEKDELIVQLSREKARVKSVSSLNLSGLDMESVEGRTEAQIIIKRLVKEIVVSGNEKLMDIYLHNGNMIRGFPLDGKDDHTLTLEEATDEMQSLDDMLIFGEPVTRIYPAGDMEEVDA

SEQ ID NO: 16697 - DNA, 50 bp, Escherichia coli; identical to SEQ ID NO: 3242
  source 1..50: mol_type = genomic DNA

SEQ ID NO: 16698 - DNA, 40 bp, Escherichia coli; identical to SEQ ID NO: 15663
  source 1..40: mol_type = genomic DNA

SEQ ID NO: 16699 - DNA, 50 bp, Escherichia coli; identical to SEQ ID NO: 3244
  source 1..50: mol_type = genomic DNA

SEQ ID NO: 16700 - DNA, 40 bp, Escherichia coli; identical to SEQ ID NO: 3245
  source 1..40: mol_type = genomic DNA

SEQ ID NO: 16701 - protein, 547 aa, Escherichia coli
MKLLVPYIRWSTKEQDSGDSLRRQTNLIDAFYSKHKEEYYLLPAHRYVDKGKSGFHQQHKAQGSDFRRMFENVMSGAIPEGSLIVVENFDRFSRADIDTAIDDVRQILRKGVSILTLGDGELYDKSALTDPVKLIKHIIIAERAHQESLVKQKRIAQVWNHKTQLARELKKPMGKQAPGWLELSEDGSHYIVDEDKASLVNIIYDKRLSGMSMFAICKWLNEQGYPTINQRKVRISKTKKPDGNWSALSVKHILTSRSVLGYLPAKISTEDRKTVLREEIESFYPQIVTDSKFYAVQQLLEETGKGKTSSGEHWLYVNILKGLIRCKCGLVMTPTGIRKPVYQGTYRCNGNKESRCNYGTVSRKLLDTQLCSRLFSKLSQLHDEATDTAKLDELQRRLNTVDGELEKLTETLIQLPNITQIQEALRVKQEEKDELIVQLSREKARVKSVSSLDLSGLDMESVEGRTEAQIIIKRLVKEIVVSGNEKLVDIYLHNGNMIRGFPLDGKDDHTLTLEEATDEMQSLDDMLIFGEPVTRIYPAGDMEEVDA

SEQ ID NO: 16702 - DNA, 50 bp, Escherichia coli; identical to SEQ ID NO: 3242
  source 1..50: mol_type = genomic DNA

SEQ ID NO: 16703 - DNA, 40 bp, Escherichia coli; identical to SEQ ID NO: 15663
  source 1..40: mol_type = genomic DNA

SEQ ID NO: 16704 - DNA, 50 bp, Escherichia coli; identical to SEQ ID NO: 3244
  source 1..50: mol_type = genomic DNA

SEQ ID NO: 16705 - DNA, 40 bp, Escherichia coli; identical to SEQ ID NO: 3245
  source 1..40: mol_type = genomic DNA

SEQ ID NO: 16706 - protein, 547 aa, Escherichia coli
MKLLVTYIRWSTKEQDSGDSLRRQTNLIDAFYAKHKDDYYLLPAHRYVDKGKSGFHQQHKAQGSDFRRMFENVMSGVIPEGSLIVVENFDRFSRADIDTAIDDVRQILRKGVSILTLGDGELYDKSALTDPVKLIKHIIIAERAHQESLVKQKRIAQVWNHKTQLARELKKPMGKQAPGWLELSEDGSHYIVDEDKASLVNIIYDKRLSGMSMFAICKWLNEQGYPTINQRKVRISKTKKPDGNWSALSVKHILTSRSVLGYLPAKISTEDRKTVLREEIEGFYPQIVTDSKFYAVQQLLEETGKGKTSSGEHWLYVNILKGLIRCKCGLVMTPTGIRKPVYQGTYRCNGNKESRCSYGTVSRKLLDTQLCSRLFSKLSQLHDEATDTAKLDELQRRLNTVDSELEKLTETLIQLPNITQIQEALRVKQEEKDELIVQLSREKARVKSVSSLDLSGLDMESVEGRTEAQIIIKRLVKEIVVSGNEKLVDIYLHNGNMIRGFPLDGKDDHTLTLEEATDEMQPLDDMLIFGEPVTRIYPAGDMEEVDA

SEQ ID NO: 16707 - DNA, 50 bp, Escherichia coli; identical to SEQ ID NO: 3242
  source 1..50: mol_type = genomic DNA

SEQ ID NO: 16708 - DNA, 40 bp, Escherichia coli; identical to SEQ ID NO: 15663
  source 1..40: mol_type = genomic DNA

SEQ ID NO: 16709 - DNA, 50 bp, Escherichia coli; identical to SEQ ID NO: 3244
  source 1..50: mol_type = genomic DNA

SEQ ID NO: 16710 - DNA, 40 bp, Escherichia coli; identical to SEQ ID NO: 3245
  source 1..40: mol_type = genomic DNA

SEQ ID NO: 16711 - protein, 547 aa, Escherichia coli
MKLLVTYIRWSTREQDSGDSLRRQTNLIDAFYAKHKEEYYLLPAHRYVDKGKSGFHQQHKAQGSDFRRMFENVMSGVIPEGSLIVVENFDRFSRADIDTAIDDVRQILRKGVSILTLGDGELYDKSALTDPVKLIKHIIIAERAHQESLVKQKRIAQVWNHKTQLARELKKPMGKQAPGWLELSEDGSHYIVDEDKASLVNIIYDKRLSGMSMFAICKWLNEQGYPTINQRKVRISKTKKPDGNWSALSVKHILTSRSVLGYLPAKISSEDRKTVLREEIESFYPRIVTDSKFYAVQQLLEETGKGKTSSGDHWLYVNILKGIIRCKCGLVMTPTGIRKPVYQGTYRCNGNKESRCSYGTVSRKLLDTQLCSRLFSKLSQLHDEATDTAKLDELQRRLNTVDSELEKLTETLIQLPNITQIQEALRVKQEEKDELIVQLSREKARVKSVSSLDLSGLDMESVEGRTEAQIIIKRLVKEIVVSGNEKLVDIYLHNGNMIRGFPLDGKDDHTLTLEEATDEMQSLDDMLIFGEPVTRIYPAGDMEEVDA

SEQ ID NO: 16712 - DNA, 50 bp, Escherichia coli; identical to SEQ ID NO: 3242
  source 1..50: mol_type = genomic DNA

SEQ ID NO: 16713 - DNA, 40 bp, Escherichia coli; identical to SEQ ID NO: 15663
  source 1..40: mol_type = genomic DNA

SEQ ID NO: 16714 - DNA, 50 bp, Escherichia coli; identical to SEQ ID NO: 3244
  source 1..50: mol_type = genomic DNA

SEQ ID NO: 16715 - DNA, 40 bp, Escherichia coli; identical to SEQ ID NO: 3245
  source 1..40: mol_type = genomic DNA

SEQ ID NO: 16716 - protein, 547 aa, Escherichia coli
MKLLVTYIRWSTKEQDSGDSLRRQTNLIDAFYAKHKDDYYLLPAHRYVDKGKSGFHQQHKNQGSDFRRMFENVMSGAIPEGSLIVVENFDRFSRADIDTAIDDVRQILRKGVSILTLGDGELYDKSALTDPVKLIKHIIIAERAHQESLVKQKRIAQVWNHKTQLARELKKPMGKQAPGWLELSEDGSHYIVDEDKASLVNIIYDKRLSGMSMFAICKWLNEQGYPTINQRKVRISKTKKPDGNWSALSVKHILTSRSVLGYLPAKISTEDRKTVLREEIEGFYPQIVTDSKFYAVQQLLEETGKGKTSSGEHWLYVNILKGLIRCKCGLVMTPTGIRKPVYQGTYRCNGNKESRCSYGTVSRKLLDTQLCSRLFSKLSQLHDEATDTAKLDELQRRLNTVDGELEKLTETLIQLPNITQIQEALRVKQEEKDELIVQLSREKARVKSVSSLDLSGLDMESVEGRTEAQIIIKRLVKEIVVSGNEKLVDIYLHNGNMIRGFPLDGKDDHTLTLEEATDEMQPLDDMLIFGEPVTRIYPAGDMEEVDA

SEQ ID NO: 16717 - DNA, 50 bp, Escherichia coli
  source 1..50: mol_type = genomic DNA
gtacgtatttagctatgtaaaagcactagtattcttgccttaacactcat

SEQ ID NO: 16718 - DNA, 40 bp, Escherichia coli; identical to SEQ ID NO: 15663
  source 1..40: mol_type = genomic DNA

SEQ ID NO: 16719 - DNA, 50 bp, Escherichia coli
  source 1..50: mol_type = genomic DNA
gtacgtatttagctatgtaaaagcaatagtattcttgccttaacactcat

SEQ ID NO: 16720 - DNA, 40 bp, Escherichia coli; identical to SEQ ID NO: 3245
  source 1..40: mol_type = genomic DNA

SEQ ID NO: 16721 - protein, 547 aa, Escherichia coli; identical to SEQ ID NO: 15726

SEQ ID NO: 16722 - DNA, 50 bp, Escherichia coli; identical to SEQ ID NO: 3502
  source 1..50: mol_type = genomic DNA

SEQ ID NO: 16723 - DNA, 40 bp, Escherichia coli; identical to SEQ ID NO: 15663
  source 1..40: mol_type = genomic DNA

SEQ ID NO: 16724 - DNA, 50 bp, Escherichia coli; identical to SEQ ID NO: 15659
  source 1..50: mol_type = genomic DNA

SEQ ID NO: 16725 - DNA, 40 bp, Escherichia coli; identical to SEQ ID NO: 3245
  source 1..40: mol_type = genomic DNA

SEQ ID NO: 16726 - protein, 547 aa, Escherichia coli
MKLLVTYIRWSTREQDSGDSLRRQTNLIDAFYSKHKNDYYLLPAHRYVDKGKSGFHQQHKAQGSDFRRMFENVMSGAIPEGSLIVVENFDRFSRADIDTAIDDVRQILRKGVSILTLGDGELYDKSALTDPVKLIKHIIIAERAHQESLVKQKRIAQVWNHKTQLARELKKPMGKQAPGWLELSEDGSHYIVDEDKASLVNIIYDKRLSGMSMFAICKWLNEQGYPTINQRKVRISKTKKPDGNWSALSVKHILTSRSVLGYLPAKVSSEDRKTVLREEIEGFYPQIVTDSKFYAVQQLLEETGKGKTSSGEHWLYVNILKGLIRCKCGLVMTPTGIRKPVYQGTYRCNGNKESRCSYGTVSRKLLDTQLCSRLFSKLSQLHDEATDTAKLDELQRRLNTVDSELEKLTETLIQLPNITQIQEALRAKQEEKDELIVQLSREKARVKSVSSLDLSGLDMESVEGRTEAQIIIKRLVKEIVVSGNERLVDIYLHNGNMIRGFQIDGKDDHTLTLEEATDEMQSLDDMLIFGEPVTRIYPAGDMEEVDA

SEQ ID NO: 16727 - DNA, 50 bp, Escherichia coli; identical to SEQ ID NO: 16337
  source 1..50: mol_type = genomic DNA

SEQ ID NO: 16728 - DNA, 40 bp, Escherichia coli; identical to SEQ ID NO: 15663
  source 1..40: mol_type = genomic DNA

SEQ ID NO: 16729 - DNA, 50 bp, Escherichia coli; identical to SEQ ID NO: 16339
  source 1..50: mol_type = genomic DNA

SEQ ID NO: 16730 - DNA, 40 bp, Escherichia coli; identical to SEQ ID NO: 3245
  source 1..40: mol_type = genomic DNA

SEQ ID NO: 16731 - protein, 547 aa, Escherichia fergusonii
MKLLVTYIRWSTKEQDSGDSLRRQTNLIDAFYSKHKNDYYLLPAHRYVDKGKSGFHQQHKNQGSDFRRMFENVMSGAIPEGSLIVVENFDRFSRADIDTAIDDVRQILRKGVSILTLGDGELYDKSALTDPVKLIKHIIIAERAHQESLVKQKRIAQVWNHKTQLARELKKPMGKQAPGWLELSEDGSHYIVDEDKASLVNIIYDKRLSGMSMFAICKWLNEQGYPTINQRKVRISKTKKPDGNWSALSVKHILTSRSVLGYLPAKISSEDRKTVLREEIEGFYPQIVTDSKFYAVQQLLEETGKGKTSSGEHWLYVNILKGLIRCKCGLVMTPTGIRKPVYQGTYRCNGNKESRCNYGTVSRKLLDTQLCSRLFSKLSQLHDEATDTAKLDELQRRLNTVDSELEKLTETLIQLPNITQIQEALRVKQEEKDELIVQLSREKARVKSVSSLDLSGLDMESVEGRTEAQIIIKRLVKEIVVSGNEKLVDIYLHNGNMIRGFPLDGKDDHTLTLEEATDEMQPLDDMLIFGEPVTRIYPAGDMEEVDA

SEQ ID NO: 16732 - DNA, 50 bp, Escherichia fergusonii; identical to SEQ ID NO: 10667
  source 1..50: mol_type = genomic DNA

SEQ ID NO: 16733 - DNA, 40 bp, Escherichia fergusonii; identical to SEQ ID NO: 15663
  source 1..40: mol_type = genomic DNA

SEQ ID NO: 16734 - DNA, 50 bp, Escherichia fergusonii; identical to SEQ ID NO: 15774
  source 1..50: mol_type = genomic DNA

SEQ ID NO: 16735 - DNA, 40 bp, Escherichia fergusonii; identical to SEQ ID NO: 3245
  source 1..40: mol_type = genomic DNA

SEQ ID NO: 16736 - protein, 547 aa, Escherichia coli
MKLLVTYIRWSTKEQDSGDSLRRQTNLIDAFYSKHKNDYYLLPAHRYVDKGKSGFHQQHKAQGSDFRRMFENVMSGAIPEGSLIVVENFDRFSRADIDTAIDDVRQILRKGVSILTLGDGELYDKSALTDPVKLIKHIIIAERAHQESLVKQKRIAQVWNHKTQLARELKKPMGKQAPGWLELSEDGSHYIVDEDKASLVNIIYDKRLSGMSMFAICKWLNEQGYPTINQRKVRISKTKKPDGNWSALSVKHILTSRSVLGYLPAKISSEDRKTVLREEIEGFYPQIVTDSKFYAVQQLLEETGKGKTSSGDHWLYVNILKGLIRCKCGLVMTPTGIRKPVYQGTYRCNGNKESRCSYGTVSRKLLDTQLCSRLFSKLSQLHDEATDTAKLDELQRRLNTVDSELEKLTETLIQLPNITQIQEALRVKQEEKDELIVQLSREKARVKSVSSLDLSGLDMESVEGRTEAQIIIKRLVKEIVVSGNEKLVDIYLHNGNMIRGFPLDGKDDHTLTLEEATDEMQSLDDMLIFGEPVTRIYPAGDMEEVDA

SEQ ID NO: 16737 - DNA, 50 bp, Escherichia coli
  source 1..50: mol_type = genomic DNA
atacgtgtttagctatgtaaaatcactagtattcttgccttaacactcat

SEQ ID NO: 16738 - DNA, 40 bp, Escherichia coli; identical to SEQ ID NO: 15663
  source 1..40: mol_type = genomic DNA

SEQ ID NO: 16739 - DNA, 50 bp, Escherichia coli
  source 1..50: mol_type = genomic DNA
atacgtgtttagctatgtaaaatcaatagtattcttgccttaacactcat

SEQ ID NO: 16740 - DNA, 40 bp, Escherichia coli; identical to SEQ ID NO: 3245
  source 1..40: mol_type = genomic DNA

SEQ ID NO: 16741 - protein, 547 aa, Escherichia coli
MKLLVTYIRWSTKEQDSGDSLRRQTNLIDAFYSKHKNDYYLLPAHRYVDKGKSGFHQQHKNQGSDFRRMFENVMSGAIPEGSLIVVENFDRFSRADIDTAIDDVRQILRKGVSILTLGDGELYDKSALTDPVKLIKHIIIAERAHQESLVKQKRIAQVWNHKTQLARELKKPMGKQAPGWLELSEDGSHYIVDEDKASLVNIIYDKRLSGMSMFAICKWLNEQGYPTINQRKVRISKTKKPDGNWSALSVKHILTSRSVLGYLPAKISTEDRKTVLREEIEGFYPQIVTDSKFYAVQQLLEETGKGKTSSGDHWLYVNILKGLIRCKCGLVMAPTGVRKPVYQGTYRCNGNKESRCSYGTVSRKLLDTQLCSRLFSKLSQLHDEATDTAKLDELQRRLNTVDGELEKLTETLIQLPNITQIQEALRVKQEEKDELIVQLSREKARVKSVSSLDLSGLDMESVEGRTEAQIIIKRLVKEIVVSGNEKLVDIYLHNGNMIRGFPLDGKDDHTLTLEEATDEMQSLDDMLIFGEPVTRIYPAGDMEEVDA

SEQ ID NO: 16742 - DNA, 50 bp, Escherichia coli; identical to SEQ ID NO: 3502
  source 1..50: mol_type = genomic DNA

SEQ ID NO: 16743 - DNA, 40 bp, Escherichia coli; identical to SEQ ID NO: 15663
  source 1..40: mol_type = genomic DNA

SEQ ID NO: 16744 - DNA, 50 bp, Escherichia coli; identical to SEQ ID NO: 15659
  source 1..50: mol_type = genomic DNA

SEQ ID NO: 16745 - DNA, 40 bp, Escherichia coli; identical to SEQ ID NO: 3245
  source 1..40: mol_type = genomic DNA

SEQ ID NO: 16746 - protein, 547 aa, Escherichia coli
MKLLVTYIRWSTKEQDSGDSLRRQTNLIDAFYAKHKDDYYLLPAHRYVDKGKSGFHQQHKNQGSDFRRMFENVMSGVIPEGSLIVVENFDRFSRADIDTAIDDVRQILRKGVSILTLGDGELYDKSALTDPVKLIKHIIIAERAHQESLVKQKRIAQVWNHKTQLARELKKPMGKQAPGWLELSDDGSHYIVDEDKASLVNIIYDKRLSGMSMFAICKWLNEQGYPTINQRKVRISKTKKPDGNWSALSVKHILTSRSVLGYLPAKISSEDRKTVLREEIEGFYPQIVTDSKFYAVQQLLEETGKGKTSSGEHWLYVNILKGLIRCKCGLVMTPTGIRKPVYQGTYRCNGNKESRCSYGTVSRKLLDTQLCSRLFSKLSQLHDEATDTAKLDELQRRLNTVDSELEKLTETLIQLPNITQIQEALRVKQEEKDELIAQLSREKARVKSVSSLDLSGLDMESVEGRTEAQIIIKRLVKEIVVSGNEKLVDIYLHNGNMIRGFQIDGKDDHTLTLEEATDEMQSLDDMLIFGEPVTRIYPAGDMEEVDA

SEQ ID NO: 16747 - DNA, 50 bp, Escherichia coli; identical to SEQ ID NO: 3242
  source 1..50: mol_type = genomic DNA

SEQ ID NO: 16748 - DNA, 40 bp, Escherichia coli; identical to SEQ ID NO: 15663
  source 1..40: mol_type = genomic DNA

SEQ ID NO: 16749 - DNA, 50 bp, Escherichia coli; identical to SEQ ID NO: 3244
  source 1..50: mol_type = genomic DNA

SEQ ID NO: 16750 - DNA, 40 bp, Escherichia coli; identical to SEQ ID NO: 3245
  source 1..40: mol_type = genomic DNA

SEQ ID NO: 16751 - protein, 547 aa, Escherichia coli
MKLLVTYIRWSTKEQDSGDSLRRQTNLIDAFYSKHKNDYYLLPAHRYVDKGKSGFHQQHKNQGSDFRRMFENVMSGVIPEGSLIVVENFDRFSRADIDTAIDDVRQILRKGVSILTLGDGELYDKSALTDPVKLIKHIIIAERAHQESLVKQKRIAQVWNHKTQLARELKKPMGKQAPGWLELSEDGSHYIVDEDKASLVNIIYDKRLSGMSMFAICKWLNEQGYPTINQRKVRISKTKKPDGNWSALSVKHILTSRSVLGYLPAKISTEDRKTVLREEIEGFYPQIVTDSKFYAVQQLLEETGKGKTSSGEHWLYVNILKGLIRCKCGLVMTPTGIRKPVYQGTYRCNGNKESRCSYGTVSRKLLDTQLCSRLFSKLSQLHDEATDTAKLDELQRRLNTVDSELEKLTETLIQLPNITQIQEALRVKQEEKDKLIVQLSREKARVKSVSSLDLSGLDMESVEGRTEAQIIIKRLVKEIVVSGNEKLVDIYLHNGNMIRGFPLDGKDDHTLTLEEATDEMQSLDDMLIFGEPVTRIYPAGDMEEVDA

SEQ ID NO: 16752 - DNA, 50 bp, Escherichia coli; identical to SEQ ID NO: 3242
  source 1..50: mol_type = genomic DNA

SEQ ID NO: 16753 - DNA, 40 bp, Escherichia coli; identical to SEQ ID NO: 15663
  source 1..40: mol_type = genomic DNA

SEQ ID NO: 16754 - DNA, 50 bp, Escherichia coli; identical to SEQ ID NO: 3244
  source 1..50: mol_type = genomic DNA

SEQ ID NO: 16755 - DNA, 40 bp, Escherichia coli; identical to SEQ ID NO: 3245
  source 1..40: mol_type = genomic DNA

SEQ ID NO: 16756 - protein, 547 aa, Escherichia coli
MKLLVTYIRWSTKEQDSGDSLRRQTNLIDAFYAKHKDDYYLLPAHRYVDKGKSGFHQQHKNQGSDFRRMFENVMSGVIPEGSLIVVENFDRFSRADIDTAIDDVRQILRKGVSILTLGDGELYDKSALTDPVKLIKHIIIAERAHQESLVKQKRIAQVWNHKTQLARELKKPMGKQAPGWLELSDDGSHYIVDEDKASLVNIIYDKRLSGMSMFAICKWLNEQGYPTINQRKVRISKTKKPDGNWSALSVKHILTSRSVLGYLPAKISTEDRKTVLREEIEGFYPQIVTDSKFYAVQQLLEETGKGKTSSGEHWLYVNILKGLIRCKCGLVMTPTGIRKPVYQGTYRCNGNKESRCSYGTVSRKLLDTQLCSRLFSKLSQLHDEATDTAKLDELQRRLNTVDSELEKLTETLIQLPNITQIQEALRIKQEEKDELIVQLSREKARVKSVSSLDLSGLDMESVEGRTEAQIIIKRLVKEIVVSGNEKLVDIYLHNGNMIRGFPLDGKDDHTLTLEEATDEMQPLDDMLIFGEPVTRIYPAGDMEEVDA

SEQ ID NO: 16757 - DNA, 50 bp, Escherichia coli; identical to SEQ ID NO: 3242
  source 1..50: mol_type = genomic DNA

SEQ ID NO: 16758 - DNA, 40 bp, Escherichia coli; identical to SEQ ID NO: 15663
  source 1..40: mol_type = genomic DNA

SEQ ID NO: 16759 - DNA, 50 bp, Escherichia coli; identical to SEQ ID NO: 3244
  source 1..50: mol_type = genomic DNA

SEQ ID NO: 16760 - DNA, 40 bp, Escherichia coli; identical to SEQ ID NO: 3245
  source 1..40: mol_type = genomic DNA

SEQ ID NO: 16761 - protein, 547 aa, Escherichia coli
MKLLVTYIRWSTKEQDSGDSLRRQTNLIDAFYAKHKEEYYLLPAHRYVDKGKSGFHQQHKAQGSDFRRMFENVMSGVIPEGSLIVVENFDRFSRADIDTAIDDVRQILRKGVSILTLGDGELYDKSALTDPVKLIKHIIIAERAHQESLVKQKRIAQVWNHKTQLARELKKPMGKQAPGWLELSEDGSHYIVDEDKASLVNIIYDKRLSGMSMFAICKWLNEQGYPTINQRKVRISKTKKPDGNWSALSVKHILTSRSVLGYLPAKISTEDRKTVLREEIEGFYPQIVTDSKFYAVQQLLEETGKGKTSSGEHWLYVNILKGLIRCKCGLVMTPTGIRKPVYQGTYRCNGNKESRCSYGTVSRKLLDTQLCSRLFSKLSQLHDEATDTAKLDELQRRLNTVDGELEKLTETLIQLPNITQIQEALRVKQGEKDELIVQLSREKARVKSVSSLDLSGLDMESVEGRTEAQIIIKRLVKEIVVSGNEKLVDIYLHNGNMIRGFPLDGKDDHTLTLEEATDEMQSLDDMLIFGEPVTRIYPAGDMEEVDA

SEQ ID NO: 16762 - DNA, 50 bp, Escherichia coli; identical to SEQ ID NO: 3242
  source 1..50: mol_type = genomic DNA

SEQ ID NO: 16763 - DNA, 40 bp, Escherichia coli; identical to SEQ ID NO: 15663
  source 1..40: mol_type = genomic DNA

SEQ ID NO: 16764 - DNA, 50 bp, Escherichia coli; identical to SEQ ID NO: 3244
  source 1..50: mol_type = genomic DNA

SEQ ID NO: 16765 - DNA, 40 bp, Escherichia coli; identical to SEQ ID NO: 3245
  source 1..40: mol_type = genomic DNA

SEQ ID NO: 16766 - protein, 547 aa, Escherichia coli
MKLLVTYIRWSTKEQDSGDSLRRQTNLIDAFYSKHKNDYYLLPAHRYVDKGKSGFHQQHKNQGSDFRRMFENVMSGAIPEGSLIVVENFDRFSRADIDTAIDDVRQILRKGVSILTLGDGELYDKSALTDPVKLIKHIIIAERAHQESLVKQKRIAQVWNHKTQLARELKKPMGKQAPGWLELSEDGSHYIVDEDKASLVNIIYDKRLSGMSMFAICKWLNEQGYPTINQRKVRISKTKKPDGNWSALSVKHILTSRSVLGYLPAKISTEDRKTVLREEIESFYPQIVTDSKFYAVQQLLEETGKGKTSSGEHWLYVNILKGLIRCKCGLVMTPTGIRKPVYQGTYRCNGNKESRCNYGTVSRKLLDTQLCSRLFSKLSQLHDEATDTAKLDELQRRLNTVDSELEKLTETLIQLPNITQIQEALRVKQEEKDELIVQLSREKARVKSVSSLDLSGLDMESVEGRTEAQIIIKRLVKEIVVSGNEKLVDIYLHNGNMIRGFPLDGKDDHTLTLEEATDEMQSLDDMLIFGEPVTRIYPAGDMEEVDA

SEQ ID NO: 16767 - DNA, 50 bp, Escherichia coli; identical to SEQ ID NO: 10667
  source 1..50: mol_type = genomic DNA

SEQ ID NO: 16768 - DNA, 40 bp, Escherichia coli; identical to SEQ ID NO: 15663
  source 1..40: mol_type = genomic DNA

SEQ ID NO: 16769 - DNA, 50 bp, Escherichia coli; identical to SEQ ID NO: 15774
  source 1..50: mol_type = genomic DNA

SEQ ID NO: 16770 - DNA, 40 bp, Escherichia coli; identical to SEQ ID NO: 3245
  source 1..40: mol_type = genomic DNA

SEQ ID NO: 16771 - protein, 547 aa, Escherichia coli
MKLLVTYIRWSTKEQDSGDSLRRQTNLIDAFYSKHKNDYYLLPAHRYVDKGKSGFHQQHKAQGSDFRRMFENVMSGAIPEGSLIVVENFDRFSRADIDTAIDDVRQILRKGVSILTLGDGELYDKSALTDPVKLIKHIIIAERAYQESLVKQKRIAQVWNHKTQLARELKKPMGKQAPGWLELSEDGSHYIVDEDKASLVNIIYDKRLSGMSMFAICKWLNEQGYPTINQRKVRISKTKKPDGNWSALSVKHILTSRSVLGYLPAKISTEDRKTVLREEIEGFYPQIVTDSKFYAVQQLLEETGKGKTSSGEHWLYVNILKGLIRCKCGLVMTPTGIRKPVYQGTYRCNGNKESRCNYGTVSRKLLDTQLCSRLFSKLSQLHDEATDTAKLDELQRRLNTVDGELEKLTETLIQLPNITQIQEALRVKQEEKDELIVQLSREKARVKSVSSLDLSGLDMESVEGRTEAQIIIKRLVKEIVVSGNEKLVDIYLHNGNMIRGFPLDGKDDHTLTLEEATDEMQSLDDMLIFGEPVTRIYPAGDMEEVDA

SEQ ID NO: 16772 - DNA, 50 bp, Escherichia coli; identical to SEQ ID NO: 3502
  source 1..50: mol_type = genomic DNA

SEQ ID NO: 16773 - DNA, 40 bp, Escherichia coli; identical to SEQ ID NO: 15663
  source 1..40: mol_type = genomic DNA

SEQ ID NO: 16774 - DNA, 50 bp, Escherichia coli; identical to SEQ ID NO: 15659
  source 1..50: mol_type = genomic DNA

SEQ ID NO: 16775 - DNA, 40 bp, Escherichia coli; identical to SEQ ID NO: 3245
  source 1..40: mol_type = genomic DNA

SEQ ID NO: 16776 - protein, 547 aa, Escherichia coli
MKLLVTYIRWSTKEQDSGDSLRRQTNLIDAFYSKHKNDYYLLPAHRYVDKGKSGFHQQHKNQGSDFRRMFENVMSGVIPEGSLIVVENFDRFSRADIDTAIDDVRQILRKGVSILTLGDGELYDKSALTDPVKLIKHIIIAERAHQESLVKQKRIAQVWNHKTQLARELKKPMGKQAPGWLELSDDGSHYIVDEDKASLVNIIYDKRLSGMSMFAICKWLNEQGYPTINQRKVRISKTKKPDGNWSALSVKHILTSRSVLGYLPAKISSEDRKTVLREEIESFYPRIVTDSKFYAVQQLLEETGKGKTSSGDHWLYVNILKGLIRCKCGLVMTPTGIRKPVYQGTYRCNGNKESRCSYGTVSRKLLDTQLCSRLFSKLSQLHDEATDTAKLDELQRRLNTVDSELEKLTETLIQLPNITQIQEALRVKQEEKDELIVQLSREKARVKSVSSLDLSGLDMESVEGRTEAQIIIKRLVKEIVVSGNEKLVDIYLHNGNMIRGFPLDGKDDHTLTLEEATDEMQSLDDMLIFGEPVTRIYPAGDMEEVDA

SEQ ID NO: 16777 - DNA, 50 bp, Escherichia coli; identical to SEQ ID NO: 3242
  source 1..50: mol_type = genomic DNA

SEQ ID NO: 16778 - DNA, 40 bp, Escherichia coli; identical to SEQ ID NO: 15663
  source 1..40: mol_type = genomic DNA

SEQ ID NO: 16779 - DNA, 50 bp, Escherichia coli; identical to SEQ ID NO: 3244
  source 1..50: mol_type = genomic DNA

SEQ ID NO: 16780 - DNA, 40 bp, Escherichia coli; identical to SEQ ID NO: 3245
  source 1..40: mol_type = genomic DNA

SEQ ID NO: 16781 - protein, 547 aa, Escherichia coli
MKLLATYIRWSTREQDSGDSLRRQTNLIDAFYSKHKNDYYLLPAHRYVDKGKSGFHQQHKNQGSDFRRMFENVMSGAIPEGSLIVVENFDRFSRADIDTAIDDVRQILRKGVSILTLGDGELYDKSALTDPVKLIKHIIIAERAHQESLVKQKRIAQVWNHKTQLARELKKPMGKQAPGWLELSEDGSHYIVDEDKASLVNIIYDKRLSGMSMFAICKWLNEQGYPTINQRKVRISKTKKPDGNWSALSVKHILTSRSVLGYLPAKISSEDRKTVLREEIEGFYPQIVTDSKFYAVQQLLEETGKGKTSSGDHWLYVNILKGLIRCKCGLVMTPTGIRKPVYQGTYRCNGNKESRCSYGTVSRKLLDTQLCSRLFSKLSQLHDEATDTAKLDELQRRLNTVDSELEKLTETLIQLPNITQIQEALRVKQEEKDELIVQLSREKARLKSVSSLDLSGLDMESVEGRTEAQIIIKRLVKEIVVSGNEKLVDIYLHNGNMIRGFPLDGKDDHTLTLEEATDEMQSLDDMLIFGEPVTRIYPAGDMEEVDA

SEQ ID NO: 16782 - DNA, 50 bp, Escherichia coli; identical to SEQ ID NO: 3242
  source 1..50: mol_type = genomic DNA

SEQ ID NO: 16783 - DNA, 40 bp, Escherichia coli; identical to SEQ ID NO: 15663
  source 1..40: mol_type = genomic DNA

SEQ ID NO: 16784 - DNA, 50 bp, Escherichia coli; identical to SEQ ID NO: 3244
  source 1..50: mol_type = genomic DNA

SEQ ID NO: 16785 - DNA, 40 bp, Escherichia coli; identical to SEQ ID NO: 3245
  source 1..40: mol_type = genomic DNA

SEQ ID NO: 16786 - protein, 547 aa, Escherichia coli
MKLLATYIRWSTKGQDSGDSLRRQTNLIDAFYSKHKNDYYLLPAHRYVDKGKSGFHQQHKNQGSDFRRMFENVMSGAIPEGSLIVVENFDRFSRADIDTAIDDVRQILRKGVSILTLGDGELYDKSALTDPVKLIKHIIIAERAHQESLVKQKRIAQVWNHKTQLARELKKPMGKQAPGWLELSEDGSHYIVDEDKASLVNIIYDKRLSGMSMFAICKWLNEQGYPTINQRKVRISKTKKPDGNWSALSVKHILTSRSVLGYLPAKISTEDRKTVLREEIESFYPQIVTDSKFYAVQQLLEETGKGKTSSGEHWLYVNILKGLIRCKCGLVMTPTGIRKPVYQGTYRCNGNKESRCSYGTVSRKLLDTQLCSRLFSKLSQLHDEATDTAKLDELQRRLNTVDSELEKLTETLIQLPNITQIQEALRVKQEEKDELIVQLSREKARVKSVSSLDLSGLDMESVEGRTEAQIIIKRLVKEIVVSGNEKLVDIYLHNGNMIRGFPLDGKDDHTLTLEEATDEMQSLDDMLIFGEPVTRIYPAGDMEEVDA

SEQ ID NO: 16787 - DNA, 50 bp, Escherichia coli
  source 1..50: mol_type = genomic DNA
gtacgtgtttatctatgtaaaagcactagtattcttgccttaacactcat

SEQ ID NO: 16788 - DNA, 40 bp, Escherichia coli; identical to SEQ ID NO: 15663
  source 1..40: mol_type = genomic DNA

SEQ ID NO: 16789 - DNA, 50 bp, Escherichia coli
  source 1..50: mol_type = genomic DNA
gtacgtgtttatctatgtaaaagcaatagtattcttgccttaacactcat

SEQ ID NO: 16790 - DNA, 40 bp, Escherichia coli; identical to SEQ ID NO: 3245
  source 1..40: mol_type = genomic DNA

SEQ ID NO: 16791 - protein, 547 aa, Escherichia coli
MKLLVTYIRWSTKEQDSGDSLRRQTNLIDAFYSKHKNDYYLLPAHRYVDKGKSGFHQQHKNQGSDFRRMFENVMSGAIPEGSLIVVENFDRFSRADIDTAIDDVRQILRKGVSILTLGDGELYDKSALTDPVKLIKHIIIAERAHQESLVKQKRIAQVWNHKTQLARELKKPMGKQAPGWLELSEDGSHYIVDEDKASLVNIIYDKRLSGMSMFAICKWLNEQGYPTINQRKVRISKTKKPDGNWSALSVKHILTSRSVLGYLPAKISTEDRKTVLREEIESFYPQIVTDSKFYAVQQLLEETGKGKTSSGEHWLYVNILKGLIRCKCGLVMTPTGIRKPVYQGTYRCNGNKESRCSYGTVSRKLLDTQLCSRLFSKLSQLHDEATDTAKLDELQRRLNTVDSELEKLTETLIQLPNITQIQEALRVKQEEKDELIVQLSREKARVKSVSSLDLSGLDMESVEGRTEAQIIIKRLVKEIVVSGNEKLVDIYLHNGNMIRGFPLDGKDDHTLTLEEATDEMQSLDDMLIFGEPVTRIYPAGDMEEVDA

SEQ ID NO: 16792 - DNA, 50 bp, Escherichia coli; identical to SEQ ID NO: 3242
  source 1..50: mol_type = genomic DNA

SEQ ID NO: 16793 - DNA, 40 bp, Escherichia coli; identical to SEQ ID NO: 15663
  source 1..40: mol_type = genomic DNA

SEQ ID NO: 16794 - DNA, 50 bp, Escherichia coli; identical to SEQ ID NO: 3244
  source 1..50: mol_type = genomic DNA

SEQ ID NO: 16795 - DNA, 40 bp, Escherichia coli; identical to SEQ ID NO: 3245
  source 1..40: mol_type = genomic DNA

SEQ ID NO: 16796 - protein, 547 aa, Escherichia coli
MKLLVTYIRWSTKEQDSGDSLRRQTNLIDAFYSKHKNDYYLLPAHRYVDKGKSGFHQQHKAQGSDFRRMFENVMSGAIPEGSLIVVENFDRFSRADIDTAIDDVRQILRKGVSILTLGDGELYDKSALTDPVKLIKHIIIAERAHQESLVKQKRIAQVWNHKTQLARELKKPMGKQAPGWLELSEDGSHYIVDEDKASLVNIIYDKRLSGMSMFAICKWLNEQGYPTINQRKVRISKTKKPDGNWSALSVKHILTSRSVLGYLPAKISTEDRKTVLREEIESFYPQIVTDSKFYAVQQLLEETGKGKTSSGEHWLYVNILKGLIRCKCGLVMTPTGIRKPVYQGTYRCNGNKESRCSYGTVSRKLLDTQLCSRLFSKLSQLHDEATDTAKLDELQRRLNTVDSELEKLTETLIQLPNITQIQEALRVKQEEKDELIVQLSREKARVKSVSSLDLSGLDMESVEGRTEAQIIIKRLVKEIVVSGNEKLVDIYLHNGNMIRGFPLDGKDDHTLTLEEATDEMQSLDDMLIFGEPVTRIYPAGDMEEVDA

SEQ ID NO: 16797 - DNA, 50 bp, Escherichia coli; identical to SEQ ID NO: 3242
  source 1..50: mol_type = genomic DNA

SEQ ID NO: 16798 - DNA, 40 bp, Escherichia coli; identical to SEQ ID NO: 15663
  source 1..40: mol_type = genomic DNA

SEQ ID NO: 16799 - DNA, 50 bp, Escherichia coli; identical to SEQ ID NO: 3244
  source 1..50: mol_type = genomic DNA

SEQ ID NO: 16800 - DNA, 40 bp, Escherichia coli; identical to SEQ ID NO: 3245
  source 1..40: mol_type = genomic DNA

SEQ ID NO: 16801 - protein, 547 aa, Escherichia coli
MKLLVTYIRWSTKEQDSGDSLRRQTNLIDAFYAKHKDDYYLLPAHRYVDKGKSGFHQQHKNQGSDFRRMFENVMSGVIPEGSLIVVENFDRFSRADIDTAIDDVRQILRKGVSILTLGDGELYDKSALTDPVKLIKHIIIAERAHQESLVKQKRIAQVWNHKTQLARELKKPMGKQAPGWLELSEDGSHYIVDEDKASLVNIIYDKRLSGMSMFAICKWLNEQGYPTINQRKVRISKTKKPDGNWSALSVKHILTSRSVLGYLPAKISTEDRKTVLREEIEGFYPQIVTDSKFYAVQQLLEETGKGKTSSGEHWLYVNILKGLIRCKCGLVMTPTGIRKPVYQGTYRCNGNKESRCSYGTVSRKLLDTQLCSRLFSKLSQLHDEATDTAKLDELQRRLNTVDGELEKLTETLIQLPNITQIQEALRVKQEEKDELIVQLSREKARVKSVSSLDLSGLDMESVEGRTEAQIIIKRLVKEIVVSGNEKLVDIYLHNGNMIRGFPLDGKDDHTLTLEEATDEMQSLDDMLIFGEPVTRIYPAGDMEEVDA

SEQ ID NO: 16802 - DNA, 50 bp, Escherichia coli; identical to SEQ ID NO: 3242
  source 1..50: mol_type = genomic DNA

SEQ ID NO: 16803 - DNA, 40 bp, Escherichia coli; identical to SEQ ID NO: 15663
  source 1..40: mol_type = genomic DNA

SEQ ID NO: 16804 - DNA, 50 bp, Escherichia coli; identical to SEQ ID NO: 3244
  source 1..50: mol_type = genomic DNA

SEQ ID NO: 16805 - DNA, 40 bp, Escherichia coli; identical to SEQ ID NO: 3245
  source 1..40: mol_type = genomic DNA

SEQ ID NO: 16806 - protein, 547 aa, Escherichia coli
MKLLVTYIRWSTKEQDSGDSLRRQTNLIDAFYSKHKDDYYLLPAHRYVDKGKSGFHQQHKNQGSDFRRMFENVMSEAIPEGSLIVVENFDRFSRADIDTAIDDVRQILRKGVSILTLGDGELYDKSALTDPVKLIKHIIIAERAHQESLVKQKRIAQVWNHKTQLARELKKPMGKQAPGWLELSEDGSHYIVDEDKASLVNIIYDKRLSGMSMFAICKWLNEQGYPTINQRKVRISKTKKPDGNWSALSVKHILTSRSVLGYLPAKISTEDRKTVLREEIESFYPQIVTDSKFYAVQQLLEETGKGKTSSGEHWLYVNILKGLIRCKCGLVMTPTGIRKPVYQGTYRCNGNKESRCNYGTVSRKLLDTQLCSRLFSKLSQLHDEATDTAKLDELQRRLNTVDSELEKLTETLIQLPNITQIQEALRVKQEEKDELIVQLSREKARVKSVSSLDLSGLDMESVEGRTEAQIIIKRLVKEIVVSGNEKLVDIYLHNGNMIRGFPLDGKDDHTLTLEEATDEMQSLDDMLIFGEPVTRIYPAGDMEEVDA

SEQ ID NO: 16807 - DNA, 50 bp, Escherichia coli; identical to SEQ ID NO: 3242
  source 1..50: mol_type = genomic DNA

SEQ ID NO: 16808 - DNA, 40 bp, Escherichia coli; identical to SEQ ID NO: 15663
  source 1..40: mol_type = genomic DNA

SEQ ID NO: 16809 - DNA, 50 bp, Escherichia coli; identical to SEQ ID NO: 3244
  source 1..50: mol_type = genomic DNA

SEQ ID NO: 16810 - DNA, 40 bp, Escherichia coli; identical to SEQ ID NO: 3245
  source 1..40: mol_type = genomic DNA

SEQ ID NO: 16811 - protein, 547 aa, Escherichia coli
MKLLVTYIRWSTKEQDSGDSLRRQTNLIDAFYAKHKEEYYLLPAHRYVDKGKSGFHQQHKAQGSDFRRMFENVMSGVIPEGSLIVVENFDRFSRADIDTAIDDVRQILRKGVSILTLGDGELYDKSALTDPVKLIKHIIIAERAHQESLVKQKRIAQVWNHKTQLARELKKPMGKQAPGWLELSEDGSHYIVDEDKASLVNIIYDKRLSGMSMFAICKWLNEQGYPTINQRKVRISKTKKPDGNWSALSVKHILTSRSVLGYLPAKISTEDRKTVLREEIESFYPQIVTDSKFYAVQQLLEETGKGKTSSGEHWLYVNILKGLIRCKCGLVMTPTGIRKPVYQGTYRCNGNKESRCSYGTVSRKLLDTQLCSRLFSKLSQLHDEATDTAKLDELQRRLNTVDSELEKLTETLIQLPNITQIQEALRVKQEEKDELIVQLSREKARVKSVSSLDLSGLDMESVEGRTEAQIIIKRLVKEIVVSGNEKLVDIYLHNGNMIRGFPLDGKDDHTLTLEEATDEMQSLDDMLIFGEPVTRIYPAGDMEEVDA

SEQ ID NO: 16812 - DNA, 50 bp, Escherichia coli; identical to SEQ ID NO: 3242
  source 1..50: mol_type = genomic DNA

SEQ ID NO: 16813 - DNA, 40 bp, Escherichia coli; identical to SEQ ID NO: 15663
  source 1..40: mol_type = genomic DNA

SEQ ID NO: 16814 - DNA, 50 bp, Escherichia coli; identical to SEQ ID NO: 3244
  source 1..50: mol_type = genomic DNA

SEQ ID NO: 16815 - DNA, 40 bp, Escherichia coli; identical to SEQ ID NO: 3245
  source 1..40: mol_type = genomic DNA

SEQ ID NO: 16816 - protein, 547 aa, Escherichia coli
MKLLVPYIRWSTKEQDSGDSLRRQTNLIDAFYAKHKDDYYLLPAHRYVDKGKSGFHQQHKAQGSDFRRMFENVMSGAIPEGSLIVVENFDRFSRADIDTAIDDVRQILRKGVSILTLGDGELYDKSALTDPVKLIKHIIIAERAHQESLVKQKRIAQVWNHKTQLARELKKPMGKQAPGWLELSDDGSHYIVDEDKASLVNIIYDKRLSGMSMFAICKWLNEQGYPTINQRKVRISKTKKPDGNWSALSVKHILTSRSVLGYLPAKISTEDRKTVLREEIEGFYPQIVTDSKFYAVQQLLEETGKGKTSSGEHWLYVNILKGLIRCKCGLVMTPTGIRKPVYQGTYRCNGNKESRCNYGTVSRKLLDTQLCSRLFSKLSQLHDEATDTAKLDELQRRLNTVDSELEKLTETLIQLPNITQIQEALRVKQEEKDELIVQLSREKARVKSVSSLDLSGLDMESVEGRTEAQIIIKRLVKEIVVSGNEKLVDIYLHNGNMIRGFPLDGKDDHTLTLEEATDEMQSLDDMLIFGEPVTRIYPAGDMEEVDA

SEQ ID NO: 16817 - DNA, 50 bp, Escherichia coli; identical to SEQ ID NO: 3242
  source 1..50: mol_type = genomic DNA

SEQ ID NO: 16818 - DNA, 40 bp, Escherichia coli; identical to SEQ ID NO: 15663
  source 1..40: mol_type = genomic DNA

SEQ ID NO: 16819 - DNA, 50 bp, Escherichia coli; identical to SEQ ID NO: 3244
  source 1..50: mol_type = genomic DNA

SEQ ID NO: 16820 - DNA, 40 bp, Escherichia coli; identical to SEQ ID NO: 3245
  source 1..40: mol_type = genomic DNA

SEQ ID NO: 16821 - protein, 547 aa, Escherichia coli; identical to SEQ ID NO: 15941

SEQ ID NO: 16822 - DNA, 50 bp, Escherichia coli; identical to SEQ ID NO: 10667
  source 1..50: mol_type = genomic DNA

SEQ ID NO: 16823 - DNA, 40 bp, Escherichia coli; identical to SEQ ID NO: 15663
  source 1..40: mol_type = genomic DNA

SEQ ID NO: 16824 - DNA, 50 bp, Escherichia coli; identical to SEQ ID NO: 15774
  source 1..50: mol_type = genomic DNA

SEQ ID NO: 16825 - DNA, 40 bp, Escherichia coli; identical to SEQ ID NO: 3245
  source 1..40: mol_type = genomic DNA

SEQ ID NO: 16826 - protein, 464 aa, Escherichia coli
MKLLVTYIRWSTREQDSGDSLRRQTNLIDAFYAKHKDDYYLLPAHRYVDKGKSGFHQQHKAQGSDFRRMFENVMSGAIPEGSLIVVENFDRFSRADIDTAIDDVRQILRKGVSILTLGDGELYDKSALTDPVKLIKHIIIAERAHQESLVKQKRIAQVWNHKTQLARELKKPMGKQAPGWLELSEDGSHYIVDEDKASLVNIIYDKRLSGMSMFAICKWLNEQGYPTINQRKVRISKTKKPDGNWSALSVKHILTSRSVLGYLPAKISTEDRKTVLREEIESFYPQIVTDSKFYAVQQLLEETGKGKTSSGEHWLYVNILKGLIRCKCGLVMTPTGIRKPVYQGTYRCNGNKESRCNYGTVSRKLLDTQLCSRLFSKLSQLHDEATDTAKLDELQRRLNTVDSELEKLTETLIQLPNITQIQEALRVKQEEKDELIVQLSREKARVKSVSSLDLSGLDMESVEG

SEQ ID NO: 16827 - DNA, 50 bp, Escherichia coli; identical to SEQ ID NO: 3242
  source 1..50: mol_type = genomic DNA

SEQ ID NO: 16828 - DNA, 40 bp, Escherichia coli; identical to SEQ ID NO: 15663
  source 1..40: mol_type = genomic DNA

SEQ ID NO: 16829 - DNA, 50 bp, Escherichia coli; identical to SEQ ID NO: 3244
  source 1..50: mol_type = genomic DNA

SEQ ID NO: 16830 - DNA, 40 bp, Escherichia coli; identical to SEQ ID NO: 3245
  source 1..40: mol_type = genomic DNA

SEQ ID NO: 16831 - protein, 547 aa, Escherichia coli
MKLLVTYIRWSTREQDSGDSLRRQTNLIDAFYSKHKEEYYLLPAHKYIDKGKSGFHQQHKNQGSDFRRMFDNVMSGTIPEGSLIVVENFDRFSRADIDTAIDDVRQILRKGVSILTLGDGELYDKSALTDPVKLIKHIIIAERAHQESLVKQKRIAQVWNHKTQLARELKKPMGKQAPGWLELSEDGSHYIVDEDKASLVNIIYDKRLSGMSMFAICKWLNEQGYPTINQRKVRISKTKKPDGNWSALSVKHILTSRSVLGYLPAKVSSEDRKTVLREEIEGFYPQIVTDSKFYAVQQLLEETGKGKTSSGEHWLYVNILKGLIRCKCGLVMTPTGIRKPVYQGTYRCNGNKESRCSYGTVSRKLLDTQLCSRLFSKLSQLHDEATDTAKLDELQRRLNTVDSELEKLTETLIQLPNITQIQEALRVKQEEKDELIVQLSREKARVKSVSSLDLSGLDMESVEGRTEAQIIIKRLVKEIVVSGNEKLVDIYLHNGNMIRGFPLDGKDDHTLTLEEATDEMQSLDDMLIFGEPVTRIYPAGDMEEVDA

SEQ ID NO: 16832 - DNA, 50 bp, Escherichia coli; identical to SEQ ID NO: 3242
  source 1..50: mol_type = genomic DNA

SEQ ID NO: 16833 - DNA, 40 bp, Escherichia coli; identical to SEQ ID NO: 15663
  source 1..40: mol_type = genomic DNA

SEQ ID NO: 16834 - DNA, 50 bp, Escherichia coli; identical to SEQ ID NO: 3244
  source 1..50: mol_type = genomic DNA

SEQ ID NO: 16835 - DNA, 40 bp, Escherichia coli; identical to SEQ ID NO: 3245
  source 1..40: mol_type = genomic DNA

SEQ ID NO: 16836 - protein, 547 aa, Escherichia coli; identical to SEQ ID NO: 10611

SEQ ID NO: 16837 - DNA, 50 bp, Escherichia coli; identical to SEQ ID NO: 3502
  source 1..50: mol_type = genomic DNA

SEQ ID NO: 16838 - DNA, 40 bp, Escherichia coli; identical to SEQ ID NO: 15663
  source 1..40: mol_type = genomic DNA

SEQ ID NO: 16839 - DNA, 50 bp, Escherichia coli; identical to SEQ ID NO: 15659
  source 1..50: mol_type = genomic DNA

SEQ ID NO: 16840 - DNA, 40 bp, Escherichia coli; identical to SEQ ID NO: 3245
  source 1..40: mol_type = genomic DNA

SEQ ID NO: 16841 - protein, 547 aa, Escherichia coli
MKLLVPYIRWSTKEQDSGDSLRRQTNLIDAFYAKHKDDYYLLPAHRYVDKGKSGFHQQHKAQGSDFRRMFENVMSGAIPEGSLIVVENFDRFSRADIDTAIDDVRQILRKGVSILTLGDGELYDKSALTDPVKLIKHIIIAERAHQESLVKQKRIAQVWNHKTQLARELKKPMGKQAPGWLELSEDGSHYIVDEDKASLVNIIYDKRLSGMSMFAICKWLNEQGYPTINQRKVRISKTKKPDGNWSALSVKHILTSRSVLGYLPAKVSSEDRKTVLREEIEGFYPQIVTDSKFYAVQQLLEETGKGKTSSGEHWLYVNILKGLIRCKCGLVMTPTGIRKPVYQGTYRCNGNKESRCSYGTVSRKLLDTQLCSRLFSKLSQLHDEATDTAKLDELQRRLNTVDSELEKLTETLIQLPNITQIQEALRAKQEEKDELIVQLSREKARVKSVSSLDLSGLDMESVEGRTEAQIIIKRLVKEIVVSGNEKLVDIYLHNGNMIRGFPLDGKDDHTLTLEEATDEMQSLDDMLIFGEPVTRIYPAGDMEEVDA

SEQ ID NO: 16842 - DNA, 50 bp, Escherichia coli; identical to SEQ ID NO: 3242
  source 1..50: mol_type = genomic DNA

SEQ ID NO: 16843 - DNA, 40 bp, Escherichia coli; identical to SEQ ID NO: 15663
  source 1..40: mol_type = genomic DNA

SEQ ID NO: 16844 - DNA, 50 bp, Escherichia coli; identical to SEQ ID NO: 3244
  source 1..50: mol_type = genomic DNA

SEQ ID NO: 16845 - DNA, 40 bp, Escherichia coli; identical to SEQ ID NO: 3245
  source 1..40: mol_type = genomic DNA

SEQ ID NO: 16846 - protein, 547 aa, Escherichia coli
MKLLVTYIRWSTKEQDSGDSLRRQTNLIDAFYSKHKNDYYLLPAHRYVDKGKSGFHQQHKNQGSDFRRMFENVMSGAIPEGSLIVVENFDRFSRADIDTAIDDVRQILRKGVSILTLGDGELYDKSALTDPVKLIKHIIIAERAHQESLVKQKRIAQVWNHKTQLARELKKPMGKQAPGWLELSEDGSHYIVDEDKASLVNIIYDKRLSGMSMFAICKWLNEQGYPTINQRKVRISKTKKPDGNWSALSVKHILTSRSVLGYLPAKISTEDRKTVLREEIEGFYPQIVTDSKFYAVQQLLEETGKGKTSSGEHWLYVNILKGLIRCKCGLVMTPTGIRKPVYQGTYRCNGNKESRCSYGTVSRKLLDTQLCSRLFSKLSQLHDEATDTAKLDELQRRLNTVDSELEKLTETLIQLPNITQIQEALRVKQEEKDELTFQLSREKARVKSVSSLDLSGLDMESVEGRTEAQIIIKRLVKEIVVSGNEKLVDIYLHNGNMIRGFPLDGKDDHTLTLEEATDEMQSLDDMLIFGEPVTRIYPAGDMEEVDA

SEQ ID NO: 16847 - DNA, 50 bp, Escherichia coli; identical to SEQ ID NO: 3242
  source 1..50: mol_type = genomic DNA

SEQ ID NO: 16848 - DNA, 40 bp, Escherichia coli; identical to SEQ ID NO: 15663
  source 1..40: mol_type = genomic DNA

SEQ ID NO: 16849 - DNA, 50 bp, Escherichia coli; identical to SEQ ID NO: 3244
  source 1..50: mol_type = genomic DNA

SEQ ID NO: 16850 - DNA, 40 bp, Escherichia coli; identical to SEQ ID NO: 3245
  source 1..40: mol_type = genomic DNA

SEQ ID NO: 16851 - protein, 547 aa, Escherichia coli
MKLLVPYIRWSTKEQDSGDSLRRQTNLIDAFYSKHKEEYYLLPAHRYVDKGKSGFHQQHKAQGSDFRRMFENVMSGAIPEGSLIVVENFDRFSRADIDTAIDDVRQILRKGVSILTLGDGELYDKSALTDPVKLIKHIIIAERAHQESLVKQKRIAQVWNHKTQLARELKKPMGKQAPGWLELSEDGSHYIVDEDKASLVNIIYDKRLSGMSMFAICKWLNEQGYPTINQRKVRISKTKKPDGNWSALSVKHILTSRSVLGYLPAKISTEDRKTVLREEIESFYPQIVTDSKFYAVQQLLEETGKGKTSSGEHWLYVNILKGLIRCKCGLVMTPTGIRKPVYQGTYRCNGNKESRCNYGTVSRKLLDTQLCSRLFSKLSQLHDEATDTAKLDELQRRLNTVDSELEKLTETLIQLPNITQIQEALRVKQEEKDELIVQLSREKARVKSVSSLDLSGLDMESVEGRTEAQIIIKRLVKEIVVSGNEKLVDIYLHNGNMIRGFPLDGKDDHTLTLEEATDEMQPLDDMLIFGEPVTRIYPAGDMEEVDA

SEQ ID NO: 16852 - DNA, 50 bp, Escherichia coli; identical to SEQ ID NO: 3242
  source 1..50: mol_type = genomic DNA

SEQ ID NO: 16853 - DNA, 40 bp, Escherichia coli; identical to SEQ ID NO: 15663
  source 1..40: mol_type = genomic DNA

SEQ ID NO: 16854 - DNA, 50 bp, Escherichia coli; identical to SEQ ID NO: 3244
  source 1..50: mol_type = genomic DNA

SEQ ID NO: 16855 - DNA, 40 bp, Escherichia coli; identical to SEQ ID NO: 3245
  source 1..40: mol_type = genomic DNA

SEQ ID NO: 16856 - protein, 547 aa, Escherichia coli
MKLLVTYIRWSTREQDSGDSLRRQTNLIDAFYAKHKDDYYLLPAHRYVDKGKSGFHQQHKAQGSDFRRMFENVMSGAIPEGSLIVVENFDRFSRADIDTAIDDVRQILRKGVSILTLGDGELYDKSALTDPVKLIKHIIIAERAHQESLVKQKRIAQVWNHKTQLARELKKPMGKQAPGWLELSEDGSHYIVDEDKASLVNIIYDKRLSGMSMFAICKWLNEQGYPTINQRKVRISKTKKPDGNWSALSVKHILTSRSVLGYLPAKVSSEDRKTVLREEIEGFYPQIVTDSKFYAVQQLLEETGKGKTSSGEHWLYVNILKGLIRCKCGLVMTPTGIRKPVYQGTYRCNGNKESRCSYGTVSRKLLDTQLCSRLFSKLSQLHDEATDTAKLDELQRRLNTVDSELEKLTETLIQLPNITQIQEALRAKQEEKDELIVQLSREKARVKSVSSLDLSGLDMESVEGRTEAQIIIKRLVKEIVVSGNERLVDIYLHNGNMIRGFQIDGKDDHTLTLEEATDEMQSLDDMLIFGEPVTRIYPAGDMEEVDA

SEQ ID NO: 16857 - DNA, 50 bp, Escherichia coli; identical to SEQ ID NO: 3242
  source 1..50: mol_type = genomic DNA

SEQ ID NO: 16858 - DNA, 40 bp, Escherichia coli; identical to SEQ ID NO: 15663
  source 1..40: mol_type = genomic DNA

SEQ ID NO: 16859 - DNA, 50 bp, Escherichia coli; identical to SEQ ID NO: 3244
  source 1..50: mol_type = genomic DNA

SEQ ID NO: 16860 - DNA, 40 bp, Escherichia coli; identical to SEQ ID NO: 3245
  source 1..40: mol_type = genomic DNA

SEQ ID NO: 16861 - protein, 547 aa, Escherichia coli
MKLLVPYIRWSTKEQDSGDSLRRQTNLIDAFYSKHKEEYYLLPAHRYVDKGKSGFHQQHKAQGSDFRRMFENAMSGAIPEGSLIVVENFDRFSRADIDTAIDDVRQILRKGVSILTLGDGELYDKSALTDPVKLIKHIIIAERAHQESLVKQKRIAQVWNHKTQLARELKKPMGKQAPGWLELSEDGSHYIVDEDKASLVNIIYDKRLSGMSMFAICKWLNEQGYPTINQRKVRISKTKKPDGNWSALSVKHILTSRSVLGYLPAKISTEDRKTVLREEIESFYPQIVTDSKFYAVQQLLEETGKGKTSSGEHWLYVNILKGLIRCKCGLVMTPTGIRKPVYQGTYRCNGNKESRCSYGTVSRKLLDTQLCSRLFSKLSQLHDEATDTAKLDELQRRLNTVDSELEKLTETLIQLPNITQIQEALRVKQEEKDELIVQLSREKARVKSVSSLDLSGLDMESVEGRTEAQIIIKRLVKEIVVSGNEKLVDIYLHNGNMIRGFPLDGKDDHTLTLEEATDEMQSLDDMLIFGEPVTRIYPAGDMEEVDA

SEQ ID NO: 16862 - DNA, 50 bp, Escherichia coli; identical to SEQ ID NO: 3242
  source 1..50: mol_type = genomic DNA

SEQ ID NO: 16863 - DNA, 40 bp, Escherichia coli; identical to SEQ ID NO: 15663
  source 1..40: mol_type = genomic DNA

SEQ ID NO: 16864 - DNA, 50 bp, Escherichia coli; identical to SEQ ID NO: 3244
  source 1..50: mol_type = genomic DNA

SEQ ID NO: 16865 - DNA, 40 bp, Escherichia coli; identical to SEQ ID NO: 3245
  source 1..40: mol_type = genomic DNA

SEQ ID NO: 16866 - protein, 547 aa, Escherichia coli
MKLLVTYIRWSTKEQDSGDSLRRQTNLIDAFYAKHKDDYYLLPAHRYVDKGKSGFHQQHKAQGSDFRRMFENVMSGVIPEGSLIVVENFDRFSRADIDTAIDDVRQILRKGVSILTLGDGELYDKSALTDPVKLIKHIIIAERAHQESLVKQKRIAQVWNHKTQLARELKKPMGKQAPGWLELSEDGSHYIVDEDKASLVNIIYDKRLSGMSMFAICKWLNEQGYPTINQRKVRISKTKKPDGNWSALSVKHILTSRSVLGYLPAKISTEDRKTVLREEIEGFYPQIVTDSKFYAVQQLLEETGKGKTSSGEHWLYVNILKGLIRCKCGLVMTPTGIRKPVYQGTYRCNGNKESRCSYGTVSRKLLDTQLCSRLFSKLSQLHDEATDTAKLDELQRRLNTVDSELEKLTETLIQLPNITQIQEALRVKQGEKDELIVQLSREKARVKSVSSLNLSGLDMESVEGRTEAQIIIKRLVKEIVVSGNEKLVDIYLHNGNMIRGFPLDGKDDHTLTLEEATDEMQSLDDMLIFGEPVTRIYPAGDMEEVDA

SEQ ID NO: 16867 - DNA, 50 bp, Escherichia coli; identical to SEQ ID NO: 3242
  source 1..50: mol_type = genomic DNA

SEQ ID NO: 16868 - DNA, 40 bp, Escherichia coli; identical to SEQ ID NO: 15663
  source 1..40: mol_type = genomic DNA

SEQ ID NO: 16869 - DNA, 50 bp, Escherichia coli; identical to SEQ ID NO: 3244
  source 1..50: mol_type = genomic DNA

SEQ ID NO: 16870 - DNA, 40 bp, Escherichia coli; identical to SEQ ID NO: 3245
  source 1..40: mol_type = genomic DNA

SEQ ID NO: 16871 - protein, 547 aa, Escherichia coli; identical to SEQ ID NO: 15726

SEQ ID NO: 16872 - DNA, 50 bp, Escherichia coli; identical to SEQ ID NO: 3242
  source 1..50: mol_type = genomic DNA

SEQ ID NO: 16873 - DNA, 40 bp, Escherichia coli; identical to SEQ ID NO: 15663
  source 1..40: mol_type = genomic DNA

SEQ ID NO: 16874 - DNA, 50 bp, Escherichia coli; identical to SEQ ID NO: 3244
  source 1..50: mol_type = genomic DNA

SEQ ID NO: 16875 - DNA, 40 bp, Escherichia coli; identical to SEQ ID NO: 3245
  source 1..40: mol_type = genomic DNA

SEQ ID NO: 16876 - protein, 547 aa, Escherichia coli
MKLLVTYIRWSTKEQDSGDSLRRQTNLIDAFYSKHKNDYYLLPAHRYVDKGKSGFHQQHKAQGSDFRRMFENVMSGAIPEGSLIVVENFDRFSRADIDTAIDDVRQILRKGVSILTLGDGELYDKSALTDPVKLIKHIIIAERAHQESLVKQKRIAQVWNHKTQLARELKKPMGKQAPGWLELSEDGSHYIVDEDKASLVNIIYDKRLSGMSMFAICKWLNEQGYPTINQRKVRISKTKKPDGNWSALSVKHILTSRSVLGYLPAKISSEDRKTVLREEIESFYPRIVTDSKFYAVQQLLEETGKGKTSSGEHWLYVNILKGLIRCKCGLVMTPTGIRKPVYQGTYRCNGNKESRCSYGTVSRKLLDTQLCSRLFSKLSQLHDEATDTAKLDELQRRLNTVDSELEKLTETLIQLPNITQIQEALRAKQEEKDELIVQLSREKARVKSVSSLDLSGLDMESVEGRTEAQIIIKRLVKEIVVSGNEKLVDIYLHNGNMIRGFPLDGKDDHTLTLEEATDEMQSLDDMLIFGEPVTRIYPAGDMEEVDA

SEQ ID NO: 16877 - DNA, 50 bp, Escherichia coli; identical to SEQ ID NO: 3242
  source 1..50: mol_type = genomic DNA

SEQ ID NO: 16878 - DNA, 40 bp, Escherichia coli; identical to SEQ ID NO: 15663
  source 1..40: mol_type = genomic DNA

SEQ ID NO: 16879 - DNA, 50 bp, Escherichia coli; identical to SEQ ID NO: 3244
  source 1..50: mol_type = genomic DNA

SEQ ID NO: 16880 - DNA, 40 bp, Escherichia coli; identical to SEQ ID NO: 3245
  source 1..40: mol_type = genomic DNA

SEQ ID NO: 16881 - protein, 547 aa, Escherichia coli
MKLLVPYIRWSTKEQDSGDSLRRQTNLIDAFYSKHKNDYYLLPAHRYVDKGKSGFHQQHKNQGSDFRRMFENVMSGVIPEGSLIVVENFDRFSRADIDTAIDDVRQILRKGVSILTLGDGELYDKSALTDPVKLIKHIIIAERAHQESLVKQKRIAQVWNHKTQLARELKKPMGKQAPGWLELSEDGSHYIVDEDKASLVNIIYDKRLSGMSMFAICKWLNEQGYPTINQRKVRISKTKKPDGNWSALSVKHILTSRSVLGYLPAKISSEDRKTVLREEIEGFYPQIVTDSKFYAVQQLLEETGKGKTSSGDHWLYVNILKGLIRCRCGLVMTPTGIRKPVYQGTYRCNGNKESRCSYGTVSRKLLDTQLCSRLFSKLSQLHDEATDTAKLDELQRRLNTVDGELEKLTETLIQLPNITQIQEALRVKQEEKDELIVQLSREKARVKSVSSLDLSGLDMESVEGRTEAQIIIKRLVKEIVVSGNEKLVDIYLHNGNMIRGFPLDGKDDHTLTLEEATDEMQSLDDMLIFGEPVTRIYPAGDMEEVDA

SEQ ID NO: 16882 - DNA, 50 bp, Escherichia coli; identical to SEQ ID NO: 3242
  source 1..50: mol_type = genomic DNA

SEQ ID NO: 16883 - DNA, 40 bp, Escherichia coli; identical to SEQ ID NO: 15663
  source 1..40: mol_type = genomic DNA

SEQ ID NO: 16884 - DNA, 50 bp, Escherichia coli; identical to SEQ ID NO: 3244
  source 1..50: mol_type = genomic DNA

SEQ ID NO: 16885 - DNA, 40 bp, Escherichia coli; identical to SEQ ID NO: 3245
  source 1..40: mol_type = genomic DNA

SEQ ID NO: 16886 - protein, 547 aa, Escherichia coli
MKLLVPYIRWSTKEQDSGDSLRRQTNLIDAFYAKHKDDYYLLPAHRYVDKGKSGFHQQHKNQGSDFRRMFENVMSGAIPEGSLIVVENFDRFSRADIDTAIDDVRQILRKRVSILTLGDGELYDKSALTDPVKLIKHIIIAERAHQESLVKQKRIAQVWNHKTQLARELKKPMGKQAPGWLELSEDGSHYIVDEDKASLVNIIYDKRLSGMSMFAICKWLNEQGYPTINQRKVRISKTKKPDGNWSALSVKHILTSRSVLGYLPAKISSEDHKTVLREEIEGFYPQIVTDSKFYAVQQLLEETGKGKTSSGEHWLYVNILKGLIRCKCGLVMTPTGIRKPVYQGTYRCNGNKESRCSYGTVSRKLLDTQLCSRLFSKLSQLHDEATDTAKLDELQRRLNTVDSELEKLTETLIQLPNITQIQEALRVKQEEKDELIVQLSREKARVKSVSSLDLSGLDMESVEGRTEAQIIIKRLVKEIVVSGNEKLVDIYLHNGNMIRGFPLDGKDDHTLTLEEATDEMQSLDDMLIFGEPVTRIYPAGDMEEVDA

SEQ ID NO: 16887 - DNA, 50 bp, Escherichia coli; identical to SEQ ID NO: 3242
  source 1..50: mol_type = genomic DNA

SEQ ID NO: 16888 - DNA, 40 bp, Escherichia coli; identical to SEQ ID NO: 15663
  source 1..40: mol_type = genomic DNA

SEQ ID NO: 16889 - DNA, 50 bp, Escherichia coli; identical to SEQ ID NO: 3244
  source 1..50: mol_type = genomic DNA

SEQ ID NO: 16890 - DNA, 40 bp, Escherichia coli; identical to SEQ ID NO: 3245
  source 1..40: mol_type = genomic DNA

SEQ ID NO: 16891 - protein, 547 aa, Escherichia coli
MKLLVPYIRWSTKEQDSGDSLRRQTNLIDAFYAKHKDDYYLLPAHRYVDKGKSGFHQQHKNQGSDFRRMFENVMSGTIPEGSLIVVENFDRFSRADIDTAIDDVRQILRKGVSILTLGDGELYDKSALTDPVKLIKHIIIAERAHQESLVKQKRIAQVWNHKTQLARELKKPMGKQAPGWLELSEDGSHYIVDEDKASLVNIIYDKRLSGMSMFAICKWLNEQGYPTINQRKVRISKTKKPDGNWSALSVKHILTSRSVLGYLPAKISSEDRKTVLREEIEGFYPQIVTDSKFYAVQQLLEETGKGKTSSGEHWLYVNILKGLIRCKCGLVMTPTGIRKPVYQGTYRCNGNKESRCSYGTVSRKLLDTQLCSRLFSKLSQLHDEATDTAKLDELQRRLNTVDGELEKLTETLIQLPNITQIQEALRVKQEEKDELIVQLSREKARVKSVSSLDLSGLDMESVEGRTEAQIIIKRLVKEIVVSGNEKLVDIYLHNGNMIRGFPLDGKDDHTLTLEEATDEMQSLDDMLIFGEPVTRIYPAGDMEEVDA

SEQ ID NO: 16892 - DNA, 50 bp, Escherichia coli; identical to SEQ ID NO: 3242
  source 1..50: mol_type = genomic DNA

SEQ ID NO: 16893 - DNA, 40 bp, Escherichia coli; identical to SEQ ID NO: 15663
  source 1..40: mol_type = genomic DNA

SEQ ID NO: 16894 - DNA, 50 bp, Escherichia coli; identical to SEQ ID NO: 3244
  source 1..50: mol_type = genomic DNA

SEQ ID NO: 16895 - DNA, 40 bp, Escherichia coli; identical to SEQ ID NO: 3245
  source 1..40: mol_type = genomic DNA

SEQ ID NO: 16896 - protein, 547 aa, Escherichia coli
MKLLVTYIRWSTKEQDSGDSLRRQTNLIDAFYSKHKEEYYLLPAHRYVDKGKSGFHQQHKNQGSDFRRMFENVMSGVIPEGSLIVVENFDRFSRADIDTAIDDVRQILRKGVSILTLGDGELYDKSALTDPVKLIKHIIIAERAHQESLVKQKRIAQVWNHKTQLARELKKPMGKQAPGWLELSEDGSHYIVDEDKASLVNIIYDKRLSGMSMFAICKWLNEQGYPTINQRKVRISKTKKPDGNWSALSVKHILTSRSVLGYLPAKISTEDRKTVLREEIESFYPQIVTDSKFYAVQQLLEETGKGKTSSGEHWLYVNILKGLIRCKCGLVMTPTGIRKPVYQGTYRCNGNKESRCNYGTVSRKLLDTQLCSRLFSKLSQLHDEATDTAKLDELQRRLNTVDGELEKLTETLIQLPNITQIQEALRVKQGEKDELIVQLSREKARVKSVSSLNLSGLDMESVEGRTEAQIIIKRLVKEIVVSGNEKLVDIYLHNGNMIRGFPLDGKDDHTLTLEEATDEMQSLDDMLIFGEPVTRIYPAGDMEEVDA

SEQ ID NO: 16897 - DNA, 50 bp, Escherichia coli; identical to SEQ ID NO: 3242
  source 1..50: mol_type = genomic DNA

SEQ ID NO: 16898 - DNA, 40 bp, Escherichia coli; identical to SEQ ID NO: 15663
  source 1..40: mol_type = genomic DNA

SEQ ID NO: 16899 - DNA, 50 bp, Escherichia coli; identical to SEQ ID NO: 3244
  source 1..50: mol_type = genomic DNA

SEQ ID NO: 16900 - DNA, 40 bp, Escherichia coli; identical to SEQ ID NO: 3245
  source 1..40: mol_type = genomic DNA

SEQ ID NO: 16901 - protein, 547 aa, Escherichia coli
MKLLVTYIRWSTKEQDSGDSLRRQTNLIDAFYSKHKNDYYLLPAHRYVDKGKSGFHQQHKNQGSDFRRMFENVMSGAIPEGSLIVVENFDRFSRADIDTAIDDVRQILRKGVSILTLGDGELYDKSALTDPVKLIKHIIIAERAHQESLVKQKRIAQVWNHKTQLARELKKPMGKQAPGWLELSEDGSHYIVDEDKASLVNIIYNKRLSGMSMFAICKWLNEQGYPTINQRKVRISKTKKPDGNWSALSVKHILTSRSVLGYLPAKISTEDRKTVLREEIEGFYPQIVTDSKFYAVQQLLEETGKGKTSSGDHWLYVNILKGLIRCKCGLVMTPTGIRKPVYQGTYRCNGNKESRCSYGTVSRKLLDTQLCSRLFSKLSQLHDEATDTAKLDELQRRLNTVDSELEKLTETLIQLPNITQIQEALRVKQEEKDELIVQLSREKARVKSVSSLDLSGLDMESVEGRTEAQIIIKRLVKEIVVSGNEKLVDIYLHNGNMIRGFPLDGKDDHTLTLEEATDEMQSLDDMLIFGEPVTRIYPAGDMEEVDA

SEQ ID NO: 16902 - DNA, 50 bp, Escherichia coli; identical to SEQ ID NO: 10667
  source 1..50: mol_type = genomic DNA

SEQ ID NO: 16903 - DNA, 40 bp, Escherichia coli; identical to SEQ ID NO: 15663
  source 1..40: mol_type = genomic DNA

SEQ ID NO: 16904 - DNA, 50 bp, Escherichia coli; identical to SEQ ID NO: 15774
  source 1..50: mol_type = genomic DNA

SEQ ID NO: 16905 - DNA, 40 bp, Escherichia coli; identical to SEQ ID NO: 3245
  source 1..40: mol_type = genomic DNA

SEQ ID NO: 16906 - protein, 547 aa, Escherichia coli
MKLLVTYIRWSTKEQDSGDSLRRQTNLIDAFYSKHKEEYYLLPAHRYVDKGKSGFHQQHKAQGSDFRRMFENVMSGVIPEGSLIVVENFDRFSRADIDTAIDDVRQILRKGVSILTLGDGELYDKSALTDPVKLIKHIIIAERAHQESLVKQKRIAQVWNHKTQLARELKKPMGKQAPGWLELSEDGSHYIVDEDKASLVNIIYDKRLSGMSMFAICKWLNEQGYPTINQRKVRISKTKKPDGNWSALSVKHILTSRSVLGYLPAKISTEDRKTVLREEIEGFYPQIVTDSKFYAVQQLLEETGKGKTSSGEHWLYVNILKGLIRCKCGLVMTPTGIRKPVYQGTYRCNGNKESRCSYGTVSRKLLDTQLCSRLFSKLSQLHDEATDTAKLDELQRRLNTVDSELEKLTETLIQLPNITQIQEALRVKQEEKDELIVQLSREKARVKSVSSLDLSGLDMESVEGRTEAQIIIKRLVKEIVVSGNEKLVDIYLHNGNMIRGFPLDGKDDHTLTLEEATDEMQSLDDMLIFGEPVTRIYPAGDMEEVDA

SEQ ID NO: 16907 - DNA, 50 bp, Escherichia coli; identical to SEQ ID NO: 3242
  source 1..50: mol_type = genomic DNA

SEQ ID NO: 16908 - DNA, 40 bp, Escherichia coli; identical to SEQ ID NO: 15663
  source 1..40: mol_type = genomic DNA

SEQ ID NO: 16909 - DNA, 50 bp, Escherichia coli; identical to SEQ ID NO: 3244
  source 1..50: mol_type = genomic DNA

SEQ ID NO: 16910 - DNA, 40 bp, Escherichia coli; identical to SEQ ID NO: 3245
  source 1..40: mol_type = genomic DNA

SEQ ID NO: 16911 - protein, 547 aa, Escherichia coli
MKLLVPYIRWSTKEQDSGDSLRRQTNLIDAFYAKHKDDYYLLPAHRYVDKGKSGFHQQHKAQGSDFRRMFENVMSGVIPEGSLIVVENFDRFSRADIDTAIDDVRQILRKGVSILTLGDGELYDKSALTDPVKLIKHIIIAERAHQESLVKQKRIAQVWNHKTQLARELKKPMGKQAPGWLELSDDGSHYIVDEDKASLVNIIYDKRLSGMSMFAICKWLNEQGYPTINQRKVRISKTKKPDGNWSALSVKHILTSRSVLGYLPAKISTEDRKTVLREEIEGFYPQIVTDSKFYAVQQLLEETGKGKTSSGEHWLYVNILKGLIRCKCGLVMTPTGIRKPVYQGTYRCNGNKESRCSYGTVSRKLLDTQLCSRLFSKLSQLHDEATDTAKLDELQRRLNTVDSELEKLTETLIQLPNITQIQEALRVKQEEKDELIVQLSREKARVKSVSSLDLSGLDMESVEGRTEAQIIIKRLVKEIVVSGNEKLVDIYLHNGNMIRGFPLDGKDDHTLTLEEATDEMQSLDDMLIFGEPVTRIYPAGDMEEVDA

SEQ ID NO: 16912 - DNA, 50 bp, Escherichia coli; identical to SEQ ID NO: 3242
  source 1..50: mol_type = genomic DNA

SEQ ID NO: 16913 - DNA, 40 bp, Escherichia coli; identical to SEQ ID NO: 15663
  source 1..40: mol_type = genomic DNA

SEQ ID NO: 16914 - DNA, 50 bp, Escherichia coli; identical to SEQ ID NO: 3244
  source 1..50: mol_type = genomic DNA

SEQ ID NO: 16915 - DNA, 40 bp, Escherichia coli; identical to SEQ ID NO: 3245
  source 1..40: mol_type = genomic DNA

SEQ ID NO: 16916 - protein, 547 aa, Escherichia coli
MKLLVTYIRWSTKEQDSGDSLRRQTNLIDAFYSKHKNDYYLLPAHRYVDKGKSGFHQQHKAQGSDFRRMFENVMSGAIPEGSLIVVENFDRFSRADIDTAIDDVRQILRKGVSILTLGDGELYDKSALTDPVKLIKHIIIAERAHQESLVKQKRIAQVWNHKTQLARELKKPMGKQAPGWLELSEDGSHYIVDEDKASLVNIIYDKRLSGMSMFAICKWLNEQGYPTINQRKVRISKTKKPDGNWSALSVKHILTSRSVLGYLPAKISTEDRKTVLREEIEGFYPQIVTDSKFYAVQQLLEETGKGKTSSGEHWLYVNILKGIIRCKCGLVMTPTGIRKPVYQGTYRCNGNKESRCNYGTVSRKLLDTQLCSRLFSKLSQLHDEATDTAKLDELQRRLNTVDSELEKLTETLIQLPNITQIQEALRVKQEEKDELIVQLSREKARVKSVSSLDLSGLDMESVEGRTEAQIIIKRLVKEIVVSGNEKLVDIYLHNGNMIRGFPLDGKDDHTLTLEEATDEMQSLDDMLIFGEPVTRIYPAGDMEEVDA

SEQ ID NO: 16917 - DNA, 50 bp, Escherichia coli; identical to SEQ ID NO: 3242
  source 1..50: mol_type = genomic DNA

SEQ ID NO: 16918 - DNA, 40 bp, Escherichia coli; identical to SEQ ID NO: 15663
  source 1..40: mol_type = genomic DNA

SEQ ID NO: 16919 - DNA, 50 bp, Escherichia coli; identical to SEQ ID NO: 3244
  source 1..50: mol_type = genomic DNA

SEQ ID NO: 16920 - DNA, 40 bp, Escherichia coli; identical to SEQ ID NO: 3245
  source 1..40: mol_type = genomic DNA

SEQ ID NO: 16921 - protein, 547 aa, Escherichia coli
MKLLATYIRWSTREQDSGDSLRRQTNLIDAFYAKHKDDYYLLPAHRYVDKGKSGFHQQHKAQGSDFRRMFENVMSGAIPEGSLIVVENFDRFSRADIDTAIDDVRQILRKGVSILTLGDGELYDKSALTDPVKLIKHIIIAERAHQESLVKQKRIAQVWNHKTQLARELKKPMGKQAPGWLELSEDGSHYIVDEDKASLVNIIYDKRLSGMSMFAICKWLNEQGYPTINQRKVRISKTKKPDGNWSALSVKHILTSRSVLGYLPAKISTEDRKTVLREEIESFYPQIVTDSKFYAVQQLLEETGKGKTSSGEHWLYVNILKGLIRCKCGLVMTPTGIRKPVYQGTYRCNGNKESRCSYGTVSRKLLDTQLCSRLFSKLSQLHDEATDTAKLDELQRRLNTVDSELEKLTETLIQLPNITQIQEALRVKQEEKDELIVQLSREKARVKSVSSLDLSGLDMESVEGRTEAQIIIKRLVKEIVVSGNEKLVDIYLHNGNMIRGFPLDGKDDHTLTLEEATDEMQSLDDMLIFGEPVTRIYPAGDMEEVDA

SEQ ID NO: 16922 - DNA, 50 bp, Escherichia coli; identical to SEQ ID NO: 3242
  source 1..50: mol_type = genomic DNA

SEQ ID NO: 16923 - DNA, 40 bp, Escherichia coli; identical to SEQ ID NO: 15663
  source 1..40: mol_type = genomic DNA

SEQ ID NO: 16924 - DNA, 50 bp, Escherichia coli; identical to SEQ ID NO: 3244
  source 1..50: mol_type = genomic DNA

SEQ ID NO: 16925 - DNA, 40 bp, Escherichia coli; identical to SEQ ID NO: 3245
  source 1..40: mol_type = genomic DNA

SEQ ID NO: 16926 - protein, 547 aa, Escherichia coli
MKLLATYIRWSTKEQDSGDSLRRQTNLIDAFYAKHKDDYYLLPAHRYVDKGKSGFHQQHKAQGSDFRRMFENVMSGVIPEGSLIVVENFDRFSRADIDTAIDDVRQILRKGVSILTLGDGELYDKSALTDPVKLIKHIIIAERAHQESLVKQKRIAQVWNHKTQLARELKKPMGKQAPGWLELSEDGSHYIVDEDKASLVNIIYDKRLSGMSMFAICKWLNEQGYPTINQRKVRISKTKKPDGNWSALSVKHILTSRSVLGYLPAKISTEDRKTVLREEIEGFYPQIVTDSKFYAVQQLLEETGKGKTSSGEHWLYVNILKGLIRCKCGLVMTPTGIRKPVYQGTYRCNGNKESRCSYGTVSRKLLDTQLCSRLFSKLSQLHDEATDTAKLDELQRRLNTVDSELEKLTETLIQLPNITQIQEALRIKQEEKDELIVQLSREKARVKSVSSLDLSGLDMESVEGRTEAQIIIKRLVKEIVVSGNEKLVDIYLHNGNMIRGFPLDGKDDHTLTLEEATDEMQPLDDMLIFGEPVTRIYPAGDMEEVDA

SEQ ID NO: 16927 - DNA, 50 bp, Escherichia coli; identical to SEQ ID NO: 3242
  source 1..50: mol_type = genomic DNA

SEQ ID NO: 16928 - DNA, 40 bp, Escherichia coli; identical to SEQ ID NO: 15663
  source 1..40: mol_type = genomic DNA

SEQ ID NO: 16929 - DNA, 50 bp, Escherichia coli; identical to SEQ ID NO: 3244
  source 1..50: mol_type = genomic DNA

SEQ ID NO: 16930 - DNA, 40 bp, Escherichia coli; identical to SEQ ID NO: 3245
  source 1..40: mol_type = genomic DNA

SEQ ID NO: 16931 - protein, 547 aa, Escherichia coli
MKLLVTYIRWSTKEQDSGDSLRRQTNLIDAFYSKHKNDYYLLPAHRYVDKGKSGFHQQHKNQGSDFRRMFENVMSGAIPEGSLIVVENFDRFSRADIDTAIDDVRQILRKGVSILTLGDGELYDKSALTDPVKLIKHIIIAERAHQESLVKQKRIAQVWNHKTQLARELKKPMGKQAPGWLELSEDGSHYIVDEDKASLVNIIYDKRLSGMSMFAICKWLNEQGYPTINQRKVRISKTKKPDGNWSALSVKHILTSRSVLGYLPAKISTEDRKTVLREEIEGFYPQIVTDSKFYAVQQLLEETGKGKTSSGEHWLYVNILKGLIRCKCGLVMTPTGIRKPVYQGTYRCNGNKESRCSYGTVSRKFLDTQLCSRLFSKLSQLHDEATDTAKLDELQRRLNTVDGELEKLTETLIQLPNITQIQEALRVKQEEKDELIVQLSREKARVKSVSSLDLSGLDMESVEGRTEAQIIIKRLVKEIVVSGNEKLVDIYLHNGNMIRGFPLDGKDDHTLTLEEATDEMQSLDDMLIFGEPVTRIYPAGDMEEVDA

SEQ ID NO: 16932 - DNA, 50 bp, Escherichia coli; identical to SEQ ID NO: 3242
  source 1..50: mol_type = genomic DNA

SEQ ID NO: 16933 - DNA, 40 bp, Escherichia coli; identical to SEQ ID NO: 15663
  source 1..40: mol_type = genomic DNA

SEQ ID NO: 16934 - DNA, 50 bp, Escherichia coli; identical to SEQ ID NO: 3244
  source 1..50: mol_type = genomic DNA

SEQ ID NO: 16935 - DNA, 40 bp, Escherichia coli; identical to SEQ ID NO: 3245
  source 1..40: mol_type = genomic DNA

SEQ ID NO: 16936 - protein, 547 aa, Escherichia coli
MKLLVTYIRWSTKEQDSGDSLRRQTNLIDAFYSKHKNDYYLLPAHRYVDKGKSGFHQQHKAQGSDFRRMFENVMSGAIPEGSLIVVENFDRFSRADIDTAIDDVRQILRKGVSILTLGDGELYDKSALTDPVKLIKHIIIAERAHQESLVKQKRIAQVWNHKTQLARELKKPMGKQAPGWLELSEDGSHYIVDEDKASLVNIIYDKRLSGMSMFAICKWLNEQGYPTINQRKVRISKTKKPDGNWSALSVKHILTSRSVLGYLPAKISTEDRKTVLREEIEGFYPQIVTDSKFYAVQQLLEETGKGKTSSGEHWLYVNILKGLIRCKCGLVMTPTGIRKPVYQGTYRCNGNKESRCSYGTVSRKLLDTQLCSRLFSKLSQLHDEATDTAKLDELQRRLNTVDSELEKLTETLIQLPNITQIQEALRVKQEEKDELIVQLSREKARVKSVSSLDLSGLDMESVEGRTEAQIIIKRLVKEIVVSGNEKLVDIYLHNGNMIRGFPLDGKDDHTLTLEEATDEMQPLDDMLIFGEPVTRIYPAGDMEEVDA

SEQ ID NO: 16937 - DNA, 50 bp, Escherichia coli; identical to SEQ ID NO: 3502
  source 1..50: mol_type = genomic DNA

SEQ ID NO: 16938 - DNA, 40 bp, Escherichia coli; identical to SEQ ID NO: 15663
  source 1..40: mol_type = genomic DNA

SEQ ID NO: 16939 - DNA, 50 bp, Escherichia coli; identical to SEQ ID NO: 15659
  source 1..50: mol_type = genomic DNA

SEQ ID NO: 16940 - DNA, 40 bp, Escherichia coli; identical to SEQ ID NO: 3245
  source 1..40: mol_type = genomic DNA

SEQ ID NO: 16941 - protein, 547 aa, Escherichia coli
MKLLVPYIRWSTKEQDSGDSLRRQTNLIDAFYSKHKEEYYLLPAHRYVDKGKSGFHQQHKNQGSDFRRMFENVMSGVIPEGSLIVVENFDRFSRADIDTAIDDVRQILRKGVSILTLGDGELYDKSALTDPVKLIKHIIIAERAHQESLVKQKRIAQVWNHKTQLARELKKPMGKQAPGWLELSEDGSHYIVDEDKASLVNIIYDKRLSGMSMFAICKWLNEQGYPTINQRKVRISKTKKPDGNWSALSVKHILTSRSVLGYLPAKISTEDRKTVLREEIESFYPQIVTDSKFYAVQQLLEETGKGKTSSGEHWLYVNILKGLIRCKCGLVMTPTGIRKPVYQGTYRCNGNKESRCSYGTVSRKLLDTQLCSRLFSKLSQLHDEATDTAKLDELQRRLNTVDSELEKLTETLIQLPNITQIQEALRVKQEEKDELIVQLSREKARVKSVSSLDLSGLDMESVEGRTEAQIIIKRLVKEIVVSGNEKLVDIYLHNGNMIRGFPLDGKDDHTLTLEEATDEMQSLDDMLIFGEPVTRIYPAGDMEEVDA

SEQ ID NO: 16942 - DNA, 50 bp, Escherichia coli; identical to SEQ ID NO: 3242
  source 1..50: mol_type = genomic DNA

SEQ ID NO: 16943 - DNA, 40 bp, Escherichia coli; identical to SEQ ID NO: 15663
  source 1..40: mol_type = genomic DNA

SEQ ID NO: 16944 - DNA, 50 bp, Escherichia coli; identical to SEQ ID NO: 3244
  source 1..50: mol_type = genomic DNA

SEQ ID NO: 16945 - DNA, 40 bp, Escherichia coli; identical to SEQ ID NO: 3245
  source 1..40: mol_type = genomic DNA

SEQ ID NO: 16946 - protein, 547 aa, Escherichia coli
MKLLVTYIRWSTKEQDSGDSLRRQTNLIDAFYAKHKDDYYLLPAHRYVDKGKSGFHQQHKAQGSDFRRMFENVMSGAIPEGSLIVVENFDRFSRADIDTAIDDVRQILRKGVSILTLGDGELYDKSALTDPVKLIKHIIIAERAHQESLVKQKRIAQVWNHKTQLARELKKPMGKQAPGWLELSDDGSHYIVDEDKASLVNIIYDKRLSGMSMFAICKWLNEQGYPTINQRKVRISKTKKPDGNWSALSVKHILTSRSVLGYLPAKISSEDRKTVLREEIESFYPQIVTDSKFYAVQQLLEETGKGKTSSGDHWLYVNILKGIIRCKCGLVMTPTGIRKPVYQGTYRCNGNKESRCNYGTVSRKLLDTQLCSRLFSKLSQLHDEATDTAKLDELQRRLNTVDGELEKLTETLIQLPNITQIQEALRVKQGEKDELIVQLSREKARVKSVSSLDLSGLDMESVEGRTEAQIIIKRLVKEIVVSGNEKLVDIYLHNGNMIRGFPLDGKDDHTLTLEEATDEMQSLDDMLIFGEPVTRIYPAGDMEEVDA

SEQ ID NO: 16947 - DNA, 50 bp, Escherichia coli; identical to SEQ ID NO: 3242
  source 1..50: mol_type = genomic DNA

SEQ ID NO: 16948 - DNA, 40 bp, Escherichia coli; identical to SEQ ID NO: 15663
  source 1..40: mol_type = genomic DNA

SEQ ID NO: 16949 - DNA, 50 bp, Escherichia coli; identical to SEQ ID NO: 3244
  source 1..50: mol_type = genomic DNA

SEQ ID NO: 16950 - DNA, 40 bp, Escherichia coli; identical to SEQ ID NO: 3245
  source 1..40: mol_type = genomic DNA

SEQ ID NO: 16951 - protein, 547 aa, Escherichia coli
MKLLATYIRWSTREQDSGDSLRRQTNLIDAFYSKHKNDYYLLPAHRYVDKGKSGFHQQHKAQGSDFRRMFENVMSGAIPEGSLIVVENFDRFSRADIDTAIDDVRQILRKGVSILTLGDGELYDKSALTDPVKLIKHIIIAERAHQESLVKQKRIAQVWNHKTQLARELKKPMGKQAPGWLELSEDGSHYIVDEDKASLVNIIYDKRLSGMSMFAICKWLNEQGYPTINQRKVRISKTKKPEGNWSALSVKHILTSRSVLGYLPAKISSEDRKTVLREEIESFYPQIVTDSKFYAVQQLLEETGKGKTSSGEHWLYVNILKGLIRCKCGLVMTPTGIRKPVYQGTYRCNGNKESRCSYGTVSRKLLDTQLCSRLFSKLSQLHDEATDTAKLDELQRRLNTVDSELEKLTETLIQLPNITQIQEALRVKQEEKDELIVQLSREKARVKSVSSLDLSGLDMESVEGRTEAQIIIKRLVKEIVVSGNEKLVDIYLHNGNMIRGFPLDGKDDHTLTLEEATDEMQSLDDMLIFGEPVTRIYPAGDMEEVDA

SEQ ID NO: 16952 - DNA, 50 bp, Escherichia coli
  source 1..50: mol_type = genomic DNA
atacgtgtttagctatgtaagattactagtattcttgccttaacactcat

SEQ ID NO: 16953 - DNA, 40 bp, Escherichia coli; identical to SEQ ID NO: 15663
  source 1..40: mol_type = genomic DNA

SEQ ID NO: 16954 - DNA, 50 bp, Escherichia coli
  source 1..50: mol_type = genomic DNA
atacgtgtttagctatgtaagattaatagtattcttgccttaacactcat

SEQ ID NO: 16955 - DNA, 40 bp, Escherichia coli; identical to SEQ ID NO: 3245
  source 1..40: mol_type = genomic DNA

SEQ ID NO: 16956 - protein, 547 aa, Escherichia coli
MKLLVTYIRWSTKEQDSGDSLRRQTNLIDAFYAKHKDEYYLLPAHRYVDKGKSGFHQQHKTQGSDFRRMFDNVMSGAIPAGSLIVVENFDRFSRADIDTAIDDVRQMLRKGVSILTLVDGELYDKSALTDPVKLIKHIIIAERAHQESLVKQKRIAQVWNHKTQLARELKKPMGKQAPGWLELSEDGSHYIVDEDKAALVNLIYDKRLSGMSMFAITKWLNEQGYPTINQRKVRISKTKRPDGNWSSLSVKHILTSRSVLGYLPAKISTEDRKTVLREEIEGFYPQIVTDSKFYAVQQLLKDTGKGKTSSGEHWLYVNILRGLVRCRCGLVMIPSGIRKPVYQGVYRCNARHEGRCNYGTVSRKLLDTQLCSRLFSKLSQLHDDATDTARMDELQRKLNTVDSELEKLTETLIQLPNITQIQEALRIKQVEKDELVVQLSREKARVKSVSNLDLSGLDMASVEGRTEAQIIIKRLVKEIVVSGNEKLVDIYLHNGNMIRGFPLDGKDDHTLTLEEATDEMQSLDDMLIFGEPVTRIYPAGDMEEVDA

SEQ ID NO: 16957 - DNA, 50 bp, Escherichia coli; identical to SEQ ID NO: 14457
  source 1..50: mol_type = genomic DNA

SEQ ID NO: 16958 - DNA, 40 bp, Escherichia coli
  source 1..40: mol_type = genomic DNA
acatggaataataaagcaccagaactttagccatttctaa

SEQ ID NO: 16959 - DNA, 50 bp, Escherichia coli
  source 1..50: mol_type = genomic DNA
gcgtgtttagctatgtaagagtacgagtattcttgccttaacgctcatgg

SEQ ID NO: 16960 - DNA, 40 bp, Escherichia coli
  source 1..40: mol_type = genomic DNA
gaattgaataataaagaaagagaactttatcaacttctta

SEQ ID NO: 16961 - protein, 547 aa, Escherichia coli
MKLLVTYIRWSTREQDSGDSLRRQTNLIDAFYSKHKNDYYLLPAHRYVDKGKSGFHQQHKAQGSDFRRMFENVMSGAIPEGSLIVVENFDRFSRADIDTAIDDVRQILRKGVSILTLGDGELYDKSALTDPVKLIKHIIIAERAHQESLVKQKRIAQVWNHKTQLARELKKPMGKQAPGWLELSDDGSHYIVDEDKASLVNIIYDKRLSGMSMFAICKWLNEQGYPTINQRKVRISKTKKPDGNWSALSVKHILTSRSVLGYLPAKISTEDRKTVLREEIEGFYPQIVTDSKFYAVQQLLEETGKGKTSSGEHWLYVNILKGLIRCRCGLVMTPTGIRKPVYQGTYRCNGNKESRCNYGTVSRKLLDTQLCSRLFSKLSQLHDEATDTAKLDELQRRLNTVDSELEKLTETLIQLPNITQIQEALRVKQEEKDELIVQLSREKARVKSVSSLDLSGLDMESVEGRTEAQIIIKRLVKEIVVSGNEKLVDIYLHNGNMIRGFPLDGKDDHTLTLEEATDEMQSLDDMLIFGEPVTRIYPAGDMEEVDA

SEQ ID NO: 16962 - DNA, 50 bp, Escherichia coli
  source 1..50: mol_type = genomic DNA
acgtgtttagctatgtaagattaccagtattcttgccttaacactcatgg

SEQ ID NO: 16963 - DNA, 40 bp, Escherichia coli; identical to SEQ ID NO: 16958
  source 1..40: mol_type = genomic DNA

SEQ ID NO: 16964 - DNA, 50 bp, Escherichia coli
  source 1..50: mol_type = genomic DNA
acgtgtttagctatgtaagattacgagtattcttgccttaacactcatgg

SEQ ID NO: 16965 - DNA, 40 bp, Escherichia coli; identical to SEQ ID NO: 16960
  source 1..40: mol_type = genomic DNA

SEQ ID NO: 16966 - protein, 547 aa, Escherichia coli
MKLLVTYIRWSTREQDSGDSLRRQTNLIDAFYSKHKNDYYLLPAHRYVDKGKSGFHQQHKAQGSDFRRMFENVMSGAIPEGSLIVVENFDRFSRADIDTAIDDVRQILRKGVSILTLGDGELYDKSALTDPVKLIKHIIIAERAHQESLVKQKRIAQVWNHKTQLARELKKPMGKQAPGWLELSEDGSHYIVDEDKASLVNIIYDKRLSGMSMFAICKWLNEQGYPTINQRKVRISKTKKPDGNWSALSVKHILTSRSVLGYLPAKISTEDRKTVLREEIEGFYPQIVTDSKFYAVQQLLEETGKGKTSSGEHWLYVNILKGLIRCKCGLVMTPTGIRKPVYQGTYRCNGNKESRCNYGTVSRKLLDTQLCSRLFSKLSQLHDEATDTAKLDELQRRLNTVDSELEKLTETLIQLPNITQIQEALRVKQEEKDELIVQLSREKARVKSVSSLDLSGLDMESVEGRTEAQIIIKRLVKEIVVSGNEKLVDIYLHNGNMIRGFPLDGKDDHTLTLEEATDEMQSLDDMLIFGEPVTRIYPAGDMEEVDA

SEQ ID NO: 16967 - DNA, 50 bp, Escherichia coli; identical to SEQ ID NO: 16962
  source 1..50: mol_type = genomic DNA

SEQ ID NO: 16968 - DNA, 40 bp, Escherichia coli; identical to SEQ ID NO: 16958
  source 1..40: mol_type = genomic DNA

SEQ ID NO: 16969 - DNA, 50 bp, Escherichia coli; identical to SEQ ID NO: 16964
  source 1..50: mol_type = genomic DNA

SEQ ID NO: 16970 - DNA, 40 bp, Escherichia coli; identical to SEQ ID NO: 16960
  source 1..40: mol_type = genomic DNA

SEQ ID NO: 16971 - protein, 502 aa, Lachnospiraceae bacterium
MEFIREDCIYARQSVDRKDSISIESQIDFCKYELKGGSCRVFKDKGYSGKNTDRPEFQKLLGEIRKGKVRRVIVYKLDRISRSILDFATMMELFQEYDVEFVSSTEKFDTSTPMGRAMLNICIVFAQLERETIQKRVTDAYYSRCLKGFHMSGQAPYGYQLEPTVVEGIRTKKMVADPVAADHVRLMFEMYAEPETSFGDITRYFEEHDIKIYGKSMFRTFLSQLLRNPVYAQADLELYEFFKSQGAAIINDASDFAGTNGCYLYQGRDVKEDKDRCLKDQILVIAPHEALISSDTWLKCRKKLMANTTFQQGRKPKNTWLAGKIKCGHCGYALKATHVPNSTGYFRCTKRTENKGCPGCGKIRKEEFEQFIFSAMQEKFKDFQILHGREEKVNPKLTTYQVELAQVEAEIEKLLDTLTGANATLLAYANKKIEELDTRRQTISKAIAELSVETISPQQIKKLSYYLDNWESIDFDDKRKAADGLISTIKATSDRVQIEWKI

SEQ ID NO: 16972 - DNA, 50 bp, Lachnospiraceae bacterium; identical to SEQ ID NO: 14317
  source 1..50: mol_type = genomic DNA

SEQ ID NO: 16973 - DNA, 40 bp, Lachnospiraceae bacterium
  source 1..40: mol_type = genomic DNA
aacatctccaaacacaacatttcgtttgtttatatatgtg

SEQ ID NO: 16974 - DNA, 50 bp, Lachnospiraceae bacterium
  source 1..50: mol_type = genomic DNA
tttgtaccccttgtacaccgatgccagcaacggtgtacaaagggaacata

SEQ ID NO: 16975 - DNA, 40 bp, Lachnospiraceae bacterium
  source 1..40: mol_type = genomic DNA
aacatgtacacacacaccacatggtgtgtatatatatatt

SEQ ID NO: 16976 - protein, 632 aa, Rathayibacter tritici
MKDDFMPVTGQAREAAVAISATPGARGSSADDSEPRRAAEQKGLDSARVQSVNQSAMTFTPLLASPTLSPQPVAPDPLSVIGEMLTPKVAVLYLRVSTARQAQRGDEKEGFSIPAQREANRKKAQSMGAMVAKEFVDRGESAKTANRPALQEMLEYIREHSVDYVVVHKVDRLARNREDDVEIMKQLTAANVALISATESIDQSPSGALLHGIMSSIAEFYSRNLAHEVTKGMTQKVQKGGTPGRAPLGYLNVREFDSDGRESRTVRPDADRAPLITWAFHRYTEPSISLSQLALELTQRGLTTRRTPQVPSRALTDTDLHKILTNSYYLGLVSFSGATYAGKHEPLIDQETWDKVQDALQSRRSGERRRRHDHYLKSTVYCGNCHNRLIVQMTRSKSGEIYPYFYCSARQANRNDCTQKAVLIHVVEEKIVEEYKKSLRLNRIARADLERLFHDELVATRGDAERQRAQIKTDLERLEREQLRLLQAHYADAISLDLFKKEQDRIRAERTIAERDEARLTQDVADVEHAIGLTLDVSAECASAYGWAPDRVKRLFNQVFLARVLVHADETITVELDEPFATIASTTMQLATHEKSTTRKSGALTLTSFLEAEVGAVPAFFSGQGFSNDTLV

SEQ ID NO: 16977 - DNA, 50 bp, Rathayibacter tritici
  source 1..50: mol_type = genomic DNA
gggttttagtaacgacactttggtgcacctatctgcaactaatcaaaaaa

SEQ ID NO: 16978 - DNA, 40 bp, Rathayibacter tritici
  source 1..40: mol_type = genomic DNA
tgagaactcattctgtggtgcccctggagggactcgaacc

SEQ ID NO: 16979 - DNA, 50 bp, Rathayibacter tritici
  source 1..50: mol_type = genomic DNA
gggttttagtaacgacactttggttgacctatctgcaactaatcaaaaaa

SEQ ID NO: 16980 - DNA, 40 bp, Rathayibacter tritici
  source 1..40: mol_type = genomic DNA
tgagggctcactgtgttgttgccctggcaggtctcgaact

SEQ ID NO: 16981 - protein, 612 aa, Bacteroides ovatus
MRAAFLIRCSTKKQDYERQVNDLTRLAKKFGYTSSDNMIFGEHITGKDDASKRDRQSIQRLKDAAINKEFDVVLVSEVSRMSRDPMSGRLYVRQLINMDIPVYFRDIDTWTIDPVTGKKVRDAETIIGAAFDAAWKYIKSMKTQIASGRRDELDNNQMSIGQPFFGYKRYGGRDKGKKNSWVINDDAAKVVVDVFEEYVKDGATLKSTALAITAKYGEQFNKKFSIGTIEHILTFEPYCTGIKVVSLTDPDTEDVDEFEVEIPTIITRAMFDKATTKRATNRTARTPYPKQATYILSKLLKCPICEHSLTPQKRGGDKGDKYRLMNGKVAIRWSCMSGINNATDCSSRITISNEKLEAIIWGLIKQELIGFANLNDEDRVAKVEELTDKITNLEMNIANFTSHISNMDRLIERAYSAYMDAPDSVMDIAKDKYYKTLTKCENERAECKGKIEALSAEKLRLENMRTFFNQPTLPKDAIEKAESDPIKMRNLVMELVDKIYPYRITTYVSPATNRIMKNGIVLLEVYTINGIYNVLYDGNQRNNKVAYYISGVYATFQNGKNKLDAYDTGEYFVISNATLVTETEDVDLTVTFNELIKICMQNGWEIDYTYKM

SEQ ID NO: 16982 - DNA, 50 bp, Bacteroides ovatus; identical to SEQ ID NO: 2417
  source 1..50: mol_type = genomic DNA

SEQ ID NO: 16983 - DNA, 40 bp, Bacteroides ovatus; identical to SEQ ID NO: 5428
  source 1..40: mol_type = genomic DNA

SEQ ID NO: 16984 - DNA, 50 bp, Bacteroides ovatus
  source 1..50: mol_type = genomic DNA
tagttaaatagttttgagaatagttggctattcttaaaatacttgcacca

SEQ ID NO: 16985 - DNA, 40 bp, Bacteroides ovatus
  source 1..40: mol_type = genomic DNA
tcaattgaattcaggttcctgttctaaagaaagttttcca

SEQ ID NO: 16986 - protein, 612 aa, Bacteroides ovatus
MRAAFLIRCSTKKQDYERQVNDLTRLAKKFGYTSSDNMIFGEHITGKDDASKRDRQSIQRLKDAAINKEFDVVLVSEVSRMSRDPMSGRLYVRQLINMDIPVYFRDIDTWTIDPVTGKKVRDAETIIGAAFDAAWKYIKSMKTQIASGRRDELDNNQMSIGQPFFGYKRYGGRDKGKKNSWVINDDAAKVVVDVFEEYVKDGATLKSTALAITAKYGEQFNKKFSIGTIEHILTFEPYCTGIKVVSLTDPDTEDVDEFEVEIPTIITRAMFDKATTKRATNRTARTPYPKQATYILSKLLKCPICEHSLTPQKRGGDKGDKYRLMNGKVAIRWSCMSGINNATDCSSRITISNEKLEAIIWGLIKQELIGFANLNDEDRVAKVEELTDKITNLEMNIANFTSHISNMDRLIERAYSAYMDAPDSVMDIAKDKYYKTLTKCENERAECKGKIEALSAEKLRLENMRTFFNQPTLPKDAIEKAESDPIKMRNLVMELIDKIYPYRITTYVSPATNRIMKNGIVLLEVYTINGIYNVLYDGNQRNNKVAYYISGVYATFQNGRNKFDAYDTGEYFVISNATLVTNTEDVDLLVTFNELIKICMQNGWEIDYTYKM

SEQ ID NO: 16987 - DNA, 50 bp, Bacteroides ovatus; identical to SEQ ID NO: 2417
  source 1..50: mol_type = genomic DNA

SEQ ID NO: 16988 - DNA, 40 bp, Bacteroides ovatus; identical to SEQ ID NO: 5428
  source 1..40: mol_type = genomic DNA

SEQ ID NO: 16989 - DNA, 50 bp, Bacteroides ovatus; identical to SEQ ID NO: 16984
  source 1..50: mol_type = genomic DNA

SEQ ID NO: 16990 - DNA, 40 bp, Bacteroides ovatus; identical to SEQ ID NO: 16985
  source 1..40: mol_type = genomic DNA

SEQ ID NO: 16991 - protein, 503 aa, Enterocloster bolteae; identical to SEQ ID NO: 341

SEQ ID NO: 16992 - DNA, 50 bp, Enterocloster bolteae; identical to SEQ ID NO: 12
  source 1..50: mol_type = genomic DNA

SEQ ID NO: 16993 - DNA, 40 bp, Enterocloster bolteae
  source 1..40: mol_type = genomic DNA
cacagatgaaattccctggttgacgtgttataaataattt

SEQ ID NO: 16994 - DNA, 50 bp, Enterocloster bolteae; identical to SEQ ID NO: 2524
  source 1..50: mol_type = genomic DNA

SEQ ID NO: 16995 - DNA, 40 bp, Enterocloster bolteae
  source 1..40: mol_type = genomic DNA
tacaggtgaaattcccttgtggtcttgttaatattaattg

SEQ ID NO: 16996 - protein, 489 aa, Plantibacter flavus
MTSTRVAPVRAAIYARQSVAEPEGIRRQVDACLQLAAARDYEVVETYEDNNVSGYKSRGAGTAYDRLLTDARAGKFDVLIVRKLDRLGRSLSALEALTAAKVNTVTTDGALDLASPSGRLVANVLTSVSRAESEIKAERRIFANADRRERGVPTSGRVPYGYLWVPTADRTAESPSAYLIDPERADDVRRMYESLLSGMTLGSICRELNAAGKRTMPSKRNPDGVEFRPTTLRRMLLSPYYAALLPRRNPDGELYDLESITRESCVPGAWEPIVGEETWLAAKELLSHSGRRTNGGETGRKWLLSGLAVCGVCFDPIRAGGGDAGVHSYRCRSMAHFMRRGAPLDRFVESVIVARLSRPDAADLLLDRERPDADALRTERLAHQARLDSVVDLVADGTLSSDDARAAVRNLREQIATIDAKMTEAGRVDVLGDIIGQADVSATWEALSLDRKRAVLDVLMTVVVHSVGQGGRSQSMEAMAASTEIQWRD

SEQ ID NO: 16997 - DNA, 50 bp, Plantibacter flavus
  source 1..50: mol_type = genomic DNA
gtacgcccttttggcgccacagttgccactgtagcgcgtttcggcgtact

SEQ ID NO: 16998 - DNA, 40 bp, Plantibacter flavus
  source 1..40: mol_type = genomic DNA
tcccgcgaacccgacggccgccatggtcgccacggcgtac

SEQ ID NO: 16999 - DNA, 50 bp, Plantibacter flavus
  source 1..50: mol_type = genomic DNA
gtacgcccttttggcgccacagttagcactgtagcgcgtttcggcgtact

SEQ ID NO: 17000 - DNA, 40 bp, Plantibacter flavus
  source 1..40: mol_type = genomic DNA
ccccgcgaccccgaccgccagcatgatcgccgcgcagctc

SEQ ID NO: 17001 - protein, 478 aa, Mycolicibacterium fortuitum
MNTPRERVALYARISQDTTGQAIGVADQLEHARAFAAARGYLVVAEHADNDISAFRGAARPEYQRVLTLARERRIDRVIVYHLTRMTRNRMERAEFIDAFHACRVNVSEAQGGDYDLSTAAGRTWVDIQGALATWESEIKSERVTAAAARRARSGRPSGSLGYGWIKHGVGSSATWTEHPHEAAVVREIVDRLLAGETLRGVTESLNGRGEPAPNSERWGKTSVKKLAIRESNAAQRIHHRGQPDEERFEGCWPPIVDRTKHEKIVALLTQPARRTNATVTRPGARRHLLSWGIGECGVCGEMLRASTKRGRYGRPLDLYVCDGKGCVGRSEPAVDDLVKEVVIERLSQPDALDWLLGDDDEARRWSERVDELSRRLSEAADAFAEGAITTEQLRRITERVRPDLDEAERRQAECVVSLDLDALRPLAGPTARENWDDMEVSQRRAVLEALGIKVIVDRTRRGPGFDPESVRFAWARQ

SEQ ID NO: 17002 - DNA, 50 bp, Mycolicibacterium fortuitum
  source 1..50: mol_type = genomic DNA
tctgggcgtgttgtccttccaggaccgccgggaaacaccgtagggtctga

SEQ ID NO: 17003 - DNA, 40 bp, Mycolicibacterium fortuitum
  source 1..40: mol_type = genomic DNA
ctgccaggttttgcccacgccgccgggaaacaggcagtca

SEQ ID NO: 17004 - DNA, 50 bp, Mycolicibacterium fortuitum
  source 1..50: mol_type = genomic DNA
tctgggcgtgttgtccttccaggactgccgggaaacaccgtagggtctga

SEQ ID NO: 17005 - DNA, 40 bp, Mycolicibacterium fortuitum
  source 1..40: mol_type = genomic DNA
ctcccaggtgttgcccatgctgcggggccagaggctgtaa

SEQ ID NO: 17006 - protein, 491 aa, Mycobacterium asiaticum
MSVVQAENGVVRAGCYCRISSDPKDRREGVERQREDTIALCEVKGWTPVGYYVDNDRSASNGKDRPEWDRLLADVQAGKIDAIAAWDQDRGWRMMHELEQLRRFFTALGRRVLLATTGQGDIDLYSPTGVLAAQIKTAVSEHEIAMMKVRMRRAARQRAEQGIPKWTRAFGYLRDTHQPDPVTAPLVRQAYAAVLAGSSLREVARLFNEAGTYGLNGKPWTPSTVSLFLRKSRNAGLRAHNNEIVGKGTWPALVDESTWRAAQAVLDAPGRKPGRKSVRQHLLTGVMRCGKPGCAGYLSGQWVMQKTGGKPGRPKAGQKKEPHSGQVAHSITYACKQCRGCSVRAEHVEPLLIGLVAGRLAKPDAVDLLKAEVHDEAEAERLRLEKNTLYSELDKLAVERANGLLTGRQVQIATEVVQQQIDAIECKEQDTERLRVFDGIPLGTLEAAAAVKQLSPDRLRAVMDVLMTVTVAPTGKGGHVFNPERVQVNWR

SEQ ID NO: 17007 - DNA, 50 bp, Mycobacterium asiaticum
  source 1..50: mol_type = genomic DNA
gagtgttcttcggccaatcgatgccaataccgacagcttgaagtacgctt

SEQ ID NO: 17008 - DNA, 40 bp, Mycobacterium asiaticum
  source 1..40: mol_type = genomic DNA
caaatgcctgtgccgccaacaccatttactcaagaccttc

SEQ ID NO: 17009 - DNA, 50 bp, Mycobacterium asiaticum
  source 1..50: mol_type = genomic DNA
gagtgttcttcggccaatcgatgcatataccgacagcttgaagtacgctt

SEQ ID NO: 17010 - DNA, 40 bp, Mycobacterium asiaticum
  source 1..40: mol_type = genomic DNA
aaagagcctgtgccaccagatgcatttgctcagggccttc

SEQ ID NO: 17011 - protein, 461 aa, Mycolicibacterium fortuitum
METGRRLAGIYTRISADVQGDALGVQRQEADCRKLCEQRGWDVVEVFCDNDRSAYSRKPRPRYNDMLEAIRDRKINAVVAWHPDRLHRQLRELVGFIDVADEFGVHVETVTAGKYDLSTASGRMQAKMLGTVAEFESEHKSERIRRKLEQNAANGIHHGGSRPFGWLEDRVTLDPSEAEVVREACQLILAGETVKGIARVLNERGYRTATGRPWRDVTVRTTLLRPRNAGLRLHHGEVVGGGQWEPIIDAADFHQIEAILKNPARRTNPGRNGRVHLLSVLALCGVCDSPVVVAQGKKYKGVSKPIYRCRAAHVIRDQASVDHQVTQLVLARLAMPDAAGLLAEPDRADRAHAAAVKVQELQDRLTDAAEAYAAGTISLGQLTTINGAVRPKLEEAQLDAASPDRAKVLGDLVAAEDPATVWVTMSQEQRRAVIDLLVEVRIMRTTSGPHYKPEAVKIRWK

SEQ ID NO: 17012 - DNA, 50 bp, Mycolicibacterium fortuitum
  source 1..50: mol_type = genomic DNA
tcctgctttgttcgcaggctcacacatctgagggtatcatcaaagcatgg

SEQ ID NO: 17013 - DNA, 40 bp, Mycolicibacterium fortuitum
  source 1..40: mol_type = genomic DNA
ccgcactgctggtctgacacatctgaccgcggtgtcgggc

SEQ ID NO: 17014 - DNA, 50 bp, Mycolicibacterium fortuitum
  source 1..50: mol_type = genomic DNA
tcctgctttgttcgcaggctcacatctctgagggtatcatcaaagcatgg

SEQ ID NO: 17015 - DNA, 40 bp, Mycolicibacterium fortuitum
  source 1..40: mol_type = genomic DNA
ccgcactgctggcatcacatccctgaccgcgctggtggca

SEQ ID NO: 17016 - protein, 613 aa, Streptomyces coelicolor
MTQGVVTGVDTYAGAYDRQSRERENSSAASPATQRSANEDKAADLQREVERDGGRFRFVGHFSEAPGTSAFGTAERPEFERILNECRAGRLNMIIVYDVSRFSRLKVMDAIPIVSELLALGVTIVSTQEGVFRQGNVMDLIHLIMRLDASHKESSLKSAKILDTKNLQRELGGYVGGKAPYGFELVSETKEITRNGRMVNVVINKLAHSTTPLTGPFEFEPDVIRWWWREIKTHKHLPFKPGSQAAIHPGSITGLCKRMDADAVPTRGETIGKKTASSAWDPATVMRILRDPRIAGFAAEVIYKKKPDGTPTTKIEGYRIQRDPITLRPVELDCGPIIEPAEWYELQAWLDGRGRGKGLSRGQAILSAMDKLYCECGAVMTSKRGEESIKDSYRCRRRKVVDPSAPGQHEGTCNVSMAALDKFVAERIFNKIRHAEGDEETLALLWEAARRFGKLTEAPEKSGERANLVAERADALNALEELYEDRAAGAYDGPVGGKHFRKQQAALTLRQQGAEERLAELEAAEAPKLPLDQWFPEDADADPTGPKSWWGRASVDDKRVFVGLFVDKIVVTKSTTGRGQGTPIEKRASITWAKPPTDDDEDDAQDGTEDVAA

SEQ ID NO: 17017 - DNA, 50 bp, Streptomyces coelicolor; identical to SEQ ID NO: 3852
  source 1..50: mol_type = genomic DNA

SEQ ID NO: 17018 - DNA, 40 bp, Streptomyces coelicolor
  source 1..40: mol_type = genomic DNA
cgggtgccagggcgtgcccttgggctccccgggcgcgtac

SEQ ID NO: 17019 - DNA, 50 bp, Streptomyces coelicolor; identical to SEQ ID NO: 13519
  source 1..50: mol_type = genomic DNA

SEQ ID NO: 17020 - DNA, 40 bp, Streptomyces coelicolor
  source 1..40: mol_type = genomic DNA
ctggtgccagtgcgtggcctggagctccgcgggcaccacc

SEQ ID NO: 17021 - protein, 613 aa, Streptomyces coelicolor
MTQGVVTGVDTYAGAYDRQSRERENSSAASPATQRSANEDKAADLQREVERDGGRFRFVGHFSEAPGTSAFGTAERPEFERILNECRAGRLNMIIVYDVSRFSRLKVMDAIPIVSELLALGVTIVSTQEGVFRQGNVMDLIHLIMRLDASHKESSLKSAKILDTKNLQRELGGYVGGKAPYGFELVSETKEITRNGRMVNVVINKLAHSTTPLTGPFEFEPDVIRWWWREIKTHKHLPFKPGSQAAIHPGSITGLCKRMDADAVPTRGETIGKKTASSAWDPATVMRILRAPRIAGFAAEVIYKKKPDGTPTTKIEGYRIQRDPITLRPVELDCGPIIEPAEWYELQAWLDGRGRGKGLSRGQAILSAMDKLYCECGAVMTSKRGEESIKDSYCCRRRKVVDPSAPGQHEGTCNVSMAALDKFVAERIFNKIRHAEGDEETLALLWEAARRFGKLTEAPEKSGERANLVAERADALNALEELYEDRAAGAYDGPVGRKHFRKQQAALTLRQQGAEERLAELEAAEAPKLPLDQWFPEDADADPTGPKSWWGRASVDDKRVFVGLFVDKIVVTKSTTGRGQGTPIEKRASITWAKPPTDDDEDDAQDGTEDVAA

SEQ ID NO: 17022 - DNA, 50 bp, Streptomyces coelicolor; identical to SEQ ID NO: 3852
  source 1..50: mol_type = genomic DNA

SEQ ID NO: 17023 - DNA, 40 bp, Streptomyces coelicolor; identical to SEQ ID NO: 17018
  source 1..40: mol_type = genomic DNA

SEQ ID NO: 17024 - DNA, 50 bp, Streptomyces coelicolor; identical to SEQ ID NO: 13519
  source 1..50: mol_type = genomic DNA

SEQ ID NO: 17025 - DNA, 40 bp, Streptomyces coelicolor; identical to SEQ ID NO: 17020
  source 1..40: mol_type = genomic DNA

SEQ ID NO: 17026 - protein, 613 aa, Streptomyces lividans; identical to SEQ ID NO: 3851

SEQ ID NO: 17027 - DNA, 50 bp, Streptomyces lividans; identical to SEQ ID NO: 3852
  source 1..50: mol_type = genomic DNA

SEQ ID NO: 17028 - DNA, 40 bp, Streptomyces lividans; identical to SEQ ID NO: 17018
  source 1..40: mol_type = genomic DNA

SEQ ID NO: 17029 - DNA, 50 bp, Streptomyces lividans; identical to SEQ ID NO: 13519
  source 1..50: mol_type = genomic DNA

SEQ ID NO: 17030 - DNA, 40 bp, Streptomyces lividans; identical to SEQ ID NO: 17020
  source 1..40: mol_type = genomic DNA

SEQ ID NO: 17031 - protein, 547 aa, Faecalibacterium prausnitzii
MEPQAPIRQKIIREIKPSPVLQARTRNHKLRVAAYCRVSTEQEEQQTSIENQITYYDDLIRSNPEWEYAGVFSDDGISGTRDENRPGFMEMIKQCKKGKIDMILAKSLSRFSRNTLQCISYIRMLKDRGIIIRFEKEGLDTSRVTSEIFFTWTSAFAQGESESLSNNVKWGKRKGYSQGNFAFPYKNMLGYKKGEDGEPEIVPEEAEHIKMIFNLFLLGRSLRQIKEALERRNILTPRGNPEWGLSSIEHILRNEKYMGDVLLQKSYTVDFLTKKKKKNNGELTQYYITDNHPAIISREDFLNVQLELTRRNSKKKVSQKKTKSALGKYCSKYALSERLVCGECGSMYRRTTWVKKGKKKVVWRCISRLEFGTKYCQHSPTISEEALHQAILQCIQKVVEDKEDILKNLRDVQENIILFSGNQITPQSLEKQIDKLQQEMSALVKIIAQGGDSEFYAAKLRQLSEQKMGLTSQLQEIQKKKMADQAQEYQYQQALLYINNEENLNLTEFNDDFIRRIIEQITVLSATQIRIRFVGGYEQDANLPLKK

SEQ ID NO: 17032 - DNA, 50 bp, Faecalibacterium prausnitzii
  source 1..50: mol_type = genomic DNA
gggatctaaagtgtccaccccttccatctggggtggacactttagatgtc

SEQ ID NO: 17033 - DNA, 40 bp, Faecalibacterium prausnitzii
  source 1..40: mol_type = genomic DNA
cgaatccaccctctcccaccagattatgtgcctgatttta

SEQ ID NO: 17034 - DNA, 50 bp, Faecalibacterium prausnitzii
  source 1..50: mol_type = genomic DNA
gggatctaaagtgtccaccccttccctctggggtggacactttagatgtc

SEQ ID NO: 17035 - DNA, 40 bp, Faecalibacterium prausnitzii
  source 1..40: mol_type = genomic DNA
ccaatccaccctcacctacccaattatttttctgacatta

SEQ ID NO: 17036 - protein, 503 aa, Clostridioides difficile; identical to SEQ ID NO: 11

SEQ ID NO: 17037 - DNA, 50 bp, Clostridioides difficile; identical to SEQ ID NO: 12
  source 1..50: mol_type = genomic DNA

SEQ ID NO: 17038 - DNA, 40 bp, Clostridioides difficile
  source 1..40: mol_type = genomic DNA
gtgtgatttagttcagggatttgtattttataaaccaatg

SEQ ID NO: 17039 - DNA, 50 bp, Clostridioides difficile; identical to SEQ ID NO: 12
  source 1..50: mol_type = genomic DNA

SEQ ID NO: 17040 - DNA, 40 bp, Clostridioides difficile
  source 1..40: mol_type = genomic DNA
gtgtgattaagttcacaaatttaaattttaaaaatcaata

SEQ ID NO: 17041 - protein, 466 aa, Enterococcus gallinarum
MKKAGLYIRVSTPQQEKEGYSIEAQTEKLNAYALAKDYKVFKTYTDAAFSGAKLERPALNEMIEDIENNKIDVVIVYKLDRLSRSQKNTMYLIEDVFLKNNVDFISMQESFDTTTSFGRAMIGILSVFAQLERDNITERMSMGKLERVKRGYYMGGGNVPFGYEYNQITGELEIQETQALAVKRMFELFLSGQAINKIVSILKKEFPVFEDSFMDSTVRRRLQSHYYCGKQKYQNKIYDAKHEPIVSTKDFNKVQRLISNRPHSNAFNHSYLFSGLIICHKCGKPYNGYESVRTANGKQYKHKYYRCSCRTYKHKQKYGWTCSGKSYRCDFLDAAIMSEIKKRAENSKFALKEDNNEVDNKPIIREIARLNAQQSKLLDLYLSDKISTNILDNKTDELKEKIEKLELQLNQTVSKKDKEEFEKSLEELVDKFEELDFSTRRSLIENIIEKIEVVDNEVNIYFYVTI

SEQ ID NO: 17042 - DNA, 50 bp, Enterococcus gallinarum
  source 1..50: mol_type = genomic DNA
tacgtgaccatttaagcaatcacttgcatatttgcttatttagacacaca

SEQ ID NO: 17043 - DNA, 40 bp, Enterococcus gallinarum; identical to SEQ ID NO: 4108
  source 1..40: mol_type = genomic DNA

SEQ ID NO: 17044 - DNA, 50 bp, Enterococcus gallinarum; identical to SEQ ID NO: 17042
  source 1..50: mol_type = genomic DNA

SEQ ID NO: 17045 - DNA, 40 bp, Enterococcus gallinarum
  source 1..40: mol_type = genomic DNA
tttctggcctggggtcacctgcttatttgctgggtgacct

SEQ ID NO: 17046 - protein, 466 aa, Enterococcus gallinarum
MKKAGLYIRVSTPQQEKEGYSIEAQTEKLNAYAVAKDYKVFKTYTDAAFSGAKLERPALNEMIEDIENNKIDVVIVYKLDRLSRSQKNTMYLIEDVFLKNNVDFISMQESFDTTTSFGRAMIGILSVFAQLERDNITERMSMGKLERVKRGYYMGGGNVPFGYEYNQITGELEIQETQALAVKRMFELFLSGQAINKIVSVLKKEFPVFEDSFMDSTVRRRLQSHYYCGKQKYQNKVYDAKHEPIVSTKDFNKVQRLISNRPHSNAFNHSYLFSGLIICHKCGKPYNGYESVRTANGKKYKHKYYRCSCRTYKHKQKYGWTCSGKSYRCDFLDAAIMSEIKKRAESSKFALKEDNNEIDNKPIIREIARLNAQQSKLLDLYLSDKISTNILDNKTDELKEKIEKLESQLNQTVSKKDKEEFEKSLEELVDRFEEMDFSTRRSLIENIIEKIEVVDDEITIYFYVTI

SEQ ID NO: 17047 - DNA, 50 bp, Enterococcus gallinarum
  source 1..50: mol_type = genomic DNA
tatgtgaccatttaagcaatcacctgcatatttggttatttggacacata

SEQ ID NO: 17048 - DNA, 40 bp, Enterococcus gallinarum; identical to SEQ ID NO: 4108
  source 1..40: mol_type = genomic DNA

SEQ ID NO: 17049 - DNA, 50 bp, Enterococcus gallinarum; identical to SEQ ID NO: 17047
  source 1..50: mol_type = genomic DNA

SEQ ID NO: 17050 - DNA, 40 bp, Enterococcus gallinarum; identical to SEQ ID NO: 17045
  source 1..40: mol_type = genomic DNA

SEQ ID NO: 17051 - protein, 466 aa, Enterococcus gallinarum
MKKAGLYIRVSTPQQEKEGYSIEAQTEKLNAYALAKDYTVFKTYTDAAFSGAKLERPALNEMIEDIESDKIDVVIVYKLDRLSRSQKNTMYLIEDVFLKNNVDFISMQESFDTTTSFGRAMIGILSVFAQLERDNITERMSMGKLERVKRGYYMGGGNVPFGYEYNQITGELEIQETQALAVKRMFELFLSGQAINKIVSILKKEFPVFEDSFMDSTVRRRLQSHYYCGKQKYQNKIYDAKHEPIVSTKDFNKAQRLISNRPHSNAFNHSYLFSGLIICHKCGKPYNGYESVRTANGKKYKHKYYRCSCRTYKHKQKYGWTCSGKSYRCDFLDAAIMSEIKKRAESSKFALKENSNEIDNKPIIREIARLNAQQSKLLDLYLSDKISTNILDNKTDELKEKIEKLESQLNQTVSKKDKEEFEKSLEELVDRFEEMDFSTRRSLIENIIEKIEVVDDEITIYFYVTI

SEQ ID NO: 17052 - DNA, 50 bp, Enterococcus gallinarum
  source 1..50: mol_type = genomic DNA
tatgtgaccatttaagcaatcacttgcatgtttggttatttggacacgta

SEQ ID NO: 17053 - DNA, 40 bp, Enterococcus gallinarum; identical to SEQ ID NO: 4108
  source 1..40: mol_type = genomic DNA

SEQ ID NO: 17054 - DNA, 50 bp, Enterococcus gallinarum; identical to SEQ ID NO: 17052
  source 1..50: mol_type = genomic DNA

SEQ ID NO: 17055 - DNA, 40 bp, Enterococcus gallinarum; identical to SEQ ID NO: 17045
  source 1..40: mol_type = genomic DNA

SEQ ID NO: 17056 - protein, 545 aa, Oceanicaulis alexandrii
MSTPQVKRCAIYTRKSSEEGLDQDFNSLQAQREACEAFVASQRHEGWKLLPNQYDDGGISGGTLNRPGLERLLTDIEAGRIDLVVVYKVDRLTRSLADFAKLIDRLEAAGASFVSVTQAFNTSTSMGRLTLNVLLSFAQFEREVTAERIRDKLAQSKAKGLWMGGFVPLGFKPDGRSLKIVPKEAETVQRLFELYDQHACLRLVEKAADGEGLRTKMRESENERMRGGKPFSRGRIQALLRNPIYTGRIRHKDKVYPGKHEAIISDALFYRVQEKLNAASSRPSRRKSMAVTSLLVGKVYDETGDRLTPSHTTRGSRRFRYYVSSRLVKNSRKDGQEGLRISAQKLETAVADATTRFLTKNAQQLAAQNSQTIEAIETEMNNLQQLINTSEAETLAAVTKVTVRNGALEVTVAIPRSIDKTATCGVQQVIFETPFVIHRRGAEARLVLADEKPKPDALMRKTLGKALAWLNDLKSGVSITELAKREQVSQRYLRSRLQMAFLSPTIMSAILEGRQPAHLTTETFVRTDIPLDWAEQARAFGFDSV

SEQ ID NO: 17057 - DNA, 50 bp, Oceanicaulis alexandrii
  source 1..50: mol_type = genomic DNA
tgatgtcgctggaaatcctggcggtgctgtcagactaacgcggaccagtc

SEQ ID NO: 17058 - DNA, 40 bp, Oceanicaulis alexandrii
  source 1..40: mol_type = genomic DNA
catgaaaaaggaatggcggtgagggtgggattcgaaccca

SEQ ID NO: 17059 - DNA, 50 bp, Oceanicaulis alexandrii
  source 1..50: mol_type = genomic DNA
tgatgtcgctggaaatcctggcggcactgtcagactaacgcggaccagtc

SEQ ID NO: 17060 - DNA, 40 bp, Oceanicaulis alexandrii
  source 1..40: mol_type = genomic DNA
catgatagaaaaatggtgacaaggatgggactcaaaccca

SEQ ID NO: 17061 - protein, 560 aa, Hungatella hathewayi; identical to SEQ ID NO: 14351

SEQ ID NO: 17062 - DNA, 50 bp, Hungatella hathewayi; identical to SEQ ID NO: 3677
  source 1..50: mol_type = genomic DNA

SEQ ID NO: 17063 - DNA, 40 bp, Hungatella hathewayi
  source 1..40: mol_type = genomic DNA
gcgaggcccctgaggtccggttgggcccatggcgccgcga

SEQ ID NO: 17064 - DNA, 50 bp, Hungatella hathewayi
  source 1..50: mol_type = genomic DNA
acctttcctaaataaagcgccccgagcggggcgatgttaaaaggaaagtg

SEQ ID NO: 17065 - DNA, 40 bp, Hungatella hathewayi
  source 1..40: mol_type = genomic DNA
gagaggcccctgggggccgagtgggcctgttgcgcctcct

SEQ ID NO: 17066 - protein, 515 aa, Vibrio parahaemolyticus
MTKAYSYIRFSTKGQIEGRSLQRQLETARKYAEENGLELQSLSFQDLGVSGFKGRNSEQGALSQFIEAVKEGTIPEGSWLLLESFDRMSRQPVEKSMRLLMELVELGIIVVTLMDKQVYRRGQLDMTKLIISLVIMSRAHEESAAKSKRLADVWHAKQAVAHLKPLGTHLPAWLEYNEDKTKIQINYEKAVVVRYIFELSANGYGRSALIRKLNSQGIAPIGSRAKRWHLSYVTKLLNNTAVLGEYIPHVTDKLGQRVPTGEVIENYYPPIIEKDLWLRAKAAAQSRKIRGTGAIRRGHTRNILSGMVSCECGSSMQFVNKGSSDKGGYYLVCSTARHGAGCQYIGHRYYSVQWVVLIALQKLLHTFANKADNHEKEMQLEGELVELDRKLNNLINDLEENGSSKYISAAIRKTEQRMDIVKNELLMLQSSKAVENDEVDLQEITLRLNENFERLRLHQYLKRHITNIVVYKNKERLEINLKTGEDITLTFIPSENLWQSNTGVSFSVTFDTRWG

SEQ ID NO: 17067 - DNA, 50 bp, Vibrio parahaemolyticus
  source 1..50: mol_type = genomic DNA
ataggtcttttaggttccaaaagtaggaatcttagatataatagacctac

SEQ ID NO: 17068 - DNA, 40 bp, Vibrio parahaemolyticus
  source 1..40: mol_type = genomic DNA
accaggagggccaaggaaaagtaggttgtggtttccagcc

SEQ ID NO: 17069 - DNA, 50 bp, Vibrio parahaemolyticus; identical to SEQ ID NO: 17067
  source 1..50: mol_type = genomic DNA

SEQ ID NO: 17070 - DNA, 40 bp, Vibrio parahaemolyticus; identical to SEQ ID NO: 3260
  source 1..40: mol_type = genomic DNA

SEQ ID NO: 17071 - protein, 558 aa, Clostridioides difficile
MLQQSNSTITSIYPMGNQTEELTALYCRLSQDDKQEGDSNSIINQKKILKRYAIEHGYQPYVFFVDDGFSGTNFNRPDFQRMIAEVEAGRIKRVIVKDMSRLGRDYLQVGMYTEIMFPNMDVHFIAVNDGVDSHVGDNEFTPFRNIINEWYAKDTSKKIRAVKRSKGMAGEHIGSHAPYGYMKNPDNKKEWLIDEEAAEVVREIFRLCVNGYGPTRIANILTERKILCPTYYALEHGEKPRTVLPPDKYLWSATVVSHILERMDYLGHTVNFKTHVKSYKNRKKIDNSPEQWKIFENTHEAIIDKETFEIVQKIRSGKRRPTKMGDMPMFSGLLYCADCGSKMTFHRQMAQSAEKHNFVCSNYRHNSKSCTMHYIRNVVVEQIVLENLKEVIRYVSDYEDEFVQMVMDTDMRQRNKELSQKKKRLTEIHSRIQELDKIFQRIYEDNISGKLSDERFMKLSKGYEEEQHTLQEEQTFLEKELQKEEKQSVDVKQFLSVVRKYTNLTELTPEIVHEFIDKIIVHAPDKSSGKRLQEIEIIYNHIGVFDHSKVILWKGKAV

SEQ ID NO: 17072 - DNA, 50 bp, Clostridioides difficile; identical to SEQ ID NO: 3207
  source 1..50: mol_type = genomic DNA

SEQ ID NO: 17073 - DNA, 40 bp, Clostridioides difficile
  source 1..40: mol_type = genomic DNA
ataccttgaaatgctggcattatttgatttattagcattc

SEQ ID NO: 17074 - DNA, 50 bp, Clostridioides difficile; identical to SEQ ID NO: 10169
  source 1..50: mol_type = genomic DNA

SEQ ID NO: 17075 - DNA, 40 bp, Clostridioides difficile
  source 1..40: mol_type = genomic DNA
ttaccttgaaatgatgtaaatatgtgattccttaccattt

SEQ ID NO: 17076 - protein, 507 aa, Clostridium perfringens
MIDKKIIVLHRVSSDSQDFESQNNAIEDYIRENNIVVDEYIKEEGISGYSNKLFEREAIKKIYDMALLDELDTLIVFNLDRIGRTTEVAEFLKKLTYCDVKVYSVTEGLLNGGEDTQDLINYIKSFSAQMESKKTSLRVRSGKEATNKKGLFSGGTVNFGYGVENQKMFVIEQEAEIVRLIFDLYIKEGKAGTVRILKEKGITKRGRPFSHHMVNDILKDTIYIGLKRYGHYILTDKDPTIKARKFSKESMKFQPYNESLRIISDDLFYKVQEKIQGNTIKKGNVTKLTNKTNVLFEGLLYHRCGDREIRKLHLDRKKDKYGNYIYSYRCSHCRRQFYKNVIKTYGCKKYNPVIEEHILNNLSLLSIEELEQKIIDNNKNGVILIQKSLNESEKELTKREKALSNARKELELIFLGESDMEKGVINTLIIKLTKDIEELRDNIKILNDRLEEAKSNFTIDSNLINKYKNFNFTYSKADSNYKKLLMQEVVEKIIIDGEELRIKFYID

SEQ ID NO: 17077 - DNA, 50 bp, Clostridium perfringens
  source 1..50: mol_type = genomic DNA
aagtgggtttatattctatttactgtagtatcttgaatagtaacccactt

SEQ ID NO: 17078 - DNA, 40 bp, Clostridium perfringens
  source 1..40: mol_type = genomic DNA
gtcaggaattccagactcagttgacactccagcccctcca

SEQ ID NO: 17079 - DNA, 50 bp, Clostridium perfringens
  source 1..50: mol_type = genomic DNA
aagtgggtttatattctatttactatagtatcttgaatagtaacccactt

SEQ ID NO: 17080 - DNA, 40 bp, Clostridium perfringens
  source 1..40: mol_type = genomic DNA
atcaggaatttcacacttaattaacactccttcccatccc

SEQ ID NO: 17081 - protein, 549 aa, Clostridioides difficile
MSKEKIKVYLYTRVSTSIQIDGYSLEAQKSRMKAFALYNDYEIVGEYEDAGKSGKSIEGRVQFTRMMEDIKSGKDGVSFVLVFKLSRFARNAADVLSTLQIMQDFGVNLICVEDGIDSSKDAGKLMISVLSAVAEIERENIRVQTMEGRIQKAKEGKWNGGFAPYGYQLIDGKLIINEEEAIAIRTIFDQYVNTSIGANGLSKYLENHGIRKIPRQNGKNPLFDAGLIRKILKNPVYNGKIAFGRRTLEKVHGTRNEYRQVEQDDYLVAEGIHEAIIPDELWQAAQVKLKAQAKKYEHVNKGKNMRTHLLSGIVKCPICGAGMFGNKSIKYKKDGTKYKDFYYYGCKHRLMNRGHKCTYNKQIREELLDDAVAEVIIKLVSNPKFASMIQEKINMKVDTSAIENEIDNYQNELRKSHSTKYKLIEEIDNLDVEDKHYKRRKNDLDDRLYRMYDKIEELESQLIEAKAKKETIEVEKLTGDNIYKVLIYFDKLYKVMNDVERRQLIEALISEIQIYEEKQPNGQWLKSITFKLPIIDEDLNISLENDEQV

SEQ ID NO: 17082 - DNA, 50 bp, Clostridioides difficile; identical to SEQ ID NO: 10392
  source 1..50: mol_type = genomic DNA

SEQ ID NO: 17083 - DNA, 40 bp, Clostridioides difficile
  source 1..40: mol_type = genomic DNA
aggcataacagttcacgttgaaccatgtactaattgccaa

SEQ ID NO: 17084 - DNA, 50 bp, Clostridioides difficile
  source 1..50: mol_type = genomic DNA
agtttggaaaatgatgagcaagttcagacggtagcgttattgtccaaact

SEQ ID NO: 17085 - DNA, 40 bp, Clostridioides difficile
  source 1..40: mol_type = genomic DNA
tggcaaaatagttcaagatcaactatgtaataattgaaaa

SEQ ID NO: 17086 - protein, 547 aa, Clostridioides difficile; identical to SEQ ID NO: 2666

SEQ ID NO: 17087 - DNA, 50 bp, Clostridioides difficile; identical to SEQ ID NO: 2667
  source 1..50: mol_type = genomic DNA

SEQ ID NO: 17088 - DNA, 40 bp, Clostridioides difficile; identical to SEQ ID NO: 17083
  source 1..40: mol_type = genomic DNA

SEQ ID NO: 17089 - DNA, 50 bp, Clostridioides difficile
  source 1..50: mol_type = genomic DNA
ttgtgggaaagaggtaataccgttcagacggtagtactgctttcccacaa

SEQ ID NO: 17090 - DNA, 40 bp, Clostridioides difficile; identical to SEQ ID NO: 17085
  source 1..40: mol_type = genomic DNA

SEQ ID NO: 17091 - protein, 447 aa, Brevibacillus brevis
MKVAIYLRVSTQEQVDNYSIEAQRERLEAFCKAKGWTVYDVYVDAGFTGSNTDRPGLQRLLMELDKVDVVAVYKLDRLSRSQRDTLTLIEDHFLKNKVDFVSLTEALDTSTPFGKAMIGILAVFAQLERETIAERMRLGHIKRAEEGLRGMGGDYDPAGYKRQDGRLVLVPEEAQHIQEAFNLYEQYLSITKVQKRLKELNYPVWRFRRYRDILSNKLYCGYVQFADKHYKGQHESIITEEQFDRVQILLSRHKGRNAFKAKEALLTGLAVCGECGESYVSYHCRAKGKHYRYYTCRARRFPSEYPEKCHNKNWRSEAIEKFIQDALYTIADEKETSEREFVAIDYGTQLKKIDQKLERLVDLYADGSIEKSVLDKQVTKLNNEKRDIAEQQAAQTERAARSVNRKQLQDYAIVLESAAFPDRQAIVQKLIRRLAIHKDRLEIEWNF

SEQ ID NO: 17092 - DNA, 50 bp, Brevibacillus brevis
  source 1..50: mol_type = genomic DNA
ttttagtattcataacgggctattcaaacaaccaatcatgaatactaaaa

SEQ ID NO: 17093 - DNA, 40 bp, Brevibacillus brevis
  source 1..40: mol_type = genomic DNA
gcctcaccttgtagccattcacgctgccaagctgcaaaat

SEQ ID NO: 17094 - DNA, 50 bp, Brevibacillus brevis
  source 1..50: mol_type = genomic DNA
ttttagtattcataacgggctattgaaacaaccaatcatgaatactaaaa

SEQ ID NO: 17095 - DNA, 40 bp, Brevibacillus brevis
  source 1..40: mol_type = genomic DNA
ccctcaccctgcagcctttgaccctggcaagctgctggat

SEQ ID NO: 17096 - protein, 505 aa, Paenibacillus riograndensis
MPSTNKLIRAVAYPRYSSDNQREESIVAQMRAIEAYCQQKGYVLVNAYPDEEKTATTDRRPNFQRMIEDSNKKLFDVVIVHKLDRFARNRYDSAHYKRVLKRNGVRVESVLEHLDNSPESVILESVLEGMAEYYSLNLSREVRKGLRENAEQGTHTGGRPPYGLKVNPVTRMLEIDEQTYKAVQIYFDGIEADLSNDQIAAILNEKGYRTLNDRSFTSSSFATWGHNRKYKGDYTYDVSAPKDEDGKRNTNNKKPQEEQVLHEGRIPAIISSEQWDRVYRKLQDRKRKPGRMKAKVNYLLTGKIYCGACGALYSGNSYTNKKSSEGTVLTYYKCQDKCGNTSVRKDDIEAMVIQRLIEVCFSGEGIQEIIDKVQELYQKEKQQSVNDIEPIKRELAELEGKLKNWIEALGAGIKTVIENIKQAEQRKEALEYELDRAEVMQRVAVLDDTQIRSIIEMKKNLLLSGNEDEKKQVLQEYVDRVVIQPSSDINRFEAEITYRVFTNGA

SEQ ID NO: 17097 - DNA, 50 bp, Paenibacillus riograndensis
  source 1..50: mol_type = genomic DNA
tacagggttttcaccaatggagccgaagttacactgttgaaaaccctgca

SEQ ID NO: 17098 - DNA, 40 bp, Paenibacillus riograndensis
  source 1..40: mol_type = genomic DNA
ctttactccatatggagccgaggggagtcgaacccctgtc

SEQ ID NO: 17099 - DNA, 50 bp, Paenibacillus riograndensis
  source 1..50: mol_type = genomic DNA
tacagggttttcaccaatggagccacagttacactgttgaaaaccctgca

SEQ ID NO: 17100 - DNA, 40 bp, Paenibacillus riograndensis
  source 1..40: mol_type = genomic DNA
ctttattacaccgggagccactgggagtccaacccaggtc

SEQ ID NO: 17101 - protein, 509 aa, Escherichia coli
MRRAISYIRFSSERQLKGDSVRRQSKLVTDWLDKNPEFYLDSSLSFKDLGKSAFSGKHLKGGLGDFLTAIEKGLVKAGDTLLIESLDRLSRQDIDIASELLRRILRAGVDVVTLSDGEHYTRESLKDPLALIKSILIMQRAHEESLRKSERVQAAWNRKKELISEGIKVSRRCPAWLKLNDDRRTFTIIPDKVEVVKRAFDLRLQGLSFWAITRTLNDEGHLSLNQYTPKQKGWSDTAVKKLLRNRAVIGCFTPAGREEVQGYYPAIISESLFYRVQQLNTGQYGRASVSSNPLSVNLFRGIIKCSECGATIVLGGYALKRFGMYRCPNRSANRCSAKAISRKQTDATILYMLALCDRFETENTDIIDSLKLQREDLQRKISKMAELAIELDDMTIITEKLRDMKNALSKLNHDIEEETQRIKAITTGSLKDIDRTTKEGMVETQLLIKGVLKEIVIDAAKRRCKVTFHNGKVIDLSITENPSDNVTEAIQSLSEVTERGLIDVDEVII

SEQ ID NO: 17102 - DNA, 50 bp, Escherichia coli
  source 1..50: mol_type = genomic DNA
gtatttagggaacaaatatcagcataataggttcctaaacacatcatttt

SEQ ID NO: 17103 - DNA, 40 bp, Escherichia coli
  source 1..40: mol_type = genomic DNA
tccggtattgtcttcagtattacatttttattttcggcca

SEQ ID NO: 17104 - DNA, 50 bp, Escherichia coli
  source 1..50: mol_type = genomic DNA
gtatttagggaacaaatatcagcaatataggttcctaaacacatcatttt

SEQ ID NO: 17105 - DNA, 40 bp, Escherichia coli
  source 1..40: mol_type = genomic DNA
tgctgttttgtcttcattaattctgtttcattttgggcca

SEQ ID NO: 17106 - protein, 571 aa, Peptostreptococcus anaerobius; identical to SEQ ID NO: 12626

SEQ ID NO: 17107 - DNA, 50 bp, Peptostreptococcus anaerobius
  source 1..50: mol_type = genomic DNA
tagttgaggcaacatacggacatccaaatgtcaggcagaaatacgatttt

SEQ ID NO: 17108 - DNA, 40 bp, Peptostreptococcus anaerobius
  source 1..40: mol_type = genomic DNA
tgctcattcatttgacatccgaatgtttgcatgataaaag

SEQ ID NO: 17109 - DNA, 50 bp, Peptostreptococcus anaerobius
  source 1..50: mol_type = genomic DNA
tagttgaggcaacatacggacatcgcaatgtcaggcagaaatacgatttt

SEQ ID NO: 17110 - DNA, 40 bp, Peptostreptococcus anaerobius
  source 1..40: mol_type = genomic DNA
tgctgattcatttgaaatggcaatatcaacatgataacat

SEQ ID NO: 17111 - protein, 586 aa, Clostridium symbiosum
MTGFTFQSLKPQESLSNELRSVIRDNVLQFYAKGLSTEAEEEGLTALYERLSQEDKLDGESNSIANQKKILERYCKDHGITAYRHYDEDDGYSGTNFNRPGFQRMLADIKAGRIKRVIVKDMSRFGRDYLQVGMYTDVVFPEFGVHFIAVNDGVDSTRGESEFTAIRNVFNEMYARDTSKKIRATWQSKGKSGEHLTTIPPYGYMKSPEDKKKWIVDEEAAAVVQKIFSLCASGKGPTQIAKWLKQQQILNPTAYCHAKGLPTSNKPTADPYKWTNETVSRILERVDYLGHTVNFKTTKKSYKSKKKIWNDPENWVIFENTQPPIIEESVFLIVQNIRKARRRPTKMGEMGMFSGLLYCAECGGKMYQCRATNFAENQKYFICSTYRKGKDLCTTHSIKNVVLHEIVLRNLREAISYVSEHEAEFIQDAAESDMRDRDAEFVRKRETLAKADTRIAELDRIISRLYEDNVIGKLSDERFIKMSHDYELEQSNLKSMADVLRKDLKQQEQQKTNVKAFIAAVKKYTDLQELDAAVLRAFIDRIEVSHVDKKSRTREITIVYNFIGAFDFTRAIENARNTSKKEQRTA

SEQ ID NO: 17112 - DNA, 50 bp, Clostridium symbiosum
  source 1..50: mol_type = genomic DNA
atgttttcctaagtcaccgccccgtcaagagcgttgacataggaaaacaa

SEQ ID NO: 17113 - DNA, 40 bp, Clostridium symbiosum
  source 1..40: mol_type = genomic DNA
ttttaaaagacagcggcattcagggggtgggacttttcct

SEQ ID NO: 17114 - DNA, 50 bp, Clostridium symbiosum
  source 1..50: mol_type = genomic DNA
atgttttcctaagtcaccgccccgataagagcgttgacataggaaaacaa

SEQ ID NO: 17115 - DNA, 40 bp, Clostridium symbiosum
  source 1..40: mol_type = genomic DNA
ttttaaaagacagcaccatatagggattgggtttatttat

SEQ ID NO: 17116 - protein, 528 aa, Selenomonas ruminantium
MARKITTIPATINKFTAAPIASNVKRKVAGYARVSTDTDDQISSYAAQVDYYTKYIKERKDWDFVGIYTDEGVTGTSTKKREGFTRMIKDALAGKIQLIITKSVSRFARNTVDCLTTIRKLKAAGVECYFEKEGIWTLDSAGELLITVLSSISQEEARSISENTTWGQRKSFADGKARVPYKRFLGYDRGEDGNLVINPEQAKVVKLIYKLFLTGLSYSAIAKKLMEKGIKSPAGKDRWYSNTVQSILTSEKMKGDALLQKKFTVDFLTKKVKKNEGEVPQYYVTGNHEAIIPPATFDLVQAEIERRKNGRGKGGYSGATIFSNRIKCGECGHWYGSKVWHSNDKYRRVVYQCNNKFAGAKKCSTPHLTEKEIKEAFVKVVNKLLKGKTDMLENIRLVQKQICDTSDLEAESQRLMDEMNALSDRVQKCISENARIAQDQTDYQKRYDELVNRYETTKANYDKTEKSIKARHAKAERLGAFVKALATQGASVTEFDEGLWGTIVDFMTVYSKEDISVTFKDGTEIHIG

SEQ ID NO: 17117 - DNA, 50 bp, Selenomonas ruminantium
  source 1..50: mol_type = genomic DNA
tgtatcaaatttattcaactaatggacaaaatcatagcttatttgataca

SEQ ID NO: 17118 - DNA, 40 bp, Selenomonas ruminantium
  source 1..40: mol_type = genomic DNA
tgtgattacaagattaatggagtgtatgttttttgagacg

SEQ ID NO: 17119 - DNA, 50 bp, Selenomonas ruminantium
  source 1..50: mol_type = genomic DNA
tgtatcaaatttattcaactaatgagcaaaatcatagcttatttgataca

SEQ ID NO: 17120 - DNA, 40 bp, Selenomonas ruminantium
  source 1..40: mol_type = genomic DNA
tgtaattacaaatttaatgagctacatgtttcttaagaca

SEQ ID NO: 17121 - protein, 513 aa, Celeribacter halophilus
MFDKQEKQKRTKCVIYCRVSSIKQTMDGAGLSSQERSCRDYAEQCGMRVEDVFTDVISGASSDRPGMNLLLDFLNRVDARDYVVIVDDVSRFARDVGAHTELRNKIMTAGAAIDSPKTKFGVDAESRFLEMLWALLASRDREKNAELSKTRTIARLKNGYWTFSAPVGYQYAKAPEGGKILLPKEPEASIIREALEGFASGRFQSQAEVKRFLDNNPEFPRPRGAKEVKFDRVTGLLTRLVYAGYLEKPEWGVPLTKAQHEPLISYETYLINQDRLNGKKVAPARKNIDRDFVLRGFLTCSECGYSLTSCWSKSGTGKRYPYYLCHHQGCSQRGKSIARDKLETEFDHVLKGLTPSAKTFELASLMFREAWDRYRSNSKEEASRHRTRLRQIDTEINSLIDRAARTQHDETARAYETRIAELRSETAVLQEKLANRDLPEGNFDKMFELSMAFLSNPWKIWEKGSYELKRTVLRLAFAAPLSVSREMGLRTAETTLPFKALRFLSTSESKMVH

SEQ ID NO: 17122 - DNA, 50 bp, Celeribacter halophilus
  source 1..50: mol_type = genomic DNA
ggttcttatctacatctgaaagtaaaatggtgcacctaaagggagaaaca

SEQ ID NO: 17123 - DNA, 40 bp, Celeribacter halophilus
  source 1..40: mol_type = genomic DNA
ggcatctgacaaagaagaaaaatggtgcacccgagaggat

SEQ ID NO: 17124 - DNA, 50 bp, Celeribacter halophilus
  source 1..50: mol_type = genomic DNA
ggttcttatctacatctgaaagtaggatggtgcacctaaagggagaaaca

SEQ ID NO: 17125 - DNA, 40 bp, Celeribacter halophilus
  source 1..40: mol_type = genomic DNA
ggcagctgaaaaaaaacaaggaagcagcacccaagagggt

SEQ ID NO: 17126 - protein, 470 aa, Blautia wexlerae; identical to SEQ ID NO: 3151

SEQ ID NO: 17127 - DNA, 50 bp, Blautia wexlerae; identical to SEQ ID NO: 3152
  source 1..50: mol_type = genomic DNA

SEQ ID NO: 17128 - DNA, 40 bp, Blautia wexlerae
  source 1..40: mol_type = genomic DNA
gttttcaacttatgctgttcccatgatcataggtgaaatc

SEQ ID NO: 17129 - DNA, 50 bp, Blautia wexlerae
  source 1..50: mol_type = genomic DNA
aaatttccactataatacattatcctaatagagtaagataaaggaaacga

SEQ ID NO: 17130 - DNA, 40 bp, Blautia wexlerae
  source 1..40: mol_type = genomic DNA
ggtttcccctcatgctgttctcatgatagtgagtgaattc

SEQ ID NO: 17131 - protein, 535 aa, Photobacterium phosphoreum
METHTNMNKLFSYQRFSTSTQLGGDSLRRQTEAARTYAEQHDLDYQDKTFSDLGVSGYKAKKRSGLEALLEAVKNGSIAGGDVIFLENLDRITRKGFQDTNELIKQIVSTGVVLHVQSDNLTLDKSSLNDFTSIMRVALMADLAWKESEKKSQRLLETKGQKRLRAIEHNEAQARKLPFWIDYNKATSKYQFNELVEIVRRIVSERLSGKSDRTIINGLNNDGIMTPRGSRWYENSIRNIYTHKAVYGAYQTMRTVRDDPTDHTTAKTVLDKLVLDHYPAIMSPEDFESIQPIAGVRSGNHGSHNHLRRITRCMRCGEPIGKKLSKHSNSNGNAYVQWFCMGIKNTGKLKCDQPTFKDLDQILFRITKHLKRVRSSSIDAEQKVIQQSIAQKEMALSEIQQAILGGVGITALIATSIELEKEIDNLRSEITIDYGDKDYDLLSESVGDAVAWNILAVKLIKSINVDYITNPKRIGMGKDHGSYRVVINQSNGYTISAVVSGVDKIDYKDLNIIMSDTHDIASISPNLHEWELDQG

SEQ ID NO: 17132 - DNA, 50 bp, Photobacterium phosphoreum
  source 1..50: mol_type = genomic DNA
tgtttgattacttataataacatagtaatattgttcgtactaatcaaagg

SEQ ID NO: 17133 - DNA, 40 bp, Photobacterium phosphoreum
  source 1..40: mol_type = genomic DNA
ctcagcgccaaattgcattgtaatgtttgcggtagatatc

SEQ ID NO: 17134 - DNA, 50 bp, Photobacterium phosphoreum
  source 1..50: mol_type = genomic DNA
tgtttgattacttataataacatatcaatattgttcgtactaatcaaagg

SEQ ID NO: 17135 - DNA, 40 bp, Photobacterium phosphoreum
  source 1..40: mol_type = genomic DNA
ctcaaccccagactgtatttcaattcttggggtagatatg

SEQ ID NO: 17136 - protein, 516 aa, Mediterraneibacter faecis
MSYCIYLRKSRKDLEAEQHGEGETLARHERALLSLAKKNNLIISNIYREVVSGETIAARPVMQQLLREVEQNLWDGVLVMEVERLARGDTIDQGVVQRAFQYSNTLIITPSKTYDPANEFDEEYFEFGLFMSRREYKTIKRRMQNGRYAAISEGKWPYNSAPYGFRRVKLEKEKGWTLAFDENEAPVVRLIFSMFTGPERVGIRSITRTLNSYGTKPRNSKLWSESTVRGILSNVVYDQCVKIGERKVVRTVENGVLTTTRPRTSDYTIVSGRHPRLIDHDVFAEAQSYLGCGSPKPSGSSIIKNPLAGIIVCSECKKKMIRRPPSGTASRVPYDLMLCSTYDCPTIGSPLDLVEREVYNALSDWVEGYRLSGQMPSKSLIPEKEVLLESAQQTLDQLLRQKGTMYDLLEQGVYSTEVFLERSDSLQNRISEAESNVAQLKLELDKERQREANIEQFLPACEDLLSCYWDLSIPERNRLLKLLIESIEYKKLTKNKRGHLNEPNFELTIKPRIPRK

SEQ ID NO: 17137 - DNA, 50 bp, Mediterraneibacter faecis
  source 1..50: mol_type = genomic DNA
tatttccaaaagaaacgggattattctttatcccaattcttttggaaatg

SEQ ID NO: 17138 - DNA, 40 bp, Mediterraneibacter faecis
  source 1..40: mol_type = genomic DNA
catttccatatgggcaagttcttctgtgccaatatcagtc

SEQ ID NO: 17139 - DNA, 50 bp, Mediterraneibacter faecis
  source 1..50: mol_type = genomic DNA
tatttccaaaagaaacgggattatagtttatcccaattcttttggaaatg

SEQ ID NO: 17140 - DNA, 40 bp, Mediterraneibacter faecis
  source 1..40: mol_type = genomic DNA
ccttttcaaatgggaaactagttctttgccagtttaagtc

SEQ ID NO: 17141 - protein, 479 aa, Mycobacteroides abscessus
MVKAKPPAQRAGVRSAAIYARISADAEGTGLGVTRQLEDCRKLATDRGWPVGDEYVDNDVSAYSGKPRREYARMLEDLKSGTRDAVIVYNLDRLHRRPVELEDFVILCESVGVRDVATVTADIDLGNDDGLFMARIFAAFAAKESGRKSARIRRKMLQNAEQGLPHGPARPFGYENDKITLRPDEARIVREMVDRYLAGASIRSLTIWLNDTGVAPATSKSWQTTTVRHILASGRIAGLREHHGQVVGRGAWPAIITPAERDRILARIATRSLTKTRAPRTYLLSGMLRCGRCGNRLFSQARHNNPTNRVRRYVCLKGPDHGGCGRLTVVALPVEELLTDAVLTRLDSPQLAEALAGKSRVDADVATLAAQLEADQTRLDELAGLYAQGAVSAREWIAARDPITDRITRARRDIATATDTSAVVDLAGRGDLLRSQWDDLDIGRQQAIIKSVLDHAVIAPGTPGTRKLDINRVQPHWRT

SEQ ID NO: 17142 - DNA, 50 bp, Mycobacteroides abscessus
  source 1..50: mol_type = genomic DNA
agggtatattaggaacttgtcaccaagctaaaatgttgttaaactaccct

SEQ ID NO: 17143 - DNA, 40 bp, Mycobacteroides abscessus; identical to SEQ ID NO: 1473
  source 1..40: mol_type = genomic DNA

SEQ ID NO: 17144 - DNA, 50 bp, Mycobacteroides abscessus
  source 1..50: mol_type = genomic DNA
agggtatattaggaacttgtcaccccgctaaaatgttgttaaactaccct

SEQ ID NO: 17145 - DNA, 40 bp, Mycobacteroides abscessus
  source 1..40: mol_type = genomic DNA
tggccccgccccgagcgcccctcgggagtcctggtcccgc

SEQ ID NO: 17146 - protein, 479 aa, Mycobacteroides abscessus; identical to SEQ ID NO: 3691

SEQ ID NO: 17147 - DNA, 50 bp, Mycobacteroides abscessus; identical to SEQ ID NO: 3692
  source 1..50: mol_type = genomic DNA

SEQ ID NO: 17148 - DNA, 40 bp, Mycobacteroides abscessus; identical to SEQ ID NO: 1473
  source 1..40: mol_type = genomic DNA

SEQ ID NO: 17149 - DNA, 50 bp, Mycobacteroides abscessus
  source 1..50: mol_type = genomic DNA
agggtatattaggaacttgtcaccccgctgaaatatcgctaaactaccct

SEQ ID NO: 17150 - DNA, 40 bp, Mycobacteroides abscessus; identical to SEQ ID NO: 17145
  source 1..40: mol_type = genomic DNA

SEQ ID NO: 17151 - protein, 580 aa, Micromonospora globispora
MTATHDTTDPTRCAALYLRRSHKNADGDARNGRSLAEQESELRDLAARLGLFVTEVYVEREGTGASRYSLKARPQWMRALAELRAGDHFRTLLVWALDRADRRGAVEIGRILDEHADGSRRIVGVDGTDTADSRRRLEHIIRAELAREEVENLSRRVSRAKRFRRAEGRWLGGAAPYGLRIVDGHLEHDPETYPTARRIADELLAGRTIWQTVKRLNDDGVPSPRGKSWGVGTVSTLVRSPAWAGLQGIREKTASGRWRHIAEPFRDERGQTVSVGEGVITPGERARILQTIGDRSATLAEGGRFVRRGDRRSAALLADVLRCADCGGRTAQSGAAGKKVYRCGTYGNGRACDGFTAPTAESDEAVSIAFLGRLATLEAGDPLLEAVADAWVARVAPDDIAAREAAQDALDAARADLARVRRLVAAGTFDEADATAVMPELRANVAAAEAALARIPVPDADISPLLDLAQSVPAFFDLPEHERRGLIALAITNVEASRARSRGVRFDPTDRLLITWADGTTSRPSPARVDQRAERIAKVCAMLAADPAVTIAQVAEAINRSPRTARDVLDTARASLADTH

SEQ ID NO: 17152 - DNA, 50 bp, Micromonospora globispora
  source 1..50: mol_type = genomic DNA
gcgaggtcgtataaccatcctcgacttcttagcgttcccgtcggtctaac

SEQ ID NO: 17153 - DNA, 40 bp, Micromonospora globispora
  source 1..40: mol_type = genomic DNA
gcaagatcgtcctgctggacttctggaccttctgctgcat

SEQ ID NO: 17154 - DNA, 50 bp, Micromonospora globispora
  source 1..50: mol_type = genomic DNA
gcgaggtcgtataaccatcctcgatttcttagcgttcccgtcggtctaac

SEQ ID NO: 17155 - DNA, 40 bp, Micromonospora globispora
  source 1..40: mol_type = genomic DNA
gaaaaatagtcgtccttgatttcttcacctactgctgcat

SEQ ID NO: 17156 - protein, 511 aa, Kitasatospora aureofaciens
MHHHTLSDLYLRLSLDRDGKTAIERQEADCRAWAERHGLTVRKVHIDRGRSGFKDVERKGFDSALAAVTAGVVGTLIVWKLDRLSRKGIGQVGKVLDDIEKAGGRLVSVVDGLDTSNDSARMVVAMLAELARSESKNLGTRVAHAKRHLRRQGQWIGGQPPYGLLVDPTTKKLTHDPDTAVYARLIADGALAGKSLVQIARLLNEYDIPSARGGQWNAASIMNLVKSPAFAGLMPETETIEAEDGSRKFTSRVFPYRDPETLDTVSIGEGIITVGERERIIRQLESRTRVHAGKRMPKPNGTALLTSLVFCDVPGCGRRMHKVGNSYQCMARRAGNQCPGASAMADRVDEYVSERFLSMLPALELDDPMLVAIADRWVKRADPETFAKRGAIADEIADQEARLADLEDARYVRGEFDRPGALDRYDRLAARLQSRIDGLRADLTALPLPAVDITPLLDGELLRAAWAAATQDQKRDRLSLAIDGVFISKGQRGKRFIPEQRVRIKWAEIKE

SEQ ID NO: 17157 - DNA, 50 bp, Kitasatospora aureofaciens
  source 1..50: mol_type = genomic DNA
ggtaagtgtgtcgtactagacttctggaagtcctacacaatgtagggaac

SEQ ID NO: 17158 - DNA, 40 bp, Kitasatospora aureofaciens
  source 1..40: mol_type = genomic DNA
gatcaccgtcctggacttctggaccttctgctgcatcaac

SEQ ID NO: 17159 - DNA, 50 bp, Kitasatospora aureofaciens
  source 1..50: mol_type = genomic DNA
ggtaagtgtgtcgtactagacttcttgaagtcctacacaatgtagggaac

SEQ ID NO: 17160 - DNA, 40 bp, Kitasatospora aureofaciens; identical to SEQ ID NO: 3345
  source 1..40: mol_type = genomic DNA

SEQ ID NO: 17161 - protein, 453 aa, Ruminococcus bicirculans
MTGKITALYCRLSQDDMLQGESNSITNQKAILKKYAEDNGFSNPVYYVDDGVSGTTFERDGFKAMMADVEAGKAGTIITKDLSRLGRDYLKTGEYIEIIFPDYDVRYIAINDNVDTLKSENELMAFKNIFNDWYARDTSKKIHAVFKAKGQSGKPLSLPIYGYKASEEDKHKWIIDDEPAAVVRKIYKLCISGYGPTQIARKLTEEGIPNPTAYAISQGRNPANKNSRLDRWCTETVIDILEHPEYIGHTVNFRTRRKSYKNKRKIENPKEDWLIVENTHEPVVTQQEFELVQEMRKNKRRNQKQETVNPFSGICFCADCGKKLYLCRSRSLSEDQEHLKSSTHSADKDSCSAHYIRTVVLKELVLNALNKLLDSVKDNESEFVQTAMDNSASKHSSDVFKTKKALTQAEKRIAELDRLFARLYEDNISGKISNERFAVLSAGYEDEQKKLKA

SEQ ID NO: 17162 - DNA, 50 bp, Ruminococcus bicirculans
  source 1..50: mol_type = genomic DNA
aacttctttattggcgctcctctaaaatgtgaggcgctgatatagcagta

SEQ ID NO: 17163 - DNA, 40 bp, Ruminococcus bicirculans
  source 1..40: mol_type = genomic DNA
caaaaaaagactcgcacgaaaatgtgcgagttctttttta

SEQ ID NO: 17164 - DNA, 50 bp, Ruminococcus bicirculans
  source 1..50: mol_type = genomic DNA
aacttctttattggcgctcctctagaatgtgaggcgctgatatagcagta

SEQ ID NO: 17165 - DNA, 40 bp, Ruminococcus bicirculans
  source 1..40: mol_type = genomic DNA
cagaaatagactcacacaagaatgtccaactgatttttta

SEQ ID NO: 17166 - protein, 576 aa, Aeromonas sp ASNIH1
MTYVKTHVYTRISKTSQQEGSGIDEQLARIDAYIQSKPQQFQGEIQHWQDIGLSAFGNKNIIDGQLAEFIQHVEEGSIGKGHALVIYSLDRLSRRSSWDEDTIQKLVKAGVDIHDVSTPVVLKHDDPFSKIIMELIVQRGNNESKIKSERATAGWAKRLKDTLEHGKVFTKRLPHWLKVDEDNNIVLVPEHVELIKRIFKEYTNGLSSPMIAKRLNDEGIKTSTGSLWRADTLTKLIKDERLRGNHVQFNDQTLIPNIFPVIIDSELFTIANRIRVQNVASTKGRPRESKNEKIINNIISGFVRCGKCGSKVTTSSNSVGDRYIVCKGRRNFEICTQKGVLLKRLERVVTTYAKQLDMSKIFSYEEVDTSLETKLQSELQSLEADEKNCLEKIEQRKKEKKTYLALADALTDIQDRIEEVRKELQEVNVNEPLVAIENYNIDDLLDPSKKELRMSLRKYLVQVLDKVKFRSIDDNILIEVVYNKDVFRHVLITDSKVSKVLHEISIIKEDGLIKYNTKGFSIIEDEEAGTCAFKGLDSVSTEDYFLLANYMDGVEGKRWIIDYMHDPLNVETVLEK

SEQ ID NO: 17167 - DNA, 50 bp, Aeromonas sp ASNIH1
  source 1..50: mol_type = genomic DNA
ctgtttgcaagctttgctatatccgtggagttgtgctaatctgcacacat

SEQ ID NO: 17168 - DNA, 40 bp, Aeromonas sp ASNIH1
  source 1..40: mol_type = genomic DNA
ggtgtggcccatcaatacggtgcagttctccaaccacacc

SEQ ID NO: 17169 - DNA, 50 bp, Aeromonas sp ASNIH1
  source 1..50: mol_type = genomic DNA
ctgtttgcaagctttgctatatccacggagttgtgctaatctgcacacat

SEQ ID NO: 17170 - DNA, 40 bp, Aeromonas sp ASNIH1
  source 1..40: mol_type = genomic DNA
ggtgtagtcgaccaaaaccacgcagtcctccacgcacacc

SEQ ID NO: 17171 - protein, 579 aa, Aeromonas caviae
MQWMTYVKTHVYTRISKTSQQEGSGIDEQLARIDAYIQSKPQQFQGEIQHWQDIGLSAFGNKNIIDGQLAEFIQHVEEGSIGKGHALVIYSLDRLSRRSSWDEDTIQKLVKAGVDIHDVSTPVVLKHDDPFSKIIMELIVQRGNNESKIKSERATAGWAKRLKDTLEHGKVFTKRLPHWLKVDADNNIVLVPEHVELIKRIFKEYTNGLSSPMIAKRLNDEGIKTSTGSLWRADTLTKLIKDERLRGNHVQFNDQTLIPNIFPVIIDSELFTIANRIRVQNVASTKGRPRESKNEKIINNIISGFVRCGKCGSKVTTSSNSVGDRYIVCKGRRNFEICTQKGVLLKRLERVVTIYAKQLDMSKIFSYEEVDTSLETKLQSELQSLEVDEKNCLEKIEQRKKEKKTYLALADALTDIQDRIEEVRKELQEVNVNEPLVAIENYNIDDLLDPSKKELRMSLRKYLVQVLDKVKFRSIDDNILIEVVYNKDVFRHVLITDSKVSKVLHEISIIKEDGLIKYNTKGFSIIEDEEAGTCTFKGLDSVSTEDYFLLANYMDTVEGKRWIIDYMHDPLNVEVVLEN

SEQ ID NO: 17172 - DNA, 50 bp, Aeromonas caviae
  source 1..50: mol_type = genomic DNA
ctgtttgcaagccttgttatatccgtggagttgtgctaatctgcacacat

SEQ ID NO: 17173 - DNA, 40 bp, Aeromonas caviae; identical to SEQ ID NO: 17168
  source 1..40: mol_type = genomic DNA

SEQ ID NO: 17174 - DNA, 50 bp, Aeromonas caviae
  source 1..50: mol_type = genomic DNA
ctgtttgcaagccttgttatatccacggagttgtgctaatctgcacacat

SEQ ID NO: 17175 - DNA, 40 bp, Aeromonas caviae; identical to SEQ ID NO: 17170
  source 1..40: mol_type = genomic DNA

SEQ ID NO: 17176 - protein, 542 aa, Paenibacillus larvae
MFSNSLEDFFGPEVDIYARVSSEDQQERETIENQIEYATKYCELNKLTIREWYLDDGITGTIPLRDRPAGAKLIKDAQEGKSKKILIFNMKRLGRVARVTLDAVYELEKHGAKIKSMTEPFDTSTPAGRFILTVLAGQAELDRDTMLETMWHGANRAARKGKWLGGIVPYGYKKNHDGFLEINCDPLPGKEDMSEASVIELLYHLCVNGKMSTIQIADYLNALGIPPSYVKDNRSIKRGRRKEKTAGVWRPARVGNMIKNSTYRGIHVYGKRSNKDRELIERKVPAIISEEMWHQAQIILKANQIEAVKNTKRQYLLRGLIKCGCCGLNYHGTAYRSSPFYVCNGKTAYAGPLMGKCKSRNIPAPWVENLVWEQCVNFINNPGDTVKELVNVDEKVLDHTAAYIDEKELVQKSLLNKDDERQSILELYRKKMISSNDVEIQLTEITNEKKELEDRLRELNILIEGNARKEKRTDDVFQILDGLREVIKEELPFETKRAIVKALVKKIIVHTHFEDGVKRFHNASVHAEFSFDGIKVINGTPV

SEQ ID NO: 17177 - DNA, 50 bp, Paenibacillus larvae
  source 1..50: mol_type = genomic DNA
aatcaaggttattaacggaactcctgtccgtgaaaataacaaccttgata

SEQ ID NO: 17178 - DNA, 40 bp, Paenibacillus larvae
  source 1..40: mol_type = genomic DNA
ggccgcttccatgaatccctgtccctgtggttatctttcc

SEQ ID NO: 17179 - DNA, 50 bp, Paenibacillus larvae
  source 1..50: mol_type = genomic DNA
aatcaaggttattaacggaactccagtccgtgaaaataacaaccttgata

SEQ ID NO: 17180 - DNA, 40 bp, Paenibacillus larvae
  source 1..40: mol_type = genomic DNA
ggcggctgctgtgaaccccaggccctgtccttatgtttcc

SEQ ID NO: 17181 - protein, 613 aa, Streptomyces albidoflavus; identical to SEQ ID NO: 3851

SEQ ID NO: 17182 - DNA, 50 bp, Streptomyces albidoflavus
  source 1..50: mol_type = genomic DNA
gtagtgccccaactggggtaaccttagagttctctcagttgggggcgtag

SEQ ID NO: 17183 - DNA, 40 bp, Streptomyces albidoflavus
  source 1..40: mol_type = genomic DNA
cgggtgccagggagagccgtacgtctcgccctggcacccc

SEQ ID NO: 17184 - DNA, 50 bp, Streptomyces albidoflavus
  source 1..50: mol_type = genomic DNA
gtagtgccccaactggggtaacctgcgagttctctcagttgggggcgtag

SEQ ID NO: 17185 - DNA, 40 bp, Streptomyces albidoflavus
  source 1..40: mol_type = genomic DNA
gggttgccagggagctccggccgtgtagcccagggagccc

SEQ ID NO: 17186 - protein, 559 aa, Anaerobutyricum soehngenii
MQVLKATKIIPNSRGRSSYGVKLDRIRVAAYCRVSTDDDEQLGSFQSQKLYYEDKIQKNKEWVMAGIFADEAVTGTKVDKREGFQEMIRKCQHGEIDMILTKSISRFSRNTSDTIKYVRMLRDKHIAILFEKENINTLDMNGEMLLTILSSLAQQEVESLSGNVKMGLQMKMKRGELIGFNGCLGYDYNRETKEITVNREEAETVIFIFELYIQGYGGARIAKQLMEMGIKNHKGNVVWTDSGVMGIIKNEKYKGDVLLGKTFTVDPISKRRLANMGEENQYYIKDHHEAIVPREIWDKAESIRLKRVNPKLIESTGKRERYTRQFAFSSMLECAYCGHKLSRRTRHQTVKTTKPVWQCTNAIKYGIDNCPHCKAIDEIIIEEAFLESFRLLANNFDDVLESVLDTVEEVLKDDTELKQVEKVGKEISSIKKRKSRLTDLLLDGRIEQEDYDEKKEKFQRKIHKLTEEKACLESNIGQQQNINKRMLQLQKTLEREDPLDKFDRMVFESIVEKVIVGGYDADGNPSPYKLTFVLKSNQTLKVKNARADYRANRKGNKVS

SEQ ID NO: 17187 - DNA, 50 bp, Anaerobutyricum soehngenii
  source 1..50: mol_type = genomic DNA
tgtgttccacagaggacttcgccacatgtcgagacggtatgtttaatcca

SEQ ID NO: 17188 - DNA, 40 bp, Anaerobutyricum soehngenii
  source 1..40: mol_type = genomic DNA
tatgttccctggaacggtgcatgtggagactgcggtgttg

SEQ ID NO: 17189 - DNA, 50 bp, Anaerobutyricum soehngenii
  source 1..50: mol_type = genomic DNA
tgtgttccacagaggacttcgccaattgtcgagacggtatgtttaatcca

SEQ ID NO: 17190 - DNA, 40 bp, Anaerobutyricum soehngenii
  source 1..40: mol_type = genomic DNA
gatgatggctgtagcggtgatggtggagactgtggtggtg

SEQ ID NO: 17191 - protein, 476 aa, Mycobacteroides abscessus
MGVRAAIYVRISQDRDGTRLGVERQEQDCRKLANTLGLEVRNVFVDNDISAYSGKRRPKYEALLADIEAGALDVVLAWHPDRLHRSPLELETYIDLSERFAIQTHTVQAGAWDLSTPSGRAVARTLGAWARYESEHKGERIRRARQQQAKAGGWHGGIRPYGFEKDGVTIRPAEAAEIAKATEAIVSGVSLRSLVRDLNERGIPTATGRGPWTSVALKDTIMRPRTAGLSSYHGEVVGPAVWPPIVPEDTWRAACSILSDPARRTNAGRGGTVRWLGSGLYVCGVCGEAQLRVGTGGSVKRHTYRCGNRNIRDGGGHVTREAGSLDAYIEEVIVRRLSEPGLLDQFLSADPDQDTTTTRVELLAVRQRQDDLAGLFAAGQITARQLAISTEQLIAKEDQLAKTLASAGRRNPIQMLAGAKDLRSLWFGTDEDRSDGLTLGQRRALLDVLMTVTVLPAPRTRGGFDPDYVRIDWKAH

SEQ ID NO: 17192 - DNA, 50 bp, Mycobacteroides abscessus
  source 1..50: mol_type = genomic DNA
cggtgccataggtgggctgtcggttttccgactcttaacctgtggcacac

SEQ ID NO: 17193 - DNA, 40 bp, Mycobacteroides abscessus
  source 1..40: mol_type = genomic DNA
cgcggacaacaacgtggtcttgcccgcgcccgtgccgccc

SEQ ID NO: 17194 - DNA, 50 bp, Mycobacteroides abscessus
  source 1..50: mol_type = genomic DNA
cggtgccataggtgggctgtcggttgtccgactcttaacctgtggcacac

SEQ ID NO: 17195 - DNA, 40 bp, Mycobacteroides abscessus
  source 1..40: mol_type = genomic DNA
tggggagaacaccctggtctgtcctgggcccgtgctgccc

SEQ ID NO: 17196 - protein, 589 aa, Enterobacter cloacae
MSAHVTILRNTVLPVKFNTMNRPRLYSYIRYSSERQGKGSSIERQKSYIAEMAKQIATEYDLEIFEEYQDLGVSAYKGKNVQEGALSDFIDQVESGLIPKGSFLLIESLDRFSRQNAMQAVNLFTSLLLNGITVITGIDKQVYRQTEVNTETLQQLMFSVMLFSRANEESSTKSHRTIASALSKIRRHQERKPGDPVVAIKELGSDKWWTDSSTGYVNPHPVLFPIAKKIIQLKQDGWSNRMILQHLKNNYDGPVIGNKKSKGIWNMQHCSRILEPAIYGRKVITVNNAEYVLDDYYPAIISKDEYEALKLQVGNKGFAPNRESNPEIPLLSGIGILHCAHCSCYMVKAKSTLKNHPHAYRYQCASRDLHQDCNKWGFRASTLERTILQLIADRIFLQTKYQPSGLEGKIADIQSQIENYVLAIGSAKSPEIINSLTSQIDQLEQEKQSLIVEKRLYDESIVQMNTEGWDKFRKFDIDDALNPLRTKIRANIKTVIMRVDCSRIDKKHNLFTITYRDQHKQRIVIENNSGWKKGKIYIEAQTINDIQILESEGLILHDHIDILINRDKFMTEAKKRLDHPRTLIDELTE

SEQ ID NO: 17197 - DNA, 50 bp, Enterobacter cloacae
  source 1..50: mol_type = genomic DNA
tatacccattacacttcagtgaatactaaagtaaaatacacctcattaag

SEQ ID NO: 17198 - DNA, 40 bp, Enterobacter cloacae
  source 1..40: mol_type = genomic DNA
gggcgtcaccatcggcaacaccgacggcaacgtgatcgac

SEQ ID NO: 17199 - DNA, 50 bp, Enterobacter cloacae; identical to SEQ ID NO: 17197
  source 1..50: mol_type = genomic DNA

SEQ ID NO: 17200 - DNA, 40 bp, Enterobacter cloacae
  source 1..40: mol_type = genomic DNA
gtacttcaccatcgtcaccaccgaccacaaggagatcgac

SEQ ID NO: 17201 - protein, 472 aa, Streptococcus uberis
METNKVAIYARVSTLNQAEEGYSINEQIDSLTKYCDAMSWEVVHQYVDAGYSGGKLERPDITKLISDAKNKKFDTVLVFKLDRLSRSVRDTLYLVKDVFTENKIGFVSLKENIDTSTAMGNLFLTMLSAIAEFEREQIKERMQFGLAGRAKSGKPTSWKTPPYGYTYDKNLQEMVVNEYEANNVREMFDMIISGHSLMQITHYARDHYPGNTWTHVKVKRILENEAYIGLVKLRNERYKGNHKQIISDEIFIKAQNAIEERTNASDNTRPFQGKYMLSHIVKCGYCGAPLKIDTSKPRKDGTRRQTYTCVNKFKARATNGATIYNNGKICKSGRYDAKKIEKFVIEEIRKIQIDEDFFKSKKQKSNINNDIAKKEISKIENKIEKLNDLYINDLIALDDLKKKTSDLKKEISKINKSINEEIIDSVKQNALNELESNIDISKSSYEVQKRIVKLIVDRVEVTNDNINIILKF

SEQ ID NO: 17202 - DNA, 50 bp, Streptococcus uberis
  source 1..50: mol_type = genomic DNA
taaccgcttttatgaacatcaactagtatagtagtgcatgaatcctgtat

SEQ ID NO: 17203 - DNA, 40 bp, Streptococcus uberis
  source 1..40: mol_type = genomic DNA
agaagctttttttccaactagtatagtagtgcaacccatt

SEQ ID NO: 17204 - DNA, 50 bp, Streptococcus uberis
  source 1..50: mol_type = genomic DNA
taaccgcttttatgaacatcaactattatagtagtgcatgaatcctgtat

SEQ ID NO: 17205 - DNA, 40 bp, Streptococcus uberis
  source 1..40: mol_type = genomic DNA
aacagttttttttccaactattttactaggccaaccactt

SEQ ID NO: 17206 - protein, 499 aa, Pseudomonas brenneri
MALDATLTLKDEGLSAYHQRHVKQGALGVFLRAVEDGRIASGSVLVVEGLDRLSRAEPIQAQAQLAQIINAGITVVTASDGREYNRAGLKAQPMDLVYSLLVMIRAHEESDTKSKRVKAAIRRQCEGWLAGSFRGLIRNGKDPQWVRLTNDGWELIPERVAAVKRALELYRQGLGAGRAAAVMHEEGFQLTDGGISGLQIYRTIKLPALRGVKRLSLDGEDYELEEYYPRILSDAEWSDLQHLAGQRLRRRGAGEIPGIITGVGLAYCGYCGTALVAQNIMKRRRSDGSIADGNRRLQCTSYSKNGGCSAGGSCSVVPIERALLSFCSDQLNLQRLLQLGDDGKGVRQKLLVARAALEKITTQLGKVTDALLADESGASPIAFIRKARELEEQQGVAEQNVKRLEFELAAMSCAVRPAQADRWEELAAQVFAGDYGAREKVRQLIMDTFERIVIYMRGMSAQDRKGQAIDVQLLSRTGQHRLIQIDRRTGEWVASEDWG

SEQ ID NO: 17207 - DNA, 50 bp, Pseudomonas brenneri
  source 1..50: mol_type = genomic DNA
tgtgtattttgaatatcgcttgggcaccctagcgatacaaaccctacacg

SEQ ID NO: 17208 - DNA, 40 bp, Pseudomonas brenneri
  source 1..40: mol_type = genomic DNA
gtcgaccagagctttcgggcaacccagggaaacaaagcca

SEQ ID NO: 17209 - DNA, 50 bp, Pseudomonas brenneri
  source 1..50: mol_type = genomic DNA
tgtgtattttgaatatcgcttgggggccctagcgatacaaaccctacacg

SEQ ID NO: 17210 - DNA, 40 bp, Pseudomonas brenneri
  source 1..40: mol_type = genomic DNA
gtctaccagagcctctgggggcctcaaggagacaaaggca

SEQ ID NO: 17211 - protein, 499 aa, Pseudomonas helleri
MELDATLTLKDEGLSAYHQRHVTQGALGVFLRAIEDGRIASGSVLVVEGLDRLSRAEPIQAQAQLAQIINAGITVVTASDGREYNRASLKAQPMDLVYSLLVMIRAHEESDTKSKRVKAAIRRQCEGWMSGSFRGLIRNGKDPQWLRWSEQGWELVPERVNAVRRALELYQQGLGAGRAAKVMHEEGYELSSWGVSGQQVYRLIKLPALRGAKRLAVDGEAYMLEEYYPRILSDAEWAELQHLAGQRHRRRGAGEIPGIITGIGLTYCGYCGTALVAQNIMHRRREDGSLSDGHRRLHCTSYSKRGGCSASGSCSVVPIERALLNFCSDQLNLQRLLQVGDDGQGIRQQLVVARAAVEKITKQLGKITEALLDDDSGAAPIAFVRKARELEAQQVIAEQKVVQLEYGLAAVSGTSQPAQAERWEELSELVCTDDYTAREKVRQLVMDTFERIVIYMRGLDPDGRNGQFIDVQLLSRTGQHRLIQINRRSGEWVSSEDWD

SEQ ID NO: 17212 - DNA, 50 bp, Pseudomonas helleri
  source 1..50: mol_type = genomic DNA
tgtatattttaagagtcgttagggcaccctagtgatacaaaccctacacg

SEQ ID NO: 17213 - DNA, 40 bp, Pseudomonas helleri
  source 1..40: mol_type = genomic DNA
gtcgaccagcgctttcgggcaacccaaggaaacaaagcca

SEQ ID NO: 17214 - DNA, 50 bp, Pseudomonas helleri
  source 1..50: mol_type = genomic DNA
tgtatattttaagagtcgttagggggccctagtgatacaaaccctacacg

SEQ ID NO: 17215 - DNA, 40 bp, Pseudomonas helleri; identical to SEQ ID NO: 17210
  source 1..40: mol_type = genomic DNA

SEQ ID NO: 17216 - protein, 499 aa, Pseudomonas helleri
MELDATLTLKDEGLSAYHQRHVTQGALGVFLRAIEDGRIASGSVLVVEGLDRLSRAEPIQAQAQLAQIINAGITVVTASDGREYNRASLKAQPMDLVYSLLVMIRAHEESDTKSKRVKAAIRRQCEGWLAGSFRGLIRNGKDPQWLRWGDQGWELVPERVSAVRRALELYQQGLGAGRAANLMHQEGYELSSWGISGQQVYRLIKLPALRGAKRLSVDGEDYMLEEYYPRILSETEWAELQHLASQRHRRRGAGEIPGIITGVGLAYCGYCGTALVAQNIMNRRRADGSLADGNRRLQCTSYSKNGGCSASGSCSVVPIERALLNFCSDQLNLQRLLQVGDDGQGIRQQLVVARAAVEKIAKQLGRITEALLDDESGSAPVAFVRKARELESQQTAAQQKVAQLEYELAAVSGTSQPAQAGRWEELAELVEAGDYSAREKVRQLVMDTFERIVIYMRGLEPDGRKGRLIDVQLLSRTGQHRLIQIDRRSGQWVSSEDWE

SEQ ID NO: 17217 - DNA, 50 bp, Pseudomonas helleri
  source 1..50: mol_type = genomic DNA
cgtataggtttgatatcttaggcgcaccccagtgatacaaaccctacacg

SEQ ID NO: 17218 - DNA, 40 bp, Pseudomonas helleri; identical to SEQ ID NO: 17213
  source 1..40: mol_type = genomic DNA

SEQ ID NO: 17219 - DNA, 50 bp, Pseudomonas helleri
  source 1..50: mol_type = genomic DNA
cgtataggtttgatatcttaggcgggccccagtgatacaaaccctacacg

SEQ ID NO: 17220 - DNA, 40 bp, Pseudomonas helleri; identical to SEQ ID NO: 17210
  source 1..40: mol_type = genomic DNA

SEQ ID NO: 17221 - protein, 499 aa, Pseudomonas helleri
MELDATLTLKDEGLSAYHQRHVTQGALGVFLRAIEDGRIASGSVLVVEGLDRLSRAEPIQAQAQLAQIVNAGITVVTASDGREYNRAGLKAQPMDLVYSLLVMIRAHEESDTKSKRVKAAIRRQCEGWVAGTFRGLIRNGKDPQWLNWGDQGWELVPERVSAVRRALELYQQGFGAGRAAKMMHQEGFELSSWGISGQQVYRLIKLPALRGAKRLAVDGEAYMLEEYYPRILSETEWAELQHLASQRNRRRGAGEIPGIITGVGLAYCGYCGTALVAQNMMNRRRADGSLADGHRRMQCTSYSKNGGCSASGSCSVVPIERALLNFCSDQLNLQRLLQVGDDGQGIRQQLVVARAAVEKITKQLGKITEALLDDDGGSAPIAFVRKARELEAQQVVAEHKVVQLEYALAAVSGTSQPAQAERWEELAELVGADDYGAREKVRQLVMDTFERIVIYMRGLEPDGRKGQFIDVQLLSRTGQQRLIQIDRRSGEWVSSEDWD

SEQ ID NO: 17222 - DNA, 50 bp, Pseudomonas helleri
  source 1..50: mol_type = genomic DNA
agtataggttcgtagtcctacggacaccccagtgatataaaccctacacg

SEQ ID NO: 17223 - DNA, 40 bp, Pseudomonas helleri; identical to SEQ ID NO: 17213
  source 1..40: mol_type = genomic DNA

SEQ ID NO: 17224 - DNA, 50 bp, Pseudomonas helleri
  source 1..50: mol_type = genomic DNA
agtataggttcgtagtcctacggaggccccagtgatataaaccctacacg

SEQ ID NO: 17225 - DNA, 40 bp, Pseudomonas helleri; identical to SEQ ID NO: 17210
  source 1..40: mol_type = genomic DNA

SEQ ID NO: 17226 - protein, 505 aa, Brevibacillus brevis
MYKPFLQANYKPSDKPKALYLRKSKKSRDKTEVETIENHLNRLTDFCKEQGWNNYDIYNDFVAKSTDVNRKEYKKMLKACLDGKHDLIIVVEESRLYRTVNEQTNVYEELKGTDVAILSIREGYIFPNDRNQFLTNIIRGAMNQQELENFAYRMNIKVLASAKEGSYVNRTPFGYIKDKDKLIPHPIESKTFRLIVDKVLEGYVIAEIIGQLNQLGYHTKSNKKWKDVGTITRMLANRVYLGESHYYSKMFDEDVIMRDTHQALLTIEEFQKISSMISSRSRNPQGIRYTKVNTVLDRLVVCGICGSRLPLHKSWTNKEGITSYQIGKCQRVIGEYNEKKCPNKSISLNELLPHFYNAIESYKDALREEINSVEIDTTNDKKIILMGQIQDIKKRIAEIQVEMQNAKSYLIKGILTEADYVGLVPPLEKDLKELNVSLEDSERLLSSLSDYDRGAVIQNAIDSLYNIVNESIDNQNRIYRLMFEHLEIVNTADEFEIRLKEKDIS

SEQ ID NO: 17227 - DNA, 50 bp, Brevibacillus brevis
  source 1..50: mol_type = genomic DNA
actttacattaatgtgttttatccggcgataaagtatgttataataaggt

SEQ ID NO: 17228 - DNA, 40 bp, Brevibacillus brevis
  source 1..40: mol_type = genomic DNA
acacgggattgcactatccggcgattttattattcaaggg

SEQ ID NO: 17229 - DNA, 50 bp, Brevibacillus brevis
  source 1..50: mol_type = genomic DNA
actttacattaatgtgttttatccgccgataaagtatgttataataaggt

SEQ ID NO: 17230 - DNA, 40 bp, Brevibacillus brevis
  source 1..40: mol_type = genomic DNA
acacgggacttgagcatccgcagactttggtattcaaggg

SEQ ID NO: 17231 - protein, 586 aa, Listeria monocytogenes
MKEVEVIKARSSSSNSVRGKKIEQLRVAAYCRVSTDSEDQLNSYNSQKAYYTDLIQKNGEWIFVGIYADEAITGTQVTKREDFQRMINDCMNGEIDMLITKSISRFARNTLDTLKYVRMLKEKNIAVYFEDEKINTLTMDGELLLVVLSSVAQQEVENISANVKKGLKMKMKRGELVGFQGCLGYDYHPEDKSITVNEDEAEIVRYIFNRYIEGAGGSVIGQELENLGYLTKYGNSTWVPTTVLGIIKNEKYKGDILLGKTFTVDPISKRRLENMGEEDQFYIRNHHEPIVSEEVFDKAQEILNRRSKNRGKIGDGNSKREKYSRKYAFSCLLECGFCGGTLTRRRWHSGTEYNKVIWQCVTSTKKGKKHCPHSKGIPEMAIEEAFVESYRLLCNNNKDVLEEFLKRIDETLSSSSVNNKLQKVDKDIEAIEKKKSKLVDMRLEDIIDSDTYESKFSSMTTKQEDLIKERIQLQETATNEKDIKRRLRDFKKTLEQNEVLYEFDRYVFESIVEKVIVGGYDEDGNIDPAQLVFVYKTGFKNSLDGNRFKPERKNARANRKSKNLYSHTNDENQSLCSDTKGDTCRD

SEQ ID NO: 17232 - DNA, 50 bp, Listeria monocytogenes
  source 1..50: mol_type = genomic DNA
gtgttctgatactaaaggcgacacatgtggagactattgtgttgctacaa

SEQ ID NO: 17233 - DNA, 40 bp, Listeria monocytogenes
  source 1..40: mol_type = genomic DNA
atgttcccgcaaacagcacatgtagagactgtagtacttt

SEQ ID NO: 17234 - DNA, 50 bp, Listeria monocytogenes; identical to SEQ ID NO: 17232
  source 1..50: mol_type = genomic DNA

SEQ ID NO: 17235 - DNA, 40 bp, Listeria monocytogenes
  source 1..40: mol_type = genomic DNA
ttgttcccgcaagcagcaaatgtaatgagtttagtgctat

SEQ ID NO: 17236 - protein, 523 aa, Vibrio lentus
MRFSRPEQAKGTSIERQSHFAEQYALEHGFELDKSLTMMDKGLSAFHGVHKKKGAFGQFLAAVTAGKVKSGSVLVVESLDRLSREDPLIAQSALSDLILSGITVVTAADNQVYSREEIQQNPFKLIMSLVVMIRANEESETKQRRSNAFLKSALNQYQTNGKVRRLGADPSWLDFNKDDGTYSFNERIEVIRQILGLYNQGFGSLKIARRLTEENVPTLSGKRSAWGQTTVANIVKSHALYGMKRINVQGVDYDLEDFYPELITKSKWLALQQHRTKRSKSMHGRGETVHLITGHGKGFTTCGYCGGGLGAQTQKQYKRSGEYSKTVTRLHCLTHKETSSCCSSVFLEPIENAVLFAACIGVEPQSLVPTANNVNYSALIDDIENKVKHIVEQVAEGAPWHLFKDSHDRLNSEKQKLIKERDSQKPDVNQSDVQKWVEKLIELADKARADNKDARLKCRTLINSVCKSIVIQLRGHDLKSEPLITITFVTDEQFEFKVGKDGAVRFIDNDMAVNKRLKPLLTE

SEQ ID NO: 17237 - DNA, 50 bp, Vibrio lentus
  source 1..50: mol_type = genomic DNA
tagttatgcactatacatttgctgtcagtctaatgtatagtgctaactta

SEQ ID NO: 17238 - DNA, 40 bp, Vibrio lentus
  source 1..40: mol_type = genomic DNA
gaagtaaccgaatgcgccgtctgtccagtggatgtcttgc

SEQ ID NO: 17239 - DNA, 50 bp, Vibrio lentus
  source 1..50: mol_type = genomic DNA
tagttatgcactatacatttgctgttagtctaatgtatagtgctaactta

SEQ ID NO: 17240 - DNA, 40 bp, Vibrio lentus; identical to SEQ ID NO: 3360
  source 1..40: mol_type = genomic DNA

SEQ ID NO: 17241 - protein, 523 aa, Vibrio splendidus
MRFSRPEQAKGTSIERQSHFAEQYALEHGFELDKSLTMMDKGLSAFHGVHKKKGAFGQFLAAVTAGKVKSGSVLVVESLDRLSREDPLIAQSALSALILSGITVVTAADNQVYSREEIQQNPFKLIMSLVVMIRANEESETKQRRSNAFLKSALNQYQTNGKVRRLGADPSWLDFNKDDGTYSFNERIEVIRQILGLYNQGFGSLKIARRLTEENVPTLSGKRSAWGQTTVANIVKSHALYGMKRINVQGVDYDLEDFYPELITKSKWLALQQHRTKRSKSMHGRGETVHLITGHGKGFTTCGYCGGGLGAQTQKQYKRSGEYSKTVTRLHCLTHKETSSCCSSVFLESIENAVLFAACIGVEPQSLVPTANNVNYSALIDDIENKVKHIVEQVAEGAPWHLFKDSHDRLNSEKQKLIKERDSQKPDVNQSDVQKWVEKLIELADKARADNKEARLKCRTLINSICKSIVIQLRGHDLKSEPLITITFVTDEQFEFKVGKDGAVRFIDNDMAVNKRLKPLLTE

SEQ ID NO: 17242 - DNA, 50 bp, Vibrio splendidus
  source 1..50: mol_type = genomic DNA
tagttattcaccgtgcatttgctatctgtctaatgtatagtgctaactta

SEQ ID NO: 17243 - DNA, 40 bp, Vibrio splendidus; identical to SEQ ID NO: 17238
  source 1..40: mol_type = genomic DNA

SEQ ID NO: 17244 - DNA, 50 bp, Vibrio splendidus
  source 1..50: mol_type = genomic DNA
tagttattcaccgtgcatttgctatttgtctaatgtatagtgctaactta

SEQ ID NO: 17245 - DNA, 40 bp, Vibrio splendidus; identical to SEQ ID NO: 3360
  source 1..40: mol_type = genomic DNA

SEQ ID NO: 17246 - protein, 537 aa, Amedibacterium intestinale; identical to SEQ ID NO: 641

SEQ ID NO: 17247 - DNA, 50 bp, Amedibacterium intestinale; identical to SEQ ID NO: 402
  source 1..50: mol_type = genomic DNA

SEQ ID NO: 17248 - DNA, 40 bp, Amedibacterium intestinale
  source 1..40: mol_type = genomic DNA
agtaaatgactgggataatggaggaagttatccagataac

SEQ ID NO: 17249 - DNA, 50 bp, Amedibacterium intestinale
  source 1..50: mol_type = genomic DNA
taatatttttaactaagggaaaccactgtttcccaaacaaaaagatatta

SEQ ID NO: 17250 - DNA, 40 bp, Amedibacterium intestinale
  source 1..40: mol_type = genomic DNA
agtaactgcctaggataacacagagagttatcaccataac

SEQ ID NO: 17251 - protein, 538 aa, Vibrio owensii
MKTATALVRVSTSVQEHGHGLDRQDTDISAFLTANTDYKLERTIQAIGESAYSGVVHDDSSEFGAYLNNLESKRLTPPTALLISSLDRLTRLPFFEATELINRVLKLIPELIVCDTGKRYSLSGGQDLGSLMELSLKIQLAHEESLQKSKRLRAARLKRVDQIAKKEKVLNNRPFWIDWNGTDYVLNEYADTVRKMVELRLQGMGSVAIQAYLNERPEAYPCFMYRGTLRKWTKSRIDDILFKEKTITGTYVIKTTYTPDEKRAAKRDGVKLSAYNKDASHELKGLFPAIVDEVTYHKLKTGTGKGRVSNQYHNVLRSLGKCTCGSSFVLSYDSKVKTVEDRIYLKCNRRNQEGRLSECSNPSIKVYPLVRKILFQLLEQPLYVEDVNKVSKSDELQKQIEENEALLQRLQKRLELDLPESVLSDLVTRLKAVTDVTASLKLDYQTAIASESESVDTNTVLTNLRNLGLKTAEQRIEVNKALRSLLSEVVVNNETKRVLFKFKSGATRWFDYEKGGDVAEAYHFAFEQVSEADSDDFE

SEQ ID NO: 17252 - DNA, 50 bp, Vibrio owensii
  source 1..50: mol_type = genomic DNA
actagtgtataaaggttgttgtttaccattaaccaccttttagcggtagt

SEQ ID NO: 17253 - DNA, 40 bp, Vibrio owensii
  source 1..40: mol_type = genomic DNA
aacggctggtgtggcgtttaccatcaaccacattgctgct

SEQ ID NO: 17254 - DNA, 50 bp, Vibrio owensii
  source 1..50: mol_type = genomic DNA
actagtgtataaaggttgttgtttgccattaaccaccttttagcggtagt

SEQ ID NO: 17255 - DNA, 40 bp, Vibrio owensii
  source 1..40: mol_type = genomic DNA
aagccctgatgtggagtatgccttcaacaacattgcagct

SEQ ID NO: 17256 - protein, 519 aa, Clostridium tertium
MRIALYVRVSTEEQESSIINQKEYIKSLYPDDEVFVYQDFGISGTKISNRNGFIRMMKDAGLKQHFITKKKFVFVADETREPLFDKIVTKSVTRFARNTDVLSIWKELSQKGVTVFFQDINKDTASTEDSLILNLLLTLSQEESKNISERTKFGNRATAKANKIRNNSLYGYIFDKETNSLIIKEDEAVVVRKMFDLCIQGYGYVKISQILAEEGIYNPKGKPFAMSTIKNMIHNKKYCGYNVRNQWESRNLFSENHSHCRTKKENWIIQKNDKIEPIISEETWNLAQEQIKLRLLHQNTGGTVERRDTSDKIICNCCGKNFYICHSRKIGSGINSYPYYICSTKKKQGKNVCDNDNVQVKKVDAFIDGLAKNYYKNIRLSNKAKLIKLQGELKKAKNRSVTEINNECEAIKSENMYHEQKLSKLIDNFLDCSDVMKAVIDKKINDLELTIKNNNNKILELERSRTNIDADKMSIEKKIKELKKELSKIDTIELTREELMDKIRYIKVDKGNKFIVEYV

SEQ ID NO: 17257 - DNA, 50 bp, Clostridium tertium
  source 1..50: mol_type = genomic DNA
ttgtggaaaggtttgcgatgatttgacattgaaaatatgtggttccacaa

SEQ ID NO: 17258 - DNA, 40 bp, Clostridium tertium
  source 1..40: mol_type = genomic DNA
tatggaattgtgaggattggacacttaagataatttaatt

SEQ ID NO: 17259 - DNA, 50 bp, Clostridium tertium
  source 1..50: mol_type = genomic DNA
ttgtggaaaggtttgcgatgatttaacattgaaaatatgtggttccacaa

SEQ ID NO: 17260 - DNA, 40 bp, Clostridium tertium
  source 1..40: mol_type = genomic DNA
aatggaatattaagaattgaaaacttaagttgatttcatt

SEQ ID NO: 17261 - protein, 604 aa, Aerococcus urinae
MRNFEKITALYERLSRDDELEGESNSIINQKKILEEYASKNNLTNIIHFTDDGISGTQFDRPGFMAMMNGVNTGNIGCIIVKDMSRLGRDYLKVGQCMEILRQKGVRLIAINDNVDSFYREDDFTPFRNIMNEWYARDTSRKIQSTFRSKGESGKHTASTPPYGYIKDEKDKDKWVVDEKAAEIVRRIFNLTMQGNGPYRIAKILEAEKIDIPAYHQQKLGYGLHQSKNFEYPYRWCSSTIASVLKKKEYLGHTVNFKTRKHFKDKKSKYVSEDNWLIFENTHEAIIDQETFDNVQRIRGNVKRYPDGWGEYHPLTGLMYCADCGSKMYVHRTNNYKNIPYYVCSNYKKVPCGTLCPSAHRIKAEVVINLIQETLKDIKNYLDEDNEAFIHSIQNEMEEKEKAHIEKKKIRLTESQNRLQELERLMCRIYEDMILNKIPNNRYEILNNQYETEQLTLSKEIKDLELVISRYEMETDKARKFISLISRYENFDNLTNTMINEFVKKIIIHERDRKGSQTSKQKIEIYFNFIGNYEVPKEELSEEERSKLEEEERKINERRDRLHQNYLKRKANGKQQEYEERYKERREQKKQEKLKSLRKDYEKA

SEQ ID NO: 17262 - DNA, 50 bp, Aerococcus urinae; identical to SEQ ID NO: 62
  source 1..50: mol_type = genomic DNA

SEQ ID NO: 17263 - DNA, 40 bp, Aerococcus urinae
  source 1..40: mol_type = genomic DNA
aaatataagcttgcagcaggaaaaactgccaaatcaattc

SEQ ID NO: 17264 - DNA, 50 bp, Aerococcus urinae; identical to SEQ ID NO: 3374
  source 1..50: mol_type = genomic DNA

SEQ ID NO: 17265 - DNA, 40 bp, Aerococcus urinae; identical to SEQ ID NO: 3375
  source 1..40: mol_type = genomic DNA

SEQ ID NO: 17266 - protein, 512 aa, Sporolactobacillus terrae
MDIFNQTEARKGKVTAYHDYPYIVYGRVSTDKDEQVSSLENQVEICHSWLEKNNFEWNEKSVLLDDGISGTTIVARKAMRLILDKARKKEIKMVLFKSISRLARDLKDALEIKELLLSASVRVVTIEEGYDSFTEGKNDMKFEMFSMFAAQYPKSVSVSTSAAFDAKVRRGEWRGGKTSYGYYIKDKKLAIREDEARVVRLIFKLYNEQDMGFKNITHYLNDQLSDGQIIGPRIKKTWQLTTVQSIIKNPVYCGVIITKRYDIVKINGRKKQIKNPPEKWKIYYNQHPKIISVDEWKKANPRDLNSNKIKITPWNEFRGLAKCSECGSNMVILQTFKKHKDGSRHGWKYLKCSAYRRSGTYGCVNHAPILYKDFRALIIELLKKKGKSVKINLKNDFNEKKARRVSLVKDRIKNTDFKVKRLISLYMDELINKDEFQSERQKIEANKRKDEEELFLLNDYKQQATQIKDTLKAFQMLESTDQDLHSVFKALIDEIIMHPNGEIDIHYKFSNK

SEQ ID NO: 17267 - DNA, 50 bp, Sporolactobacillus terrae
  source 1..50: mol_type = genomic DNA
tgtttgcaaaaggtacacatctcgaacgcggtgtgtaccttttgcaaact

SEQ ID NO: 17268 - DNA, 40 bp, Sporolactobacillus terrae
  source 1..40: mol_type = genomic DNA
agttcggaaccacatctcgaacaccatgcagaaattaggt

SEQ ID NO: 17269 - DNA, 50 bp, Sporolactobacillus terrae
  source 1..50: mol_type = genomic DNA
tgtttgcaaaaggtacacatctcgtgcgcggtgtgtaccttttgcaaact

SEQ ID NO: 17270 - DNA, 40 bp, Sporolactobacillus terrae
  source 1..40: mol_type = genomic DNA
agtcctggaccacatcccctgcaccaggcacatagtaggt

SEQ ID NO: 17271 - protein, 540 aa, Enterococcus faecalis; identical to SEQ ID NO: 296

SEQ ID NO: 17272 - DNA, 50 bp, Enterococcus faecalis; identical to SEQ ID NO: 297
  source 1..50: mol_type = genomic DNA

SEQ ID NO: 17273 - DNA, 40 bp, Enterococcus faecalis
  source 1..40: mol_type = genomic DNA
aattagtaactgggaattaggtttgaatttacccaataaa

SEQ ID NO: 17274 - DNA, 50 bp, Enterococcus faecalis
  source 1..50: mol_type = genomic DNA
caatatctttaactaagggaaacgatagtttcccaaagttaaagatacca

SEQ ID NO: 17275 - DNA, 40 bp, Enterococcus faecalis
  source 1..40: mol_type = genomic DNA
aactttttacttggaaataattttaaatttaccaaaaaaa

SEQ ID NO: 17276 - protein, 458 aa, Staphylococcus aureus
MKVAIYTRVSTLEQKEKGHSIEEQERKLRAYSDINDWTIQGVYVDAGYSGAKTDRPELNRLKENLSKIDLVLVYKLDRLTRNVKDLLDLLEIFEQENVSFRSATEVYDTSTAMGRLFVTLVGAMAEWERETIRERAMMGKQAAIRKGMILTPPPFYYDRVDNKYIPNKYKDVVVWAYEEVKKGNSAKGIARKLNASDIPPPNGIQWEDRTITRALRSPLSKGHYFWGDIFIENSHEPIITDEMYNEIKERLNERVNAKTITHTSVFRGKLICPNCNGRLCLNTSYRKLKRGDVIHKNYYCNNCKVNKSGAFSFTEKEALKVFYDYLSKLDLSKYKAKEKEDKKIVTIDINKVMEQRKRYHKLYANGMMQEEELFELIKETDEKISEYEKQKERVPKKRLDVSKIKNFKNILLDSWNAFTLEDKEDFIKMAIKSIEIEYIHVKRGKTKHSIKIKNIDFY

SEQ ID NO: 17277 - DNA, 50 bp, Staphylococcus aureus; identical to SEQ ID NO: 12712
  source 1..50: mol_type = genomic DNA

SEQ ID NO: 17278 - DNA, 40 bp, Staphylococcus aureus
  source 1..40: mol_type = genomic DNA
aaaatgtatggaggcacttgtatcaatataggatgtatac

SEQ ID NO: 17279 - DNA, 50 bp, Staphylococcus aureus
  source 1..50: mol_type = genomic DNA
cttttgtgcggaactacgaacagtggataaatacgaagtgtacaaacttc

SEQ ID NO: 17280 - DNA, 40 bp, Staphylococcus aureus
  source 1..40: mol_type = genomic DNA
gaaatgaaagcagggacttggacaaatatatgatatatac

SEQ ID NO: 17281 - protein, 458 aa, Staphylococcus aureus; identical to SEQ ID NO: 13066

SEQ ID NO: 17282 - DNA, 50 bp, Staphylococcus aureus; identical to SEQ ID NO: 12712
  source 1..50: mol_type = genomic DNA

SEQ ID NO: 17283 - DNA, 40 bp, Staphylococcus aureus; identical to SEQ ID NO: 17278
  source 1..40: mol_type = genomic DNA

SEQ ID NO: 17284 - DNA, 50 bp, Staphylococcus aureus; identical to SEQ ID NO: 17279
  source 1..50: mol_type = genomic DNA

SEQ ID NO: 17285 - DNA, 40 bp, Staphylococcus aureus; identical to SEQ ID NO: 17280
  source 1..40: mol_type = genomic DNA

SEQ ID NO: 17286 - protein, 458 aa, Staphylococcus aureus
MKVAIYTRVSTLEQKEKGHSIEEQERKLRAYSDINDWTIQGVYVDAGYSGAKTDRPELNRLKENLSKIDLVLVYKLDRLTRNVKDLLDLLEIFEQENVSFRSATEVYDTSTAMGRLFVTLVGAMAEWERETIRERAMMGKQAAIRKGMILTPPPFYYDRVDNKYIPNKYKDVVVWAYEEVKKGNSAKGIARKLNASDIPPPNGIQWEDRTITRALRSPLSKGHYFWGDIFIENSHEPIITDEMYNEIKERLNERVNVKTITHTSVFRGKLICPNCNGRLCLNTSYRKLKRGDVIHKNYYCNNCKVNKSGAFSFTEKEALKVFYDYLSKLDLSKYKAKEKEDKKIVTIDINKVMEQRKRYHKLYANGMMQEEELFELIKETDEKISEYEKQKERVPKKRLDVSKIKNFKNILLDSWNAFTLEDKEDFIKMAIKSIEIEYIHVKRGKTKHSIKIKNIDFY

SEQ ID NO: 17287 - DNA, 50 bp, Staphylococcus aureus; identical to SEQ ID NO: 12712
  source 1..50: mol_type = genomic DNA

SEQ ID NO: 17288 - DNA, 40 bp, Staphylococcus aureus; identical to SEQ ID NO: 17278
  source 1..40: mol_type = genomic DNA

SEQ ID NO: 17289 - DNA, 50 bp, Staphylococcus aureus; identical to SEQ ID NO: 17279
  source 1..50: mol_type = genomic DNA

SEQ ID NO: 17290 - DNA, 40 bp, Staphylococcus aureus; identical to SEQ ID NO: 17280
  source 1..40: mol_type = genomic DNA

SEQ ID NO: 17291 - protein, 562 aa, Acutalibacter muris
MKPTAIYSRKSKFTGKGESTANQIDLCREYIALHSGKEAARTALIFEDEGFSGGNLNRPAFQQMLSAARNHEISSIVVYRLDRISRNISDFSTLIEELSRLNVAFISIREQFDTGSPMGRAMMYIASVFSQLERETIAERIRDNMHELAKTGRWLGGNTPTGYCSESVQTITVDGKSRKSCKLKLLPEEGELVRKIYSLYAQTDSLSKTEAELRRQNIKTKTGRDFTRFAVRNILQNPVYLLADQEAYQYFTENEAELCSSPADFDSTHGILAYNRTDQEKGRATVYLPVNEWIVTVGQHEGLIPGREWVKVQESLEQNRSKSYRKPRSNQALLTGLLFCSCGSRMYPKVSKRLNKEGQLVYSYVCKCKEHSQGSQCAQKNVSGNRLDAAVLEEIKGLTEDKAAFVEQLEKSKSFYSGDRTGYDERLAGLRKKCADVETKLTALVDSLAELDSTAAKNQVAKRIDELSGQQETLQTRITELEGLTAQNELSAEEFDILVQMLSSFRTTIDLLSVEEKRAAIRTVVQKVVWDGDAAHVVLFGAEGDVGYTTIPDLSQSSEDSK

SEQ ID NO: 17292 - DNA, 50 bp, Acutalibacter muris
  source 1..50: mol_type = genomic DNA
tgtcgcagtcaagtgaggatagcaaatgctatgctaacacgagagagata

SEQ ID NO: 17293 - DNA, 40 bp, Acutalibacter muris
  source 1..40: mol_type = genomic DNA
tgcttctaagtgtattgaaaatgaaatcctcatgttcttc

SEQ ID NO: 17294 - DNA, 50 bp, Acutalibacter muris
  source 1..50: mol_type = genomic DNA
tgtcgcagtcaagtgaggatagcatgtgctatgctaacacgagagagata

SEQ ID NO: 17295 - DNA, 40 bp, Acutalibacter muris
  source 1..40: mol_type = genomic DNA
tgctaattattgtattgaatgtgattttctcatcttcttt

SEQ ID NO: 17296 - protein, 471 aa, Microbacterium foliorum
MDCVIYTRISLDRTGEGLGVARQEKECRALAKKLGLRVVKVYSDNDISATSGKVRPDFEAMLDAQPPAIVAWHQDRLLRLTRDLERVITLNVPVYSVTAGTLDLTTPAGRAVARTVAAWSQYEGEQKATRQVAANVQRAVSGVHQGRVGYGYRREGSAVVLHDAEADTIRAAVKRVLDGESLRAVCKDLDAQQVPTPGRGAGWNTTTLKQLLLRPSLAGLTVHRGQVVGHSPADSPRVIDEDTHERLKAVLTDPLRRTSPAGRTPKYLLGGIARCGRSTGALDEPGKPVECGGVMVRAVGRKTRQANGNEKRQPPSYVCSECYRVRRKQDSVDDAVDRVLIGRLQMPDAAALFTQGDPATLQEARDTIEALDARLANAADMFATGDIDAAQLTRITERLRADRVQAAAALDAALPPAVPAELIGPNALQVWGGLSMDVKRAVLDTLVTVTILPSGSGKAFDPATVRVTWKS

SEQ ID NO: 17297 - DNA, 50 bp, Microbacterium foliorum
  source 1..50: mol_type = genomic DNA
aggtaccttttcaccattatgcagggcgctggcatggcgctaaggtacct

SEQ ID NO: 17298 - DNA, 40 bp, Microbacterium foliorum
  source 1..40: mol_type = genomic DNA
gaggatcaggaacacgagcgggaggagcatcaggatctcc

SEQ ID NO: 17299 - DNA, 50 bp, Microbacterium foliorum
  source 1..50: mol_type = genomic DNA
aggtaccttttcaccattatgcagaacgctggcatggcgctaaggtacct

SEQ ID NO: 17300 - DNA, 40 bp, Microbacterium foliorum
  source 1..40: mol_type = genomic DNA
gagcaccaggaagaccaggaagaggggaatctggagctcc

SEQ ID NO: 17301 - protein, 533 aa, Bacteroides helcogenes
MENFDLKGFAKGKKQQKEQIGGNAIIYTRVSSSEQVDGQSLEVQIDKCREYAKVRSYTIVGEFGGTYESAKSDKERKEFNRMLAFIKQSNKKGSSQPVKTVIVFSTSRFSRTGSTTIIEEVEARGAYVVSATSNYDPRTPVGKYMQLMELANARFQNDEKRATTIENSVKALLKGRWIGKAPRGYDQKTTKKEQIITINEEGKLIRKAFLWKANNKLSNEEIRHRLEAEGLHICKQKLSELFKNPFYCGYMAHKFLQGDIVQGNHPPLISKEIFLKVNGELSKNHSGYEQKIDKEYAPLLGSIKCPCCGKNLSASISTKMRKKFGRTDIGYYVCSRKGCKYNSSIKKVHEAFEEEVNRYSLSDKVSELLKMQLTITFEYMNQENRERAKSIKANIKAKEKELEQVETNYALCTDAKKQSICEKVMTKLEKEVRDLKTEFSKVNTEILNLDKFIDFAFKMRSNLFGLWELQGLEGRRRLQKLVFPDGFIYDKNNEHIEPKRVNQFFLIKYSYPTGNGDKKKGTNREKHDSSLRV

SEQ ID NO: 17302 - DNA, 50 bp, Bacteroides helcogenes
  source 1..50: mol_type = genomic DNA
aaaacacgattcgtcccttagagtacccttaacggatgaaatattgaacc

SEQ ID NO: 17303 - DNA, 40 bp, Bacteroides helcogenes
  source 1..40: mol_type = genomic DNA
tcacagagcttaatcgagtactcgaagcgggacttgaacc

SEQ ID NO: 17304 - DNA, 50 bp, Bacteroides helcogenes
  source 1..50: mol_type = genomic DNA
aaaacacgattcgtcccttagagtctccttaacggatgaaatattgaacc

SEQ ID NO: 17305 - DNA, 40 bp, Bacteroides helcogenes
  source 1..40: mol_type = genomic DNA
tcacacagtttaacccagtcttcaaagcagcacttgaggc

SEQ ID NO: 17306 - protein, 582 aa, Pseudomonas fluorescens
MLGIQAMQRKCYSYVRFSHKKQELGTSFARQSDIQHFVEKHNLIVDTKLEDLGVSAFRGKNSQKGQLGDFIDLVENGLIEENSILLIENFDRLSRQKVIKSTQIFINLLNRGVDIAVLDTGKIYSKNTLLSSDFFIAVIEFERANAESARKSDFTSSAWNIHRDEMRKTKAVKTRKTPSWIGVSGVVKARPGDESAKFFIIENEARKIRKIFDLALSKGLSETARSVNEWLEPDEPKYSIHQIQYLLKNRKVIGEHQPMKFHESEMGQMKLMPEGPTIHDYYPSIVDKSIFEEVQEKVLGRKPFSGNFNKSRLNIFQGFITCYHCAGTIRYMDKSSSERSNKHYFVCTNSMSGKCALGKRLTYNASEAMQFFFEKTDRLNLSEIFENDENILRLNNSIKDAERALKNTNHQLEQLKKQIREMLRIGKNISDTLNEMLIEFETLKREQTNTLKTLKEEKETSVAQIEVSRNFNQENILELLNDKSDEATRKRININNHLKQIIENIQFFCRGYSKKNPITGVEDKRSTLIPTMIVKFKNGAVRVIVENELIKDVGEQSGGAELYLEILEDMHQQMILKKALTV

SEQ ID NO: 17307 - DNA, 50 bp, Pseudomonas fluorescens
  source 1..50: mol_type = genomic DNA
cggggtcttatcgcgtaatagatacacctgtgctacgctataagacactc

SEQ ID NO: 17308 - DNA, 40 bp, Pseudomonas fluorescens
  source 1..40: mol_type = genomic DNA
ccgcgcgtagcagtagatgcagccgtgctcgcaaccgcga

SEQ ID NO: 17309 - DNA, 50 bp, Pseudomonas fluorescens
  source 1..50: mol_type = genomic DNA
cggggtcttatcgcgtaatagataaacctgtgctacgctataagacactc

SEQ ID NO: 17310 - DNA, 40 bp, Pseudomonas fluorescens; identical to SEQ ID NO: 3390
  source 1..40: mol_type = genomic DNA

SEQ ID NO: 17311 - protein, 547 aa, Pseudoflavonifractor phocaeensis
MDIHTTRQQLKTKSIYDIPLRVTYYARVSSEKDEQLNSLDNQISYYEDLIKKNPNWTYAEGYIDEGLSGATTKKRENFHRMIDDAEAGKFDLIITKEISRFARNTVDSISYTRELLNAGVGVFFQNDNINTLDDDSELRLTIMSGIAQDELRRLSGRVKFGHSQAIKNGVVLGNSRIFGYVKDDGRLVIDEDEAPMVRELFELYATGQYSMKQIETLFWEKGYRNHNGKKIAHTTMSGIISNPKYKGYYVGNKVKVIDMFTKKQKFLPPEEWVIHKDETGLAVPAIVDEELWEQANKVLKKRSEDVKGRQGICNHANLLTGKLFCTDCGAPYYRRESKDKYGNKNSKWVCSNKINSGAAACASFPIYEEELKPLLFEVFNETEANAEALIEEYIEMYKSLADSGDTAKQIAALRDQADLARKKKSKLLGYNAAGQLSDKDFLSMNKECDKEIEEAERQIYELEQQQLSKEEFRKHIDTIRRVLHDAKRDAAQGIINKDFVDKYIDKIFVTPEGDGTMRLQIKIFTGEITDKYLSKLKGRTGHTVKKM

SEQ ID NO: 17312 - DNA, 50 bp, Pseudoflavonifractor phocaeensis
  source 1..50: mol_type = genomic DNA
aaaggtcgtacgggtcacacggtgaaaaagatggtacccatacgaactat

SEQ ID NO: 17313 - DNA, 40 bp, Pseudoflavonifractor phocaeensis
  source 1..40: mol_type = genomic DNA
cgtgggcggccagatggtcaagaagatgatccaggcctac

SEQ ID NO: 17314 - DNA, 50 bp, Pseudoflavonifractor phocaeensis
  source 1..50: mol_type = genomic DNA
aaaggtcgtacgggtcacacggtgcgaaagatggtacccatacgaactat

SEQ ID NO: 17315 - DNA, 40 bp, Pseudoflavonifractor phocaeensis
  source 1..40: mol_type = genomic DNA
agagggtggccagatgagccggactatgagccaggccttc

SEQ ID NO: 17316 - protein, 582 aa, Methylorubrum extorquens
MVALEKPQRFGVSYARFSHRKQAAGSTIERQEELLARFLQENPDITLHEQFSDKGVSGFRGKHAKDGALSRLLEAIKVGRLPTPLVLIIESVDRLSREPMMDAWDRFNTLLKAGVTVAVCDMRLEIDREALSKQSWKLHSLINAMERAHGESARKSTLITGGWNKSIKAAYARKSAIKGYVGPPWVTLDEETLRYVITEKNRPTVQTVRRIFDWAAEGATAHGIAKRLNEQQVPLFRAHVAKDHVRQGWYQGYITEILKNRQVLGEHRYRGGEVIEGYFEPIISPELFFRAQQNLVRRPGVAGRRGQTLSNLFTGLAFCTCGGHMEMTRNRSATENGPEPIKYLMCSNRKRRFGCEAVGMVNYPKLEEAVLSFLPNIPWADIVREESPDYPLPGIDDRIATVMLEIAELETTRSQARRMILKGEEFEAEFTPVLTEAIASLRQAEARLAELQVERAKVVSTWENRPGLIRTAQEFREKMNILSDAERFIARTRLSETLKQMVTKMVCDTVRKTVAVEWGGRYAQLVFMPIRKDPIVYGRWTRLFYPNDFPGEAERIDPKKEFTRLTHEIMEAGFSWDRFVEK

SEQ ID NO: 17317 - DNA, 50 bp, Methylorubrum extorquens
  source 1..50: mol_type = genomic DNA
aaggtggggaatagaagaaaaagagaacccaatagacaattccccacctt

SEQ ID NO: 17318 - DNA, 40 bp, Methylorubrum extorquens
  source 1..40: mol_type = genomic DNA
agatcatgatcgcccgcgcgaaccaccggaccacctatcc

SEQ ID NO: 17319 - DNA, 50 bp, Methylorubrum extorquens
  source 1..50: mol_type = genomic DNA
aaggtggggaatagaagaaaaagaccacccaatagacaattccccacctt

SEQ ID NO: 17320 - DNA, 40 bp, Methylorubrum extorquens
  source 1..40: mol_type = genomic DNA
agatgctgagcgcatgcgcccaccacaggtccacctttgc

SEQ ID NO: 17321 - protein, 697 aa, Mycolicibacterium mucogenicum
MTTRKPSSPDDSQGAHAAPLSSMGSGLAGNGSDAAKTAIIYLRVSTARQATKDGEAEGYSIPAQRTACIKKARDLGATVAEEYVDAGASARSADRANLQRMLTRLRDTTLPSVDFVIVHKLDRLARDRADDVAILLDIRKAGATLVSVSEQIDETPAGTLMHGIVASFAEFYSKNLSTEAKKGLEEKVRRGGTPGVAPVGYLNTTRRIDGTEVKSVIVDQDKAPHIQWAFRQYATGDWSISSLRDGLEDRGLKTRETLKFRGQPLSHSQVHRLLSNPYYKGQIRFKGLLFDGKHEPLVDEVTWQTVQDILASRRIAGDRSWKHGHFLKGSLVCARCGGKIGYGWSRGKGGKYDYFFCIGRHTGRTDCDLPYLQASVVEKKVASIWSTIRFTDKTLTALEDTVTTDFDQLFSEQEKLAAEQRRRLIQLERQKSKLIDAYMADAIPVEDLKQRQTQVATEIAAARRMIAESDIERAQLHQRLKTVLALLRKARQTYDTSNDSTRQLLNTAMFERLEVDSRDDGPTANGWTPQEPLVERAELTEIMDAVLDYHPDTALVGGPLASPLASSTTPHLTSAKTNLESGNSGVPRDTTNPADNAATNTPSYPLAHPTAAVSKPTLTTAKSRSGVLNDGAPRGTTPTAHQPHLGGLGRFRRTKPIAWTATGAGQSRGTKTAHETGHERTPGELSFIGGSNEYNLA

SEQ ID NO: 17322 - DNA, 50 bp, Mycolicibacterium mucogenicum
  source 1..50: mol_type = genomic DNA
gggttccaacgaatacaacctggcgggcctactgctacaccgttggaaca

SEQ ID NO: 17323 - DNA, 40 bp, Mycolicibacterium mucogenicum
  source 1..40: mol_type = genomic DNA
cgaaggtcgaacgtttggcggtggcggagggatttgaacc

SEQ ID NO: 17324 - DNA, 50 bp, Mycolicibacterium mucogenicum
  source 1..50: mol_type = genomic DNA
gggttccaacgaatacaacctggcaggcctactgctacaccgttggaaca

SEQ ID NO: 17325 - DNA, 40 bp, Mycolicibacterium mucogenicum
  source 1..40: mol_type = genomic DNA
ggaaggtctaaggtgtggaagtgtcagaggtgtttgaacc

SEQ ID NO: 17326 - protein, 531 aa, Pseudooceanicola nitratireducens
MTKRAAIYARYSSDRQKDTSLDDQVSMARRFAESQGWEIVGIFTDRQKTGRNKRRPGFQALTDCVEAGQVDVVIVEAVDRLTRRIADALNHFDLFRFQKTDLHSVTEGPQDFFKVLLAGLGAQFYAESVAAHSKRAMKGGIERGRLHTSAYGYRNLAVETGLNREVDPAEAEVVLRIFEEFADGRSAMAIAQGLNADRIDAPKGGSWDPSSIRGHEARGEGILNNSLYIGVVRVCATSRSYHPESGAQRVVLTPDEIVEASIPELRIVPQALWDQVKAAQALRRQKVAAKGNPVAARRTRHLFSGLMVCGCCGGRFVKHSTTSFKCGEARKGACTNQLSMSQKRIEKRVFDCIRSAFLSPELVKQFDKAVATERKKLDTRDFDGELTGLRAELATAQGRMDGILHSIEEGARFATFKARAAELDAEIIRITALISKTEATWHSSQIASVDIKAVYASAIAEMEILLGDPALVDQAHELLSTLIRRIVLTPDEAAPHGMAVTLEAGIADLLRPTLGAGQPDGGTNDLLSISC

SEQ ID NO: 17327 - DNA, 50 bp, Pseudooceanicola nitratireducens
  source 1..50: mol_type = genomic DNA
acttcaaatatcggccgcacagagggcgttgtggcaccgatatttgaatt

SEQ ID NO: 17328 - DNA, 40 bp, Pseudooceanicola nitratireducens
  source 1..40: mol_type = genomic DNA
gacgtagaggggggcagggggctgtctgccccctgcgcca

SEQ ID NO: 17329 - DNA, 50 bp, Pseudooceanicola nitratireducens
  source 1..50: mol_type = genomic DNA
acttcaaatatcggccgcacagagctcgttgtggcaccgatatttgaatt

SEQ ID NO: 17330 - DNA, 40 bp, Pseudooceanicola nitratireducens
  source 1..40: mol_type = genomic DNA
gagggagatgggggcagggctctatctgccccaggcttcc

SEQ ID NO: 17331 - protein, 476 aa, Streptococcus suis
MDRNKVAIYVRVSTQGQANEGYSLDEQVDLLTNYCKLKNWDIYDVYVDPGFSGKNMDRPEIERLSIDAKKKVFDIVLIYDLKRFGRSQRENIVLVEDVLQKNDIRLMSFTENFDTSTPVGKMVFGILSAHAELDRGNIAERMLMGKIGRAKAGKAMSWGMPPFAYDYNKETGDLELDEVKAPIVEMIFSDYLSGSSVNQIVQKLNSMSYHGKNHNWRHHAVTVIIDNPVYCGMMKYMGQTYQARHTPIIDKKTFELTQIERKKRLSKYHDADWVGPFQRKYIGSKVCYCGLCGANLKSEKDKKNKQTGIRPISFYCPNTRSRGAGGCTNPRFKQSVLEGYILNEVAKLQQNPERLKDIKPAEDNELHNKIATYEKKIKQNSSKLSKLNDLYLNDLISLDDLKKQSKSLLNENEYLEEQIELLSATTREDELRKKIDTFLAFPDILTADYDTQKQAVELVISRVEATKEGIDIFFNF

SEQ ID NO: 17332 - DNA, 50 bp, Streptococcus suis
  source 1..50: mol_type = genomic DNA
aaccctgttttaagacccagcattataatacttggcaataaaacagggga

SEQ ID NO: 17333 - DNA, 40 bp, Streptococcus suis
  source 1..40: mol_type = genomic DNA
ctcctgtacttccctcatgataaaactggagtaaaccagt

SEQ ID NO: 17334 - DNA, 50 bp, Streptococcus suis
  source 1..50: mol_type = genomic DNA
aaccctgttttaagacccagcatttgaatacttggcaataaaacagggga

SEQ ID NO: 17335 - DNA, 40 bp, Streptococcus suis
  source 1..40: mol_type = genomic DNA
ctgctgtagttcactcatctgaaaaatggagataaaccgt

SEQ ID NO: 17336 - protein, 515 aa, Bacillus thuringiensis
MKTAIYLRKSRADLEAEARGEGETLAKHRTTLLKIAKEMNLNVLAVREEIVSGESLVKRPEMLALLEEIEDNKYDVVLCMDMDRLGRGGMKEQGIILETFKRSNTKIMTPRKTYDLNDEWDEEYSEFEAFMARKELKIITRRMQRGRIASVEAGNYLGTHAPYGYDIHRLNKRERTLTINSEEASVVRMIFDWYANEDMGANAIRSKLNDLGYKSKLGNEWNPYSILDILKNNVYIGKVTWQKRKEVKRPDAVKRSCARQDKSDWIIADGKHEPIIPESLFEQVQEKLNSRYHVPYNTNGIKNPLAGIIKCSKCGYSMVQRYPKNRKETMDCKHRGCENKSSYTELIEKRLLEALKEWYINYKADFEKHKQDDKLKETQVIQMNEAALRKLEKELVDVQKQKNNLHDLLERGVYTVDMFLERSNVVSDRITEITSTMENLKKEIKTEIKKEKVKKDTIPQVEHVLDLYFKTDDPKKKNSLLKSVLEKAVYKKEKWQRLDDFELVLYPKLPQDGDI

SEQ ID NO: 17337 - DNA, 50 bp, Bacillus thuringiensis
  source 1..50: mol_type = genomic DNA
tgtcgtcaccttgttggtgtaattaggttgttaccaacagggtgataaca

SEQ ID NO: 17338 - DNA, 40 bp, Bacillus thuringiensis
  source 1..40: mol_type = genomic DNA
tgtggccattaagcgcatgagatttaccccatttaatcct

SEQ ID NO: 17339 - DNA, 50 bp, Bacillus thuringiensis
  source 1..50: mol_type = genomic DNA
tgtcgtcaccttgttggtgtaattaagttgttaccaacagggtgataaca

SEQ ID NO: 17340 - DNA, 40 bp, Bacillus thuringiensis
  source 1..40: mol_type = genomic DNA
tctaggcattaagtttatcaaacttacctcatttaatcct

SEQ ID NO: 17341 - protein, 555 aa, Streptococcus equi
MNKSTLTIEDIKTQNLDSLPDRITALYCRLSAEDANEGESNSISNQKQILSQVAIRENLPNPFFFVDDGFSGSNAQRPDFQKMMSLVETGKIQAVVVKDLSRLSRDYLLTGQLTEITFPSKNIRFISLNENLDSNKRNSQDAYLAPLVSLFNNWYSLQCSEKIKLSKHTKAKTGEKIGWIAPYGYIKNPENPKEWLVDDYASQIVKRVFKEYLSGKPIASIAGGLRKDKILTPANYKKKLGISNYRVLETDPYHWKSQMICQMIEKEEYTGATINLKTAKISYKQRGHRMRPREDWLIFPNTHEAIISQEDFEMARKMLGHKRVTPKNRWKNTAGHENLFAGIVFCENGHKLSFCPQQKNHLNLDHYKCYHYHRAGDTCSGSHYLRKETLEELVLGDLQQLISSIQFNEEELLTKLKSRFDIRESKKQDSLRKHLNKAKKRSLELDTIIQRLYEKQLLDDISDERFRKLADSYESEQAELNQKIQELQEVLINQTESEESIDKFMRTIRQYTNLEALSTQLVNELIDKIVIHQPTGRGKKRQVTIELHYRFIGEL

SEQ ID NO: 17342 - DNA, 50 bp, Streptococcus equi
  source 1..50: mol_type = genomic DNA
ggactgctcaccgaggtgtaaatattataccacagctcagacagcagtcc

SEQ ID NO: 17343 - DNA, 40 bp, Streptococcus equi
  source 1..40: mol_type = genomic DNA
ctcttacttgatagtatcattatatcacactctatcttaa

SEQ ID NO: 17344 - DNA, 50 bp, Streptococcus equi
  source 1..50: mol_type = genomic DNA
ggactgctcaccgaggtgtaaataatataccacagctcagacagcagtcc

SEQ ID NO: 17345 - DNA, 40 bp, Streptococcus equi
  source 1..40: mol_type = genomic DNA
ttcttgctttataatttaaatatatctcactatttcttaa

SEQ ID NO: 17346 - protein, 557 aa, Agrobacterium tumefaciens
MTRVALYARYSSDSQRDASIEDQLRQCRERAAREGWTIVETYSDRAISGASLIRSGIQSLLADAQAGRFDMVLSEALDRLSRDQEDVAGVFKRLSFAGVRIFTLSEGEINELHVGLKGTMNALFLKDLAIKTHRGIRGRVEAGRIGGGNAYGYRVVHRLDARGEPIRGEREIIAEQADIVRRIFRDYATGKGPRRIAAELNRENIPSPTGKRWNDATIRGNRAISSGILNCELYIGVIRWNRQKKLKNPDTGRFAYRLNPESEWIRTEAPELRIVPQDLWDAAKRRQDKLTGLYRKQIDGARDAMHTARQKNGGLNATHRPRTLLSGLVFCGCCGGSYARRGQDRFTCTNHMLGNGCDNARTVPGKLLETRVLAGLSERLMTPEMVTEAMSAYTQETNRLNRERRIAAETTRRDLAETSKAIAEIVRVIEQGGWHRALSDRLTELEARQDSLAARLADIPEDVPDLHPGIAETYRRRIERLTETLSHPDQALEAAEAIREVIDRIVVTPGDKRGSYSITLQGELGTILDWIDRTGKPGYKPKPDTAQSRLSVPVEAR

SEQ ID NO: 17347 - DNA, 50 bp, Agrobacterium tumefaciens
  source 1..50: mol_type = genomic DNA
tttgtcggtcccggtagaagcccgggcaggtttttaccgagacagacatt

SEQ ID NO: 17348 - DNA, 40 bp, Agrobacterium tumefaciens
  source 1..40: mol_type = genomic DNA
cttgcctccgtcatgctcgggcttgtcccgagcatctgct

SEQ ID NO: 17349 - DNA, 50 bp, Agrobacterium tumefaciens
  source 1..50: mol_type = genomic DNA
tttgtcggtcccggtagaagcccgaccaggtttttaccgagacagacatt

SEQ ID NO: 17350 - DNA, 40 bp, Agrobacterium tumefaciens
  source 1..40: mol_type = genomic DNA
cttccttccttcatgctataccctttccagagcatctcct

SEQ ID NO: 17351 - protein, 542 aa, Luteococcus japonicus
MPRAAVIYCRISLDQRDGAGVERQELECRALARREGYEVIEVCVDNSVSAYSGVRRPAFERTVELLTSGRADVLLCWHLDRVTRSLDDLQRLLRINGLLIHPVTGTIVDTSDASAVMSGSILTVVSRFESQHKSERVIAAARAKAQKGLLTSGRIWGYNADGTATEEACLAIPTLFETFIRTHNLEAARDAFIQIAPDAPSSRTVIRSRLTQPVYAGISTFRGEVFDVEPQWEPLIPREVFRRAEVILNSPNRRYTGHERGVVQGLGTGLFICGKCGESMIAGGVMNTAGGKRQAYRCRTNAHLNRDREDIDRAVMALLLWRLEIASAKAALLPRNDAPDPAARLSERLTEAERKLAEVTEDYVADLLPRSTALPAIERLRSEIEAMGRELATMGWEGPKPRAYNVSQTILALPLHALRQVLAATMVVTLPPLPPPTGVRKKGQRVGLREGSITVEWLDEPSFDSWHSSHHRPDWSGLTWPLPDAPDWLLDQLNDAPALSPSVRQAVWRAVAPYAIGVEPLPRTSDGDLDMAQVADIGSGEA

SEQ ID NO: 17352 - DNA, 50 bp, Luteococcus japonicus
  source 1..50: mol_type = genomic DNA
ccagcagttccatgactattcagggtgcccggtggttattgtcccagtca

SEQ ID NO: 17353 - DNA, 40 bp, Luteococcus japonicus
  source 1..40: mol_type = genomic DNA
ccagcagtacctggaccgtgtcccccacggctactgcccg

SEQ ID NO: 17354 - DNA, 50 bp, Luteococcus japonicus
  source 1..50: mol_type = genomic DNA
ccagcagttccatgactattcagggggcccggtggttattgtcccagtca

SEQ ID NO: 17355 - DNA, 40 bp, Luteococcus japonicus
  source 1..40: mol_type = genomic DNA
ccagctgtgcctgccccgtggcctacatggctactgcgca

SEQ ID NO: 17356 - protein, 458 aa, Staphylococcus capitis
MNYERSYLRSCQVSTLEQKEHGYSIEEQERKLKSFCEINDWSVSDVFIDAGFSGAKRDRPELQRMMKDIKRFDLVLVYKLDRLTRNVRDLLDLLEIFEQNNVAFRSATEVYDTSTAMGRLFVTLVGAMAEWERETIRERVMMGKRAAIKQGMILTPPPFYYDRVDNTYVPNDYKKVVLWAYDEVLKGVSSKGIARKLNDSDIPPPNGKRWEDRTITRALRSPITRGHYTWGDVFIENSHEPIITEEMYQQIKERLEERINTKIVSHVSVFRGKFICPKCGGTLTMNTATKKRKKGYVTYKTYYCNTCKTKKQSFGFSENEALRVFRDYLSKLDLDKYEVKTKQKDDVVTIDIDKIMEQRKRYHKLYAKGLMQEEELFELIKETDETIAEYEKQKELVPRKTLDVDKIKNFKNVLLESWKIFSLEDKADFIKMAIKSIDIEYVKLKNRHSIKINDIEFY

SEQ ID NO: 17357 - DNA, 50 bp, Staphylococcus capitis
  source 1..50: mol_type = genomic DNA
gtacggaagtatagacactcgattaatatctaatgtgtatacttccgtat

SEQ ID NO: 17358 - DNA, 40 bp, Staphylococcus capitis
  source 1..40: mol_type = genomic DNA
gtatggcggtacatgtataaatattggatgtattccttct

SEQ ID NO: 17359 - DNA, 50 bp, Staphylococcus capitis
  source 1..50: mol_type = genomic DNA
gtacggaagtatagacactcgattggtatctaatgtgtatacttccgtat

SEQ ID NO: 17360 - DNA, 40 bp, Staphylococcus capitis
  source 1..40: mol_type = genomic DNA
ttatgggggtaaaaataaaggtgttggctgcattccttct

SEQ ID NO: 17361 - protein, 458 aa, Staphylococcus capitis
MNYERSYLRSCQVSTLEQKEHGYSIEEQERKLKSFCEINDWSVSDIFIDAGFSGAKRDRPELQRMMNDIKRFDLVLVYKLDRLTRNVRDLLDLLEVFEQNNVAFRSATEVYDTSTAMGRLFVTLVGAMAEWERETIRERVMMGKRAAIKQGMILTPPPFYYDRVDNTYIPNDYKKVVLWAYDEVLKGVSSKGIARKLNDSDIPPPNGKRWEDRTITRALRSPITRGHYSWGDVFIENSHEPIITEEMYQKIKERLEERINTKIVSHVSVFRGKFICPRCGGTLTMNTATRKRKKGYVTYKTYYCNTCKTRKQSFGFSENEALRVFRDYLSKLDLDKYEVKTKQKDDVVTIDIDKIMEQRKRYHKLYAKGLMQEEELFELIKETDETIAEYEKQKELVPRKILDIDKIKNFKNVLLESWKIFSLEDKADFIKMAIKSIDIEFVKLKSRHSIKINDIEFY

SEQ ID NO: 17362 - DNA, 50 bp, Staphylococcus capitis
  source 1..50: mol_type = genomic DNA
gtacggaagtatagacactctattaatatttaatgtgtatacttccgtat

SEQ ID NO: 17363 - DNA, 40 bp, Staphylococcus capitis; identical to SEQ ID NO: 17358
  source 1..40: mol_type = genomic DNA

SEQ ID NO: 17364 - DNA, 50 bp, Staphylococcus capitis
  source 1..50: mol_type = genomic DNA
gtacggaagtatagacactctattggtatttaatgtgtatacttccgtat

SEQ ID NO: 17365 - DNA, 40 bp, Staphylococcus capitis; identical to SEQ ID NO: 17360
  source 1..40: mol_type = genomic DNA

SEQ ID NO: 17366 - protein, 458 aa, Staphylococcus capitis
MNYERSYLRSCQVSTLEQKEHGYSIEEQERKLKSFCQINDWSVSDVFIDAGFSGAKRERPELQRMMNDIKRFDLVLVYKLDRLTRNVRDLLDLLEVFEQNNVAFRSATEVYDTSTAMGRLFVTLVGAMAEWERETIRERVMMGKRAAIKQGMILTPPPFYYDRVDNTYIPNDYKKVVLWAYDEVLKGVSSKGIARKLNDSDIPPPNGKKWEDRTITRALRSPITRGHYTWGDVFIENSHEPIITEEMYQQIKERLEERINTKIVSHVSVFRGKFICPRCGGTLTMNTATRKRKKGYVTYKTYYCNTCKIRKQSFGFAENEALRVFRDYLSKLDLEKYKVKTKQKDDVVTIDIDKIMEQRKRYHKLYAKGLMQEEELFELIKETDETIAEYEKQKELVPSKTLDVDKIKKFKSVLLDSWKIFSLEDKADFIKMAIKSIDIDYVKLKNRHSIKINDIEFY

SEQ ID NO: 17367 - DNA, 50 bp, Staphylococcus capitis
  source 1..50: mol_type = genomic DNA
gtacggaagtatagacacctgattaatatttaatgtgtatacttccatat

SEQ ID NO: 17368 - DNA, 40 bp, Staphylococcus capitis; identical to SEQ ID NO: 17358
  source 1..40: mol_type = genomic DNA

SEQ ID NO: 17369 - DNA, 50 bp, Staphylococcus capitis
  source 1..50: mol_type = genomic DNA
gtacggaagtatagacacctgattggtatttaatgtgtatacttccatat

SEQ ID NO: 17370 - DNA, 40 bp, Staphylococcus capitis; identical to SEQ ID NO: 17360
  source 1..40: mol_type = genomic DNA

SEQ ID NO: 17371 - protein, 485 aa, Angelakisella massiliensis
MENGQVETLIVKDMSRLGREYLQVGQYTELIFPSYGVRFIAVNDGVDSLYESTNDFTPFRNLMNEFYAKDCSKKGRSVVRIKAETGARVSSRPRYGYMKDPADPKRHMVPDPETAPVVRYIFDLCVSGKGPAQIAKQLKKDKIPTPGYSYYQKHGVELTGVDITRPYNWSTNTVAGILEDETYLGHTINLKSTTLSFKNKKRIERPESEQLRFENTHEALVTQQTWEIVQDIRKHKRRRANMDEQNIFSGLVYCLDCGGTMVLHRAHTMDAVKNNFMCSTYKKKGKAVCSAHYIREQELNAILLDDIRRVTHFARQNELRFAEHIRKKQGKEAQQEIAVLQKKSDTMQKRQIELTKLFKRLYEDSVLGRIPDEQYRILSQEYTAEQKEIQEQLPAMEVRLQELKDSSSNIARFIENAKRHSEIPELTAEILRIFIKRVEVGERAEKYSRTAPQEVRIYYRDIGLVDELPQNMADSVSEEIPNEVA

SEQ ID NO: 17372 - DNA, 50 bp, Angelakisella massiliensis
  source 1..50: mol_type = genomic DNA
aattgtccccatgcaccggacacggagtgctccatctcatagggaaacga

SEQ ID NO: 17373 - DNA, 40 bp, Angelakisella massiliensis
  source 1..40: mol_type = genomic DNA
aagcaaagccccgctgctggagaacagcggggcttttatt

SEQ ID NO: 17374 - DNA, 50 bp, Angelakisella massiliensis
  source 1..50: mol_type = genomic DNA
aattgtccccatgcaccggacacgcagtgctccatctcatagggaaacga

SEQ ID NO: 17375 - DNA, 40 bp, Angelakisella massiliensis
  source 1..40: mol_type = genomic DNA
aagagaagccacgatgctgcagagcactggggattttata

SEQ ID NO: 17376 - protein, 590 aa, Clostridium tetani
MKKVEVIKGEGLLNGRRNGAEINLKRVAAYCRVSTDSEDQLQSYHSQVKYYTDLINENSDWTMAGIYADEAITGTQVDKRLDFQRLINDCMNGDIDMVITKSISRFARNTLDTLKYVRQLKEMNVAVFFEEENINTLTMDGELLLVILSSVAQQEVENISANVKKGLKMKMQRGELVGFHGCLGYDYDKESKTISINEDEAEIVRYIFRRYLEGAGGSVIGRELENLGYKSPRGSSKWSATTVLGIIKNEKYKGDLLMGKTFTLDPITKRRLENFGEEDKFHIKDHHEPIISEEDFDKAQAIRLRRAKNRNTVGSKNGKREKFSREYAFSCLLECGFCGSNLSRRSWHSNSQYKKTIWQCVTGTKKGKKFCPNSKGIEEIAIEKAFLESYRQLTSNNKDIVDKFLELIESTLKDNTLEKNIKKLEREISKITNKQNSLVDLRLEEKIEEKLYEEKYIDLQKEYSEKNKEKENLEYNLENNNEIKNRMKTFKTMLERKEVLKEFDRYVFESIVEKVIVGEIDENGNVDPYKLIFVYKTGFKDDLDGEKFKTPRKNASSKNKFIGKDSAELSTYTNNHVNKSCSHSSDATCG

SEQ ID NO: 17377 - DNA, 50 bp, Clostridium tetani
  source 1..50: mol_type = genomic DNA
atgttcccatagtagtgacgccacacgtggagtgtatagcgttactacaa

SEQ ID NO: 17378 - DNA, 40 bp, Clostridium tetani
  source 1..40: mol_type = genomic DNA
atgttttctaatacatatcatgtggagactataattctga

SEQ ID NO: 17379 - DNA, 50 bp, Clostridium tetani
  source 1..50: mol_type = genomic DNA
atgttcccatagtagtgacgccaccagtggagtgtatagcgttactacaa

SEQ ID NO: 17380 - DNA, 40 bp, Clostridium tetani
  source 1..40: mol_type = genomic DNA
atggtatctacttcatatccagttgttactattattctaa

SEQ ID NO: 17381 - protein, 587 aa, Klebsiella quasipneumoniae
MPQLYSYIRWSSERQQKGTTRQRQVIGAKEFAIANGLELVEIEDPGVSAFRGKNTTHGKLGDFIDAVRQGAIPPDSWLYVENLDRLTRQEVTTAQKLFIELLDLGLTLVTGMDKRVYTLESVNKNPTDLMISLLLFSRANEESKTKQARTIGNVESLIERHRQGLPVNIKSCGKHPFWIDDSGSQYESVKRHAIYWEIAREAIELFLSGYGIYKVKRFLDEKYPNGLNGKEWGYQVLKKMRESRALIGERQINIGSHTYTLRDYYPCLCKNEVEFLHLQELKGQNSYKSKKNPLKEQIKLLSGLAILRCSKCGGTMSSFMNKGKPRYICLNGRHLQKGCVGWSLTAPLVDHCVIIALLMGYMDANRKERQDTSDISALIEAKNTSVGELNVSITNLVAVIEAGVNVSELASRLKVLSTERETFLKEIERLKERKALIDSKGSFEVSMMDFINLIHWNVFSDYAHESRDKIRSTINKIIEHVIIDKTDGCITIKIKCRGSDEQLIFCGIGRKPHWKFDIALYVEQDTDGDTTFEEKSILPMANQLMEEATKQFALIREGYISYFDKICKILAAIGYPNIDGSAFWPNR

SEQ ID NO: 17382 - DNA, 50 bp, Klebsiella quasipneumoniae
  source 1..50: mol_type = genomic DNA
gcgcaatctttttcttgatgtttcgggcaccctaatgataaaaatccaat

SEQ ID NO: 17383 - DNA, 40 bp, Klebsiella quasipneumoniae
  source 1..40: mol_type = genomic DNA
tgagtccacgaggtttttcgggcagcccagggagacgaag

SEQ ID NO: 17384 - DNA, 50 bp, Klebsiella quasipneumoniae
  source 1..50: mol_type = genomic DNA
gcgcaatctttttcttgatgtttctagcaccctaatgataaaaatccaat

SEQ ID NO: 17385 - DNA, 40 bp, Klebsiella quasipneumoniae; identical to SEQ ID NO: 3415
  source 1..40: mol_type = genomic DNA

SEQ ID NO: 17386 - protein, 587 aa, Klebsiella pneumoniae
MPQLYSYIRWSSERQQKGTTRQRQVIGAKEFAIANGLELVEIEDPGVSAFRGKNTTHGKLGDFIDAVRQGAIPPDSWLYVENLDRLTRQEVTTAQKLFIELLDLGLTLVTGMDKRVYTLESVNKNPTDLMISLLLFSRANEESKTKQARTIGNVESLIERHRQGLPVNIKSCGKHPFWIDDSGSQYESVKRHAIYWEIAREAIELFLSGYGIYKVKRFLDEKYPNGLNGKEWGYQVLKKMRESRALIGERQINIGSHTYTLRDYYPCLCKNEVEFLHLQELKGQNSYKSKKNPLKEQIKLLSGLAILRCSKCGGTMSSFMNKGKPRYICLNGRHLQKGCVGWSLTAPLVDHCVIIALLMGYMDANRKERQDTSDISALIEAKNTSVGELNVSITNLVAVIEAGVNVSELASRLKVLSTERETFLKEIERLKERKALIDSKGSFEVSMMDFINLIHWNVFSDYAHESRDKIHSTINKIIEHVIIDKTDGCITIKIKCRGSDEQLIFCGIGRKPHWKFDIALYVEQDTDGDTTFEEKSILPMANQLMEEATKQFALIREGYISYFDKICKILAAIGYPDIDGSAFWPNR

SEQ ID NO: 17387 - DNA, 50 bp, Klebsiella pneumoniae
  source 1..50: mol_type = genomic DNA
gcacaatctttttcttgatgtttcgggcaccctaatgataaaaatccaat

SEQ ID NO: 17388 - DNA, 40 bp, Klebsiella pneumoniae; identical to SEQ ID NO: 17383
  source 1..40: mol_type = genomic DNA

SEQ ID NO: 17389 - DNA, 50 bp, Klebsiella pneumoniae
  source 1..50: mol_type = genomic DNA
gcacaatctttttcttgatgtttctagcaccctaatgataaaaatccaat

SEQ ID NO: 17390 - DNA, 40 bp, Klebsiella pneumoniae; identical to SEQ ID NO: 3415
  source 1..40: mol_type = genomic DNA

SEQ ID NO: 17391 - protein, 587 aa, Klebsiella pneumoniae
MPQLYSYIRWSSERQQKGTTRQRQVIGAKEFAIANGLELVEIEDPGVSAFRGKNTTHGKLGDFIDAVRQGAIPPDSWLYVENLDRLTRQEVTTAQKLFIELLDLGLTLVTGMDKRVYTLESVNKNPTDLMISLLLFSRANEESKTKQARTIGNVESLIERHRQGLPVNIKSCGKHPFWIDDSGSQYESVKRHAIYWEIAREAIELFLSGYGIYKVKRFLDEKYPNGLNGKEWGYQVLKKMRESRALIGERQINIGSHTYTLRDYYPCLCKNEVEFLHLQELKGQNSYKSKKNPLKEQIKLLSGLAILRCSKCGGTMSSFMNKGKPRYICLNGRHLQKGCVGWSLTAPLVDHCVIIALLMGYMDANRKERQDTSDISALIEAKNTSVGELNVSITNLVAVIEAGVNVSELASRLKVLSTERETFLKEIERLKERKALIDSKGSFEVSMMDFINLIHWNVLSDYAHESRDKIRSTINKIIEHVIIDKTDGCITIKIKCRGSDEQLIFCGIGRKPHWKFDIALYVEQDTDGDTTFEEKSILPMANQLMEEATKQFALIREGYISYFDKICKILAAIGYPDIDGSAFWPNR

SEQ ID NO: 17392 - DNA, 50 bp, Klebsiella pneumoniae
  source 1..50: mol_type = genomic DNA
gcacaatctttttcttggtgtttcgggcaccctaatgataaaaatccaat

SEQ ID NO: 17393 - DNA, 40 bp, Klebsiella pneumoniae; identical to SEQ ID NO: 17383
  source 1..40: mol_type = genomic DNA

SEQ ID NO: 17394 - DNA, 50 bp, Klebsiella pneumoniae
  source 1..50: mol_type = genomic DNA
gcacaatctttttcttggtgtttctagcaccctaatgataaaaatccaat

SEQ ID NO: 17395 - DNA, 40 bp, Klebsiella pneumoniae; identical to SEQ ID NO: 3415
  source 1..40: mol_type = genomic DNA

SEQ ID NO: 17396 - protein, 587 aa, Klebsiella pneumoniae
MPQLYSYIRWSSERQQKGTTRQRQVIGAKEFAIANGLELVEIEDPGVSAFRGKNTTHGKLGDFIDAVRQGAIPPDSWLYVENLDRLTRQEVTTAQKLFIELLDLGLTLVTGMDKRVYTLESVNKNPTDLMISLLLFSRANEESKTKQARTIGNVESLIERHRQGLPVNIKSCGKHPFWIDDSGSQYESVKRHAIYWEIAREAIELFLSGYGIYKVKRFLDEKYPNGLNGKEWGYQVLKKMRESRALIGERQINIGSHTYTLRDYYPCLCKNEVEFLHLQELKGQNSYKSKKNPLKEQIKLLSGLAILRCSKCGGTMSSFMNKGKPRYICLNGRHLQKGCVGWSLTAPLVDHCVIIALLMGYMDANRKERQDTSDISALIEAKNTSVGELNVSITNLVAVIEAGVNVSELASRLKVLSTERETFLKEIERLKERKALIDSKGSFEVSMMDFINLIHWNVFSDYAHESRDKIRSTINKIIEHVIIDKTDGCITIKIKCRGSDEQLIFCGIGRKPHWKFDIALYVEQDTDGDTTFEEKSILPMANQLMEEATKQFALIREGYISYFDKICKILAAIGYPDIDGSAFWPNR

SEQ ID NO: 17397 - DNA, 50 bp, Klebsiella pneumoniae; identical to SEQ ID NO: 17387
  source 1..50: mol_type = genomic DNA

SEQ ID NO: 17398 - DNA, 40 bp, Klebsiella pneumoniae; identical to SEQ ID NO: 17383
  source 1..40: mol_type = genomic DNA

SEQ ID NO: 17399 - DNA, 50 bp, Klebsiella pneumoniae; identical to SEQ ID NO: 17389
  source 1..50: mol_type = genomic DNA

SEQ ID NO: 17400 - DNA, 40 bp, Klebsiella pneumoniae; identical to SEQ ID NO: 3415
  source 1..40: mol_type = genomic DNA

SEQ ID NO: 17401 - protein, 629 aa, Klebsiella pneumoniae; identical to SEQ ID NO: 3411

SEQ ID NO: 17402 - DNA, 50 bp, Klebsiella pneumoniae; identical to SEQ ID NO: 3412
  source 1..50: mol_type = genomic DNA

SEQ ID NO: 17403 - DNA, 40 bp, Klebsiella pneumoniae; identical to SEQ ID NO: 17383
  source 1..40: mol_type = genomic DNA

SEQ ID NO: 17404 - DNA, 50 bp, Klebsiella pneumoniae; identical to SEQ ID NO: 3414
  source 1..50: mol_type = genomic DNA

SEQ ID NO: 17405 - DNA, 40 bp, Klebsiella pneumoniae; identical to SEQ ID NO: 3415
  source 1..40: mol_type = genomic DNA

SEQ ID NO: 17406 - protein, 587 aa, Klebsiella pneumoniae; identical to SEQ ID NO: 17396

SEQ ID NO: 17407 - DNA, 50 bp, Klebsiella pneumoniae; identical to SEQ ID NO: 17382
  source 1..50: mol_type = genomic DNA

SEQ ID NO: 17408 - DNA, 40 bp, Klebsiella pneumoniae; identical to SEQ ID NO: 17383
  source 1..40: mol_type = genomic DNA

SEQ ID NO: 17409 - DNA, 50 bp, Klebsiella pneumoniae; identical to SEQ ID NO: 17384
  source 1..50: mol_type = genomic DNA

SEQ ID NO: 17410 - DNA, 40 bp, Klebsiella pneumoniae; identical to SEQ ID NO: 3415
  source 1..40: mol_type = genomic DNA

SEQ ID NO: 17411 - protein, 587 aa, Klebsiella pneumoniae
MPQLYSYIRWSSERQQKGTTRQRQVIGAKEFAIANGLELVEIEDPGVSAFRGKNTTHGKLGDFIDAVRQGAIPPDSWLYVENLDRLTRQEVTTAQKLFIELLDLGLTLVTGMDKRVYTLESVNNNPTDLMISLLLFSRANEESKTKQARTIGNVESLIERHRQGLPVNIKSCGRHPFWIEDSGSQYESVKRHAIYWEIAREAIELFLSGYGIYKVKRFLDEKYPNGLNGKEWGYQVLKKMRESRALIGERQINIGSHTYTLRDYYPSLCKNEVEFLHLQELKGQNSYKSKKNPSKEQIKLLSGLAILRCSKCGGTMSSFMNKGKPRYICLNGRHLQKGCVGWSLTAPLVDHCVIIALLMGYMDANRKERQDTSHISALIEAKNTSVGELNVSITNLVAVIEAGVNVSELASRLKILSTERETFLKDIERLKERKALIDSKGSFEVSMMDFINLIHWNVFSDYAHESRDKIRSTINKIIEHVIIDKTDGCITIKIKCRGSDEQLIFCGVGRKPHWKFDIALYVEHDKDGDTTFEEKSILPMANQLMEEATKQFALIREGYISYFGKVCEILAAIGYPDIDGAAFWPNR

SEQ ID NO: 17412 - DNA, 50 bp, Klebsiella pneumoniae
  source 1..50: mol_type = genomic DNA
gcgcaatatttttcttgatgtttcgggcaccctaatgataaaaatccaat

SEQ ID NO: 17413 - DNA, 40 bp, Klebsiella pneumoniae; identical to SEQ ID NO: 17383
  source 1..40: mol_type = genomic DNA

SEQ ID NO: 17414 - DNA, 50 bp, Klebsiella pneumoniae
  source 1..50: mol_type = genomic DNA
gcgcaatatttttcttgatgtttctagcaccctaatgataaaaatccaat

SEQ ID NO: 17415 - DNA, 40 bp, Klebsiella pneumoniae; identical to SEQ ID NO: 3415
  source 1..40: mol_type = genomic DNA

SEQ ID NO: 17416 - protein, 587 aa, Klebsiella pneumoniae
MPQLYSYIRWSSERQQKGTTRQRQVIGAKEFAIANGLELVEIEDPGVSAFRGKNTTHGKLGDFIDAVRQGAIPPDSWLYVENLDRLTRQEVTTAQKLFIELLDLGLTLVTGMDKRVYTLESVNKNPTDLMISLLLFSRANEESKTKQARTIGNVESLIERHRQGLPVNIKSCGKHPFWIDDSGSQYESVKRHAIYWEIAREAIELFLSGYGIYKVKRFLDEKYPNGLNGKEWGYQVLKKMRESRALIGERQINIGSHTYTLRDYYPCLCKNEVEFLHLQELKGQNSYKSKKNPLKEQIKLLSGLAILRCSKCGGTMSSFMNKGKPRYICLNGRHLQKGCVGWSLTAPLVDHCVIIALLMGYMDANRKERQDTSDISALIEAKNTSVGELNVSITNLVAVIEAGVNVSELASRLKVLSTERETFLKEIERLKERKALIDSKGSFEVSMMDFINLIHWNVLSDYAHESRDKIRSTINKIIEHVIIDKTDGCITIKIKCRGSDEQLIFCGIGRKPHWKFDIALYVEQDTDGDTTFEEKSILPMANQLMEEATKQFALIREGYISYFDKICKILAAICYPDIDGSAFWPNR

SEQ ID NO: 17417 - DNA, 50 bp, Klebsiella pneumoniae; identical to SEQ ID NO: 17392
  source 1..50: mol_type = genomic DNA

SEQ ID NO: 17418 - DNA, 40 bp, Klebsiella pneumoniae; identical to SEQ ID NO: 17383
  source 1..40: mol_type = genomic DNA

SEQ ID NO: 17419 - DNA, 50 bp, Klebsiella pneumoniae; identical to SEQ ID NO: 17394
  source 1..50: mol_type = genomic DNA

SEQ ID NO: 17420 - DNA, 40 bp, Klebsiella pneumoniae; identical to SEQ ID NO: 3415
  source 1..40: mol_type = genomic DNA

SEQ ID NO: 17421 - protein, 587 aa, Klebsiella quasipneumoniae
MPQLYSYIRWSSERQQKGTTRQRQVIGAKEFAIANGLELVEIEDPGVSAFRGKNTTHGKLGDFIDAVRQGAIPPDSWLYVENLDRLTRQEVTTAQKLFIELLDLGLTLVTGMDKRVYTLESVNKNPTDLMISLLLFSRANEESKTKQARTIGNVESLIERHRQGLPVNIKSCGKHPFWIDDSGSQYESVKRHAIYWEIAREAIELFLSGYGIYKVKRFLDEKYPNGLNGKEWGYQVLKKMRESRALIGERQINIGSHTYTLRDYYPCLCKNEVEFLDLQELKGQNSYKSKKNPLKEQIKLLSGLAILRCSKCGGTMSSFMNKGKPRYICLNGRHLQKGCVGWSLTAPLVDHCVIIALLMGYMDANRKERQDTSDISALIEAKNTSVGELNVSITNLVAVIEAGVNVSELASRLKVLSTERETFLKEIERLKERKALIDSKGSFEVSMMDFINLIHWNVLSDYAHESRDKIRSTINKIIEHVIIDKTDGCITIKIKCRGSDEQLIFCGIGRKPHWKFDIALYVEQDTDGDTTFEEKSILPMANQLMEEATKQFALIREGYISYFDKICKILAAIGYPDIDGSAFWPNR

SEQ ID NO: 17422 - DNA, 50 bp, Klebsiella quasipneumoniae; identical to SEQ ID NO: 17392
  source 1..50: mol_type = genomic DNA

SEQ ID NO: 17423 - DNA, 40 bp, Klebsiella quasipneumoniae; identical to SEQ ID NO: 17383
  source 1..40: mol_type = genomic DNA

SEQ ID NO: 17424 - DNA, 50 bp, Klebsiella quasipneumoniae; identical to SEQ ID NO: 17394
  source 1..50: mol_type = genomic DNA

SEQ ID NO: 17425 - DNA, 40 bp, Klebsiella quasipneumoniae; identical to SEQ ID NO: 3415
  source 1..40: mol_type = genomic DNA

SEQ ID NO: 17426 - protein, 587 aa, Klebsiella pneumoniae
MPQLYSYIRWSSERQQKGTTRQRQVIGAKEFAIANGLELVEIEDPGVSAFRGKNTTHGKLGDFIDAVRQGAIPPDSWLYVENLDRLTRQEVTTAQKLFIELLDLGLTLVTGMDKRVYTLESVNKNPTDLMISLLLFSRANEESKTKQARTIGNVESLIERHRQGLPVNIKSCGKHPFWIDDSGSQYESVKRHAIYWEIAREAIELFLSGYGIYKVKRFLDEKYPNGLNGKEWGYQVLKKMRESRALIGERQINIGSHTYTLRDYYPCLCKNEVEFLHLQELKGQNSYKSKKNPLKEQIKLLSGLAILRCSKCGGTMSSFMNKGKPRYICLNGRHLQKGCVGWSLTAPLVDHCVIIALLIGYMDANRKERQDTSDISALIEAKNTSVGELNVSITNLVAVIEAGVNVSELASRLKVLSTERETFLKEIERLKERKALIDSKGSFEVSMMDFINLIHWNVLSDYAHESRDKIRSTINKIIEHVIIDKTDGCITIKIKCRGSDEQLIFCGIGRKPHWKFDIALYVEQDTDGDTTFEEKSILPMANQLMEEATKQFALIREGYISYFDKICKILAAIGYPDIDGSAFWPNR

SEQ ID NO: 17427 - DNA, 50 bp, Klebsiella pneumoniae; identical to SEQ ID NO: 17392
  source 1..50: mol_type = genomic DNA

SEQ ID NO: 17428 - DNA, 40 bp, Klebsiella pneumoniae; identical to SEQ ID NO: 17383
  source 1..40: mol_type = genomic DNA

SEQ ID NO: 17429 - DNA, 50 bp, Klebsiella pneumoniae; identical to SEQ ID NO: 17394
  source 1..50: mol_type = genomic DNA

SEQ ID NO: 17430 - DNA, 40 bp, Klebsiella pneumoniae; identical to SEQ ID NO: 3415
  source 1..40: mol_type = genomic DNA

SEQ ID NO: 17431 - protein, 458 aa, Klebsiella pneumoniae
MISLLLFSRANEESKTKQARTIGNVESLIERHRQGLPVNIKSCGKHPFWIDDSGSQYESVKRHAIYWEIAREAIELFLSGYGIYKVKRFLDEKYPNGLNGKEWGYQVLKKMRESRALIGERQINIGSHTYTLRDYYPCLCKNEVEFLHLQELKGQNSYKSKKNPLKEQIKLLSGLAILRCSKCGGTMSSFMNKGKPRYICLNGRHLQKGCVGWSLTAPLVDHCVIIALLMGYMDANRKERQDTSDISALIEAKNTSVGELNVSITNLVAVIEAGVNVSELASRLKVLSTERETFLKEIERLKERKALIDSKGSFEVSMMDFINLIHWNVFSDYAHESRDKIRSTINKIIEHVIIDKTDGCITIKIKCRGSDEQLIFCGIGRKPHWKFDIALYVEQDTDGDTTFEEKSILPMANQLMEEATKQFALIREGYISYFDKICKILAAIGYPDIDGSAFWPNR

SEQ ID NO: 17432 - DNA, 50 bp, Klebsiella pneumoniae; identical to SEQ ID NO: 17382
  source 1..50: mol_type = genomic DNA

SEQ ID NO: 17433 - DNA, 40 bp, Klebsiella pneumoniae; identical to SEQ ID NO: 17383
  source 1..40: mol_type = genomic DNA

SEQ ID NO: 17434 - DNA, 50 bp, Klebsiella pneumoniae; identical to SEQ ID NO: 17384
  source 1..50: mol_type = genomic DNA

SEQ ID NO: 17435 - DNA, 40 bp, Klebsiella pneumoniae; identical to SEQ ID NO: 3415
  source 1..40: mol_type = genomic DNA

SEQ ID NO: 17436 - protein, 587 aa, Klebsiella pneumoniae
MPQLYSYIRWSSERQQKGTTRQRQVIGAKEFAIANGLELVEIEDPGVSAFRGKNTTHGKLGDFIDAVRQGAIPPDSWLYVENLDRLTRQEVTTAQKLFIELLDLGLTLVTGMDKRVYTLESVNKNPTDLMISLLLFSRANEESKTKQARTIGNVESLIERHRQGLPVNIKSCGKHPFWIDDSGSQYESVKRHTIYWEIAREAIELFLSGYGIYKVKRFLDEKYPNGLNGKEWGYQVLKKMRESRALIGERQINIGSHTYTLRDYYPCLCKNEVEFLHLQELKGQNSYKSKKNPLKEQIKLLSGLAILRCSKCGGTMSSFMNKGKPRYICLNGRHLQKGCVGWSLTAPLVDHCVIIALLMGYMDANRKERQDTSDISALIEAKNTSVGELNVSITNLVAVIEAGVNVSELASRLKVLSTERETFLKEIERLKERKALIDSKGSFEVSMMDFINLIHWNVLSDYAHESRDKIRSTINKIIEHVIIDKTDGCITIKIKCRGSDEQLIFCGIGRKPHWKFDIALYVEQDTDGDTTFEEKSILPMANQLMEEATKQFALIREGYISYFDKICKILAAIGYPDIDGSAFWPNR

SEQ ID NO: 17437 - DNA, 50 bp, Klebsiella pneumoniae; identical to SEQ ID NO: 17392
  source 1..50: mol_type = genomic DNA

SEQ ID NO: 17438 - DNA, 40 bp, Klebsiella pneumoniae; identical to SEQ ID NO: 17383
  source 1..40: mol_type = genomic DNA

SEQ ID NO: 17439 - DNA, 50 bp, Klebsiella pneumoniae; identical to SEQ ID NO: 17394
  source 1..50: mol_type = genomic DNA

SEQ ID NO: 17440 - DNA, 40 bp, Klebsiella pneumoniae; identical to SEQ ID NO: 3415
  source 1..40: mol_type = genomic DNA

SEQ ID NO: 17441 - protein, 498 aa, Mycobacteroides abscessus
MKDQAKRALIVVRLSHVTDSTTSPVRQLAKCRELIRDRGYEEVGTATDLDVSGAVDPFDRRKRPELSRWLANEAEPFDVIVTFRVDRLTRSLRHLQKLVNWADDNRKLVVSATEPHFDMTTPFAAVLIALIGTVAEMELEGIRERTSSAAQHNIRLGKYRGGVPPWGYLPQKQGNTWRFVPDPPQVKVIGEVAERVISGEPLRSIAHDLSERGVLTARDRFAQVRGREVQRHDWTPHGLKRVMTSPTMLGYAVSDGQPVRNSDGSPVVRSEPILTREVFDQITKELEDRKTRREPTKLSASLLLQVIHCGVCGKPAYRCVTGRGRAPRYRCASAQKREPCGNRTVLMDTADTIIADSILDELVGRERYVRVWDSGSDHSEELSETDAQLVDLTGQIGTPAFRAGTPQRDQLDALIAALADRQGRLRAEAVRPSGWAWEPTGELFSDWWEGQDTEGKNIWLRQVQVKLFWKYSDGDVITWQIDKLYLERMEEQWKQRIS

SEQ ID NO: 17442 - DNA, 50 bp, Mycobacteroides abscessus
  source 1..50: mol_type = genomic DNA
aggatgatgtaaatggttgcactcggaatgtcgaaggtttatcatttaca

SEQ ID NO: 17443 - DNA, 40 bp, Mycobacteroides abscessus
  source 1..40: mol_type = genomic DNA
gtagggaatgaactcactcggaatgtcgatcggggctaca

SEQ ID NO: 17444 - DNA, 50 bp, Mycobacteroides abscessus
  source 1..50: mol_type = genomic DNA
aggatgatgtaaatggttgcactccaaatgtcgaaggtttatcatttaca

SEQ ID NO: 17445 - DNA, 40 bp, Mycobacteroides abscessus
  source 1..40: mol_type = genomic DNA
gtagggaatggaatcagtccaaatgtccatcaatggtaga

SEQ ID NO: 17446 - protein, 571 aa, Agrobacterium tumefaciens
MTVAYSYVRISTFEQSEGSGVERQLEKTRRYAEENGLILDTEMIDIGKSGFHGRHKKDGVFGEFIDLVKEGKIKRGSVLIVESLDRISREKVIVAAGQLLSLLGEGIDVVTLQDRMRYSSNATVGDLIVSLTIMSRAHEESAIKSDRVKAAIEKRKEMAVMGLKTFVQNGPSWIDQERLKDRTYRFTLNHRADVIRRIFDLYLDGYGLNKICQIFNAEKVKNLSRATLWKDNILFAVLRNEATIGTYQAGETSIKDYFPACITEDMFWRAQDELKKRSKPGRKGVRYTNLFQGLIVCHHCGNSVMTTRSGVKGMVHTYFACRTTSLGGECKREGKRKQINLKMVEKAVLDNVLVYHLDSNIGKKNTSSLVMEKELLVGSIEQSKKAVRNLMSSLELVDDEDDRVMLTNRITTLRKEERANQSRLEVIEGEIRSIESDLQDDVDINKEVRAEIAKWPNLGEAELYQSRQKINNILRKLITQVRIDIDAQEINVVLAGMIKWWNIDIEGKVLHTGDWSMLPFDILVKRAKEFFGKSVDVASMKSVYDRIEIARPDPKLWDGERNPDVFPSHLN

SEQ ID NO: 17447 - DNA, 50 bp, Agrobacterium tumefaciens
  source 1..50: mol_type = genomic DNA
cattgcgcctaatcattaattccaggtcgccgggattaatgattgcgtgc

SEQ ID NO: 17448 - DNA, 40 bp, Agrobacterium tumefaciens
  source 1..40: mol_type = genomic DNA
tgcagatcttcccattccagttcggagggacgggcataga

SEQ ID NO: 17449 - DNA, 50 bp, Agrobacterium tumefaciens
  source 1..50: mol_type = genomic DNA
cattgcgcctaatcattaattccacctcgccgggattaatgattgcgtgc

SEQ ID NO: 17450 - DNA, 40 bp, Agrobacterium tumefaciens
  source 1..40: mol_type = genomic DNA
tgctaatctgctcattcatcctctgagggatgggcttaga

SEQ ID NO: 17451 - protein, 580 aa, Enterocloster asparagiformis
MRKRKVVFYGRVSTHSDEQLSAFDNQMAWYKQLLALHPEWTVVGEYEDAGVTGTSVRKRKGFQQMLDDGIRYHKYDLIVTRETKRFARNTVDALSYVRLLKQHGIEVYFVSDGIWTISDNDGELRLSIMATIAQEESRKTSENVRAGQRISRQKGILRGTGNILGYRRVGRNQYELDAEQAAIVKNIYKWYLSGDGIRAIKRKLEEHGYRTATGKSRWQFQVIDDILRNPFYTGRQRQMGKISDGYLTQNRVKNSPDQIEYIQGDYEPIISEEAFKEVERIREQRYNKMNSRGKKESKSVWCGKYLCGCGCGTVRRIASGNESVFICHSQHVNGIKAKSGTAGAENACSLRTILEWKLDMIAWYVINDVWGSSKTDASQALKMIEECYSEEIAISQVEINTVQDKIEKLEKRKQGLLDMRADGEITKEEYAAKRSECDVQIHKLNVSIAEAETDRIASADHNQKISSIKQALEKILDLSQPKLNRYIVDGFIWKLVHISDHEFDIYLSMGNESFGDVGAEEKVIQYKVFESSNPRREERVKCTKLKSMRLTYEDAVRYRAMSGKRVLKHKWEDLVVHIYI

SEQ ID NO: 17452 - DNA, 50 bp, Enterocloster asparagiformis
  source 1..50: mol_type = genomic DNA
tagtggcgtttgttcagccccatctggatgggattgaacgaaggggacta

SEQ ID NO: 17453 - DNA, 40 bp, Enterocloster asparagiformis
  source 1..40: mol_type = genomic DNA
gacgtaatccatgcctttttggatcgcgtttgtaaatttt

SEQ ID NO: 17454 - DNA, 50 bp, Enterocloster asparagiformis
  source 1..50: mol_type = genomic DNA
tagtggcgtttgttcagccccatcaagatgggattgaacgaaggggacta

SEQ ID NO: 17455 - DNA, 40 bp, Enterocloster asparagiformis
  source 1..40: mol_type = genomic DNA
gatgtattctatgccttttaagatcttattttgagatttt

SEQ ID NO: 17456 - protein, 600 aa, Vibrio vulnificus
MSYAKEQVNAYIYSRVSKDVQVHGDGIRRQIEGAIRFVEKINQDNIQKGIPTYKIADEFITDKGLSAYKGFNTAANGGLGAFLEAARKGEIKRGSLLVVEAVDRISRMPADESRKTFSLFKQYGIDVAIVKFGIIIKHSESTTLENDLLITAAIHLAYMESQQKSNRINDYFDKKRLREKEGGEKRTSICPLWMKLSEDKKSFELIPDRARVMSRIIDMKLNGIGCHRIASTLNKEGVPYFNGKTWSTTIVTKYCKMIQLYGAFQPVKHVRTDSGTQKKPWGDVLQNYYPAVIDEQTFLRLKNSFKRTGGRQTGAYSNLFSGLLCCPECGSGMSYFKPNRGKQKIRCRKQIDKQGCFQRALNYEEIENRLVKALAGLDYAKINDNSFASLSEELSSLEANIAELRENIEAVSAQLMENSNPRLYDILIEKLTKLDDEICIEQDKFNELSTLQSNYDASIINSLQLDSNEDRARYNHFVKQFVKYIICTDKKQGGPLRVVFKADTVGELPFNFDDEKNDKAVSEVFTANRSISDTETVRLINLDKSSGMYLSTLKDITDVKQPNDLSDSRELIRYMHAVRMAVRRNPNKWKGIAAQAKLRY

SEQ ID NO: 17457 - DNA, 50 bp, Vibrio vulnificus
  source 1..50: mol_type = genomic DNA
tgcgatactaatacaaatccaaccaatgaagagtacgtgatagtatcgca

SEQ ID NO: 17458 - DNA, 40 bp, Vibrio vulnificus
  source 1..40: mol_type = genomic DNA
ggcgatggtcattccaaccaatgaagaattcgtgattgct

SEQ ID NO: 17459 - DNA, 50 bp, Vibrio vulnificus
  source 1..50: mol_type = genomic DNA
tgcgatactaatacaaatccaacccctgaagagtacgtgatagtatcgca

SEQ ID NO: 17460 - DNA, 40 bp, Vibrio vulnificus
  source 1..40: mol_type = genomic DNA
ggtgatggcacttccaccacctgaagcattgctgattgct

SEQ ID NO: 17461 - protein, 561 aa, Streptomyces albus
MTVHELPATFSSRGEGEPYIGYIRVSTWREEKISPELQETALRQWAARTGRRLLEPLTYDLDVTGRNFNRKIMRDIERVERGDARGIVVWRYSRFGRNRTGNAVNLARLEAAGGQLESATEPVDASTAIGEFQREMIFAFGNFESNRAGEQWREAHEYRLAAKLPASGRARFGYIWHPRRVPDLSQPGGWRLQQERYELHPDYAPIVEEMYERKIEDHDGFNNLAHWLNEELNITTTRGRPWGVSSVSRFLDSGFAAGLLRIHDRDCKCGYGANPKMHRCPNGRMIYLAGAQPPIITPEQWEAYREHRAETKRTPPRARRATYTLTGLMRHGYCRFHMAAASNSNRHGPPEPGFWLVCSRHKHSNKLECPHGINAKREQVEGDVLRWLAEEAAAGVDAAPSVPRQRAEPAEDPQARVQRERARLQAELSKVDAAIDRLVTDNAMHPDKYPVDSFERVRDQLLGKKSTIVGQLRDLGEAAKLPTREEYKELVVGLLAEWKTIQPIERNAILKQLVRRVVCYDERDDRGRLLNVRTEIHPVWKPDPWASHPDEVIHRRDEPVR

SEQ ID NO: 17462 - DNA, 50 bp, Streptomyces albus
  source 1..50: mol_type = genomic DNA
gagccccctttagaagcgttgtcctgcggcagtgcatctaaaggggcctc

SEQ ID NO: 17463 - DNA, 40 bp, Streptomyces albus
  source 1..40: mol_type = genomic DNA
gagcgtcggcgccttcatctgcggcatcggcaccctgctc

SEQ ID NO: 17464 - DNA, 50 bp, Streptomyces albus
  source 1..50: mol_type = genomic DNA
gagccccctttagaagcgttgtcccacggcagtgcatctaaaggggcctc

SEQ ID NO: 17465 - DNA, 40 bp, Streptomyces albus
  source 1..40: mol_type = genomic DNA
gatcgtcttctccatcattcacatcatcgccaccctgctc

SEQ ID NO: 17466 - protein, 485 aa, Eubacterium callanderi
MKGVIYARYSSDNQREESIEGQLRECKEYAERNDITILGTYIDRALSAKTDNRPEFQHMIKDSAKGLFDVVLVWKLDRFARNRYDSARYKNLLKKNGVKVISARENISEGSEGIILEAMLEGYAEYYSAELSEKVIRGLTDNALKCKYNGGTVPMGYYIDEQQYYQIDPKTAPVVLEMFTKYSEGATMQELVNLLNSRGMRSIRGGKITLNIMNHLLKNRRYMGEYSYRDVVKEDGIPAIVPKELFERVQERLAKNKKAPARHKAEDDYLLTTKLYCGKCGSFMVGESGTSHTMKVHRYYRCVNTKKKKLCDKKAVKKDWIEDLVVNYTMKAIMNDEVMERLIDTLMELQKKESTDLPLLKKQLAETEKGINNMLNAIQAGIFTPSTKQRLDELEETKSQLEVSILQEEMHKPLLTREQIAFFIYHFRKFDVTKREQRQRLIDSFVNAVYLYEDKIILTFNYKDGSKTITLEEVEGSDLSVLGAP

SEQ ID NO: 17467 - DNA, 50 bp, Eubacterium callanderi
  source 1..50: mol_type = genomic DNA
ggttcggatttatccgtactcggtgcaccagataatgataatccgaaccc

SEQ ID NO: 17468 - DNA, 40 bp, Eubacterium callanderi
  source 1..40: mol_type = genomic DNA
ggttcgactcccttcatccgcaccacttttaatataaaac

SEQ ID NO: 17469 - DNA, 50 bp, Eubacterium callanderi
  source 1..50: mol_type = genomic DNA
ggttcggatttatccgtactcggtagaccagataatgataatccgaaccc

SEQ ID NO: 17470 - DNA, 40 bp, Eubacterium callanderi
  source 1..40: mol_type = genomic DNA
ggattgactccctccctccagaccactttcaataagaaga

SEQ ID NO: 17471 - protein, 576 aa, Kocuria rhizophila
MTTTNAPASLHRSATRTRTTGCTELDQAEPSSGSAFGLDQIGETTTLAVSYLRVSTKEQASKGGRDEGFSIPAQREANLRKAQGLNAIIIEEFVDAGESARKADRPALMELIEYVKTHPVAYCIVHKVDRLARNRADDVAIHLALKEAGVLLVSATENIDETPSGMLLHGIMSTIAEFYSRNLANEVSKGMTQKAITGGTNGKAPMGYLNVTRRDELGRELRTIEVDPHRGPLIRWAFEAYATGNYSTATLREELIDRGLTTVATPKRPARPPALSSIQRMLSSPYYKGNVLFKGATYDGLHEPLVAPEIWYRVQTVLAAHQVSGEKTQAHDHYLKGSVFCGICGSRLILTNAKSRRGVIYPYFICSGRHKKRTNCDRKAMFVPDVEAAVEDYYRTVQIPAHIIGPLRELIHAEFDRLHATAKTERKAQIAERDRLYDERHKLLQAHYAGAVPLDLLKSEQDRIGRQVAFLDSRIEASQIEYDQARAHLDDCLALAGDAHTIYMSLDDSLRRIANQAFFNRLVVTDGDVVEGEPGVPFNIFFDPGVQATALARQGEGGNEAGKTGNVGGLNNDALV

SEQ ID NO: 17472 - DNA, 50 bp, Kocuria rhizophila
  source 1..50: mol_type = genomic DNA
tggtttgaacaacgacgctctggtggacctggctgggtgcttctcaaacc

SEQ ID NO: 17473 - DNA, 40 bp, Kocuria rhizophila
  source 1..40: mol_type = genomic DNA
gggcggggcgtgcgctggtgggccctgccgggatcgaacc

SEQ ID NO: 17474 - DNA, 50 bp, Kocuria rhizophila
  source 1..50: mol_type = genomic DNA
tggtttgaacaacgacgctctggtccacctggctgggtgcttctcaaacc

SEQ ID NO: 17475 - DNA, 40 bp, Kocuria rhizophila
  source 1..40: mol_type = genomic DNA
gggcagggcgggcgcgggtccgcgcggccgggggcaaact

SEQ ID NO: 17476 - protein, 470 aa, Blautia massiliensis; identical to SEQ ID NO: 3151

SEQ ID NO: 17477 - DNA, 50 bp, Blautia massiliensis
  source 1..50: mol_type = genomic DNA
aaatttccactataatacattatcccaatagagtacgataaaggaaatga

SEQ ID NO: 17478 - DNA, 40 bp, Blautia massiliensis
  source 1..40: mol_type = genomic DNA
attttccacctatgccgttcccatgatcatcggagagatc

SEQ ID NO: 17479 - DNA, 50 bp, Blautia massiliensis
  source 1..50: mol_type = genomic DNA
aaatttccactataatacattatcctaatagagtacgataaaggaaatga

SEQ ID NO: 17480 - DNA, 40 bp, Blautia massiliensis
  source 1..40: mol_type = genomic DNA
cttttccacccatgctgttctcatgatagtgagtgagttc

SEQ ID NO: 17481 - protein, 569 aa, Listeria innocua
MARVRKNTKVQQPRHKIWKIAIYIRLSKDDGNEESLSVTNQRKIILEYLNNTFDGEYVLVDYYVDDGQSGTTDYERIDFQRMIRDVETGKVDCIICKTLARAFRNYSDQGYFLERIFPVHGVRFISIGDPAIDTYLNPEVTQGLEVPMAGLLNDRYAARTSNDVRRTLDTKRRNGEFIGSFAPYGYQKNPENKNHLIIDEEAAQVVHNIYHWFVYDGMSKAGIVKHLNELGIPSPSAYKKQKGFNHRTPNDAKNDGMWSLGTIHRILTNKMYIGTMVQGQQRVMSYKIHDKITPPEEEWFVVENTHEPIIEQSLFEKAQSLQKRDTRTAPSEKKVYLFAGFLRCPDCGLGMTRKGSRKKTKSGIKEYIYYVCSTNYIKDKRKCTLRSMNVEIITEVVLRAIQTQIALIDDMATIIKAINKQPVIRTKSKQLEQLYKAKQQELEKITVVTDNLYVDWKCGDITKAEYLRMKAKFEQKADEVTQVMTNLEIEMSTVQKGIGVNHPYLQTFLKHRNIQTLDRGLLVELVDTIYIHENNEITIQFNFADQHQHMLEFIQQNKKQYMAIENQVM

SEQ ID NO: 17482 - DNA, 50 bp, Listeria innocua
  source 1..50: mol_type = genomic DNA
cttaaattcttctatatatacatgccccattagccgcatgtgcatataga

SEQ ID NO: 17483 - DNA, 40 bp, Listeria innocua
  source 1..40: mol_type = genomic DNA
agagtagtcgatttccccgccccattctcacctaagaaag

SEQ ID NO: 17484 - DNA, 50 bp, Listeria innocua
  source 1..50: mol_type = genomic DNA
cttaaattcttctatatatacatgctccattagccgcatgtgcatataga

SEQ ID NO: 17485 - DNA, 40 bp, Listeria innocua
  source 1..40: mol_type = genomic DNA
agattagtagatttccccactccattaacgccgcagaagg

SEQ ID NO: 17486 - protein, 533 aa, Brevibacillus brevis
MLRLGIYARVSSDDQAERGTIENQLEFARKYADLHQLEIVKWYKDDGVTGTIPLEARPAGRELLQDAKNGIIDLLLIYRLDRLGRSARIILNSVHELESDGVKIRSMTEPFDTGDPSGRFLLTILAGVADLERETIIERLWYGANRAARAGKWLGGIVPYGYRVDSDGYLQICEDLLPNSDMTEAGVVRLIFHMLANQGHSCIKVSDYLNALGVPTAYAKDERKITRGKRKENTAGIWRPSRIRGIITNTSYKGVHFYGKRSTRKRDVIEREVPAIVDVETWEKAQKVLRGNQIEAMRNIKNQYLLRSLLKCQCCGLTYVGIHYPGSKRALKGYYTCTGKQAYKGPMQGKCTSKNLPQDWIEDLVWRDCLAFINQPGEALQEIAAAREVKQTEKVDLESEIALIQKSIDDKDVERQSILDLFRKSIITFTDLEKQIQKINQEKEILEQRIKEIRTSLQVDRDYSTKVKNAFQLLTSLRNKLDDNPSFETRREIVKTLVHRIQVHTAPSEGSKRPRASVTVQYCFSKDIIYTDK

SEQ ID NO: 17487 - DNA, 50 bp, Brevibacillus brevis
  source 1..50: mol_type = genomic DNA
ttccaaggatattatctacacggacaaggttgaagataatacccttggaa

SEQ ID NO: 17488 - DNA, 40 bp, Brevibacillus brevis
  source 1..40: mol_type = genomic DNA
accaaagaatccacaagggcaaggattgcacgaaccaatt

SEQ ID NO: 17489 - DNA, 50 bp, Brevibacillus brevis; identical to SEQ ID NO: 17487
  source 1..50: mol_type = genomic DNA

SEQ ID NO: 17490 - DNA, 40 bp, Brevibacillus brevis
  source 1..40: mol_type = genomic DNA
accacaatatctacaagtacaaggattgcaccaacccaat

SEQ ID NO: 17491 - protein, 544 aa, Clostridium perfringens; identical to SEQ ID NO: 2301

SEQ ID NO: 17492 - DNA, 50 bp, Clostridium perfringens; identical to SEQ ID NO: 2302
  source 1..50: mol_type = genomic DNA

SEQ ID NO: 17493 - DNA, 40 bp, Clostridium perfringens
  source 1..40: mol_type = genomic DNA
atatacaaaaaaagcagccttaagctgcttttttataagt

SEQ ID NO: 17494 - DNA, 50 bp, Clostridium perfringens
  source 1..50: mol_type = genomic DNA
ataaatccctattggaagtcaccttgtggagcgttcaattagggattaac

SEQ ID NO: 17495 - DNA, 40 bp, Clostridium perfringens
  source 1..40: mol_type = genomic DNA
agaaaaaaaaaattcaacctgaggctgattttttttaagt

SEQ ID NO: 17496 - protein, 502 aa, Faecalibacterium prausnitzii; identical to SEQ ID NO: 11191

SEQ ID NO: 17497 - DNA, 50 bp, Faecalibacterium prausnitzii; identical to SEQ ID NO: 2062
  source 1..50: mol_type = genomic DNA

SEQ ID NO: 17498 - DNA, 40 bp, Faecalibacterium prausnitzii
  source 1..40: mol_type = genomic DNA
aaatgttatgatcttatccttacagggttgcatggcagtg

SEQ ID NO: 17499 - DNA, 50 bp, Faecalibacterium prausnitzii
  source 1..50: mol_type = genomic DNA
tttgtaccccttgtacaccgatgtctgcaacggtgtacaaagggaacata

SEQ ID NO: 17500 - DNA, 40 bp, Faecalibacterium prausnitzii
  source 1..40: mol_type = genomic DNA
caatggtccgatctcatccctgctgggtgggatggcagtg

SEQ ID NO: 17501 - protein, 536 aa, Faecalibacterium prausnitzii
MLRQTNQQPITALYPRLSHEDELQGESNSISNQKRILETYAKQNGFSNLRWYTDDGYSGANFQRPGFQAMLADIEAGKVGTVIVKDMSRLGRNYLQVGMYTEMIFPQKGVRFIAINDGVDSAQGDNDFAPLRNIFNEWLVRDTSKKIKAVKRSKGMSGKPVTSKPVYGYLMDEDENFIIDEEAAPVVKQIYRLCLAGNGPTKIARMLTEQEIPTPGTLEYRRTGSTRRYHPGYECKWATNTVVHILENREYMGCLVNFKTEKPSYKTKHSIENPIEKQAIFENHHEPIIDTQTWERVQELRKQRKRPNRYDEVGLFSGMLFCADCGSVMYQQRYQTDKRKQDCYICGNYKKRTHDCTAHFIRTDLLTAGVLSNLRKVTSYAAKHEARFMKLLIEQNEDGGKRRNAAKKKELEASEKRIAELSAIFKRLYEDSVTGRISDERFTELSADYEAEQRELKERAAAIQAELSKAQEATVNAEKFMNVVRRHTSFEELTPTLLREFVEKIVVHECSYDENKTRRQDIEIYYSFVGKVDLPE

SEQ ID NO: 17502 - DNA, 50 bp, Faecalibacterium prausnitzii; identical to SEQ ID NO: 2967
  source 1..50: mol_type = genomic DNA

SEQ ID NO: 17503 - DNA, 40 bp, Faecalibacterium prausnitzii
  source 1..40: mol_type = genomic DNA
cggcgataacccctccgcaaagagtcagggaatgaagcag

SEQ ID NO: 17504 - DNA, 50 bp, Faecalibacterium prausnitzii
  source 1..50: mol_type = genomic DNA
ttacttctttatcgcacatcagtaactgctcatgtacggtaaggaagcaa

SEQ ID NO: 17505 - DNA, 40 bp, Faecalibacterium prausnitzii
  source 1..40: mol_type = genomic DNA
cagctgtaccccctcctccaccagtcagggaaggaagccg

SEQ ID NO: 17506 - protein, 548 aa, Mycobacterium marseillense; identical to SEQ ID NO: 13166

SEQ ID NO: 17507 - DNA, 50 bp, Mycobacterium marseillense; identical to SEQ ID NO: 442
  source 1..50: mol_type = genomic DNA

SEQ ID NO: 17508 - DNA, 40 bp, Mycobacterium marseillense
  source 1..40: mol_type = genomic DNA
gcctcagttgagtgtccgaggggggacttgaacccccacg

SEQ ID NO: 17509 - DNA, 50 bp, Mycobacterium marseillense; identical to SEQ ID NO: 444
  source 1..50: mol_type = genomic DNA

SEQ ID NO: 17510 - DNA, 40 bp, Mycobacterium marseillense; identical to SEQ ID NO: 445
  source 1..40: mol_type = genomic DNA

SEQ ID NO: 17511 - protein, 548 aa, Mycobacterium marseillense; identical to SEQ ID NO: 9226

SEQ ID NO: 17512 - DNA, 50 bp, Mycobacterium marseillense
  source 1..50: mol_type = genomic DNA
agtcgtgtcgccggacgtgtccgaggggggacttggccacttacgacacg

SEQ ID NO: 17513 - DNA, 40 bp, Mycobacterium marseillense; identical to SEQ ID NO: 17508
  source 1..40: mol_type = genomic DNA

SEQ ID NO: 17514 - DNA, 50 bp, Mycobacterium marseillense
  source 1..50: mol_type = genomic DNA
agtcgtgtcgccggacgtgtccgaccggggacttggccacttacgacacg

SEQ ID NO: 17515 - DNA, 40 bp, Mycobacterium marseillense; identical to SEQ ID NO: 445
  source 1..40: mol_type = genomic DNA

SEQ ID NO: 17516 - protein, 480 aa, Halobacteroides halobius
MKKAVIYARVSSKMQAEDGLSIDAQINQLREYAVDNGYEILNEYVDKGESAKTADRPEFQQMIRDIKGDKNSYDAVLIHKTDRFARNREDSIVYKSLLRRDCGVDVIAIKEDFGEGPIGKMIEGILEVIAEFYSENLAREVKKGQVEKAKKGQALGEPPYGYIIGEDGKFKIYEPEAEVVRYIFNRYLEGDGSHTIADKIKEIGIKQFGEAAIKKTTGKELNWSSNRMVLFIIKNEVYTGLFEWDDIIIEDNHPAIISKEEFELAQELRDKKKGRGCGQRNMYLLKGLLKCYECNSNLGRKNYKSKGKTVHVSYCMNNRINNECYSNRNKMADLEKHIIKSLEKISKGITKINNLTVTRDDKDQNQKQIKKLQKKLEEFDKQFDRQMEAFEAGVINIEQLKKYKTRLNNQKDEVKNQIVKLKDVKKDIDENKFRNKINNVVTLLKDESININKKRLALLSIIKEVRVSRKNGIIKMIYKW

SEQ ID NO: 17517 - DNA, 50 bp, Halobacteroides halobius
  source 1..50: mol_type = genomic DNA
tttattacatatgatacgtgggctaaatctcacgttttatatgtaacaag

SEQ ID NO: 17518 - DNA, 40 bp, Halobacteroides halobius
  source 1..40: mol_type = genomic DNA
agtggtacaaactggagtgaagtcagaaggatgagaaaac

SEQ ID NO: 17519 - DNA, 50 bp, Halobacteroides halobius; identical to SEQ ID NO: 17517
  source 1..50: mol_type = genomic DNA

SEQ ID NO: 17520 - DNA, 40 bp, Halobacteroides halobius
  source 1..40: mol_type = genomic DNA
agaggaggaaagtggagggaagagaggaggatgagaaaac

SEQ ID NO: 17521 - protein, 479 aa, Lactobacillus fermentum
MKVAVYIRVSTLEQAEEGYSIGEQKDKLRKYCEIKDWTVVKEYVDPGRSGSNLNRPSMQQLIKDAPKGLFDAVLVYKLDRLSRSQKDTLYLIEDVFQKNDIHFVSLSENFDTLTAFGKAMIGILSVFAQLEREQIKERMTMGRIGRVKSGKIMEFNNPPFGYEVEDDNYKVKPLQGAIVKKIYDMYLSGKSISKIKETLNEEGHVGNPYPWSDTRVRYILSNPTYIGKIPYRGKLYDGRFIPLVNDATFSKVQQELKERQVSTAKRFNMQLRPFQSKYMLSGILRCGYCGATLFVNSYVQPNGHRRLRYNCPSTYKSMQKAKKYAVKDPNCPFKLVYAEKLEPVVINEIKKLALHPDSIRKPKTIHHNGVDVAAVKKELASVKKQQQKLIDLYVISDNINIENISKKSADLKIQEEALTKKLSQAVEPDNGNLINFQNLLAKSSDIDQLSYDEQKFIVKKLIKSIDVYNDDRIKINWNI

SEQ ID NO: 17522 - DNA, 50 bp, Lactobacillus fermentum
  source 1..50: mol_type = genomic DNA
aaaaaatattaggtatttcccattgaaactgtaaatacctaatatacgaa

SEQ ID NO: 17523 - DNA, 40 bp, Lactobacillus fermentum
  source 1..40: mol_type = genomic DNA
taaaattccaacaacaattgaaactgggatcggcggccaa

SEQ ID NO: 17524 - DNA, 50 bp, Lactobacillus fermentum; identical to SEQ ID NO: 17522
  source 1..50: mol_type = genomic DNA

SEQ ID NO: 17525 - DNA, 40 bp, Lactobacillus fermentum
  source 1..40: mol_type = genomic DNA
taaaattacaacaattatggaaacaggcatcggtgcccta

SEQ ID NO: 17526 - protein, 552 aa, Pseudomonas sp JY-Q
MARLISYLRMSTSEQLKGFSLERQRKLIADFALRYGLSLDESHSIEDIGRSSFSDDAEQRQLARFFTDLDAGKFSPGDVFALENIDRLTRRGPIDAILKVNAIISKGLKLAIISNNEQKIIEDVNDVFTIINLSIDAARSHGESKNKSDKGLSNWEEKRKLAASHGVAMTAQAPAWLDTETFYLMDETKGKQIKRRRYVLNPEKAETVRLIFELFQNGNGSLKIKNILNERNIPTFKGAEYWEPSIISKMLRNPATFGFYQPQKQGTGKRDLIPAGEPIENYFPAIVSRETFEQCQRITAANSTRKGRKGKLFTNLFTGLLKCVDCGGPVHLLNPGIDKRAKVPKSVNYIVCKKGKFTRECILKRLRYDDFEAVMLNAIQEINLADVLNENNPLEQLIKQIRAIETKIEKNQKLLENFQKSFVETGDLPAFMIEAAKNAETANKALEIERTELHAQISQLNVYNTNVDNAIEELKENGTYETRAKINLLLHEIIKSINIDFELVDFAIIFKNGVKRFINDGIIQNVYIAKSFSEQSFREFEEILNYKPPEKI

SEQ ID NO: 17527 - DNA, 50 bp, Pseudomonas sp JY-Q
  source 1..50: mol_type = genomic DNA
cacaggttaaacgctaccgtcttgatcaagtcggacgtataatacctgca

SEQ ID NO: 17528 - DNA, 40 bp, Pseudomonas sp JY-Q
  source 1..40: mol_type = genomic DNA
gccgggcaacgcggtgctgatcaagtctgcctatccttgg

SEQ ID NO: 17529 - DNA, 50 bp, Pseudomonas sp JY-Q
  source 1..50: mol_type = genomic DNA
cacaggttaaacgctaccgtcttgagcaagtcggacgtataatacctgca

SEQ ID NO: 17530 - DNA, 40 bp, Pseudomonas sp JY-Q
  source 1..40: mol_type = genomic DNA
gcagggcagcgtggtgcggagaaagtacccctatgcttgg

SEQ ID NO: 17531 - protein, 502 aa, Blautia massiliensis
MEFIREDCIYARQSVDRKDSISIESQIDFCKYELKGGSCRVFKDKGYSGKNTDRPEFQKLLGEIRKGKVRRVIVYKLDRISRSILDFATMMELFQEYDVEFVSSTEKFDTSTPMGRAMLNICIVFAQLERETIQKRVTDAYYSRCLKGFHMSGQAPYGYQLEPTVVEGIRTKKMVSDPIAADHVRLMFEMYAEPETSFGDITRYFEEHDIKIYGKSMFRTFLSQLLRNPVYAQADLELYEFFKSQGAAIVNDASDFAGTNGCYLYQGRDVKEDKDRCLKDQILVIAPHEALISSDTWLKCRKKLMANTTFQQGRKPKNTWLAGKIKCGHCGYALKATHVPNSTGYFRCTKRTENKGCPGCGKIRKEEFEQFIFSAMQEKFKDFQILHGSEEKVNPKLTAYQVELAQVEAEIEKLLDTLTGANATLLAYANKKIEELDTRRQTISKAIAELSVETISPQQIKKLSYYLDNWDSIDFDDKRKAADGLISTIKATSDRVQIEWKI

SEQ ID NO: 17532 - DNA, 50 bp, Blautia massiliensis; identical to SEQ ID NO: 2062
  source 1..50: mol_type = genomic DNA

SEQ ID NO: 17533 - DNA, 40 bp, Blautia massiliensis
  source 1..40: mol_type = genomic DNA
aaaattgctcgattaaatcttccatatcttttgggataaa

SEQ ID NO: 17534 - DNA, 50 bp, Blautia massiliensis
  source 1..50: mol_type = genomic DNA
tttgtaccccttgtacaccgatgtccgcaacggtgtacaaagggaacata

SEQ ID NO: 17535 - DNA, 40 bp, Blautia massiliensis
  source 1..40: mol_type = genomic DNA
aaaatggcttgattactaccccccaatctgttgggataca

SEQ ID NO: 17536 - protein, 472 aa, Streptococcus equinus
MQTKRKVAIYSRVSTLHQAEEGYSIGQQIEALAKYCQAMDWSIYDNYSDAGFSGGKLERPAMQKMIQDAESGKFDTVVVYKLDRLSRNVRDTLYLVKDVFNANNVDFVSLQENIDTKSAMGNLFITLLSAIAEFEREQIKERMQLGVKGRAKSGKTTSWTTPPFGYEYDTNTQLMTINHYQAEIVRDMFDKIISGWSIMGITTHLRKTNNKKWTHVRVKRILENVAYIGKVKYRDEIFDGEHAPILTEEIFYKAQKALEERTSKKDNTRPFQGLYMLSNIAKCGYCGTPLKIDSYKPRKDGTRKRTYTCINRNPKRIKTATYNDGKQCKESGRYDVKDVEKYVLTEISKLQLNPKSIESLYRDKPEENIAAHQERLKKLETKLSKLNDLYINELISMEVLKQKSAELLKEKSSLETFINNNKRKTNNKPAFEKLAKMDDIFKMSYDDQKRIVKTLIKRVEVKRDEINVIFKL

SEQ ID NO: 17537 - DNA, 50 bp, Streptococcus equinus
  source 1..50: mol_type = genomic DNA
cacctactagaattgtagtacatgaatcagaactttttaccatgtatgtt

SEQ ID NO: 17538 - DNA, 40 bp, Streptococcus equinus
  source 1..40: mol_type = genomic DNA
acgagtatagttgtgcatgacatagcaaatattccttctt

SEQ ID NO: 17539 - DNA, 50 bp, Streptococcus equinus
  source 1..50: mol_type = genomic DNA
cacctactagaattgtagtacatgtgtcagaactttttaccatgtatgtt

SEQ ID NO: 17540 - DNA, 40 bp, Streptococcus equinus
  source 1..40: mol_type = genomic DNA
acaagaatatttgtctaggtgatagctaatgttccttgtt

SEQ ID NO: 17541 - protein, 509 aa, Myroides odoratimimus
MKTADLYIRVSTDEQADKGYSQRDQEERLRRYCSQYNFKVGNVIYEDHSAKTFNRPAWNSLLQNLKKNKGKTHLVLFTKWDRFSRNAGDAYQMINMLTKLGVNPQAIEQPLDLTIPENKMMLAIYLAAPEVENDRRALNTFYGMRRAKKEGRVMGNAPFGYANKSKEDGKKYIALIPEQSKAMKWAFTELAKGILSANQIRLEMNRMNAGKLSSTAFHVAVRNPIYCGKIFIPKYKDEEAYFVTGLHEALISEALFDKVQMILDGNVRKERPNTKILSDENLPLRGFLVCPKCNRNLTGSASTGRNNRYYYYHCLASCGFRQKAGVANEIFENGLKQLQINKVVQNFTKKLLIDSYNQVFANPVSQKKSILENIDKINHKLSIARNKLLEGTLEDDDYLAIKKECKIEIEKFEKQLIEEEGNKKIDIKSMLDRALDKVVNLGILYAEGGIQTKREIIGSIFPEKLEFDGKIYRTTRINTLVKCIFQINNELAENKNRIYENFLDISCVV

SEQ ID NO: 17542 - DNA, 50 bp, Myroides odoratimimus
  source 1..50: mol_type = genomic DNA
ttttctcgatatatcctgtgtagtagccccaactgaacaaatctcgaacc

SEQ ID NO: 17543 - DNA, 40 bp, Myroides odoratimimus
  source 1..40: mol_type = genomic DNA
agatgtccttttaccttgtagcgaagacgggagttgaacc

SEQ ID NO: 17544 - DNA, 50 bp, Myroides odoratimimus
  source 1..50: mol_type = genomic DNA
ttttctcgatatatcctgtgtagttgccccaactgaacaaatctcgaacc

SEQ ID NO: 17545 - DNA, 40 bp, Myroides odoratimimus
  source 1..40: mol_type = genomic DNA
agatgtggttttaccatgttgccaaggcaggtcttgaact

SEQ ID NO: 17546 - protein, 472 aa, Halobacillus karajensis
MTIGIYIRVSTLEQAKEGYSISAQKERLMAFCSAQGWENYKFYVDEGVSGKDTKRPQLQSLMEDMEEGNLEMILVYRLDRFTRSVLDLHKMLELMDKHNCVFKSATEPYDTSTAMGRMFITIVAAMAQWEIENSSERIKMALEEKVAEGQRVGNVPYGFDLTSEEKLIANDKAPVVLDIIDKIKSGWSATSVAEFLNKTNNDRVWRPTTVLRVLKNPALYGATRWNDKLYEDTHEGLITKSDFMKIQQMLDDRSIHHRRNVKNEYLFQGVLSCPTCDRFLSVNRYIRKRRDGTEYQGAIYRCQDCRKKKGKFNKSPGENRFLDALYRYMKSIKIDHLDSAAPEENKNDMIKSQLQQIERKREKYQRAWASDLMDDDEFKKLMDETKEPYEDLKKKLSETDQPALIDKDKVKEIIFTFNENFELLTQEEKKAFISSFVRRIDFKVIPQPPKDPAKTKSKYGKDLIEITEVVFY

SEQ ID NO: 17547 - DNA, 50 bp, Halobacillus karajensis
  source 1..50: mol_type = genomic DNA
tgttgtatttatgaaacgttaccgactgataacgtttcataaacacaact

SEQ ID NO: 17548 - DNA, 40 bp, Halobacillus karajensis
  source 1..40: mol_type = genomic DNA
gatcctgctcacaggcccgacaggtagtggtaaaaccaca

SEQ ID NO: 17549 - DNA, 50 bp, Halobacillus karajensis
  source 1..50: mol_type = genomic DNA
tgttgtatttatgaaacgttaccgcctgataacgtttcataaacacaact

SEQ ID NO: 17550 - DNA, 40 bp, Halobacillus karajensis
  source 1..40: mol_type = genomic DNA
catcctgctcaccggtacaccaggggttggaaaaaccaca

SEQ ID NO: 17551 - protein, 494 aa, Clostridium leptum
MKAVIYARYSSDNQREESIEGQIRECTAFAEKNGITILRHYIDRAFSAKTDNRPEFQNMIKDSGKRLFDMIIVWKLDRFARNRYDSARYKAVLKKNGVKVVSATEVISDGAEGIILESVLEGYAEYYSADLSEKVVRGMTENALKCKFNGGTLPIGYQIDSDQHFQLDPLTAPFVREAFQRYDERATMTQIRDWLNEKGVKNTRGQKMTYNSIQHLLNNRRYIGEYTYRDIVVPDGISAIVPQDLFDRVQEKLAKNKKAPARHKAEDDYLLTTKLFCGYCGAYLCGESGTSHTGNVHHYYKCVSVKKKRTECHKKSVRKEWIEDLVVSETMKMVMDDTAIEAIVSMLMDLQDRENVNLPLYEQQLREADTAIQNLLNAIQQGILTKSTKGRLEELEATKEELENKIACEKLAKPKVSAEFMTFWLHRFRKLDVQQKSHRKMLIDTFINAIFLYDDKMVLTFNYKEGTATITFDDLKTALADQKTGSDLDCSTAP

SEQ ID NO: 17552 - DNA, 50 bp, Clostridium leptum
  source 1..50: mol_type = genomic DNA
ggttcggatttggattgctcaactgcaccaaaccaatataatccgaactt

SEQ ID NO: 17553 - DNA, 40 bp, Clostridium leptum
  source 1..40: mol_type = genomic DNA
ggttcaagtcctgttatccgcaccagtcgagagcctcgac

SEQ ID NO: 17554 - DNA, 50 bp, Clostridium leptum
  source 1..50: mol_type = genomic DNA
ggttcggatttggattgctcaactttaccaaaccaatataatccgaactt

SEQ ID NO: 17555 - DNA, 40 bp, Clostridium leptum
  source 1..40: mol_type = genomic DNA
gctccaagtcctgctatactttgcagtggtgagcctagac

SEQ ID NO: 17556 - protein, 483 aa, Angelakisella massiliensis
MSTYERLVNSQNFFSPYLTQEDLSRFGRNSALTGMYTNITFAKYGVRFIAINDNYDTIDPNSVDNDFAGIKNWFNEFYARDTSRKIRAVNKAKGERGEPLTTNIPYGYKKDPDTPKGWLVDEEAAQVVKRIFTLCMEGRGPMQIARALTEARVLTPTAYKQRQGRKTPNKEGADPYHWNTNTVVHILERREYTGCTVNFKTYTNSIWDKKQRHSPEDRQAIFYNTHPAIIEAEVFDKVQEIRQQRHRRTKTGKSSIFSGLVYCADCGAKMRYCTTNYFERRQDHFVCANYRSNTGSCSAHFIRAVVLEELVWRHMEAVISYVSRYEAHFRAVMEERLKLSTGEAIRVRRKKLAQDEKRLAELDRLFMRLYEDNVSGKVSDQRYATMSAAYEDEQAALQAEAQTLEKEIEVQERQLENLEQFIQRVHKYAGERELTPYALRELVKAIYIEAPDKSSGKRRQNIRIVYDLVGFIPLNELMKEETA

SEQ ID NO: 17557 - DNA, 50 bp, Angelakisella massiliensis
  source 1..50: mol_type = genomic DNA
cggcttttgcggggggatatttattgtgtaaagaaaaccacgcgatagtc

SEQ ID NO: 17558 - DNA, 40 bp, Angelakisella massiliensis
  source 1..40: mol_type = genomic DNA
ccgcatcccgttttctttttttagaatatccctctatgcc

SEQ ID NO: 17559 - DNA, 50 bp, Angelakisella massiliensis
  source 1..50: mol_type = genomic DNA
cggcttttgcggggggatatttatggtgtaaagaaaaccacgcgatagtc

SEQ ID NO: 17560 - DNA, 40 bp, Angelakisella massiliensis
  source 1..40: mol_type = genomic DNA
ccacctcccgtctttttttggtagaatacccctcattctc

SEQ ID NO: 17561 - protein, 563 aa, Flavonifractor plautii
MARKSRVITENEKKETVKVFVWKIGIYIRLSKEDLRNNDESESVTNQRKINLEFVEEKFADEKYIIYDIYIDDGRSGTTEDTRPDFQRLSKDIREGNVNCVVCKTLARAFRNYADQGKFLEQYLPTYGCRFIAFGNPYVDTFANPDCMQNMEIPINGLMNDRYAARTSEDVRRTFRTKRNKGEFIGAFAPFGYLKNPENKNAFIIDEEAAETVKEIFEKYLDGMSKLAIVRYLNDHCIPCPTVYKQKHLGMKYQNPHSDPAKNPLWSERTVGEILKNRMYCGDMVQGRYRIKSYKVHIQEQVPEDEWFIKENTHEPIIERETFEKVQRLLQKDTRTSPKKNTLYLFSGFLRCADCQKAMIRSEVKGHVYYYCSTYKSRSKNACTKHTIQHERLEAAVLFAIQQYVYLAIDYTKTIEQINRAPIVKSQDKKLAEAISQKERELTKVIRYKQAIYQDWKDNEISQTDYRRMREDYEEQEREINEKLKKLQDERAEQEQGVDTENPFLVAFRKYENITTLSREVLIELVDSIVVHEGSNISIILRFADELRRVQEFIEANTHSEAV

SEQ ID NO: 17562 - DNA, 50 bp, Flavonifractor plautii
  source 1..50: mol_type = genomic DNA
ggttttcttattattcatggagccacgggaccaatcataataagaaaacg

SEQ ID NO: 17563 - DNA, 40 bp, Flavonifractor plautii
  source 1..40: mol_type = genomic DNA
aaccgggccggctggtcctaccggccccactggtccaact

SEQ ID NO: 17564 - DNA, 50 bp, Flavonifractor plautii
  source 1..50: mol_type = genomic DNA
ggttttcttattattcatggagccccgggaccaatcataataagaaaacg

SEQ ID NO: 17565 - DNA, 40 bp, Flavonifractor plautii
  source 1..40: mol_type = genomic DNA
tcctggcccccctggtcctcccggcccccctggtccccct

SEQ ID NO: 17566 - protein, 552 aa, Pseudomonas aeruginosa
MNFVERLNCTIYAGLRASMTSTNPLPRAFAEVFQGNDQINVYSYIRFSTKAQKLGFSEKRQLDQINTFFDQYPQARQVERYEDLGVSAFKGKNLKTGQLAKFVERIKAKEILPNALLLVESFDRISRMGGYDALELIISIIQADCAIYTLFDNRLYSRRKKDSGVDLTLIQNILDRANEESRSKSDRVTDAKARNLLRAEQGEIIAKRAPFWISYADGQFVLNEHAKAVRRATELCFDMGCLAIAKALNAESHPKTYSVGIITKLLRQNALYGSYIATDIDKKGRRTLIKKEIKDYYPAVISEAEFHRIGAKLEQRQRPELAGRHPAEFRNILRGIVFCACGATLRSHSATKSERQYHDLLCTASEHGKCTHSPNEKGLRYRYARIEEVFLAYQALIPFEKIIAKSNDIKALEKEHEETTGLILQQEKALANAFAILQNASETAQKYVLSNIEEVSHTLDQLKAKQREIGLKIASMHIASKSTINVMEIYQLLLTEHGRMRVNNFLQGQGVKLIITPIQRKHYFLDIFLAEIHIDRITVSPDGYTAQNTPHR

SEQ ID NO: 17567 - DNA, 50 bp, Pseudomonas aeruginosa
  source 1..50: mol_type = genomic DNA
tttctacgaatttcatttgtcattactatgtgccatgaatttcgtagaaa

SEQ ID NO: 17568 - DNA, 40 bp, Pseudomonas aeruginosa
  source 1..40: mol_type = genomic DNA
catgcgctggcgggtgaccacgctgaccgactgaggggtc

SEQ ID NO: 17569 - DNA, 50 bp, Pseudomonas aeruginosa
  source 1..50: mol_type = genomic DNA
tttctacgaatttcatttgtcattagtatgtgccatgaatttcgtagaaa

SEQ ID NO: 17570 - DNA, 40 bp, Pseudomonas aeruginosa
  source 1..40: mol_type = genomic DNA
catggggtggcgggagaccaggctgagggacagggggctt

SEQ ID NO: 17571 - protein, 539 aa, Clostridium sporogenes
MKTIAIYARKSLFTGKGDSIGAQVDTCKRFIDYKFANEDYEIKIFQDEGWSGKTTDRPDFTNMVNLIKSKKIDYVITYKLDRVGRTARDLHNFLYELDQLGIVYLSATEPYDTTTSAGRFMISILAAMAQMERERLAERVKSGMIQLAKKGRWLGGQCPLGFDSKKEFYIDDMGKERQIIKLAQNKEEIKIVKLIYDKYLEMGSMSQVRKYCLENSIRGKNGGDFSTNTLKQMLTSPIYVKSTENIFKYLESHNINVFGTPNNNGILTFNKTKEIRIERDKSEWIAAVGKHKGIIEDTKWLQIQQQLEQQAEKQIKSSGRQGTSDALLSGILKCSKCKSNMIVKTGHKSKKTGVTYSYYVCSKKDNTYGHKCDNKNVRVDEADKVAISEIQLYNKKILITELNKALEKSDKKNNNINNAEVLKANIKEKEKAISNLVKKLSLIDDENISSIIINEISNLNKDINKLNKEVNEEYIKENDTIKAKIDIDSYLQALKNFNANVDIVKEPYKRKALLKTIVESIQWDGKYLKVNPLLISKKK

SEQ ID NO: 17572 - DNA, 50 bp, Clostridium sporogenes
  source 1..50: mol_type = genomic DNA
agtcgtgttttaagataggaaacatgtccttgatgtataaaaacacgact

SEQ ID NO: 17573 - DNA, 40 bp, Clostridium sporogenes
  source 1..40: mol_type = genomic DNA
agatgctggtagtgaatactgcccttgtcatttagctgaa

SEQ ID NO: 17574 - DNA, 50 bp, Clostridium sporogenes
  source 1..50: mol_type = genomic DNA
agtcgtgttttaagataggaaacatatccttgatgtataaaaacacgact

SEQ ID NO: 17575 - DNA, 40 bp, Clostridium sporogenes
  source 1..40: mol_type = genomic DNA
tgatacttatagtgaatgataaccttgtcatttagatgac

SEQ ID NO: 17576 - protein, 540 aa, Clostridium botulinum
MKTIAIYARKSLFTGKGDSIGAQVDTCKRFIDYKFANEDYEIRTFKDEGWSGKTTDRPDFTNMVNLIKSKKIDYVITYKLDRIGRTARDLHNFLYELDNLGIVYLSATEPYDTTTSAGRFMISILAAMAQMERERLAERVKSGMIQIAKKGRWLGGQCPLGFDSKREIYIDDMGKERQMMKLTPNKEEIKIVKLIYDKYLEMGSMNQVRKYCLENSLRGKNGGDFSTNTLKQLLTSPIYVKSSDNIFKYLESQNINVFGIPNGNGMLTFNKTKEIRIERDKSEWIAAVGKHKGIIDDNKWLQIQQQLQQQSEKQIKSSGRQGTTSTGLLSGIIKCAKCGSNLLIKTGHKSKKNPGTTYSYYVCGKKDNSYGHKCDNKNVRTDEADSAVITQLKLYNKELLIKNLKEALIKNEKADTDNIEILESKLKEKEKAVSNLVKKLSLVDDENVSNIILSEVTNINKEINDIKLQLSNETLKINEVTKATLDTEIYIKILENFNKKIDDITDPIEKRNLLKSALESVEWNGDSGEFKINLIGSKKK

SEQ ID NO: 17577 - DNA, 50 bp, Clostridium botulinum
  source 1..50: mol_type = genomic DNA
tatcgtactttaacataggaaacatgttcatcatgtataaaagtacgagt

SEQ ID NO: 17578 - DNA, 40 bp, Clostridium botulinum; identical to SEQ ID NO: 17573
  source 1..40: mol_type = genomic DNA

SEQ ID NO: 17579 - DNA, 50 bp, Clostridium botulinum
  source 1..50: mol_type = genomic DNA
tatcgtactttaacataggaaacatattcatcatgtataaaagtacgagt

SEQ ID NO: 17580 - DNA, 40 bp, Clostridium botulinum; identical to SEQ ID NO: 17575
  source 1..40: mol_type = genomic DNA

SEQ ID NO: 17581 - protein, 540 aa, Flavonifractor plautii
MKQPYNTTIYNTALYLRLSRDDESYGDSVSIETQRTILQQYAKEHGLHVVGEYVDDGWSGTNFERPNFQRMMDDVDAGKVNCIVTKDLSRFGREHVMMDYYLEFLFPEKRVRYIAIAENEDTEKGLSDFVPFKNLFNEWFAKDTSRKVKAAFKAKFAVGERIGAYAPIGYRKHPEIKNKLIIDEETRWIVERIFDLAVHGRGAASITRILIEEKVPTPGYINFRRDKTFANIYANAPEEKSYAWTIAQVKSILKDETYIGHTIHYRETNISFKNKRRIRKPQSDWVRVENTQEPIISEQVFNQVQEQIASRRRKCKDGTTQIFSGLVKCADCGWSLSYGENRQNSKPYGHYHCSKYGQGTRQCSMHYIRYDVLYAYVLSRLQYWSGLVQNGEGELMKRLLNASDKEQAAARKRQAAELKRTEKRKAEVDKLFSRMYEDWVAGRITEYNFNMLSGKYQTEQAQLDEKIGQLQAAIAAESQTVADAESWIALMKQYVNPTELTAELLNTLIEKIVVHEAVKGEDGSREQEVEIFYRFIGKID

SEQ ID NO: 17582 - DNA, 50 bp, Flavonifractor plautii
  source 1..50: mol_type = genomic DNA
caatatctttaactatgtgaaacaggggtttcacttagataaagatacca

SEQ ID NO: 17583 - DNA, 40 bp, Flavonifractor plautii
  source 1..40: mol_type = genomic DNA
ggtacagaagtgggaggcgggggccgccaccccggatctc

SEQ ID NO: 17584 - DNA, 50 bp, Flavonifractor plautii
  source 1..50: mol_type = genomic DNA
caatatctttaactatgtgaaacagcggtttcacttagataaagatacca

SEQ ID NO: 17585 - DNA, 40 bp, Flavonifractor plautii
  source 1..40: mol_type = genomic DNA
gctgcagcagaaggaggaggcggcggccaccccggacccc

SEQ ID NO: 17586 - protein, 629 aa, Cronobacter sakazakii
MPQLYSYIRWSTDRQDKGTTRTRQVAAAKAYAEEAGLEMVEIIEPGVSAFRGKNRAGKLGDFIDAVKNAAIPSDSWLYCENLDRLSRDQVDEALRLFLELIGLGLTIVTGMDRKVYNRDTIRQNPTDLMISILMFIRGNEESETKSNRTVGNVVALVERHKEGLPVNIKSVGRHPFWIDDTGSQYEAVKKHPFYWNIAREIIDMFLSGNGVYSVKKYLDEKYPNGLKGREWDYQVLKKMRDNRALIGERTINLRGVPYKLENYYPWLCKDEAEFFLLEKRKQQNNYKSKKEGADTIKLLSGLSILRCSKCGGTMHSFMNHGKARYICTNGVHLQKNCSGWSITAQLVEHCTMIALLIGYMDKSRKNGSDTTLIEEELNEKEKLIKALDSKISNLVTAIAIAPDVNSLAHSLNEINSKRKELVLSVEKLKERLVSFQGKGSFEVDIMEFLILIQWAVFTNMEDNDRDKIRKIIDAIIEYIVVDKTNDCITIKIKYYGNDEVLVFGGVDRKPHWRFSIDFDTGKEGALTVLENDLKDVPEIQKAVSYLHKLEKGYLAMYDSAVTMLAEVGYPEIKGTQFWPNTGKHEKITVAFDGVEHTISFNGRLPKAIASAIEKTGLTRQQFIEKFKIQ

SEQ ID NO: 17587 - DNA, 50 bp, Cronobacter sakazakii
  source 1..50: mol_type = genomic DNA
gatcttatttcttgattcttagggcaccctaatgatataaatccaatctt

SEQ ID NO: 17588 - DNA, 40 bp, Cronobacter sakazakii
  source 1..40: mol_type = genomic DNA
gtccaccaggttttttgggcagcccagcgaaacgaagccg

SEQ ID NO: 17589 - DNA, 50 bp, Cronobacter sakazakii
  source 1..50: mol_type = genomic DNA
gatcttatttcttgattcttagggtgccctaatgatataaatccaatctt

SEQ ID NO: 17590 - DNA, 40 bp, Cronobacter sakazakii
  source 1..40: mol_type = genomic DNA
gtcctccaggttcatggggtggcacagctgtacgaagccc

SEQ ID NO: 17591 - protein, 677 aa, Vibrio harveyi
MKTLPKIYNYARVSTTKQLKGVGLETQQQRSVLEQLAEEHNLPIHDENFVDHGLSAYHGKHKEGALGLVLSRIESGEIPSGSILVVFSLDRLSRETVNVAMEQLLSIINRGVRVYTHIDDKMFDAKSQNLTADLIVSLITMQRANEESETKSKRIIAAAKLGLQRWRETGEPQSTLGRAPFWIEQSTNSFNINAEGVKKAIEMRIAGFGDLKIKQYLDTNFEYKPTRLKGRVKRTNSWDYIAISQLWGRRSLIGENTYTIEGIEHVMENYYPALIDEDTFRNLQIQKKTKQGRDTASGKIPLLKSLARCGFCGGAMVFVDKGGNRVNYQCNLAMKGEHLREVYNVNMLDLLTLEVCKDAYLSESSKSNDTFVAEQKLKLESELLDQQESRDNLVDSYRTTPSKSILGLIEDSESKIVELEAKLDAIDIKTIELNTDELSNLPEIFTDSIRTDFLNPKRYEIRNNLRRFISSITLSRSEEPCRDAKTKVANCVDITWHFKNGQKRRLSMLPYQFIKSDGDKTLYLPFVYLYGTKSKIKVEDGDEFLSGILEKLHALDLTKTLYPSKGRYQWSKLSLECGKTYWAPLDNAEFGEHGAPFTEFSLSVEDDFLQEHAQRTDYLSLMFNYPSSGDERYDYPETTFLELANKFNFEEESEFSSTLQDNSFNHELYSSLDFLKS

SEQ ID NO: 17592 - DNA, 50 bp, Vibrio harveyi
  source 1..50: mol_type = genomic DNA
agaggaagtatgttaaacttatggtttgctaataaaaaacaattcccttc

SEQ ID NO: 17593 - DNA, 40 bp, Vibrio harveyi
  source 1..40: mol_type = genomic DNA
agaagaatacctactctggtttgataaaaaaggttttccg

SEQ ID NO: 17594 - DNA, 50 bp, Vibrio harveyi
  source 1..50: mol_type = genomic DNA
agaggaagtatgttaaacttatggtatgctaataaaaaacaattcccttc

SEQ ID NO: 17595 - DNA, 40 bp, Vibrio harveyi
  source 1..40: mol_type = genomic DNA
ttttgaacacctactatggtatgataaaagaggtcttctg

SEQ ID NO: 17596 - protein, 485 aa, Eubacterium callanderi
MKKCVIYARYSHGPNQTEQSIEGQLMDCSNYAKEHDLAIVKTYTDKAKTGTNDNREAFQRMLRDSAKGLFDVVLVWKIDRFGRNREEMALNKVKLRKNNVQLITVKENIPDGPEGVLIESLMEGLAEYYSLNLAQNIRRGLNTNALKAKVNGGHVAFGFRIGKDHHFEVVEELRPIIVEIFTLYDSGWSFKDICDHLNAKGIRTSRGNRFNKSTLRPMLSNVKYIGTYKYKDVVIENAFPAIVDKALFDRVQVRLKASLQHRQAYRKKVVYMLSGKIFCNKCGAPYIADAGTSKSGKVYNYYVCEDKKKRKNCKNKTYSKDVLDNIVIKTTLKYVLTADRIEKIADNLIRVNEKRNESPYLSKLICDKAESEKKINNILSAIEEGIFTPSTKERLLALEEEVKNLEAAITEENIKKPPLTKEAVLWFLNRLKKLNYSDEQCKDQLVKTLIHSVLIDDDRVIINYNYTNNDGITAFAECSSDSKMV

SEQ ID NO: 17597 - DNA, 50 bp, Eubacterium callanderi
  source 1..50: mol_type = genomic DNA
tgccgagtgttcaagtgattccaaaatggtggactattcaagactggaaa

SEQ ID NO: 17598 - DNA, 40 bp, Eubacterium callanderi
  source 1..40: mol_type = genomic DNA
tgacggttctaaaaaacaaaatggtggagacaaggggact

SEQ ID NO: 17599 - DNA, 50 bp, Eubacterium callanderi
  source 1..50: mol_type = genomic DNA
tgccgagtgttcaagtgattccaatgtggtggactattcaagactggaaa

SEQ ID NO: 17600 - DNA, 40 bp, Eubacterium callanderi
  source 1..40: mol_type = genomic DNA
acactgtattaacaaataatgtggtggagacaaaaggact

SEQ ID NO: 17601 - protein, 522 aa, Devosia sp
MKRAAKTAPAADPARKQAVIYARVSSKEQEKEGFSIPAQLKLLKEYAATNGFAVAQEYIDVETAKQTGRAAFGEMVAYLKAHPSVRVMLVEKTDRLYRNLKDWVTVDELDVEMHFPKEGVVLSRESRSSEKFMHGIKVLMAKNYIDNLSEEARKGMQEKAEQGIWPTKTPLGYRNVTGPDGKKIIATDPAIAPLIGKLFEWYARGDISLKEAARKAHTAGLTYPKSGAKVPVSTVHTILRNRLYTGWFEWNGKLIEGKHEALVPVELWERVQGVLDGRFASKAKRGRHDFAFSGLIACHACGCAVVGEIKKQRYIYYHCTGYADKCQGNPASCRRKHVREEALEAQFTELLGRLRFDDEVLEWVRDALHASHADERREHEEAIKRHQAEHKRLQDRINAMYVDKLDGLVDTAFYEKMSNQWREEQNRCQREIDRHQNADKSYKDEGVALLDLARNAQRLFAMQEPREKRRLLNFLLSNCTWEDGEVVATFRQPFDMLAETATTAAHVEVGKSAKSAKSEIWL

SEQ ID NO: 17602 - DNA, 50 bp, Devosia sp
  source 1..50: mol_type = genomic DNA
gccaaatcggctaaaagtgagatttggctgccgtttctgaacgcttatag

SEQ ID NO: 17603 - DNA, 40 bp, Devosia sp
  source 1..40: mol_type = genomic DNA
cgcggagcgcggggcgcgttggctggggaacctggattcg

SEQ ID NO: 17604 - DNA, 50 bp, Devosia sp
  source 1..50: mol_type = genomic DNA
gccaaatcggctaaaagtgagattgggctgccgtttctgaacgcttatag

SEQ ID NO: 17605 - DNA, 40 bp, Devosia sp
  source 1..40: mol_type = genomic DNA
ctcggggcgcggggcgcggggcatggggcacgtggctttg

SEQ ID NO: 17606 - protein, 548 aa, Clostridium botulinum
MKKELIKVSCYCRVSTNKDEQEQSFEAQQKYFKEKLSKDNGYDLVEVYADRGLSGTDFSKREQFNKMLEDCGIIKKEVKARETEIRKQFISIDYVADADIKPKFTLIYVKDSSRFARNTEVNRIISRLRDKGVYVYFEDLNKSTENPSEKMLIDFMFSMNEQESISRSAKVRFGNMQSAKDGKVRSIKLYGYQYNKEENSLRIINDEAEIVKLIFKLRLEGNGGRAIATILNSKGIKNRKGNEWRPNTINSMLQNPTYCGKVVRNRWYSSRMYGKDIVKLNDTNEWIVEDSNKVDKIIDEETFTIIQDMIEKNRNKVGRPTGKYHGRSEFAGKIKCEKCGKYYVRNTDRGRVFYNCSTKKQSGLKKCNSRNIQEYEIENLINPYLEKDGYKNLTKKYIDILIEKEEEKKASLYRDACTDEINNIKEEVFKYKGKLSKLTDILLADDSESVRDVFNIKKKEINNKLKELDSELDKLTTTDKQKEELVEKMNLYIKALNEAYKKIPTQITREDFINNYLYEIRVSESGELNLLTYTHLGFEEIMNLMEKY

SEQ ID NO: 17607 - DNA, 50 bp, Clostridium botulinum
  source 1..50: mol_type = genomic DNA
agcatgattatgtgtccatatattttaatgttatgatacagtatcatgat

SEQ ID NO: 17608 - DNA, 40 bp, Clostridium botulinum
  source 1..40: mol_type = genomic DNA
agcaggaaaacacaatattttattatatggagaacctggt

SEQ ID NO: 17609 - DNA, 50 bp, Clostridium botulinum
  source 1..50: mol_type = genomic DNA
agcatgattatgtgtccatatatttgaatgttatgatacagtatcatgat

SEQ ID NO: 17610 - DNA, 40 bp, Clostridium botulinum
  source 1..40: mol_type = genomic DNA
gaaagaacaaaacaatatttgattatatgtagaaactagt

SEQ ID NO: 17611 - protein, 548 aa, Clostridium botulinum
MKKELIKVACYCRVSTKADEQEQSFEAQQKYFKEKLSKKKGFDLVEVYADKGLSGTDFSKRDQFNKMLDDCGIIKKEVKARKTEIRKKYISIDYVADANVKPKFTLIYVKDSSRFARNTEVNRIISRLRDKGVYVYFEDLNKSTENPSEKMLIDFMFSMNEQESISRSIKVRFGNMQSAKDGIVRSIKLYGYHYNKEENSLRIIDDEVNIVKLIFKLSLEGNGGRAIATILNSKGIKNRKGNEWRPNTINGMLQNPTYCGKVVRNRWYSSRMYGKDIVKLNDTKEWIVEDSNKVDKIIDEETFTIIQDMIEKNRNKVGRPTGKYHGRSEFAGKIKCEKCGKYYVRNTDRGRVFYNCSTKKQHGLKKCDSRNIQEYEIESLINPYLEKSGYKNLTKKYIDILIEKEEEKKASLYRDACTDEINNIKEEVFKHKGKLSKLTDILLADDSESVRDVFNIKKKEINNKLKELESELDKLTTTDKQKAEKLNNMNMCIKTLQERYNDIPNEITREYFINNCLDEIRVSEKGELKLLTYTHYAFEKIMNLMDEY

SEQ ID NO: 17612 - DNA, 50 bp, Clostridium botulinum
  source 1..50: mol_type = genomic DNA
accgtgattacgtatccatatattttattgttatgatacagtatcacggt

SEQ ID NO: 17613 - DNA, 40 bp, Clostridium botulinum; identical to SEQ ID NO: 17608
  source 1..40: mol_type = genomic DNA

SEQ ID NO: 17614 - DNA, 50 bp, Clostridium botulinum
  source 1..50: mol_type = genomic DNA
accgtgattacgtatccatatatttgattgttatgatacagtatcacggt

SEQ ID NO: 17615 - DNA, 40 bp, Clostridium botulinum; identical to SEQ ID NO: 17610
  source 1..40: mol_type = genomic DNA

SEQ ID NO: 17616 - protein, 548 aa, Clostridium botulinum
MKKELIKVACYCRVSTKADEQEQSFEAQQKYFKEKLSKKKGFDLVEVYADKGLSGTDFSKRDQFNKMLDDCGIIKKEVKARKTEIRKKYISIDYVADANVKPKFTLIYVKDSSRFARNTEVNRIISRLRDKGVYVYFEDLNKSTENPSEKMLIDFMFSMNEQESISRSIKVRFGNMQSAKDGIVRSIKLYGYLYNKEENSLRIIKDEEEVVKLIFKLRLEGNGGRAIATILNSKGIKNRKGNEWRPNTINSMLQNPTYCGKVVRNRWYSSRMYGKDIVKLNDTNEWIVEESNKVDKIIDEETFTIIQDMIEKNRDKVGRPTGKYHGRSEFAGKIKCEKCGKYYVRNTDRGRVFFNCSTKKQHGLKKCNSRNIQEYEIENLINPYLEKDGYKNLTKKYIDILIEKEEEKKASLYRDACTDEINNIKEEVFKHKGKLSKLTDILLADDSESVRDVFNIKKKEINNKLKELESELDKLTTTDKQKAEKLNNMNMCIKTLQERYNDIPNEITREYFINNCLDEIRVSEKGELKLLTYTHYAFEKIMNLMDEY

SEQ ID NO: 17617 - DNA, 50 bp, Clostridium botulinum; identical to SEQ ID NO: 17612
  source 1..50: mol_type = genomic DNA

SEQ ID NO: 17618 - DNA, 40 bp, Clostridium botulinum; identical to SEQ ID NO: 17608
  source 1..40: mol_type = genomic DNA

SEQ ID NO: 17619 - DNA, 50 bp, Clostridium botulinum; identical to SEQ ID NO: 17614
  source 1..50: mol_type = genomic DNA

SEQ ID NO: 17620 - DNA, 40 bp, Clostridium botulinum; identical to SEQ ID NO: 17610
  source 1..40: mol_type = genomic DNA

SEQ ID NO: 17621 - protein, 571 aa, Clostridium tyrobutyricum
MSTFLYQKHNIISRSNFINKAVKYMNIAIYSRKSKFTGKGDSIENQIEMCKQYIKSHIKGKFEFLIYEDEGFSGSTINRPEFQKLINDIKLHKIGILVCYRLDRISRNVADFSSTLEILQSNNVNFISIREQFDTSNPMGRAMIYIASVFAQLERETIAERVKDNMLELAKSGRWTGGKIPLGLVSKKKKYIDKSGLERQISYLDINAREMNTVKFLYNKYIELGSLHKLEVYASENEIKSKKGIIFEKSTLKIILQNPIYVKSNNAVIDYLKSNGWKVYGKADNLHSLLTYNKTKQSIKNGKHIKSIKAPGEKFAAVSNIPGAIEPELWLNVQKQFGENKNTFPRLGKTNNALLTGKLKCGYCKKYMLIQHGRVSKVTGEKLFYYVCSLKRKSHGSLCHNHNAKASEIEAVVLTSLKNLPKSKIKFIEKLKIIYNSRSSNNTEFEKFFIIKSISQKKNQIDNLVNILSKNQCIENIIIDKIKSLKYEYLELEKRLTVIDNSQKKHKLDSRNMNLIDELINEHDIIDNLPRKNQKQIIDNLISELLWFGSKKKSGKIVIKFVGYSPMLQFS

SEQ ID NO: 17622 - DNA, 50 bp, Clostridium tyrobutyricum
  source 1..50: mol_type = genomic DNA
tgttgcagtttagttaatatagcacatgcaaggcaaaccaaactgcaaca

SEQ ID NO: 17623 - DNA, 40 bp, Clostridium tyrobutyricum
  source 1..40: mol_type = genomic DNA
tgtacttttggatactggtcatgcaaaactgatgacatct

SEQ ID NO: 17624 - DNA, 50 bp, Clostridium tyrobutyricum
  source 1..50: mol_type = genomic DNA
tgttgcagtttagttaatatagcatttgcaaggcaaaccaaactgcaaca

SEQ ID NO: 17625 - DNA, 40 bp, Clostridium tyrobutyricum
  source 1..40: mol_type = genomic DNA
tctacatttggtttctggttttgcaaaaagaataacattt

SEQ ID NO: 17626 - protein, 571 aa, Clostridium tyrobutyricum
MSTFLYQKHNIISRSNFINKAVKYMNIAIYSRKSKFTGKGDSIENQIEMCKQYIKSHIKGKFEFLIYEDEGFSGSTINRPEFQKLINDIKLHKIGILVCYRLDRISRNVADFSSTLEILQSNNVDFISIREQFDTSNPMGRAMIYIASVFAQLERETIAERVKDNMLELAKSGRWTGGKIPLGLVSKKKKYIDKSGLERQISYLDINAREMNTVKFLYNKYIELGSLHKLEVYASENEIKSKKGIIFEKSTLKIILQNPIYVKSNNAVIDYLKSNGWKVYGKADNLHSLLTYNKTKQSIKNGKHIKSIKAPGEKFAAVSNIPGAIEPELWLNVQKQFGENKNTFPRLGKTNNALLTGKLKCGYCKKYMLIQHGRVSKVTGEKLFYYVCSLKRKSHGSLCHNHNAKASEIEAVVLTSLKNLPKSKIKFIEKLKIIYNSRSSNNTEFEKFFIIKSISQKKNQIDNLVNILSKNQCIENIIIDKIKSLKYEYLELEKRLTVIDNSQKKHKLDSRNMNLIDELINEHDIIDNLPRKNQKQIIDNLISELLWFGSKKKSGKIVIKFVGYSPMLQFS

SEQ ID NO: 17627 - DNA, 50 bp, Clostridium tyrobutyricum; identical to SEQ ID NO: 17622
  source 1..50: mol_type = genomic DNA

SEQ ID NO: 17628 - DNA, 40 bp, Clostridium tyrobutyricum; identical to SEQ ID NO: 17623
  source 1..40: mol_type = genomic DNA

SEQ ID NO: 17629 - DNA, 50 bp, Clostridium tyrobutyricum; identical to SEQ ID NO: 17624
  source 1..50: mol_type = genomic DNA

SEQ ID NO: 17630 - DNA, 40 bp, Clostridium tyrobutyricum; identical to SEQ ID NO: 17625
  source 1..40: mol_type = genomic DNA

SEQ ID NO: 17631 - protein, 600 aa, Clostridium tyrobutyricum
  REGION 462..551: note = misc_feature - Xaa can be any naturally occurring amino acid
MNIAIYSRKSKFTGKGDSIENQIEMCKQYIKSHIKGKFEFLIYEDEGFSGSTINRPEFQKLINDIKLHKIGILVCYRLDRISRNVADFSSTLEILQSNNVDFISIREQFDTSNPMGRAMIYIASVFAQLERETIAERVKDNMLELAKSGRWTGGKIPLGLVSKKKKYIDKSGLERQISYLDINAREMNTVKFLYNKYIELGSLHKLEVYASENEIKSKKGIIFEKSTLKIILQNPIYVKSNNAVIDYLKSNGWKVYGKADNLHSLLTYNKTKQSIKNGKHIKSIKTPGEKFAAVSNIPGAIEPELWLNVQKQFGENKNTFPRLGKTNNALLTGKLKCGYCKKYMLIQHGRVSKVTGEKLFYYVCSLKRKSHGSLCHNHNAKASEIEAVVLTSLKNLPKSKIKFIEKLKIIYNSRSSNNTEFEKFFIIKSISQKKNQIDNLVNILSKNQCIENIIIDKIKSLXXXXXXXXXXXXXXXXXXXXXXXXXXXXXXXXXXXXXXXXXXXXXXXXXXXXXXXXXXXXXXXXXXXXXXXXXXXXXXXXXXXXXXXXXXHDIIDNLPRKNQKQIIDNLISELLWFGSKKKSGKIVIKFVGYSPMLQFS

SEQ ID NO: 17632 - DNA, 50 bp, Clostridium tyrobutyricum
  source 1..50: mol_type = genomic DNA
tgttgcagtttagttaatatagcacatgcaaggtaaaccaaactgcaaca

SEQ ID NO: 17633 - DNA, 40 bp, Clostridium tyrobutyricum; identical to SEQ ID NO: 17623
  source 1..40: mol_type = genomic DNA

SEQ ID NO: 17634 - DNA, 50 bp, Clostridium tyrobutyricum
  source 1..50: mol_type = genomic DNA
tgttgcagtttagttaatatagcatttgcaaggtaaaccaaactgcaaca

SEQ ID NO: 17635 - DNA, 40 bp, Clostridium tyrobutyricum; identical to SEQ ID NO: 17625
  source 1..40: mol_type = genomic DNA

SEQ ID NO: 17636 - protein, 571 aa, Clostridium tyrobutyricum
MSTFLYQKHNIISRSNFINKAVKYMNIAIYSRKSKFTGKGDSIENQIEMCKQYIKSHIKGKFEFLIYEDEGFSGSTINRPEFQKLINDIKLHKIGILVCYRLDRISRNVADFSSTLEILQSNNVDFISIREQFDTSNPMGRAMIYIASVFAQLERETIAERVKDNMLELAKSGRWTGGKIPLGLVSKKKKYIDKSGLERQISYLDINAREMNTVKFLYNKYIELGSLHKLEVYASENEIKSKKGIIFEKSTLKIILQNPIYVKSNNAVIDYLKSNGWKVYGKADNLHSLLTYNKTKQSIKNGKHIKSIKTPGEKFAAVSNIPGAIEPELWLNVQKQFGENKNTFPRLGKTNNALLTGKLKCGYCKKYMLIQHGRVSKVTGEKLFYYVCSLKRKSHGSLCHNHNAKASEIEAVVLTSLKNLPKSKIKFIEKLKIIYNSRSSNNTEFEKFFIIKSISQKKNQIDNLVNILSKNQCIENIIIDKIKSLKYEYLELEKRLIVIDNSQKKHKLDSRNMNLIDELINGHDIIDNLPRKNQKQIIDNLISELLWFGSKKKSGKIVIKFVGYSPMLQFS

SEQ ID NO: 17637 - DNA, 50 bp, Clostridium tyrobutyricum; identical to SEQ ID NO: 17632
  source 1..50: mol_type = genomic DNA

SEQ ID NO: 17638 - DNA, 40 bp, Clostridium tyrobutyricum; identical to SEQ ID NO: 17623
  source 1..40: mol_type = genomic DNA

SEQ ID NO: 17639 - DNA, 50 bp, Clostridium tyrobutyricum; identical to SEQ ID NO: 17634
  source 1..50: mol_type = genomic DNA

SEQ ID NO: 17640 - DNA, 40 bp, Clostridium tyrobutyricum; identical to SEQ ID NO: 17625
  source 1..40: mol_type = genomic DNA

SEQ ID NO: 17641 - protein, 571 aa, Clostridium tyrobutyricum
MSTFLYQKHNIISRSNFINKAVKYMNIAIYSRKSKFTGKGDSIENQIEMCKQYIKSHIKGKFEFLIYEDEGFSGSTINRPEFQKLINDIKLHKIGILVCYRLDRISRNVADFSSTLEILQSNNVDFISIREQFDTSNPMGRAMIYIASVFAQLERETIAERVKDNMLELAKSGRWTGGKIPLGLVSKKKKYIDKSGLERQISYLDINAREMNTVKFLYNKYIELGSLHKLEVYASENEIKSKKGIIFEKSTLKIILQNPIYVKSNNAVIDYLKSNGWKVYGKADNLHSLLTYNKTKQSIKNGKHIKSIKTPGEKFAAVSNIPGAIEPELWLNVQKQFGENKNTFPRLGKTNNALLTGKLKCGYCKKYMLIQHGRVSKVTGEKLFYYVCSLKRKSHGSLCHNHNAKASEIEAVVLTSLKNLPKSKIKFIEKLKIIYNSRSSNNTEFEKFFIIKSISQKKNQIDNLVNILSKKQCIENIIIDKIKSLKYEYLELEKRLIVIDNSQKKHKLDSRNMNLIDELINGHDIIDNLPRKNQKQIIDNLISELLWFGSKKKSGKIVIKFVGYSPMLQFS

SEQ ID NO: 17642 - DNA, 50 bp, Clostridium tyrobutyricum; identical to SEQ ID NO: 17632
  source 1..50: mol_type = genomic DNA

SEQ ID NO: 17643 - DNA, 40 bp, Clostridium tyrobutyricum; identical to SEQ ID NO: 17623
  source 1..40: mol_type = genomic DNA

SEQ ID NO: 17644 - DNA, 50 bp, Clostridium tyrobutyricum; identical to SEQ ID NO: 17634
  source 1..50: mol_type = genomic DNA

SEQ ID NO: 17645 - DNA, 40 bp, Clostridium tyrobutyricum; identical to SEQ ID NO: 17625
  source 1..40: mol_type = genomic DNA

SEQ ID NO: 17646 - protein, 571 aa, Clostridium tyrobutyricum; identical to SEQ ID NO: 17626

SEQ ID NO: 17647 - DNA, 50 bp, Clostridium tyrobutyricum; identical to SEQ ID NO: 17632
  source 1..50: mol_type = genomic DNA

SEQ ID NO: 17648 - DNA, 40 bp, Clostridium tyrobutyricum; identical to SEQ ID NO: 17623
  source 1..40: mol_type = genomic DNA

SEQ ID NO: 17649 - DNA, 50 bp, Clostridium tyrobutyricum; identical to SEQ ID NO: 17634
  source 1..50: mol_type = genomic DNA

SEQ ID NO: 17650 - DNA, 40 bp, Clostridium tyrobutyricum; identical to SEQ ID NO: 17625
  source 1..40: mol_type = genomic DNA

SEQ ID NO: 17651 - protein, 571 aa, Clostridium tyrobutyricum
MSTFLYQKHNIISRSNFINKAVKYMNIAIYSRKSKFTGKGDSIENQIEMCKQYIKSHIKGKFEFLIYEDEGFSGSTINRPEFQKLINDIKLHKIGILVCYRLDRISRNVADFSSTLEILQSNNVDFISIREQFDTSNPMGRAMIYIASVFAQLERETIAERVKDNMLELAKSGRWTGGKIPLGLVSKKKKYIDKSGLERQISYLDINAREMNTVKFLYNKYIELGSLHKLEVYASENEIKSKKGIIFEKSTLKIILQNPIYVKSNNAVIDYLKSNGWKVYGKADNLHSLLTYNKTKQSIKNGKHIKSIKAPGEKFAAVSNIPGAIEPELWLNVQKQFGENKNTFPRLGKTNNALLTGKLKCGYCKKYMLIQHGRVSKVTGEKLFYYVCSLKRKSHGSLCHNHNAKASEIEAVVLTSLKNLPKSKIKFIEKLKIIYNSRSSNNTEFEKFFIIKSISQKKNQIDNLVNILSKNQCIENIIIDKIKSLKYEYLELEKKLTVIDNSQKKHKLDSRNMNLIDELINEHDIIDNLPRKNQKQIIDNLISELLWFGSKKKSGKIVIKFVGYSPMLQFS

SEQ ID NO: 17652 - DNA, 50 bp, Clostridium tyrobutyricum; identical to SEQ ID NO: 17632
  source 1..50: mol_type = genomic DNA

SEQ ID NO: 17653 - DNA, 40 bp, Clostridium tyrobutyricum; identical to SEQ ID NO: 17623
  source 1..40: mol_type = genomic DNA

SEQ ID NO: 17654 - DNA, 50 bp, Clostridium tyrobutyricum; identical to SEQ ID NO: 17634
  source 1..50: mol_type = genomic DNA

SEQ ID NO: 17655 - DNA, 40 bp, Clostridium tyrobutyricum; identical to SEQ ID NO: 17625
  source 1..40: mol_type = genomic DNA

SEQ ID NO: 17656 - protein, 571 aa, Clostridium tyrobutyricum
MSTFLYQKHNIISRSNFINKAVKYMNIAIYSRKSKFTGKGDSIENQIEMCKQYIKSHIKGKFEFLIYEDEGFSGSTINRPEFQKLINDIKLHKIGILVCYRLDRISRNVADFSSTLEILQSNNVDFISIREQFDTSNPMGRAMIYIASVFAQLERETIAERVKDNMLELAKSGRWTGGKIPLGLVSKKKKYIDKSGLERQISYLDINAREMNTVKFLYNKYIELGSLHKLEVYASENEIKSKKGIIFEKSTLKIILQNPIYVKSNNAVIDYLKSNGWKVYGKADNLHSLLTYNKTKQSIKNGKHIKSIKAPGEKFAAVSNIPGAIEPELWLNVQKQFGENKNTFPRLGKTNNALLTGKLKCGYCKKYMLIQHGRVSKVTGEKLFYYVCSLKRKSHGSLCHNHNAKASEIEAVVLTSLKNLPKSKIKFIEKLKIIYNSRSSNNTEFEKFFIIKSISQKKNQIDNLVNILSKNQCIENIIIDKIKSLKYEYLELEKRLIVIDNSQKKHKLDSRNMNLIDELINGHDIIDNLPRKNQKQIIDNLISELLWFGSKKKSGKIVIKFVGYSPMLQFS

SEQ ID NO: 17657 - DNA, 50 bp, Clostridium tyrobutyricum; identical to SEQ ID NO: 17622
  source 1..50: mol_type = genomic DNA

SEQ ID NO: 17658 - DNA, 40 bp, Clostridium tyrobutyricum; identical to SEQ ID NO: 17623
  source 1..40: mol_type = genomic DNA

SEQ ID NO: 17659 - DNA, 50 bp, Clostridium tyrobutyricum; identical to SEQ ID NO: 17624
  source 1..50: mol_type = genomic DNA

SEQ ID NO: 17660 - DNA, 40 bp, Clostridium tyrobutyricum; identical to SEQ ID NO: 17625
  source 1..40: mol_type = genomic DNA

SEQ ID NO: 17661 - protein, 547 aa, Clostridium tyrobutyricum
MNIAIYSRKSKFTGKGDSIENQIEMCKQYIKNHIKGKFEFLIYEDEGFSGSTINRPEFQKLTNDIKLHKIDILVCYRLDRISRNVADFSSTLEILQNNSVDFISIREQFDTSNPMGRAMIYIASVFAQLERETIAERVKDNMLELAKSGRWTGGKIPLGLVSKKKKYIDKSGLERQISYLDINTREMNTIKFLYNKYIELGSLHKLEVYAAENEIKSKKGITFEKSTLKIILQNPIYVKSNNAVIDNLKSNGWKVYGKADNLHSLLTYNKTKQSIKNGKHIKSIKAPGEKFAAVSNIPGAIEPELWLNVQKQFSQNKNTFPRLGKTNNAILTGKLKCGYCKKYMLIQHGRVSKVTGEKLFYYVCSSKRKSHGSLCHNHNAKAAEIEDAVLTILKNLPKSKIKFIEKLKIIYNARPSNNTECEKTFIIKSISQKKNQIDNLVNILSKNQYIENIIIDKIKSLKYDYLELEKKLTAIDNSQKKHKLDSYNLNLIDDLINGHDIIDKLSRKNQKQIIDNLISELLWFGSKKKSGKIVIKFVGYSPMLQFS

SEQ ID NO: 17662 - DNA, 50 bp, Clostridium tyrobutyricum
  source 1..50: mol_type = genomic DNA
tgttgcagtttagttaatatagcacatgcaatgtaaaccaaactgcaaca

SEQ ID NO: 17663 - DNA, 40 bp, Clostridium tyrobutyricum; identical to SEQ ID NO: 17623
  source 1..40: mol_type = genomic DNA

SEQ ID NO: 17664 - DNA, 50 bp, Clostridium tyrobutyricum
  source 1..50: mol_type = genomic DNA
tgttgcagtttagttaatatagcatttgcaatgtaaaccaaactgcaaca

SEQ ID NO: 17665 - DNA, 40 bp, Clostridium tyrobutyricum; identical to SEQ ID NO: 17625
  source 1..40: mol_type = genomic DNA

SEQ ID NO: 17666 - protein, 571 aa, Clostridium tyrobutyricum
MSTFLYQKHNIISRSNFINKAVKYMNIAIYSRKSKFTGKGDSIENQIEMCKQYIKSHIKGKFEFLIYEDEGFSGSTINRPEFQKLINDIKLHKIGILVCYRLDRISRNVADFSSTLEILQSNNVDFISIREQFDTSNPMGRAMIYIASVFAQLERETIAERVKDNMLELAKSGRWTGGKIPLGLVSKKKKYIDKSGLERQISYLDINAREMNTVKFLYNKYIELGSLHKLEVYASENEIKSKKGIIFEKSTLKIILQNPIYVKSNNAVIDYLKSNGWKVYGKADNLHSLLTYNKTKQSIKNGKHIKSIKTPGEKFAAVSNIPGAIEPELWLNVQKQFGENKNTFPRLGKTNNALLTGKLKCGYCKKYMLIQHGRVSKVTGEKLFYYVCSLKRKSHGSLCHNHNAKASEIEAVVLTSLKNLPKSKIKFIEKLKIIYNSRSSNNTEFEKFFIIKSISQKKNQIDNLVNILSKNQCIENIIIDKIKSLKYEYLELEKRLTVIDNSQKKHKLDSRNMNLIDELINEHDIIDNLPRKNQKQIIDNLISELLWFGSKKKSGKIVIKFVGYSPMLQFS

SEQ ID NO: 17667 - DNA, 50 bp, Clostridium tyrobutyricum; identical to SEQ ID NO: 17632
  source 1..50: mol_type = genomic DNA

SEQ ID NO: 17668 - DNA, 40 bp, Clostridium tyrobutyricum; identical to SEQ ID NO: 17623
  source 1..40: mol_type = genomic DNA

SEQ ID NO: 17669 - DNA, 50 bp, Clostridium tyrobutyricum; identical to SEQ ID NO: 17634
  source 1..50: mol_type = genomic DNA

SEQ ID NO: 17670 - DNA, 40 bp, Clostridium tyrobutyricum; identical to SEQ ID NO: 17625
  source 1..40: mol_type = genomic DNA

SEQ ID NO: 17671 - protein, 571 aa, Clostridium tyrobutyricum
MSTFLYQKHNIISRSNFINKAVKYMNIAIYSRKSKFTGKGDSIENQIEMCKQYIKSHIKGKFEFLIYEDEGFSGSTINRPEFQKLINDIKLHKIGILVCYRLDRISRNVADFSSTLEILQSNNVDFISIREQFDTSNPMGRAMIYIASVFAQLERETIAERVKDNMLELAKSGRWTGGKIPLGLVSKKKKYIDKSGLERQISYLDINAREMNTVKFLYNKYIELGSLHKLEVYASENEIKSKKGIIFEKSTLKIILQNPIYVKSNNAVIDYLKSNGWKVYGKADNLHSLLTYNKTKQSIKNGKHIKSIKTPGEKFAAVSNIPGAIEPELWLNVQKQFGENKNTFPRLGKTNNALLTGKLKCGYCKKYMLIQHGRVSKVTGEKLFYYVCSLKRKSHGSLCHNHNAKASEIEAVVLTSLKNLPKSKIKFIEKLKIIYNSRSSNNTEFEKFFIIKSISQKKNQIDNLVNILSKNQCIENIIIDKIKSLKYEYLELEKKLTVIDNSQKKHKLDSRNMNLIDELINEHDIIDNLPRKNQKQIIDNLISELLWFGSKKKSGKIVIKFVGYSPMLQFS

SEQ ID NO: 17672 - DNA, 50 bp, Clostridium tyrobutyricum; identical to SEQ ID NO: 17632
  source 1..50: mol_type = genomic DNA

SEQ ID NO: 17673 - DNA, 40 bp, Clostridium tyrobutyricum; identical to SEQ ID NO: 17623
  source 1..40: mol_type = genomic DNA

SEQ ID NO: 17674 - DNA, 50 bp, Clostridium tyrobutyricum; identical to SEQ ID NO: 17634
  source 1..50: mol_type = genomic DNA

SEQ ID NO: 17675 - DNA, 40 bp, Clostridium tyrobutyricum; identical to SEQ ID NO: 17625
  source 1..40: mol_type = genomic DNA

SEQ ID NO: 17676 - protein, 571 aa, Clostridium tyrobutyricum
MSTFLYQKHNIISRSNFINKAVKYMNIAIYSRKSKFTGKGDSIENQIEMCKQYIKSHIKGKFEFLIYEDEGFSGSTINRPEFQKLINDIKLHKIGILVCYRLDRISRNVADFSSTLEILQSNNVDFISIREQFDTSNPLGRAMIYIASVFAQLERETIAERVKDNMLELAKSGRWTGGKIPLGLVSKKKKYIDKSGLKRQISYLDINTSEMNTVKFLYNKYIELGSLHKLEVYASENEIKSKKGILFEKSTLKIILQNPIYVKSNNAVIDYLKSNGWKVYGKADNLHSLLTYNKTKQSIKNGKHIKSIKAPGKKFAAVSNIPGAIEAELWLNVQKQFGENKNTFPRLGKTNNALLTGKLKCGYCKKYMLIQHGRVSKVTGEKLFYYVCSLKRKSHGSLCHNHNAKASEIEDVVLTSLKNLPKSKMKFIEKLKIIYNSRSNNNTEYEKIFIIKSISQKKNQIDNLVNILSKKQCIENIIIDKIKSLKYEYLELEKKLTAIDNSQKKYKLDSRNMNLIDDLINEHDIIDKLPRKNQKQLIDNLISELLWFGSKKKSGKIVIKFVGYSPMLQFS

SEQ ID NO: 17677 - DNA, 50 bp, Clostridium tyrobutyricum; identical to SEQ ID NO: 17632
  source 1..50: mol_type = genomic DNA

SEQ ID NO: 17678 - DNA, 40 bp, Clostridium tyrobutyricum; identical to SEQ ID NO: 17623
  source 1..40: mol_type = genomic DNA

SEQ ID NO: 17679 - DNA, 50 bp, Clostridium tyrobutyricum; identical to SEQ ID NO: 17634
  source 1..50: mol_type = genomic DNA

SEQ ID NO: 17680 - DNA, 40 bp, Clostridium tyrobutyricum; identical to SEQ ID NO: 17625
  source 1..40: mol_type = genomic DNA

SEQ ID NO: 17681 - protein, 533 aa, Microbacterium oleivorans
MTARKRAAIYARVSTEMQVDNTSLPEQREICEAAVRMRGWELVDSYVDEGLSGKDDTRPAWRQMLQDARDGKIDAVVVAKLDRFARKAGDAIRETDRLSDMGVDLVVVKEQIDMSTPAGRAMRTMLAGFAEFEADTIVARTTAGQRAKGRAGGWVGSKPPFGWRLEGAKRDARPVPDEREREVLRAMHRLFVKERLTTGEVADRLNEAGLRPRLAAAWTYQTVRQVVRNATLWTGETEWGAVTGQSHRPHAHSTKVNRDGTAKWGETVKVDLGDPVFTRQEWQALQRAVNRKSSGSPSAPQRQMLTGRLFGSCEFDQHYDGVTTKSRLHPFYKCAGRRYRSAETPRCSCPQLRGPEVDVAVWRELSSVLANPDRLEMLAKQWLELDDDADLAGDEPMIAALRKQESTLERAIGRAQDLYLMADDPAEALQTMERLKADLADVRGRLEAMTAVAERRVDQARRITDVAALAERARGRLENAPLALRREVVELLDVRVVVSDVVRGVPQTMTIHGVLDPSIFLPDEKPAEQGRSS

SEQ ID NO: 17682 - DNA, 50 bp, Microbacterium oleivorans
  source 1..50: mol_type = genomic DNA
tgagaagccagccgagcagggacgctcttccctgctcggttgggttgcat

SEQ ID NO: 17683 - DNA, 40 bp, Microbacterium oleivorans
  source 1..40: mol_type = genomic DNA
gaagaaggagatcgcgatgctcttcccgatcgtcttcctg

SEQ ID NO: 17684 - DNA, 50 bp, Microbacterium oleivorans; identical to SEQ ID NO: 17682
  source 1..50: mol_type = genomic DNA

SEQ ID NO: 17685 - DNA, 40 bp, Microbacterium oleivorans
  source 1..40: mol_type = genomic DNA
gtaggaggcaatcccgatgctcttccccattgccctcctg

SEQ ID NO: 17686 - protein, 599 aa, Mobiluncus curtisii
MGNERKKAFAYVRVSTGMQVEGYSLDNQRERIERKAYGENIDIVEWFADEGKSGKSIEGREEFQRMLEKIDAGADVQFVMVYKLSRFGRNAADVMTSLERIRLNDTELYCVEDGIDSSKDAGKLVISVLAAVSEIERENIIAQTMGGRRQKARAGKWNGGMAPYGYKIGTGKQKGILQVVPEAAEHVKMIYELYLNQHMGISRIADYMTDRGYRKIERQYVNPNPNRRKSPESEIFAPAFVKGVLDNPAYMGKIPYERRRTKRVSEKKDDKVHVKYVKEKQGDGDYGLYDGLHEAIIDKDTWYAVHARRLETGVACDRRHDLDHVHLLTGILKCPVCGANMYSNPNRKKKKDGSGEYYETEYYYCCKHRKMVGDHRCDYHRQFKQSRINLEALDAIMDAQSSKTFINEVKARMNAAVDTKQQEKELAGLKKTRRQIEATIEKISDQMDRLDATDAMYDRKYADLEKRQNDKYDALGRLEDEINILDAKVRRVMRATTNYKEAMIEVARKLNSWGTLPEQEKKELFQKYFKSIEIFEDPKPGERIIKKIIFQFPVEFMGGATPETDMTYQGIVDGKERWEAVGTPEIGDEVRWDRLGNVE

SEQ ID NO: 17687 - DNA, 50 bp, Mobiluncus curtisii
  source 1..50: mol_type = genomic DNA
aggtgggacagattaggtaatgttgagacggtagctcttttgtcccacca

SEQ ID NO: 17688 - DNA, 40 bp, Mobiluncus curtisii
  source 1..40: mol_type = genomic DNA
cccccacacccaccacgtggagactgttgcggtgatgtca

SEQ ID NO: 17689 - DNA, 50 bp, Mobiluncus curtisii
  source 1..50: mol_type = genomic DNA
aggtgggacagattaggtaatgtttcgacggtagctcttttgtcccacca

SEQ ID NO: 17690 - DNA, 40 bp, Mobiluncus curtisii
  source 1..40: mol_type = genomic DNA
cacccagcctcaccaggtgtctactgttgaggtgagggca

SEQ ID NO: 17691 - protein, 617 aa, Streptococcus pyogenes; identical to SEQ ID NO: 486

SEQ ID NO: 17692 - DNA, 50 bp, Streptococcus pyogenes; identical to SEQ ID NO: 62
  source 1..50: mol_type = genomic DNA

SEQ ID NO: 17693 - DNA, 40 bp, Streptococcus pyogenes
  source 1..40: mol_type = genomic DNA
ttatctgctgtcgttgctggtattacaaaagctgatttat

SEQ ID NO: 17694 - DNA, 50 bp, Streptococcus pyogenes; identical to SEQ ID NO: 3509
  source 1..50: mol_type = genomic DNA

SEQ ID NO: 17695 - DNA, 40 bp, Streptococcus pyogenes; identical to SEQ ID NO: 3510
  source 1..40: mol_type = genomic DNA

SEQ ID NO: 17696 - protein, 537 aa, Qipengyuania flava
MRKPQSSKATRPKAFLYLRLSVDNEDGNAQSIDAQRYAAKEYAARNEIDIVREYVDSGLSGTLSKRPQFNEMIAMATSADRPVQIVLIYRQARFARNMRLFVNTVHELAECGVEMVSVTENFGEGRTKRMGQTITALWDEQRAIDDAIYTRKSRRDNARKGYYNGGPVPFGYRTYVAHSDGKKDRMKLAIVDGEAMVVREIFDWADQGRGGRWIVKALNDRGTTLRGAKFSNGNLAGILSRETYTGQYYDKTADDDGIVPEREDWIAVRCPKIINRDQFERVAALRASRSPLRMAPHEAAGTTLLTGLAKCGMPDCGAGMTIGSGTSKSKKKYYYYKCNERTNVGQRCTCPNVRREKLDEAVFGAVEKRILGRGRLEELLKEVLELSDDKRQRMEQELTQANAERTRRRTAIDRLLGLIEEGIMKPSDPEFAQRLSDNREAVAAMTSRIEVLESQLARGSRKITPAVLEKFSQQLLAKLHDEDSTLRSAYLRMLVSEVRVSKDRVTITGSKSVLERGLAKGLPRLEGSVPIFDQKWC

SEQ ID NO: 17697 - DNA, 50 bp, Qipengyuania flava
  source 1..50: mol_type = genomic DNA
ttcccatctttgaccagaagtggtgccccatgcaagacgaacatgggaac

SEQ ID NO: 17698 - DNA, 40 bp, Qipengyuania flava
  source 1..40: mol_type = genomic DNA
tcatcgcagtagaaatggtgccagaagaggcatcacattc

SEQ ID NO: 17699 - DNA, 50 bp, Qipengyuania flava; identical to SEQ ID NO: 17697
  source 1..50: mol_type = genomic DNA

SEQ ID NO: 17700 - DNA, 40 bp, Qipengyuania flava
  source 1..40: mol_type = genomic DNA
ttagccctctagaaatggtgccagaagatgaaacacattt

SEQ ID NO: 17701 - protein, 517 aa, Lachnospira eligens
MKVAIYCRLSEEDRNKQFETDDSNSIQNQKAMLLQYAMEQGWEVYNIYSDDDYTGSDRRRPEFNRLLADAEARRFNIVLCKTQSRFTRELELVEKYIHGLFPIWGIRFVSIVDNADTANKGNKKSRQINGLVNEWYLEDMSDNIRSVLTNRRQNGFHIGAFALYGYKKDPEQKGHLIIDEEAAAIVREVFTLFSQGYGKTAIARMLNDRGIPNPTEYKRLHGLRYQQPKRKNSTLWKYFAISDMLINEIYIGNMVQGKYGSVSYKTKQNKPRPKSEWYVVEGTHEPIIDRELWDKVQAMIAERAKPFDTGTIGLFARKARCANCGYTMRSSKNRGKHYLQCSNRHVAKDACIGSFISVDKLEQMVIAELNRLAAEYLDKDELEQNIEFCDNLQGQKKRLLADMSAYEKKIAEYSKGIRELYMDKVKGLISESDFVELSKDFTTEKERLERVMIDGQKQLAEIEERIAVGDNRRELIEQYTNLEHLTREIVEILIDYIVIGKRIPGTKDVPIEIHWNF

SEQ ID NO: 17702 - DNA, 50 bp, Lachnospira eligens
  source 1..50: mol_type = genomic DNA
tgttgttcttatatgattgcagcagatggtacgactgtgcaagaacaacg

SEQ ID NO: 17703 - DNA, 40 bp, Lachnospira eligens
  source 1..40: mol_type = genomic DNA
cgttgaagatatggcagcagaacaaaaggcacgaacaact

SEQ ID NO: 17704 - DNA, 50 bp, Lachnospira eligens
  source 1..50: mol_type = genomic DNA
tgttgttcttatatgattgcagcatctggtacgactgtgcaagaacaacg

SEQ ID NO: 17705 - DNA, 40 bp, Lachnospira eligens
  source 1..40: mol_type = genomic DNA
cgttgtaaaaatggcagcatcacaagatgaaagaattact

SEQ ID NO: 17706 - protein, 537 aa, Blautia producta; identical to SEQ ID NO: 2031

SEQ ID NO: 17707 - DNA, 50 bp, Blautia producta; identical to SEQ ID NO: 2032
  source 1..50: mol_type = genomic DNA

SEQ ID NO: 17708 - DNA, 40 bp, Blautia producta
  source 1..40: mol_type = genomic DNA
tgtaagcaaatgggagagcggactctcctgcccggatatt

SEQ ID NO: 17709 - DNA, 50 bp, Blautia producta
  source 1..50: mol_type = genomic DNA
tcatatctttaactaagggaaacctcagtttcccaaacaaaaggatatta

SEQ ID NO: 17710 - DNA, 40 bp, Blautia producta
  source 1..40: mol_type = genomic DNA
cgtaaacaacttggtgagctcactttcctgccctgctctt

SEQ ID NO: 17711 - protein, 542 aa, Blautia producta
MKQPNNTKTKIYSTALYMRLSRDDENFGDSVSIETQRTILQKFAAENGLRVYGEYVDDGWSGTNFDRPSFQRMMNDVEAGKVNCIVTKDLSRFGREHVMMDYYLEFVFPEKQIRYIAIAENEDTEKGLSEFVPFKNLFNEWFAKDTSRKVKSALHAKFEKGERIFAYAPLGYKRHPEIKNTLTPDEETRWIVEKIFDLAVHGAGAAKITRILIAEKVPTAGWLNYKRYGTFANIYAGAPEEKSYAWTIAQVKSILKDETYIGNSIHNKQTNISYKNKKKVRKPKEEWIRVENTHEALVSKDVFDRVQELIETRRRKQKDGTTQIFSGLVKCADCGWSLAFGMNNQNKKPYGHYHCSNYGQGTGHCTMHYIRYDILYTYVLARIQYWSYQAQMDEGRLLQKLLKAGDRERTASQKKQAAELNKAEKRKAELDRLFAKMYEDWAAGRITEYNFNMLSQRYQTEQQELAEKIEKLNADLVAQQQSAVDAEKWVNLIKQYVNPSELTAELLNALIEKIVVHEAVKDESNTRTQEIEIYYRFIGKVE

SEQ ID NO: 17712 - DNA, 50 bp, Blautia producta; identical to SEQ ID NO: 427
  source 1..50: mol_type = genomic DNA

SEQ ID NO: 17713 - DNA, 40 bp, Blautia producta; identical to SEQ ID NO: 17708
  source 1..40: mol_type = genomic DNA

SEQ ID NO: 17714 - DNA, 50 bp, Blautia producta
  source 1..50: mol_type = genomic DNA
ttatctctttaagttggggaaacctcagtttcccaaagttaaagatacta

SEQ ID NO: 17715 - DNA, 40 bp, Blautia producta; identical to SEQ ID NO: 17710
  source 1..40: mol_type = genomic DNA

SEQ ID NO: 17716 - protein, 540 aa, Clostridioides difficile; identical to SEQ ID NO: 12471

SEQ ID NO: 17717 - DNA, 50 bp, Clostridioides difficile; identical to SEQ ID NO: 9162
  source 1..50: mol_type = genomic DNA

SEQ ID NO: 17718 - DNA, 40 bp, Clostridioides difficile; identical to SEQ ID NO: 6638
  source 1..40: mol_type = genomic DNA

SEQ ID NO: 17719 - DNA, 50 bp, Clostridioides difficile
  source 1..50: mol_type = genomic DNA
caatatctttaactaagggaaactaagggttcacttagataaagatacca

SEQ ID NO: 17720 - DNA, 40 bp, Clostridioides difficile
  source 1..40: mol_type = genomic DNA
tgtctctaaaaagtaaagtaaaataagttagcctgacata

SEQ ID NO: 17721 - protein, 540 aa, Clostridioides difficile; identical to SEQ ID NO: 296

SEQ ID NO: 17722 - DNA, 50 bp, Clostridioides difficile; identical to SEQ ID NO: 13292
  source 1..50: mol_type = genomic DNA

SEQ ID NO: 17723 - DNA, 40 bp, Clostridioides difficile; identical to SEQ ID NO: 6638
  source 1..40: mol_type = genomic DNA

SEQ ID NO: 17724 - DNA, 50 bp, Clostridioides difficile
  source 1..50: mol_type = genomic DNA
caatatctttaactaagggaaacgaagggttcacttagataaagatacca

SEQ ID NO: 17725 - DNA, 40 bp, Clostridioides difficile; identical to SEQ ID NO: 17720
  source 1..40: mol_type = genomic DNA

SEQ ID NO: 17726 - protein, 540 aa, Clostridioides difficile
MKQPYNTTIYNTALYLRLSRDDELQGESGSIQTQRMMLRQYAAEHGLTVVDEYIDDGWSGTNFERPSFQRMIDDIEDGKINCVVTKDLSRLGRNYILTGQYTEIYFPSKGVRYIAINDNVDTINGESELAPFLNILNEMHARQTSKKVKAAMHTRFANGAHYGAYAPLGYVKDPDKKGHLLIDPETRWIVEKIFDLAVHGRGAASITRILVEEKVPTPGWLNYERYGTFANIYAGAPAEKAYAWTIAQVKSILKEETYIGHSVHNKQSNISFKNKKKVRKPQEEWYRVENTHEAIISEEVFQKVQELIASRRRRQKNGTTQIFSGLVKCADCGWSLAYGVNSQNKNPYAHYHCSKYGQGLRQCSMHYIRYDVLYAYVLARLQYWSMMVQKDEDKLLKRLLNASDRERNSAKKKQAAELKKAEKRKAEVDGLFAKMYEDWSAGRITEYNFNMLSEKYQNEQKELETKIRQLHETMEAAVQTAADAEKWIALMKQYVNPVELTAELLNTLIEKITVHEAVKGEDGSREQEVEIYYRFIGKID

SEQ ID NO: 17727 - DNA, 50 bp, Clostridioides difficile; identical to SEQ ID NO: 3657
  source 1..50: mol_type = genomic DNA

SEQ ID NO: 17728 - DNA, 40 bp, Clostridioides difficile; identical to SEQ ID NO: 6638
  source 1..40: mol_type = genomic DNA

SEQ ID NO: 17729 - DNA, 50 bp, Clostridioides difficile; identical to SEQ ID NO: 12409
  source 1..50: mol_type = genomic DNA

SEQ ID NO: 17730 - DNA, 40 bp, Clostridioides difficile; identical to SEQ ID NO: 17720
  source 1..40: mol_type = genomic DNA

SEQ ID NO: 17731 - protein, 537 aa, Clostridioides difficile
MKQQIYNTALYLRLSRDDELQGESSSIITQRSMLRLYAKEHHLNVIDEYIDDGWSGTNFDRPSFQRMIEDIEAGKINCVVTKDLSRLGRNYIMTGQYTELYFPSHNVRYIAIDDGVDSEKGESEIAPFKNIINEWVARDTSRKVKSAFKTKFAEGAHYGAYAPLGYKKHPDIKGKLLIDDETKWIIEKIFSLAYQGYGSAKITKQLRAEKVPTASWLNFTRYGTFAHIFEGNPESKRYEWTIAHVKAILKSEVYIGNSVHNMQSTVSFKSKKKVRKPESEWFRVENTHEPIIDKEVFYRVQEQIKSRRRQTKEKATPIFAGLVKCVDCGWSMRFGTNKANKTPYSYYACSYYGQFGKGNCSMHYIRYDVLYQAVLERLQYWAKAVQQDEEKALNKIQKVGNAERIREKKKKASTLKKAENRQSEIDRLFAKMYEDRACEKITERNFVMLSSKYQKEQIELEQQITSLREELSKMEQDMIGAEKWIELIKEYSIPKELTAPLLNAMIEKILIHEATTNEDNERIQEIEIYYRFIGKVE

SEQ ID NO: 17732 - DNA, 50 bp, Clostridioides difficile; identical to SEQ ID NO: 3072
  source 1..50: mol_type = genomic DNA

SEQ ID NO: 17733 - DNA, 40 bp, Clostridioides difficile; identical to SEQ ID NO: 6638
  source 1..40: mol_type = genomic DNA

SEQ ID NO: 17734 - DNA, 50 bp, Clostridioides difficile; identical to SEQ ID NO: 12169
  source 1..50: mol_type = genomic DNA

SEQ ID NO: 17735 - DNA, 40 bp, Clostridioides difficile; identical to SEQ ID NO: 17720
  source 1..40: mol_type = genomic DNA

SEQ ID NO: 17736 - protein, 540 aa, Clostridioides difficile; identical to SEQ ID NO: 296

SEQ ID NO: 17737 - DNA, 50 bp, Clostridioides difficile; identical to SEQ ID NO: 297
  source 1..50: mol_type = genomic DNA

SEQ ID NO: 17738 - DNA, 40 bp, Clostridioides difficile; identical to SEQ ID NO: 6638
  source 1..40: mol_type = genomic DNA

SEQ ID NO: 17739 - DNA, 50 bp, Clostridioides difficile; identical to SEQ ID NO: 2759
  source 1..50: mol_type = genomic DNA

SEQ ID NO: 17740 - DNA, 40 bp, Clostridioides difficile; identical to SEQ ID NO: 17720
  source 1..40: mol_type = genomic DNA

SEQ ID NO: 17741 - protein, 537 aa, Clostridioides difficile; identical to SEQ ID NO: 641

SEQ ID NO: 17742 - DNA, 50 bp, Clostridioides difficile; identical to SEQ ID NO: 402
  source 1..50: mol_type = genomic DNA

SEQ ID NO: 17743 - DNA, 40 bp, Clostridioides difficile; identical to SEQ ID NO: 6638
  source 1..40: mol_type = genomic DNA

SEQ ID NO: 17744 - DNA, 50 bp, Clostridioides difficile; identical to SEQ ID NO: 644
  source 1..50: mol_type = genomic DNA

SEQ ID NO: 17745 - DNA, 40 bp, Clostridioides difficile; identical to SEQ ID NO: 17720
  source 1..40: mol_type = genomic DNA

SEQ ID NO: 17746 - protein, 540 aa, Clostridioides difficile
MKQPYNTTIYNTALYLRLSRDDELQGESGSIQTQRLMLRQYAAEHGLTVVDEYIDDGWSGTNFERPSFQRMIDDIEDGKINCVVTKDLSRLGRNYILTGQYTEIYFPSKGVRYIAINDNVDTINGESELAPFLNILNEMHARQTSKKVKAAMHTRFANGAHYGAYAPLGYIKDPDKKGHLLIDPETRWIVEKIFDLAVHGRGAASITRILVEEKIPTPGWLNYERYGTFANIYAGAPTEKAYAWTIAQVKSILKEETYIGHSVHNKQSNISFKNKKKVRKPQEEWYRVENTHEAIISEEVFQKVQELIASRRRKRRNGTTQIFAGLIKCADCGWSLAYGENKQNKNPYGYYHCSKNGQGLRQCSMHYIRYDVLYAYVLARLQYWSMMVQKDEDKLLKRLLNASDRERNSAKKKQAAELKKAEKRKAEVDGLFAKMYEDWSAGRITEYNFNMLSEKYQNEQKELETKIRQLHETMEAAVQTAADAEKWIALMKQYVNPVELTAELLNTLIEKITVHEAVKGEDGSREQEVEIYYRFIGKID

SEQ ID NO: 17747 - DNA, 50 bp, Clostridioides difficile; identical to SEQ ID NO: 3657
  source 1..50: mol_type = genomic DNA

SEQ ID NO: 17748 - DNA, 40 bp, Clostridioides difficile; identical to SEQ ID NO: 6638
  source 1..40: mol_type = genomic DNA

SEQ ID NO: 17749 - DNA, 50 bp, Clostridioides difficile; identical to SEQ ID NO: 12409
  source 1..50: mol_type = genomic DNA

SEQ ID NO: 17750 - DNA, 40 bp, Clostridioides difficile; identical to SEQ ID NO: 17720
  source 1..40: mol_type = genomic DNA

SEQ ID NO: 17751 - protein, 537 aa, Clostridioides difficile
MKQQIYNTALYLRLSRDDELQGESSSITTQRSMLRLYAKEHHLNVIDEYIDDGWSGTNFERPSFQRMIEDIEAGKINCVVTKDLSRLGRNYIMTGQYTELYFPSHNVRYIAIDDGVDSEKGESEIAPFKNIINEWVARDTSRKVKSAFKTKFAEGAYYGAYAPLGYKKHPDIKGKLLVDEETKWIVEKIFSLAYQGYGSAKITKILREEKVPTASWLNFTRYGTFAHIFEGKPESKRYEWTIAHVKAILKSEVYIGNSVHNRQSTVSFKSKKKVRKPESEWFRVENTHEPIIDKEVFYRVQEQIKSRRRQTKEKATPIFAGLVKCADCGWSMRFATNKANKTPYSYYACSYYGQFGKGTCSMHYIRYDVLYQAVLERLQYWAKAVQQDEEKVLNKIQKAGNAERIREKKKKASALKKAENRQNEIDRLFTKMYEDRACEKITERNFIMLSGKYQKEQIELEQQITNLREELSKMEQDMIGAEKWIELIKEYSVPKELTAPLLNAMIEKILIHEATTNEDNERIQEIEIYYRFIGKVD

SEQ ID NO: 17752 - DNA, 50 bp, Clostridioides difficile
  source 1..50: mol_type = genomic DNA
gcatatctttaactaagggaaactggagtttcccaaacaaaaggatatta

SEQ ID NO: 17753 - DNA, 40 bp, Clostridioides difficile; identical to SEQ ID NO: 6638
  source 1..40: mol_type = genomic DNA

SEQ ID NO: 17754 - DNA, 50 bp, Clostridioides difficile
  source 1..50: mol_type = genomic DNA
gcatatctttaactaagggaaactaaagtttcccaaacaaaaggatatta

SEQ ID NO: 17755 - DNA, 40 bp, Clostridioides difficile; identical to SEQ ID NO: 17720
  source 1..40: mol_type = genomic DNA

SEQ ID NO: 17756 - protein, 540 aa, Clostridioides difficile; identical to SEQ ID NO: 1671

SEQ ID NO: 17757 - DNA, 50 bp, Clostridioides difficile; identical to SEQ ID NO: 13292
  source 1..50: mol_type = genomic DNA

SEQ ID NO: 17758 - DNA, 40 bp, Clostridioides difficile; identical to SEQ ID NO: 6638
  source 1..40: mol_type = genomic DNA

SEQ ID NO: 17759 - DNA, 50 bp, Clostridioides difficile; identical to SEQ ID NO: 17724
  source 1..50: mol_type = genomic DNA

SEQ ID NO: 17760 - DNA, 40 bp, Clostridioides difficile; identical to SEQ ID NO: 17720
  source 1..40: mol_type = genomic DNA

SEQ ID NO: 17761 - protein, 470 aa, Clostridioides difficile
MIDDIEDGKINCVVTKDLSRLGRNYILTGQYTEIYFPSKGVRYIAINDNVDTINGESELAPFLNILNEMHARQTSKKVKAAMRTRFANGAHYGAYAPLGYVKDPDKKGHLLIDPETRWIVEKIFDLAVHGRGAASITRILVEEKVPTPGWLNYERYGTFANIYAGAPAEKAYAWTIAQVKSILKEETYIGHSVHNKQSNISFKNKKKVRKPQEEWYRVENTHEAIISEEVFQKVQELIASRRRKRRNGTTQIFAGLIKCADCGWSLAYGENKQNKNPYGYYHCSKNGQGLRQCSMHYIRYDVLYAYVLARLQYWSMMVQKDEDKLLKRLLNASDRERNSAKKKQAAELKKAEKRKAEVDGLFAKMYEDWSAGRITEYNFNMLSEKYQNEQKELETKIRQLHETMEAAVQTAADAEKWIALMKQYVNPVELTAELLNTLIEKITVHEAVKGEDGSREQEVEIYYRFIGKID

SEQ ID NO: 17762 - DNA, 50 bp, Clostridioides difficile; identical to SEQ ID NO: 3657
  source 1..50: mol_type = genomic DNA

SEQ ID NO: 17763 - DNA, 40 bp, Clostridioides difficile; identical to SEQ ID NO: 6638
  source 1..40: mol_type = genomic DNA

SEQ ID NO: 17764 - DNA, 50 bp, Clostridioides difficile; identical to SEQ ID NO: 12409
  source 1..50: mol_type = genomic DNA

SEQ ID NO: 17765 - DNA, 40 bp, Clostridioides difficile; identical to SEQ ID NO: 17720
  source 1..40: mol_type = genomic DNA

SEQ ID NO: 17766 - protein, 540 aa, Clostridioides difficile; identical to SEQ ID NO: 13311

SEQ ID NO: 17767 - DNA, 50 bp, Clostridioides difficile; identical to SEQ ID NO: 3657
  source 1..50: mol_type = genomic DNA

SEQ ID NO: 17768 - DNA, 40 bp, Clostridioides difficile; identical to SEQ ID NO: 6638
  source 1..40: mol_type = genomic DNA

SEQ ID NO: 17769 - DNA, 50 bp, Clostridioides difficile; identical to SEQ ID NO: 12409
  source 1..50: mol_type = genomic DNA

SEQ ID NO: 17770 - DNA, 40 bp, Clostridioides difficile; identical to SEQ ID NO: 17720
  source 1..40: mol_type = genomic DNA

SEQ ID NO: 17771 - protein, 537 aa, Clostridioides difficile
MKQQIYNTALYLRLSRDDELQGESSSITTQRSMLRLYAKEHHLNVIDEYIDDGWSGTNFDRPSFQRMIEDIEAGKINCVVTKDLSRLGRNYIMTGQYTELYFPSHNVRYIAIDDGVDSEKGESEIAPFKNIINEWVARDTSRKVKSAFKTKFAEGAHYGAYAPLGYKKHPDIKGKLLVDDETKWIIEKIFSLAYQGYGSAKITKQLRAEKVPTASWLNFTRYGTFAHIFEGKPESKRYEWTIAHVKAILKSEVYIGNSVHNMQSTVSFKSKKKVRKPESEWFRVENTHEPIIDKEVFYRVQEQIKSRRRQTKEKATPIKPPQLKCADCGWSMRFGTNKTNKTPYSYYACSYYGQFGKGNCSMHYIRYDVLYQAVLERLQYWAKAVQQDEEKVLNKIQKVGNAERIREKKKKASTLKKAENRQNEIDRLFAKMYEDRACEKITERNFVMLSSKYQKEQIELEQQITSLREELSKMEQDMIGAEKWIELIKEYSVPKELTAPLLNAMIEKILIHEATTNEDNERIQEIEIYYRFIGRVE

SEQ ID NO: 17772 - DNA, 50 bp, Clostridioides difficile; identical to SEQ ID NO: 402
  source 1..50: mol_type = genomic DNA

SEQ ID NO: 17773 - DNA, 40 bp, Clostridioides difficile; identical to SEQ ID NO: 6638
  source 1..40: mol_type = genomic DNA

SEQ ID NO: 17774 - DNA, 50 bp, Clostridioides difficile; identical to SEQ ID NO: 644
  source 1..50: mol_type = genomic DNA

SEQ ID NO: 17775 - DNA, 40 bp, Clostridioides difficile; identical to SEQ ID NO: 17720
  source 1..40: mol_type = genomic DNA

SEQ ID NO: 17776 - protein, 505 aa, Clostridioides difficile
MLRLYAKEHHLNVIDEYIDDGWSGTNFDRPSFQRMIEDIEAGKINCVVTKDLSRLGRNYIMTGQYTELYFPSHNVRYIAIDDGVDSEKGESEIAPFKNIINEWVARDTSRKVKSAFKTKFAEGAHYGAYAPLGYKKHPDIKGKLLVDDETKWIIEKIFSLAYQGYGSAKITKQLRAEKVPTASWLNFTRYGTFAHIFEGKPESKRYEWTIAHVKAILKSEVYIGNSVHNMQSTVSFKSKKKVRKPESEWFRVENTHEPIIDKEVFYRVQEQIKSRRRQTKEKATPIFAGLVKCADCGWSMRFGTNKTNKTPYSYYACSYYGQFGKGNCSMHYIRYDVLYQAVLERLQYWAKAVQQDEEKVLNKIQKAGNAERIREKKKKASTLKKAENRQNEIDRLFAKMYEDRACEKITERNFVMLSSKYQKEQIELEQQITSLREELSKMEQDMIGAEKWIELIKEYSVPKELTAPLLNAMIEKILIHEATTNEDNERIQEIEIYYRFIGKVE

SEQ ID NO: 17777 - DNA, 50 bp, Clostridioides difficile; identical to SEQ ID NO: 402
  source 1..50: mol_type = genomic DNA

SEQ ID NO: 17778 - DNA, 40 bp, Clostridioides difficile; identical to SEQ ID NO: 6638
  source 1..40: mol_type = genomic DNA

SEQ ID NO: 17779 - DNA, 50 bp, Clostridioides difficile; identical to SEQ ID NO: 644
  source 1..50: mol_type = genomic DNA

SEQ ID NO: 17780 - DNA, 40 bp, Clostridioides difficile; identical to SEQ ID NO: 17720
  source 1..40: mol_type = genomic DNA

SEQ ID NO: 17781 - protein, 540 aa, Clostridioides difficile
MKQPYNTTIYNTALYLRLSRDDELQGESGSIQTQRMMLRQYAAEHGLTVVDEYIDDGWSGTNFERPSFQRMIDDIEDGKINCVVTKDLSRLGRNYILTGQYTEIYFPSKGVRYIAINDNVDTINGESELAPFLNILNEMHARQTSKKVKAAMRTRFANGAHYGAYAPLGYVKDPDKKGHLLIDPETRWIVEKIFDLAVHGRGAASITRILVEEKVPTPGWLNYERYGTFANIYAGAPAEKAYAWTIAQVKSILKEETYIGHSVHNKQSNISFKNKKKVRKPQEEWYRVENTHEAIISEEVFQKVQEMIASRRRRQKNGTTQIFSGLVKCADCGWSLAYGVNSQNKNPYAHYHCSKYGQGLRQCSMHYIRYDVLYAYVLARLQYWSMLAQKDEDKLLKRLLNASDRERNSAKKKQAAELKKAEKRKAEVDGLFAKMYEDWSAGRITEYNFNMLSEKYQNEQKELETKIRQLHETMEAAVQTAADAEKWIALMKQYVNPVELTAELLNTLIEKITVHEAVKGEDGSREQEVEIYYRFIGKID

SEQ ID NO: 17782 - DNA, 50 bp, Clostridioides difficile; identical to SEQ ID NO: 3657
  source 1..50: mol_type = genomic DNA

SEQ ID NO: 17783 - DNA, 40 bp, Clostridioides difficile; identical to SEQ ID NO: 6638
  source 1..40: mol_type = genomic DNA

SEQ ID NO: 17784 - DNA, 50 bp, Clostridioides difficile; identical to SEQ ID NO: 12409
  source 1..50: mol_type = genomic DNA

SEQ ID NO: 17785 - DNA, 40 bp, Clostridioides difficile; identical to SEQ ID NO: 17720
  source 1..40: mol_type = genomic DNA

SEQ ID NO: 17786 - protein, 540 aa, Clostridioides difficile
MKQPYNTTIYNTALYLRLSRDDELQGESGSIQTQRMMLRQYAAEHGLTVVDEYIDDGWSGTNFERPSFQRMIDDIEDGKINCVVTKDLSRLGRNYILTGQYTEIYFPSKGVRYIAINDNVDTINGESELAPFLNILNEMHARQTSKKVKAAMHTRFANGAHYGAYAPLGYVKDPDKKGHLLIDPETRWIVEKIFDLAVHGRGAASITRILVEEKVPTPGWLNYERYGTFANIYAGAPAEKAYAWTIAQVKSILKEETYIGHSIHNKQSNISFKNKKKVRKPQEEWYRVENTHEAIISEEVFQKVQELIASRRRKRRNGTTQIFAGLIKCADCGWSLAYGENKQNKNPYGYYHCSKNGQGLRQCSMHYIRYDVLYAYVLARLQYWSMLAQKDEDNLLKRLLNASDRERNSAKKKQAAELKKAEKRKAEVDGLFAKMYEDWSAGRITEYNFNMLSEKYQNEQRELETKIRQLHETMEAAVQTAADAEKWIALMKQYVNPVELTAELLNTLIEKITVHEAVKGEDGSREQEVEIYYRFIGKID

SEQ ID NO: 17787 - DNA, 50 bp, Clostridioides difficile; identical to SEQ ID NO: 3657
  source 1..50: mol_type = genomic DNA

SEQ ID NO: 17788 - DNA, 40 bp, Clostridioides difficile; identical to SEQ ID NO: 6638
  source 1..40: mol_type = genomic DNA

SEQ ID NO: 17789 - DNA, 50 bp, Clostridioides difficile; identical to SEQ ID NO: 12409
  source 1..50: mol_type = genomic DNA

SEQ ID NO: 17790 - DNA, 40 bp, Clostridioides difficile; identical to SEQ ID NO: 17720
  source 1..40: mol_type = genomic DNA

SEQ ID NO: 17791 - protein, 537 aa, Clostridioides difficile; identical to SEQ ID NO: 9176

SEQ ID NO: 17792 - DNA, 50 bp, Clostridioides difficile; identical to SEQ ID NO: 1657
  source 1..50: mol_type = genomic DNA

SEQ ID NO: 17793 - DNA, 40 bp, Clostridioides difficile; identical to SEQ ID NO: 6638
  source 1..40: mol_type = genomic DNA

SEQ ID NO: 17794 - DNA, 50 bp, Clostridioides difficile; identical to SEQ ID NO: 15349
  source 1..50: mol_type = genomic DNA

SEQ ID NO: 17795 - DNA, 40 bp, Clostridioides difficile; identical to SEQ ID NO: 17720
  source 1..40: mol_type = genomic DNA

SEQ ID NO: 17796 - protein, 537 aa, Clostridioides difficile; identical to SEQ ID NO: 9196

SEQ ID NO: 17797 - DNA, 50 bp, Clostridioides difficile; identical to SEQ ID NO: 1657
  source 1..50: mol_type = genomic DNA

SEQ ID NO: 17798 - DNA, 40 bp, Clostridioides difficile; identical to SEQ ID NO: 6638
  source 1..40: mol_type = genomic DNA

SEQ ID NO: 17799 - DNA, 50 bp, Clostridioides difficile; identical to SEQ ID NO: 15349
  source 1..50: mol_type = genomic DNA

SEQ ID NO: 17800 - DNA, 40 bp, Clostridioides difficile; identical to SEQ ID NO: 17720
  source 1..40: mol_type = genomic DNA

SEQ ID NO: 17801 - protein, 537 aa, Clostridioides difficile
MKQQIYNTALYLRLSRDDELQGESSSITTQRSMLRLYAKEHHLNVIDEYIDDGWSGTNFERPSFQRMIEDIEAGKINCVVTKDLSRLGRNYIMTGQYTELYFPSHNVRYIAIDDGVDSEKGESEIAPFKNIINEWVARDTSRKVKSAFKTKFAEGAYYGAYAPLGYKKHPDIKGKLLIDEETKWIVEKIFSLAYQGYGSAKITKILREEKVPTASWLNFTRYGTFAHIFEGKPESKRYEWTIAHVKAILKSEVYIGNSVHNRQSTVSFKSKKKVRKPESEWFRVENTHEPIIDKEVFYRVQEQIKSRRRQTKEKATPIFAGLVKCADCGWSMRFATNKANKTPYSYYACSYYGQFGKGTCSMHYIRYDVLYQAVLERLQYWAKAVQQDEEKVLNKIQKAGNAERIREKKKKASALKKAENRQNEIDRLFTKMYEDRACEKITERNFIMLSGKYQKEQIELEQQITNLREELSKMEQDMIGAEKWIELIKEYSVPKELTAPLLNAMIEKILIHEATTNEENERIQEIEIYYRFIGKVD

SEQ ID NO: 17802 - DNA, 50 bp, Clostridioides difficile; identical to SEQ ID NO: 1657
  source 1..50: mol_type = genomic DNA

SEQ ID NO: 17803 - DNA, 40 bp, Clostridioides difficile; identical to SEQ ID NO: 6638
  source 1..40: mol_type = genomic DNA

SEQ ID NO: 17804 - DNA, 50 bp, Clostridioides difficile; identical to SEQ ID NO: 15349
  source 1..50: mol_type = genomic DNA

SEQ ID NO: 17805 - DNA, 40 bp, Clostridioides difficile; identical to SEQ ID NO: 17720
  source 1..40: mol_type = genomic DNA

SEQ ID NO: 17806 - protein, 537 aa, Clostridioides difficile; identical to SEQ ID NO: 11881

SEQ ID NO: 17807 - DNA, 50 bp, Clostridioides difficile; identical to SEQ ID NO: 1657
  source 1..50: mol_type = genomic DNA

SEQ ID NO: 17808 - DNA, 40 bp, Clostridioides difficile; identical to SEQ ID NO: 6638
  source 1..40: mol_type = genomic DNA

SEQ ID NO: 17809 - DNA, 50 bp, Clostridioides difficile; identical to SEQ ID NO: 15349
  source 1..50: mol_type = genomic DNA

SEQ ID NO: 17810 - DNA, 40 bp, Clostridioides difficile; identical to SEQ ID NO: 17720
  source 1..40: mol_type = genomic DNA

SEQ ID NO: 17811 - protein, 540 aa, Clostridioides difficile; identical to SEQ ID NO: 12131

SEQ ID NO: 17812 - DNA, 50 bp, Clostridioides difficile; identical to SEQ ID NO: 2472
  source 1..50: mol_type = genomic DNA

SEQ ID NO: 17813 - DNA, 40 bp, Clostridioides difficile; identical to SEQ ID NO: 6638
  source 1..40: mol_type = genomic DNA

SEQ ID NO: 17814 - DNA, 50 bp, Clostridioides difficile
  source 1..50: mol_type = genomic DNA
caatatctttaattaagggagacgaaagtttcccatagttaaagatacca

SEQ ID NO: 17815 - DNA, 40 bp, Clostridioides difficile; identical to SEQ ID NO: 17720
  source 1..40: mol_type = genomic DNA

SEQ ID NO: 17816 - protein, 536 aa, Bosea thiooxidans
MTRSAPTPLRCAIYTRVSTDHGLEQDFNSLDAQREAAEAFIRSQAHEGWRLLPQSYDDGGFSGGSLERPALQRLLGEVEAGRIDIIVVYKVDRLTRSLTDFARLVERFDARGASFVSVTQAFNTTSSMGRLTLNVLLSFAQFEREVTGERIRDKIAASKRKGLWMGGPVPHGYRVEARKLVIDPQEAQTVRSIFTQYQELRSIPALQQALRLQGIRSRVRMRTAGTSIGGVPLTNGPLGHILRNRIYLGEINHRGNSYPGEHEAIVTTEQFAAVQAIMAANTVKRRSLRVTSQALLTGLLKDDRGHAMSPSHALKKGARYRYYVSQALLQGRKAEAGSRPRIAAEPIESIVLQHLRPLATMRPPADQQPPRSDAGLIEELVEQVVLGSSEISIRLRAEAGPAGQPRALSIPWTPPSATRRREVIAVAGLGEGRAAAPMKAENRQKLIRALAQARAWLAELTRGEAIDTAGIARREGCSERAVRMRLSLAFLAPDIVEAAIAGLLPRALGLTRLSDLPMDWAAQRRALGIRDTIAAN

SEQ ID NO: 17817 - DNA, 50 bp, Bosea thiooxidans
  source 1..50: mol_type = genomic DNA
acactcgtaaattgcatgagtgtttggtggtgcatgcgttttcgatcgaa

SEQ ID NO: 17818 - DNA, 40 bp, Bosea thiooxidans
  source 1..40: mol_type = genomic DNA
ctttgagaagtaggggaaatggtgggcggcacagggatcg

SEQ ID NO: 17819 - DNA, 50 bp, Bosea thiooxidans
  source 1..50: mol_type = genomic DNA
acactcgtaaattgcatgagtgttgagtggtgcatgcgttttcgatcgaa

SEQ ID NO: 17820 - DNA, 40 bp, Bosea thiooxidans
  source 1..40: mol_type = genomic DNA
ctttgggaactcggggaaagagggggcgggtgagggatat

SEQ ID NO: 17821 - protein, 587 aa, Paenarthrobacter nitroguajacolicus
MTIEEVEALRPRKAVLYLRVSSKKQTQTAIDIDKDGNSIATQRDICEQKAEAVNADIIEEFVEPGVSAQTIEKRPVFQALLRFLQNNRDVDYVIVYARSRAFRNFTDAAITRRHLDKLGVRLLSAREDFGEGTYAEAMEAVTDIMNQVQNQLSGEDIRIKMRNKAVNGGTLGKARLGYLNIRKDIDGRMINSVGLDETRAPLVLKAFELYATGRYSIEQLEATMADIGLTNRRTARFPEGPVSASKLHQMLKDPYYVGYVIYKGDAYPGRHEPIIGQDLFDQVQDILSSRSGAGSRDRIHNHFLKGMLYCGKCLKLGRQSRVIYTEAKGRGGTIHEYFFCRARQEGKCDLPYLPAYLVEDSVADSYSRLVLDEDFKQDVRRRLEEALLGEQKDIKEMYARYTNQLKEVEAKESRLVDVAADGILPASKVREKMHELRVQRSRIEDSLANIGEEIAVGGQLLTKALDQIADPKAYYEKATDKIRRLLNESFFLRFFVYQGGAVGADLNEPFDDIFAAQTAFRSSKTPRAVSVPGSSQSSQIGPFLGDSGVLARQFPDIKNGADFSTPSLLFKLKSVYSNHGSNKATLV

SEQ ID NO: 17822 - DNA, 50 bp, Paenarthrobacter nitroguajacolicus
  source 1..50: mol_type = genomic DNA
ggttcgaataaagcgactctggtcgaggtcctaggatgttactcgaacca

SEQ ID NO: 17823 - DNA, 40 bp, Paenarthrobacter nitroguajacolicus
  source 1..40: mol_type = genomic DNA
gccattctcgtgtttggtcgggatgacaggatttgaacct

SEQ ID NO: 17824 - DNA, 50 bp, Paenarthrobacter nitroguajacolicus
  source 1..50: mol_type = genomic DNA
ggttcgaataaagcgactctggtcagggtcctaggatgttactcgaacca

SEQ ID NO: 17825 - DNA, 40 bp, Paenarthrobacter nitroguajacolicus
  source 1..40: mol_type = genomic DNA
gccataattgtgtttgggcaggtacacagggttagaacct

SEQ ID NO: 17826 - protein, 587 aa, Paenarthrobacter ureafaciens
MTIEEVEALRPRKAVLYLRVSSKKQTQTASDIDKDGNSIATQRDICEQKAEAVNADIIEEFVEPGVSAQTIEKRPVFQALLRFLQNNRDVDYVIVYARSRAFRNFTDAAITRRHLDKLGVRLLSAREDFGEGTYAVAMEAVTDIMNQVQNQLSGEDISIKMRNKAINGGTLGKARLGYLNIRKDIDGRMINSVGLDEVRAPLVLKAFELYATNLYSIEQLEATMADLGLTNRQTARFPEGPVSASKLHQMLKDPYYVGYVVYKGDAYPGRHEPIIGQDLFDQVQDILNSRSGAGSRDRIHNHFLKGMLYCGKCFKLGRQSRVIYTEVKGRGGTPHEYFFCRARQEGECDLPYLPAYLVEDSVADSYGRLVLDEDFKRDVRRRLKEALLGEQKDIKEMYARYTNQLKEIEAKESRLVDVAADGILPVSKVREKMHELRVQRSRIEDSLANIGEEIAVGGQLLTNALDQLADPKAYYEKATDKVRRLLNESFFLRFFVHHDGAVGADLNEPFDDIFAAQIAFRASKTPQAVSGPGSSRSSQIGPFLDDSGVLAAQFRGTKNGADFSTPSLLFKLKSVYSNHGSNKATLV

SEQ ID NO: 17827 - DNA, 50 bp, Paenarthrobacter ureafaciens
  source 1..50: mol_type = genomic DNA
ggttcgaataaagcgactctggtcgagatcctaggatgttactcgaaccg

SEQ ID NO: 17828 - DNA, 40 bp, Paenarthrobacter ureafaciens
  source 1..40: mol_type = genomic DNA
gccattttcgtgtttggtcgggatgacaggatttgaacct

SEQ ID NO: 17829 - DNA, 50 bp, Paenarthrobacter ureafaciens
  source 1..50: mol_type = genomic DNA
ggttcgaataaagcgactctggtcaggatcctaggatgttactcgaaccg

SEQ ID NO: 17830 - DNA, 40 bp, Paenarthrobacter ureafaciens; identical to SEQ ID NO: 17825
  source 1..40: mol_type = genomic DNA

SEQ ID NO: 17831 - protein, 540 aa, Longicatena caecimuris
MKQPYNTTIYNTALYLRLSRDDELQGESGSIQTQRMMLRQYAAEHGLTVVDEYIDDGWSGTNFERPNFQRMIDDIEDGKINCVVTKDLSRLGRNYILTGQYTDIYFPSKGVRYIAINDNVDTLNGESELAPFLNILNEMHARQTSKKVKAAMHTRFANGAHYGAYAPLGYVKDPDKKGHLLIDPETRWIVEKIFDLAVHGRGAASITRILVEEKVPTPGWLNYDRYGTFANIYAGAPAEKAYAWTIAQVKSILKEETYIGHSVHNKQSNISFKNKKKVRKPQEEWYRVENTHEAIISEEAFQKVQELIASRRRRQKNGKTQIFSGLVKCADCGWSLAYGVNSQNKNPYAHYHCSKYGQGLRQCSMHYIRYDVLYAYVLARLQYWSALAQKDEDKLLKRLLNASDRERTSAKKKQAAELKKAEKRKAEVDGLFAKMYEDWSAGRITEYNFNMLSGKYQNEQTELETKIRQLHEAMEAAVQTATDAEKWIALMKQYVNPVELTAELLNTLIEKITVHEAVKGEDGSREQEVEIYYRFIGKID

SEQ ID NO: 17832 - DNA, 50 bp, Longicatena caecimuris; identical to SEQ ID NO: 3657
  source 1..50: mol_type = genomic DNA

SEQ ID NO: 17833 - DNA, 40 bp, Longicatena caecimuris
  source 1..40: mol_type = genomic DNA
agtttcaaagtgggaaaccggtaaaagtatgccagatgca

SEQ ID NO: 17834 - DNA, 50 bp, Longicatena caecimuris
  source 1..50: mol_type = genomic DNA
caatatctttaattaagggaaacgatagtttcccatagttaaagatacca

SEQ ID NO: 17835 - DNA, 40 bp, Longicatena caecimuris
  source 1..40: mol_type = genomic DNA
tttttaaaagtttcaaaccataaaaaatattccagatgca

SEQ ID NO: 17836 - protein, 540 aa, Erysipelatoclostridium ramosum; identical to SEQ ID NO: 12131

SEQ ID NO: 17837 - DNA, 50 bp, Erysipelatoclostridium ramosum; identical to SEQ ID NO: 2472
  source 1..50: mol_type = genomic DNA

SEQ ID NO: 17838 - DNA, 40 bp, Erysipelatoclostridium ramosum
  source 1..40: mol_type = genomic DNA
agtcaataaatgggagcgggggattagttatccagatatt

SEQ ID NO: 17839 - DNA, 50 bp, Erysipelatoclostridium ramosum; identical to SEQ ID NO: 9909
  source 1..50: mol_type = genomic DNA

SEQ ID NO: 17840 - DNA, 40 bp, Erysipelatoclostridium ramosum
  source 1..40: mol_type = genomic DNA
agtgaaaaaatgtgagctgtagattatttatatagaaatc

SEQ ID NO: 17841 - protein, 615 aa, Faecalibacterium prausnitzii
MARKPERYPALYERLSHDDELQGESNSISNQKRILEDYAEQHGFTNCTHFTDDGISGTQFDRPGFQKMIAEVKADRISVVIIKDMSRFGRDYLQVGTYMEVLRKHDTRLIALNDSVDTLKGDDEFTPFRNIMNEWYARDTSKKIRSAFQAKNLAGKHTSSSVPYGYLKSEQDKNQWVIDPVAAPIVQRIYRMTMEGKGPYQIAAILSAEHIEIPAYYHQKLGIGLWQTREIRDPYKWGSSTIVHILTNLCYLGHTCNFKTRKHFKDKKSHYVDQDQWTIIENTQEPIIDQETYDNVQRIRAGVRRYPDGWGEAHPLGGLLYCADCGSPMYVNRTGNGKRVANFSCSGYGKIPVGSKCSSGHRVNADSVMALIQETLREIVRFSKEDEEEFVRIVKAEAENQQSSEIKGQKTRLAACKKRLDELETLICKIYEDNALGKLPDKRYQILDAQYAKEQESLEAEATSLQKAVDEYESGQKSADKFIALVKKYQNFEKLDTVMLNEFIYKIFVHERDYKGVANSPQTIEIYFNFIGKFGTQEVNQPTEEERAEIAEKERLRKKRHEAYLRRKANGWQDAYYQKHKAAKKAAMDAKKEAIRAEDRAKGVYYLPNQKGESA

SEQ ID NO: 17842 - DNA, 50 bp, Faecalibacterium prausnitzii
  source 1..50: mol_type = genomic DNA
aattactgttgacatttagtttctggtgttacataatacagacagaattt

SEQ ID NO: 17843 - DNA, 40 bp, Faecalibacterium prausnitzii
  source 1..40: mol_type = genomic DNA
aaagtacaaattggccagcggcaagacggcaaaaagcatt

SEQ ID NO: 17844 - DNA, 50 bp, Faecalibacterium prausnitzii
  source 1..50: mol_type = genomic DNA
aattactgttgacatttagtttctaatgttacataatacagacagaattt

SEQ ID NO: 17845 - DNA, 40 bp, Faecalibacterium prausnitzii
  source 1..40: mol_type = genomic DNA
caagaacaaattggccagcaataagaccaagaagagaatt

SEQ ID NO: 17846 - protein, 644 aa, Citrobacter freundii
MLRPICYERVSSIQQIEEGGGLDDQRSALEGYLDRNSEKFSADRVFIQDKGLSAFKNSNISAESQLGIFLQDVQNRKYGEGDALIVMSLDRISRRSSWAEDTIRFIVNSGIEVHDISASTVLRKDDPHSKLIMELIQMRSHNESLMKSVRAKAAWDRKIIEAVQNGTVISNKMPMWLKNVDNKYQVIQEKADLIVRCFEWYRDGLSTGEIVKRIGDPKWQMVTVSRLVRDRRLLGEHKRYNDEVVRNVYPQVINDDLFLTANRMMDRVMLEKKKPAEDLLLESDVVQKIFQLYESGFGSGAIVKRLPKGWSTVNVLRVLRDKKVVTQKIIDNLTFERVNQKLSMNGVANRIRKDLTISQDDYITNLFPKILKCGYCGGNIAIHYNHVRTKYVICRNREERKICDAKSVQYIRIEKNILECVKNVDFQKLMMESTGNNISALDSLREELSALRKEEDSYNQKINERKAAGKRVGIHLNDGLTEVQDKIEELETEIINAQEVREIPQLDFDMDEVLDPLNIEIRAKVRKQLRLVLKAVKYWMFDKRIFVQLEYFNEVLSHILVIDNKRSGGEVLYEMSIEVRNGERIYTVHEQGEAVFIAKVTVGTEIWTLALSLSRTVDSVGNYINLLTREGFEIIVNEDQIDWF

SEQ ID NO: 17847 - DNA, 50 bp, Citrobacter freundii
  source 1..50: mol_type = genomic DNA
atgttcccattgatgatcttatgcgtcctttcgtatactatgggaacatt

SEQ ID NO: 17848 - DNA, 40 bp, Citrobacter freundii; identical to SEQ ID NO: 8338
  source 1..40: mol_type = genomic DNA

SEQ ID NO: 17849 - DNA, 50 bp, Citrobacter freundii
  source 1..50: mol_type = genomic DNA
atgttcccattgatgatcttatgcttcctttcgtatactatgggaacatt

SEQ ID NO: 17850 - DNA, 40 bp, Citrobacter freundii
  source 1..40: mol_type = genomic DNA
aatttacttatgctttgccttgctttcattttttagtata

SEQ ID NO: 17851 - protein, 644 aa, Escherichia coli
MLRPICYERVSSIQQIEGGGGLDDQRSALEGYLDRNSDKFNNERVFIQDRGVSAFKNSNISSESQLGIFLQDVQNRKYGEGDALIVMSLDRISRRSSWAEDTIRFIVNSGIEVHDISASTVLRKDDPHSKLIMELIQMRSHNESLMKSVRAKAAWDRKIIEAVQNGTVISNKMPMWLKNVDNRYQVIQEKADLIIRCFEWYRDGFSTGEIVKRIADPKWQMVTVSRLVRDRRLLGEHKRYNDEVIHNVYPKVIDDDLFLTANRMMDRVMLEKNKPAEDLLLESEVVQEIFQLYESGLGSGAIVKRLPKGWSTVNVLRVLRDKKVVTQKIIDNLTFERVNQKLSMNGVANRIRKDITIAQDDYITNLFPKILKCGYCGGNIAIHYNHVRTKYVICRNREERKICDAKSIQYIRIEKNILKCVKNVDFQKLMIESTGSETSVLDGLREELSSLRREESSYNDKINERKLAGKRVGIHLNDGLTEVQDRIEEIEKEIISAQTVREIPQFDFDMDEVLDPMNIELRAKVRKQLRLVLKVVKYWMFDKRIFVQLEYFNDVLSHMLVIDNKRGGGDVIYEMSIEERKGERIYTVHENGHAVFIASVTIGTDLWSLALSRTRTIDSISNYLSLLAREGFEILVNEDQIDWF

SEQ ID NO: 17852 - DNA, 50 bp, Escherichia coli
  source 1..50: mol_type = genomic DNA
atgttcccattgatagatgtatgcgtcctttcgtatactatgggaacatt

SEQ ID NO: 17853 - DNA, 40 bp, Escherichia coli; identical to SEQ ID NO: 8338
  source 1..40: mol_type = genomic DNA

SEQ ID NO: 17854 - DNA, 50 bp, Escherichia coli
  source 1..50: mol_type = genomic DNA
atgttcccattgatagatgtatgcttcctttcgtatactatgggaacatt

SEQ ID NO: 17855 - DNA, 40 bp, Escherichia coli; identical to SEQ ID NO: 17850
  source 1..40: mol_type = genomic DNA

SEQ ID NO: 17856 - protein, 644 aa, Escherichia coli
MLRPICYERVSSIQQIEGGGGLDDQRSALEGYLDRNSDKFSNDRIFIQDRGVSAFKNSNISSESQLGIFLQDVQNRKYGEGDALIVMSLDRISRRSSWAEDTIRFIVNSGIEVHDISASTVLRKDDPHSKLIMELIQMRSHNESLMKSVRAKAAWDRKIIEAVQNGTVISNKMPMWLKNVDNRYQVIQEKADLIIRCFEWYRDGFSTGEIVKRIADPKWQMVTVSRLVRDRRLLGEHKRYNDEIIHNVYPKVIDDDLFLTANRMMDRVMLEKNKPAEDLLLESDVVQEIFQLYESGLGSGAIVKRLPKGWSTVNVLRVLRDKNVVTQKIIDNLTFERVNQKLSMNGVANRIRKDITIAQDDYITNLFPKILKCGYCGGNIAIHYNHVRTKYVICRNREERKICDAKSIQYIRIEKNILKCVKNVDFQKLMIESTGSETSVLDGLREELSSLRREESSYNDKINERKLAGKRVGIHLNDGLTEVQDRIEEIEKEIISAQTVREIPKFDFDMDEVLDPMNIELRAKVRKQLRLVLKAVKYWMFDKRIFIQLEYFNDVLSHMLVIDNKRGGGEVMYEMSIEEKKGERIYTVHENGYVVFIASVTIGTELWSLALSRTRTIDSVGNYLSLLAREGFEIFVNEDQIDWF

SEQ ID NO: 17857 - DNA, 50 bp, Escherichia coli; identical to SEQ ID NO: 17852
  source 1..50: mol_type = genomic DNA

SEQ ID NO: 17858 - DNA, 40 bp, Escherichia coli; identical to SEQ ID NO: 8338
  source 1..40: mol_type = genomic DNA

SEQ ID NO: 17859 - DNA, 50 bp, Escherichia coli; identical to SEQ ID NO: 17854
  source 1..50: mol_type = genomic DNA

SEQ ID NO: 17860 - DNA, 40 bp, Escherichia coli; identical to SEQ ID NO: 17850
  source 1..40: mol_type = genomic DNA

SEQ ID NO: 17861 - protein, 648 aa, Citrobacter freundii
MLRPICYERVSSIQQIEGGGGLDDQRSALEGYLEINSDIFTKDRLFIQDRGVSAFKNSNISSESQLGIFLQDVQNRKYGEGDALIVMSLDRISRRSSWAEDTIRFIVNSGIEVHDISASTVLRKDDPHSKLIMELIQMRSHNESLMKSVRAKAAWDRKIMEAVKNGTVISNKMPIWLKNVDNKYQRIEEKVNLIRHCFEWYKHGLSTGEIIKKIGDPTLQMVTVSRWIRDRRLLGEHVRYNGEVVHNAYPKVIDEDLFITANRMMDRVMLEKRKPADDLLFEPAVVQEIFRLYESGIGTGAIVKHLSKGWSTVNVLRVLRDKGVVKQKIIDNLTFERVNQKLSQNGVANRIRKDITIAQDDYITNLFPKILKCGCCGGNIAIHYNHVRVKYIICRNREEKKICDAKSIQYLRVEKNILQLVKNIAFNKLMSEGILDSGSIIDGIREELATLRKEEQKYIDKIKKRKSEGKLTGIHLNEGLTEIQDRIEELEKEIIKSQDIKEIPKLDFNIEEVLDPLNVELRAKVRKELRLVLKSVKYRVVSKSIFVSLEYYTDVLAHVIVINNQRGGGEVQTEFAIEEHDGCRVYRTDSFVLSYKIGNEVPQFHTYEGVPINNFEYLKLRDLIEEVEGNGIVSSWMYKNYDFVFMNH

SEQ ID NO: 17862 - DNA, 50 bp, Citrobacter freundii
  source 1..50: mol_type = genomic DNA
atattcccattgatgattttatgcgtcctttcgtatactatgggaacatt

SEQ ID NO: 17863 - DNA, 40 bp, Citrobacter freundii; identical to SEQ ID NO: 8338
  source 1..40: mol_type = genomic DNA

SEQ ID NO: 17864 - DNA, 50 bp, Citrobacter freundii
  source 1..50: mol_type = genomic DNA
atattcccattgatgattttatgcttcctttcgtatactatgggaacatt

SEQ ID NO: 17865 - DNA, 40 bp, Citrobacter freundii; identical to SEQ ID NO: 17850
  source 1..40: mol_type = genomic DNA

SEQ ID NO: 17866 - protein, 655 aa, Citrobacter freundii
MLRPICYERVSSIQQIEGGGGLDDQRSALEGYLDRNADKFNDERIFIQDKGVSAFKNSNISSESQLGIFLQDVQNRKYGEGDALIVMSLDRISRRSSWAEDTIRFIVNSGIEVHDISASTVLRKDDPHSKLIMELIQMRSHNESLMKSVRAKAAWDRKIMEAVKNGTVISNKMPIWLKNVDNKYQRIEEKVNLIRHCFEWYKHGLSTGEIIKKIGDPTLQMVTVSRWIRDRRLLGEHVRYNGEVVHNAYPKVIDEDLFITANRMMDRVMLEKRKPADDLLLEPAVVQEIFRLYESGIGTGAIVKHLSKGWSTVNVLRVLRDKGVVKQKIIDNLTFERVNQKLSQNGVANRIRKDITIAQDDYITNLFPKILKCGCCGGNIAIHYNHVRVKYIICRNREEKKICDSKSIQYLRVEKNILQLVKNIDFNKLMSEGILDRGSIIDGIREELATLRKEEQKYIDKIKKRKSEGKLAGIHLSEGLTEIQDRIEELDKEIIKSQDIKEIPKLDFNIEEVLDPMNVELRAKVRKELRLVLKSVKYRVISKSIFVSLKYYTNVLAHVIVINNQRGGGDVQTEFSIEEHDENRVYRTDSFALSYKHGDEVPNFHTFEGIPINNFEYLKLRDLIEEVEGNGIVASWMNRNYDFIFNPSDTVRSSD

SEQ ID NO: 17867 - DNA, 50 bp, Citrobacter freundii
  source 1..50: mol_type = genomic DNA
atgttcccattgatgattttatgcgtcctttcgtatactatgggaacatt

SEQ ID NO: 17868 - DNA, 40 bp, Citrobacter freundii; identical to SEQ ID NO: 8338
  source 1..40: mol_type = genomic DNA

SEQ ID NO: 17869 - DNA, 50 bp, Citrobacter freundii
  source 1..50: mol_type = genomic DNA
atgttcccattgatgattttatgcttcctttcgtatactatgggaacatt

SEQ ID NO: 17870 - DNA, 40 bp, Citrobacter freundii; identical to SEQ ID NO: 17850
  source 1..40: mol_type = genomic DNA

SEQ ID NO: 17871 - protein, 644 aa, Escherichia coli
MLRPICYERVSSIQQVEMGNGLDDQRSSLTAYLDKNSDKFTNDRVFITDAGLSAFKNANISPESQLGIFLQDVGNRKYGKGDALIVISLDRLSRRSSWAESTIQYIVNSGVEIHDISTNLVLRADDPMSKIHMELIQHRSHNESLMKSVRAKLAWDNKILRALQNGEVISNRMPNWLKNVDNKYQVIPEQAELIVKCFEWYREGLSTGEIVKRIGKKWQMVTVSRLIRDRRLLGEHERYNGEVVPNVYPKIIDEDLFLTANRMMDRVMLEKKKPAEDLLLEPDVVREIFKLYESGLGSGAIVKRLPKGWSTVNVLRVLRDKKVVTMKIIDNLTFERVNEKLSRNGIANRIRKDITIAQDDYITNLFPKILKCGNCGGNIAIHYNHVRTKYVICRNREEKKICDAKSFQYTRIEKNILQLVKNIDFNKLMMEGQSDSDLLLASLREELSTLKKEEETYQIKINERKVAGKKTSLPLMTGLTEVQDRIEEIESDILNAKNIKEIPVFDFDINKVLDPMNVELRAKLRKELRLVLKSVKYWIFGKRIFVQLEYFNEILSHVLVIDNKRGGGEVLHEIVISESNGERVYTVNEEGKTVFIASVTSGTDMWSLAISRTKTLDDVGLYLNLLNRENFEIVVNEDLIDWID

SEQ ID NO: 17872 - DNA, 50 bp, Escherichia coli
  source 1..50: mol_type = genomic DNA
atgttcctattgatgatcatatgcgtccttttgtataatctgggaacatt

SEQ ID NO: 17873 - DNA, 40 bp, Escherichia coli; identical to SEQ ID NO: 8338
  source 1..40: mol_type = genomic DNA

SEQ ID NO: 17874 - DNA, 50 bp, Escherichia coli
  source 1..50: mol_type = genomic DNA
atgttcctattgatgatcatatgcttccttttgtataatctgggaacatt

SEQ ID NO: 17875 - DNA, 40 bp, Escherichia coli; identical to SEQ ID NO: 17850
  source 1..40: mol_type = genomic DNA

SEQ ID NO: 17876 - protein, 644 aa, Shigella sonnei
MLRPICYERVSSIQQVDMGKGLDDQRSSLTAYLDKNADKFTDERIFITDAGLSAFKNANISPESQLGIFLQDVGNRKYGVGDALVVLSLDRLSRRSSWAESTIQYIVNSGIEIHDISTNLVLRVDDPMSKIHMELIQHRSHNESLMKSVRAKLAWDNKITRAVQNGEVISNRMPNWLRNVDNKYQVIPEQAELIVKCFMWYREGLSTGEIVKRIGRKWQMVTVSRLIRDRRLLGEHERYNGEVVPNVYPKIIDEELFLTANRMMDRVMLEKKKPAEDLLLEPEVVREIFKLYETGLGSGAIVKRLPKGWSTVNVLRVLRDKKVVTMKIIDNLTFERANEKLSRNGIANRIRKDITIAQDDYITNLFPKMLKCGHCGGNIAIHYNHVRTKYVICRNREEKKICDAKSIQYMRIEKNILQLVKNVDFNKLMMEGKSDSDSLLASLREELSTLQKEAETYQVKINERKAAGKKASLPLMTGLTEVQDRIEEIEPEILNSKNIKEIPVFDFDINKVLDPLNVELRAKLRKEVRLVLKSVKYWVFEKRIFVQLEYFNDVLSHTLVIDNKRGGGEVLHEIVISETSGERVYTVNEEGKTVFIASVTSGTDMWSLAISRTKILDDVGLYLNLLKREKFEIIVNEDMIDWMD

SEQ ID NO: 17877 - DNA, 50 bp, Shigella sonnei
  source 1..50: mol_type = genomic DNA
atgttcccattgatgaagttatgcgtccttttgtatactctgggaacatt

SEQ ID NO: 17878 - DNA, 40 bp, Shigella sonnei; identical to SEQ ID NO: 8338
  source 1..40: mol_type = genomic DNA

SEQ ID NO: 17879 - DNA, 50 bp, Shigella sonnei
  source 1..50: mol_type = genomic DNA
atgttcccattgatgaagttatgcttccttttgtatactctgggaacatt

SEQ ID NO: 17880 - DNA, 40 bp, Shigella sonnei; identical to SEQ ID NO: 17850
  source 1..40: mol_type = genomic DNA

SEQ ID NO: 17881 - protein, 644 aa, Shigella sonnei
MLRPICYERVSSIQQVDMGKGLDDQRSSLTAYLDKNADKFTDERIFITDAGLSAFKNANISPESQLGIFLQDVGNRKYGVGDALVVLSLDRLSRRSSWAESTIQYIVNSGIEIHDISTNLVLRVDDPMSKIHMELIQHRSHNESLMKSVRAKLAWDNKITRAVQNGEVISNRMPNWLRNVDNKYQVIPEQAELIVKCFMWYREGLSTGEIVKRIGRKWQMVTVSRLIRDRRLLGEHERYNGEVVPNVYPKIIDEELFLTANRMMDRVMLEKKKPAEDLLLEPEVVREIFKLYETGLGSGAIVKRLPKGWSTVNVLRVLRDKKVVTMKIIDNLTFERANEKLSRNGIANRIRKDITIAQDDYITNLFPKMLKCGHCGGNIAIHYNHVRTKYVICRNREEKKICDAKSIQYMRIEKNILQLVKNVDFNKLMMEGKSDSDSLLASLREELSTLQKEAETYQVKINERKAAGKKASLPLMTGLTEVQDRIEEIESEILNSKNIKEIPVFDFDINKVLDPLNVELRAKLRKEVRLVLKSVKYWVFEKRIFVQLEYFNDVLSHTLVIDNKRGGGEVLHEIVISETSGERVYTVNEEGKTVFIASVTSGTDMWSLAISRTKILDDVGLYLNLLKREKFEIIVNEDMIDWMD

SEQ ID NO: 17882 - DNA, 50 bp, Shigella sonnei; identical to SEQ ID NO: 17877
  source 1..50: mol_type = genomic DNA

SEQ ID NO: 17883 - DNA, 40 bp, Shigella sonnei; identical to SEQ ID NO: 8338
  source 1..40: mol_type = genomic DNA

SEQ ID NO: 17884 - DNA, 50 bp, Shigella sonnei; identical to SEQ ID NO: 17879
  source 1..50: mol_type = genomic DNA

SEQ ID NO: 17885 - DNA, 40 bp, Shigella sonnei; identical to SEQ ID NO: 17850
  source 1..40: mol_type = genomic DNA

SEQ ID NO: 17886 - protein, 470 aa, Escherichia coli
MLRPICYERVSSIQQIEGGGGLDDQRSALEGYLDRNSDKFNNERVFIQDRGVSAFKNSNISSESQLGIFLQDVQNRKYGEGDALIVMSLDRISRRSSWAEDTIRFIVNSGIEVHDISASTVLRKDDPHSKLIMELIQMRSHNESLMKSVRAKAAWDRKIIEAVQNGTVISNKMPMWLKNVDNRYQVIQEKADLIIRCFEWYRDGFSTGEIVKRIADPKWQMVTVSRLVRDRRLLGEHKRYNDEVIHNVYPKVIDDDLFLTANRMMDRVMLEKNKPAEDLLLESEVVQEIFQLYESGLGSGAIVKRLPKGWSTVNVLRVLRDKKVVTQKIIDNLTFERVNQKLSMNGVANRIRKDITIAQDDYITNLFPKILKCGYCGGNIAIHYNHVRTKYVICRNREERKICDAKSIQYIRIEKNILKCVKNVDFQKLMIESTGSETSVLDGLREELSSLRREESSYNDKINERKLAGK

SEQ ID NO: 17887 - DNA, 50 bp, Escherichia coli; identical to SEQ ID NO: 17852
  source 1..50: mol_type = genomic DNA

SEQ ID NO: 17888 - DNA, 40 bp, Escherichia coli; identical to SEQ ID NO: 8338
  source 1..40: mol_type = genomic DNA

SEQ ID NO: 17889 - DNA, 50 bp, Escherichia coli; identical to SEQ ID NO: 17854
  source 1..50: mol_type = genomic DNA

SEQ ID NO: 17890 - DNA, 40 bp, Escherichia coli; identical to SEQ ID NO: 17850
  source 1..40: mol_type = genomic DNA

SEQ ID NO: 17891 - protein, 538 aa, Bacillus cereus
MHVAIYVRVSTTSQALKGTSLDSQITLCKNKAKEIGYLDSHILLYKEAGASGEDIDIRPEMTRLREDIKKGEISKIIIQHPDRLSRELIDKLTVCREFEKYGVEIIFVDTEFQNTPEGWLFFNVMSSIATYELGLIKKRTVRGRLKAVEKGKKVMPMRVPPFGYELVNNQLIIHKKEADIVKQIYQWYVYNQLTLRQIGEKLYRLGVMPKRKEKKEWNASSIRRILTSEIYIGKYTYNKRKTQKIKGEKTETGNPKKTYTIREKEDWITIDVPRIVDETLFKLAQKQRNNNTKNSGNTKNQYLLKGLIKCQCGRTWEGTFYSGRKDKITGEQQKYFIYRCPNRNPKSYGPKIKKCKTPSIKIEELEEYIWKLVVEVFSRPDSYYVYMEEGQTEFISQYEKEVSIRLNKVKEIEKKKEKIKMLFLEDLISEQEMKSDFKKTNEQINQLKEELKTFEDKLNLENKKENTKKRMDQIIESIQNVLKDKTDNKLTFEEKRNIITQLIDEIHLEFDGEQQVNVKINGTLDTLAHDIVLSTQSL

SEQ ID NO: 17892 - DNA, 50 bp, Bacillus cereus
  source 1..50: mol_type = genomic DNA
acatcgttttgagtacacaatctcttgaggttatgaacacaaaagaacgt

SEQ ID NO: 17893 - DNA, 40 bp, Bacillus cereus
  source 1..40: mol_type = genomic DNA
ccctgtattttcaaattttttaacgatatgagctacaagc

SEQ ID NO: 17894 - DNA, 50 bp, Bacillus cereus
  source 1..50: mol_type = genomic DNA
acatcgttttgagtacacaatctcgggaggttatgaacacaaaagaacgt

SEQ ID NO: 17895 - DNA, 40 bp, Bacillus cereus
  source 1..40: mol_type = genomic DNA
cccattattttcaaattttggtacgaaatgcctaacaatc

SEQ ID NO: 17896 - protein, 538 aa, Bacillus cereus
MHVAIYVRVSTTSQVLKGTSLDSQITLCKKKAQELGYSNSQIIIYREAGFSGEDIDIRPEMTRLREDIKKGDIAKIIIQHPDRLSRELIDKLTVCREFEKYGVEIIFVDTEFQNTPEGWLFFNVMSAIATYELGLIKKRTVRGRLKAVEKGKKVMPMRVPPFGYELVNNQLIINEKEADVVQKIYHWYVYNQLTLREIGEKLYQMGVIPKRKEKKEWSASSIRRILTSEIYIGKYTYNKRKTQKVKGEKTATGNPKKTYTIRAEEDWIIIDVPKIVDESLFHSAQKQRNNNTKNSGNNKNQYLLKGLIKCQCGRTWEGTFYSGRKDKLTGEQQKYFIYRCPNRNPKSYGPKIKKCKTPSIKIEELEEYIWKLIVEVFSHPDSYYVYMEEGQTEFINQYEKELNIRLNKVKEIEKKREKLKMLFFEELISEQEMKSDFKKINEQISKLKEELQAFQDKINLENKKENTKKRMDQIIESIQNVLKDKTDNKLTFAEKRNIITQLIDEIHLEFDGEEQVNIKINGTLDTLVHDIVLSTQSL

SEQ ID NO: 17897 - DNA, 50 bp, Bacillus cereus
  source 1..50: mol_type = genomic DNA
acatcgttttgagtacacaatctcttgacgttatgaacacaaaagaacgt

SEQ ID NO: 17898 - DNA, 40 bp, Bacillus cereus; identical to SEQ ID NO: 17893
  source 1..40: mol_type = genomic DNA

SEQ ID NO: 17899 - DNA, 50 bp, Bacillus cereus
  source 1..50: mol_type = genomic DNA
acatcgttttgagtacacaatctcgggacgttatgaacacaaaagaacgt

SEQ ID NO: 17900 - DNA, 40 bp, Bacillus cereus; identical to SEQ ID NO: 17895
  source 1..40: mol_type = genomic DNA

SEQ ID NO: 17901 - protein, 538 aa, Bacillus cereus
MHVAIYVRVSTTSQALKGTSLDSQITLCKNKAKEIGYLDSHILLYKEAGASGEDIDIRPEMTRLREDIKKGEISKIIIQHPDRLSRELIDKLTVCREFEKYGVEIIFVDTEFQNTPEGWLFFNVMSSIATYELGLIKKRTVRGRLKAVEKGKKVMPMRVPPFGYELVNNQLIIHKKEADIVKQIYQWYVYNQLTLRQIGEKLYRLGVMPKRKEKKEWNASSIRRILTSEIYIGKYTYNKRKTQKIKGEKTEAGNPKKTYTIREKEDWITIDVPRIVDETLFKLAQKQRNNNTKNSGNTKNQYLLKGLIKCQCGRTWEGTFYSGRKDKITGEQQKYFIYRCPNRNPKSYGPKIKKCKTPSIKIEELEEYIWKLVVEVFSRPDSYYVYMEEGQTEFISQYEKEVSIRLNKVKEIEKKKDKIKMLFLEDLISEQEMKSDFKKTNEQINQLKEELKTFEDKLNLENKKENTKKRMDQIIESIQNVLKDKTDNKLTFEEKRNIITQLIDEIHLEFDGEQQVNVKINGTLDALAHDIVLSTQSL

SEQ ID NO: 17902 - DNA, 50 bp, Bacillus cereus; identical to SEQ ID NO: 17892
  source 1..50: mol_type = genomic DNA

SEQ ID NO: 17903 - DNA, 40 bp, Bacillus cereus; identical to SEQ ID NO: 17893
  source 1..40: mol_type = genomic DNA

SEQ ID NO: 17904 - DNA, 50 bp, Bacillus cereus; identical to SEQ ID NO: 17894
  source 1..50: mol_type = genomic DNA

SEQ ID NO: 17905 - DNA, 40 bp, Bacillus cereus; identical to SEQ ID NO: 17895
  source 1..40: mol_type = genomic DNA

SEQ ID NO: 17906 - protein, 538 aa, Bacillus cereus
MHVAIYVRVSTTSQVLKGTSLDSQITLCKKKAQELGYLNSQIIIYREAGFSGEDIDIRPEMTRLREDIKKGDIAKIIIQHPDRLSRELIDKLTVCREFEKYGVEIIFVDTEFQNTPEGWLFFNVMSAIATYELGLIKKRTVRGRLKAVEKGKKVMPMRVPPFGYELVNNQLIINEKEADVVQKIYHWYVYNQLTLREIGEKLYQMGIIPKRKEKKEWSASSIRRILTSEIYIGKYTYNKRKTQKVKGEKTATGNPKKTYTIRAEEDWIIIDVPKIVDESLFHSAQKQRNNNTKNSGNNKNQYLLKGLIKCQCGRTWEGTFYSGRKDKLTGEQQKYFIYRCPNRNPKSYGPKIKKCKTPSIKIEELEEYIWKLIVEVFSHPDSYYVYMEEGQTEFINQYEKEVNIRLNKVKEIEKKREKLKLLFFEELISEQEMKFDFKKMNEQINKLKEELQAFQDKINLENKKENTKKRMDQIIESIQNVLKDKTDNKLTFAEKRNIITQLIDEIHLEFDGEGQVNITINGTLDALAHDIVLSTQSL

SEQ ID NO: 17907 - DNA, 50 bp, Bacillus cereus; identical to SEQ ID NO: 17897
  source 1..50: mol_type = genomic DNA

SEQ ID NO: 17908 - DNA, 40 bp, Bacillus cereus; identical to SEQ ID NO: 17893
  source 1..40: mol_type = genomic DNA

SEQ ID NO: 17909 - DNA, 50 bp, Bacillus cereus; identical to SEQ ID NO: 17899
  source 1..50: mol_type = genomic DNA

SEQ ID NO: 17910 - DNA, 40 bp, Bacillus cereus; identical to SEQ ID NO: 17895
  source 1..40: mol_type = genomic DNA

SEQ ID NO: 17911 - protein, 479 aa, Streptococcus pneumoniae
MTKIALYLRLSVDEADTDESNSITNQRYLLNNYLDQTPEFKNWERLEFVDDGFSGTSLKRPAFQRMMADVKAGTIRHIIVKDLSRFMRDYLELGNYLENIFPFLGVRFIALNDHYDSLVSEHNGLDIDVPFRNLLNDFYAKDVSEKVKSAMNSMKRSGKNMSWLPPFGYIKDPNDRFKIIIDEEVAPIVRRIFRLCIEGMGTQKIAMLLNSEQTITPAERKMQVSQARYTKSIIITAEQKRNVWTRSGILQILKNEAYKGTYLFNTRTTVNGKQIRRPESEWERLDNNHEAIVSSEEFKKAQQSLASRISGTKSQACNQPEEVLLRGLVICEHCGHRLLRYSHYNNNNYFYCCYCRSQGQNMKSCRIDRIEEAIEKELKSRLPMNSPKLSKTNLIREVERLKTQKVSHFQDYKEGLMTRETYMEKRQNLDNSIMEIEEQLKVVGRENIAFDKKLTREVVDTHIERIVVNGQGSFTVVYK

SEQ ID NO: 17912 - DNA, 50 bp, Streptococcus pneumoniae
  source 1..50: mol_type = genomic DNA
agtgtcatttacttgacataagagggggattgtgtcataataatgatagg

SEQ ID NO: 17913 - DNA, 40 bp, Streptococcus pneumoniae
  source 1..40: mol_type = genomic DNA
tggttatgcctttcctggaggtcatgtagaaaatgatgag

SEQ ID NO: 17914 - DNA, 50 bp, Streptococcus pneumoniae
  source 1..50: mol_type = genomic DNA
agtgtcatttacttgacataagagtcggattgtgtcataataatgatagg

SEQ ID NO: 17915 - DNA, 40 bp, Streptococcus pneumoniae
  source 1..40: mol_type = genomic DNA
tggtactgcctttccttattcttatttggaaaatgaggag

SEQ ID NO: 17916 - protein, 560 aa, Lachnospira eligens
MARAKNRGYQQSFSPSYTIRRWRLGIYIRLSKEDLKKGKDDSNSVKNQRDLLNDFYRRNIDEFESITEYVDDGHTGTDANREDFQRLLADVMSGKINCVIVKDLSRFARNYSDAGSLIDNLFVQMGVRFISLAENVDSYKNPDSVSNIIVPITNVMNDNYCYQTSKKIRQVFDYKRRNGQYIGAFAPYGYVKHPKDKHRLIVDPDAAENVKLIFTMLIQGSSKRAIALYLNEHGVPSPSAYKVQKGLPVSTRGYDDPMWGARMIHSILTNPTYTGDLAQGRSRVKSYKVHQIEAVPREEWVEVAGTHEAIIDYETFDKVQALLQRDTRTSPKGREVHLFSGFLKCADCGRAITRCVGKNNNVYYSCSTYKNRSRTACTMHSIKHERLEAAVLFAVQHQVHLAVSYSEIVTQINSAPIKKSQSYRLDDLIAAKERELIKITRYKQSLYQDWKDGEITQQEYRDMKADYERQTSDISAVLTRLNAERAELANGVDNEHPALVAFMKYQNIEALNREILVELVDYIKVYENGNISVKFKFADELRKIAEYIEINTTEDTAVAG

SEQ ID NO: 17917 - DNA, 50 bp, Lachnospira eligens; identical to SEQ ID NO: 2692
  source 1..50: mol_type = genomic DNA

SEQ ID NO: 17918 - DNA, 40 bp, Lachnospira eligens
  source 1..40: mol_type = genomic DNA
cgttcgtattctttctgcatatagttttgaagctcccatt

SEQ ID NO: 17919 - DNA, 50 bp, Lachnospira eligens
  source 1..50: mol_type = genomic DNA
tgttttcctaataggcgctaatcacatgattacttcctattaggaacact

SEQ ID NO: 17920 - DNA, 40 bp, Lachnospira eligens
  source 1..40: mol_type = genomic DNA
cgtttgttctcttattgcacatagtgttgaacctgcaatt

SEQ ID NO: 17921 - protein, 499 aa, Megasphaera stantonii
MTKTAVIYARYSSNRQREESIEGQIRECKAFAAQNNLSIIHEYIDRAFSAKTVNRPDFLKMIEDSSKHAFDYVIVYTLDRFSRNRYDSAVYKYKLKKNGVRVLSAKEKIADDPSGIILESVIEGCSEYFLADLAQKVKRGMLENVINGKWPGGNIPYGFYLGPDKHLHFNHEQVSGVRLIFSLLASGQKYSSIVKTLNEKGYRTSFNKPWTRNSLSHIARNPIYIGTFNYQGQVFKNYVPPMVSLADFDAVQRMFNKRKRTGLVSPKSANYALVGKIYCGLCGCAYTGVSGTSRNGNKYYYYTCSSKNNGSEKSKRLDKKCSSKNLRRDELEKAILDTTIQILSAPNSIKSIAKQVAAFQEKNKDSGIVERLEKEMEEVQKKLTNSIKAIEQGIFSETIKNNIERYEHEVLELQEAISKEKLIAKAFTITEEFVEYYLTSFLKKIKKYDECKLDMFETFIRRIIVFDDHIEIQYNYNKDIPILDNHAVLPCSSMHNLVG

SEQ ID NO: 17922 - DNA, 50 bp, Megasphaera stantonii
  source 1..50: mol_type = genomic DNA
ccgtgttcgagtatgcataatctggtgggcttaccgagcatatactcgaa

SEQ ID NO: 17923 - DNA, 40 bp, Megasphaera stantonii
  source 1..40: mol_type = genomic DNA
tgcatctatgattcagttggtgggcccacctggatttgaa

SEQ ID NO: 17924 - DNA, 50 bp, Megasphaera stantonii; identical to SEQ ID NO: 17922
  source 1..50: mol_type = genomic DNA

SEQ ID NO: 17925 - DNA, 40 bp, Megasphaera stantonii
  source 1..40: mol_type = genomic DNA
tgctgtgaggattaaataggtggggccacctggatttgaa

SEQ ID NO: 17926 - protein, 565 aa, Streptococcus suis
MNRTLTISDYRQVDTSRLSNITVVYCRLSQDDGLDGDSNSIINQKNILFEVVTREKLPNPVLFVDDGFSGTNFDRPAISEALRLVENGQVSNFIVKDLSRLGRSYIKVGQLTEITFPSFDVRFIALNDGIDSNKPNETNSIFLPIKSLMDEMYAADTSKKIRAVFQAKAKSGVPVTTNPPYGYLKDPSNPKNWIIDPVASEVVKRIFQEAKSGKSLSEIAKGLENDKVFKPDRHRIEIGLKSISASPNVEALPYFWARETLSAILGREEYLGHTVNLRTRTKSYKDKRSIDLPREDWLIFKNTHEAIIDQETFDIVQKMRSHKRSNQRYKNRFGHENLFAGLVFCGTCGRKHYFCPFESKTGLNHDHYKCSGYRRPIDGCENPHYIQKSALIEIVSDKLRQTISEAQLDRENFLKKLEQQSQAQFSKDNKRQRQQLQKDEHRFKEIDRIIQQLYEDNLLGKISDERFVKLSQTYEEEQNQLQISISDLTEKLAKQQEDSLNISKFMARISKYTQVSELTVEMVNELIDKIVIHRPTGTKRNRIIQIDIYYNFIGKLTNEKASQAD

SEQ ID NO: 17927 - DNA, 50 bp, Streptococcus suis
  source 1..50: mol_type = genomic DNA
gactgctgggtgtaagcctcgcttaaaagagagtatgacacttagcagtc

SEQ ID NO: 17928 - DNA, 40 bp, Streptococcus suis
  source 1..40: mol_type = genomic DNA
aatataaaaaatccgctcaaaggcggattttttgtttatt

SEQ ID NO: 17929 - DNA, 50 bp, Streptococcus suis; identical to SEQ ID NO: 17927
  source 1..50: mol_type = genomic DNA

SEQ ID NO: 17930 - DNA, 40 bp, Streptococcus suis
  source 1..40: mol_type = genomic DNA
aaaaaaaaaaatcccttcaaaggtagattttttttttcat

SEQ ID NO: 17931 - protein, 546 aa, Gallaecimonas pentaromativorans
MSTESPKAYSYLRFSTPRQVKGDSFRRQVDLARNYAAKHGLILQDLSFHDLGVSAFRGTNREHGSLGKFIELVRSGVIDKGSYLLIESFDRLSRQDVELALPVFLEVINLGIVVVTLVDSNVFKAGEMDLAKLVTSIVYMSRANEESEIKSRRAKASWATSRIAAAEKGLRIKNSALPAWLDWNGDEIVPKEHESAVIAEMLSLSAQGWGYERIAAYFNAKKITTFRDGKPWRSAGIGAILLNPAIIGQYQPHEIVNGKRQPVGEPITDYYPAIVSKHLFMEVKQKISNRTIHSGSYRRGRYQNLFSGLLRCQCGEMLALRDKGKDGTSRLYLECPGKRTKNCSMRNIRYERFEPQVLVALSHMAPVMSARNQRTEHERAHLEAKADQELLIQRLNQNAERLTDIMLEVNNPERFRIRLLRIESEIASAKELLAKHNEALESLRVAASSVVLLTAASLDSPEERSAFNSQLHASLGPIQVLENGDSPIVRYQSKLGEWMFEQSFRDKLAGSTVLDMDGMTLCMTKSEAPFIDTAWHEDLMDESSIR

SEQ ID NO: 17932 - DNA, 50 bp, Gallaecimonas pentaromativorans
  source 1..50: mol_type = genomic DNA
tacggcacttgtgtaaaaaagtgctcgcagtttcttgcagaaatgccgta

SEQ ID NO: 17933 - DNA, 40 bp, Gallaecimonas pentaromativorans
  source 1..40: mol_type = genomic DNA
gcgggcttttttgatggtgtcgcagttttttatgccgtag

SEQ ID NO: 17934 - DNA, 50 bp, Gallaecimonas pentaromativorans
  source 1..50: mol_type = genomic DNA
tacggcacttgtgtaaaaaagtgcttgcagtttcttgcagaaatgccgta

SEQ ID NO: 17935 - DNA, 40 bp, Gallaecimonas pentaromativorans
  source 1..40: mol_type = genomic DNA
gcgggcctttttgttgttgttgttgttgttgatgctgttg

SEQ ID NO: 17936 - protein, 539 aa, Pseudomonas syringae group genomosp 3
MAKIGARVYSYLRFSDPRQGSGSSADRQLQYAQRWAADKGLALDESLSLRDEGLSAYHQRHVTQGALGVFLRAIEDGRIASGSILVVEGLDRLSRAEPIQAQAQLAQIINAGITVVTASDGREYNRAGLKAQPMDLVYSLLVMIRAHEESDTKSKRVKASILRLCQAWQSGTYRGLIRNGKDPQWLKWTGSAWEMLPDRVLTVRRALALYQEGLGAARAVRVLHEEGLDYSDAGITKQQIYRLIKLQALRGAKCLSVDGEDFVLEDYYPRLISESEWADLQHLAGQRLRRRGHGEIPGIITGIGLTYCGYCGTALVGQNMMTRQKADGTIADGHRRLHCVSYGVNGGCKAGGSCSVVPIERALLNFCSDQLNLQRLLKVGDDGQGLRHQLVIARSAVEKFSVQLGKITDALLSDDSGAAPTAFIRRARELESQQADAQKKVLQLEYELTSVAGSTRPAQAERWVELADLVRAGDYPAREKVRQLVMDTFERIVVFMRGMGAEDRSNKFIDVQLLSRTGQHRLLQINRKTGAWVASEDWD

SEQ ID NO: 17937 - DNA, 50 bp, Pseudomonas syringae group genomosp 3
  source 1..50: mol_type = genomic DNA
ggtatagattgagtatcacagggacaccctaacgatatcattcctacacg

SEQ ID NO: 17938 - DNA, 40 bp, Pseudomonas syringae group genomosp 3
  source 1..40: mol_type = genomic DNA
gtcaacgagcgccttggggcaacccagagaaatgaatccg

SEQ ID NO: 17939 - DNA, 50 bp, Pseudomonas syringae group genomosp 3
  source 1..50: mol_type = genomic DNA
ggtatagattgagtatcacagggatgccctaacgatatcattcctacacg

SEQ ID NO: 17940 - DNA, 40 bp, Pseudomonas syringae group genomosp 3
  source 1..40: mol_type = genomic DNA
gacagcaggggttgtggggtgacccagagaaatgaatcgg

SEQ ID NO: 17941 - protein, 503 aa, Ruthenibacterium lactatiformans
MNNRIDAIYARQSVDKKDSISIESQIEFCKYELKGGNCKEYTDKGYSGKNTDRPKFQELVRDIKRGLIAKVVVYKLDRISRSILDFANMMELFQQYNVEFVSSTEKFDTSTPMGRAMLNICIVFAQLERETIQKRVTDAYYSRSQRGFKMGGKAPYGFHTEPIKMDGINTKKLVVNPDEAANIRLMFEMYAQPTTSYGDITRYFAEQEILFHGKELIRPTLAQMLRNPVYVQADLDVYEFFKSQGTVIVNDAADFTGMNGCYLYQGRDVKPSKKNDLKDQMLVLAPHEGIVPSDIWLTCRKKLMNNMKIQSARKATHTWLAGKIKCGNCGYALMSIYNPSGKQYLRCTKRLDNKSCSGCGKIITSELETVVYQQMVKKLASYKTLTGRKKAAKANPKIAALQVELAHVDSEIEKLVDSLTGANNVLLSYVNVKIAELDGRKQELLARIAELTVEAISPEQVSQISGYLDTWENVSFDDKRRVVDLMITTIAATSDSLNITWKI

SEQ ID NO: 17942 - DNA, 50 bp, Ruthenibacterium lactatiformans; identical to SEQ ID NO: 12
  source 1..50: mol_type = genomic DNA

SEQ ID NO: 17943 - DNA, 40 bp, Ruthenibacterium lactatiformans
  source 1..40: mol_type = genomic DNA
cccatatttgtacttcagatttgtatgcgctaaactatta

SEQ ID NO: 17944 - DNA, 50 bp, Ruthenibacterium lactatiformans
  source 1..50: mol_type = genomic DNA
gtgtagtcccttgtaaactgtactggaggtcagtttacaaggaactacac

SEQ ID NO: 17945 - DNA, 40 bp, Ruthenibacterium lactatiformans
  source 1..40: mol_type = genomic DNA
cccatatttccacttctaaggtgtctgagagaaactctta

SEQ ID NO: 17946 - protein, 477 aa, Bacillus cytotoxicus
MRCAIYARVSTEEQAVEGYSISAQKKKLTAYCETQDWDVVGYYVDEGISAKNTNRPELIRMIDHIKKGLIDCVLVYRLDRLTRSVLDLYNLLDVFEKYDCKFKSATEVYDTTTAIGRLFITIIAALAQWERENIGERVRVGQQEKVRQGKYTSGRKPYGYNADHKEGVLTVIEEEAKIVRSVFNDYLKGHSAQRICKKLNTIGTPGRDYWNEKAILYILENPLYVGTLRWRKETEHYFEIPNSVPAIIEKELFDNVQRLREARRESHPRSAYGSYIFSGIIKCPRCGRSLVGNYVTSKKKDGTITKYKQYFCRGRKLNVCSMGSMSERKLEKAIIPYILSLHIHATDDDVSTGQNTIEDDIIQIKNELKVIEKRRKKWQYAWANEHLKDEEFTELMQEESDREKVLTEELYKLKPAENKKLKNNELKEILNDMKLNWNNLNDEEKKMLLQIILKRIVVERSDEWQAYKLKIVEMEFN

SEQ ID NO: 17947 - DNA, 50 bp, Bacillus cytotoxicus
  source 1..50: mol_type = genomic DNA
cttatgtattataagaagttttgcccgaaaaacctcttgtaacacataaa

SEQ ID NO: 17948 - DNA, 40 bp, Bacillus cytotoxicus
  source 1..40: mol_type = genomic DNA
tttggttccttctttcctccctaaaaaactcgatccatgc

SEQ ID NO: 17949 - DNA, 50 bp, Bacillus cytotoxicus
  source 1..50: mol_type = genomic DNA
cttatgtattataagaagttttgctagaaaaacctcttgtaacacataaa

SEQ ID NO: 17950 - DNA, 40 bp, Bacillus cytotoxicus
  source 1..40: mol_type = genomic DNA
gttggttacttttttccagtataaaaaattttaaccatgc

SEQ ID NO: 17951 - protein, 563 aa, Nocardia nova
MAKRGRPASIRTHKKAILLLRVSTKRQLETAVDIDPDGLSIATQRDQGTAKADAMGVEVVEEFIEPGYSAKTIDKRPVIRELLRYLTEHPEVGYVIVYMRSRAFRNRFDAAIVEAQLNKMGVRLISAKEDFGEGPHAVAMEGMLDVMNHLMNTLQGLDIQEKMRTKAVNGGTLGIARIGYLNVRVEYEGKLINTIALDGRRAPLVRKAFELYATGRYGLEQLEATMADLGLTARAIGKYPERPVSFKRLHQMLQDPYYAGWIDYDGELYPGRHEPIVTQELFDRVQDVMDMRSRLGQRDRVLQHYPKGDLFCERCRRAGRTSRLIYTEARSRNRSLYGYFLCRGRQDRLCDLPYLPVEQVEQAIADHYSTLQLPARFLDEIREALEAALSDEQGDLRDTHGTLRKQLKELDGQEERLLDLAMDKALPQPKIKARLRRIQNDRASIEARLNATTAELTVGVEVLTSALDLLRDPQQMYEDGSDAVRRHLNQTFFECFYVDIEGVLTDQLKEPFGDLHEVVGVDRTFHRAITGHVSPGRRSRNEESGPTLPLVPKDPGSSRTTLV

SEQ ID NO: 17952 - DNA, 50 bp, Nocardia nova
  source 1..50: mol_type = genomic DNA
cggttcgagtaggaccacccttgtggacatggcaggaacttactcgaacc

SEQ ID NO: 17953 - DNA, 40 bp, Nocardia nova
  source 1..40: mol_type = genomic DNA
caggtaaggggcctgtggtggagctgccgggaattgaacc

SEQ ID NO: 17954 - DNA, 50 bp, Nocardia nova
  source 1..50: mol_type = genomic DNA
cggttcgagtaggaccacccttgttgacatggcaggaacttactcgaacc

SEQ ID NO: 17955 - DNA, 40 bp, Nocardia nova
  source 1..40: mol_type = genomic DNA
caggaaagggggctgggcttgagctgccaggtaggggacc

SEQ ID NO: 17956 - protein, 537 aa, Amedibacterium intestinale
MKQQIYNTALYLRLSRDDELQGESSSITTQRSMLRLYAKEHHLNVIDEYIDDGWSGTNFDRPSFQRMIEDIEAGKINCVVTKDLSRLGRNYIMTGQYTELYFPSHNVRYIAIDDGVDSEKGESEIAPFKNIINEWVARDTSRKVKSAFKTKFAEGAHYGAYAPLGYKKHPDIKGKLLIDDETKWIIEKIFSLAYQGYGSAKITKQLRAEKVPTASWLNFTRYGTFAHIFEGKPESKRYEWTIAHVKAILKSEVYIGNSVHNMQSTVSFKSKKKVRKPESEWFRVENTHEPIIDKEVFYRVQEQIKSRRRQTKEKATPIFAGLVKCADCGWSMRFGTNKANKTPYSYYACSYYGQFGKGNCSMHYIRYDVLYQAVLERLQYWAKAVQQDEEKVLNKIQKAGNAERIREKKKKASALKKAENRQNEIDRLFTKMYEDRACEKITERNFIMLSGKYQKEQIELEQQITNLREELSKMEQDMIGAEKWIELIKEYSVPKELTAPLLNAMIEKILIHEATTNEENERIQEIEIYYRFIGKVD

SEQ ID NO: 17957 - DNA, 50 bp, Amedibacterium intestinale
  source 1..50: mol_type = genomic DNA
tcatatctttaactaagggaaagcggagtttcccaaactaaaggatatta

SEQ ID NO: 17958 - DNA, 40 bp, Amedibacterium intestinale
  source 1..40: mol_type = genomic DNA
agtatctcgatgggagaatggaaattatatgccagattta

SEQ ID NO: 17959 - DNA, 50 bp, Amedibacterium intestinale
  source 1..50: mol_type = genomic DNA
tcatatctttaactaagggaaagcaaagtttcccaaactaaaggatatta

SEQ ID NO: 17960 - DNA, 40 bp, Amedibacterium intestinale
  source 1..40: mol_type = genomic DNA
tgtttatcaatgggagaataaaaaaaatttggcaaattta

SEQ ID NO: 17961 - protein, 579 aa, Lysinibacillus fusiformis
MTKKKAVLYARVSTEKEEQEQSLEIQEEIIEQFCNDRGFNLIKPHYLEHGKSGTNMKNRPRFIEMMGDAGLKRVPSATKDTFFEDSGLSPIFDIIIVKEASRFSRNQTEALAVLKELKSKGVEVYFISTNTSTTDNNWEFDLGLYFNISQTESKNLSVRVKMSKRHNAEKGKYAPAIVPYGYKRIFDENGKKKIVKDDNEAQVVEYIFKQYIELGGHTIARLLNEQNILTKSGKIWSNDKITRLIQNPIYIGSPVVMKTKKINVTDTKRVPTTENERVTVKDAVEPIISIEDFNRVQSIRADRTTTATVKKRGQHKSKTDIFSGKLYCANCGAKYVRHIGEGKKINYMCQTRRKHGLEKCQSKGIAFNLIMQGLDDCKLFFNGLGNHVQLIAINEGIQKLNVKNIEIKERIMADIDKIKEDERNTFLFMRGLDKFSRTYELANEELETLNLKRIDLEEQISLLKVETIQRFIAKVKQKENAIYEARKMEMNEQDLKLLQLHKVVIDDDSVKYYYTVQAFDEEIEEFNRTFGDLVEPISFQSEEHYEERFQRDFRKLISRAEEQEMMQEQYEAMEDLGLI

SEQ ID NO: 17962 - DNA, 50 bp, Lysinibacillus fusiformis
  source 1..50: mol_type = genomic DNA
aggttgttaatcgatgcttatataaataaatacgctttaattaacaatcc

SEQ ID NO: 17963 - DNA, 40 bp, Lysinibacillus fusiformis
  source 1..40: mol_type = genomic DNA
gggctgtgctgcctatattaatatggtacaggggcaagta

SEQ ID NO: 17964 - DNA, 50 bp, Lysinibacillus fusiformis
  source 1..50: mol_type = genomic DNA
aggttgttaatcgatgcttatatacataaatacgctttaattaacaatcc

SEQ ID NO: 17965 - DNA, 40 bp, Lysinibacillus fusiformis
  source 1..40: mol_type = genomic DNA
cggctatgctgcttattctcaaatggtccaggagcaagaa

SEQ ID NO: 17966 - protein, 559 aa, Bacillus subtilis
MLILKGDQKLSTDNIMHLIGKINALIYARVSTTDQANKGFSIESQIERCKERAISKFGYKESEIIALVEPGGMGDDPNRPALNHALYLLEKGLGKKFIVLHPDRLTRDNTLQGVVSRRIWGMGVDIEFIEFEVNPHDPESMLMYNIQGSIAQYNKAKIHANSKRGRLAKAKKGEFPSFKRLYGYKFNTVTDLPEYNEEEKEILLEMKDMLLNKKMSSNEIAKELSRRGVAAPNGKTWYQATVSRMLQNEDYTGDFYYGKSKVVQINGKKKQVPTNKDEWILIKIPPMWDKATREQIIERLKSNFKGRSRATKDYLLKNKAKCGRCGGACGSGITSKTKSGVYKYYSCRAKTAKGYQNGKKVISCEGKNWRVDIVDEVFWNWFIKLMKNPEKFLESFLEEASDQKKIDELKAKASRLEKQLGEIDEEIANYVILFGKGKIKESMFDQLSQPLEQNKEHIENEIKIINSQLAANKQTEDKKQKMIEYIGSFSKMIKNEITIEEKRQFLDFFIEKVTLFDDDHMEVVWKSSSLNNENSHVDFLNGEQGGEFINSHKRLNYIQ

SEQ ID NO: 17967 - DNA, 50 bp, Bacillus subtilis
  source 1..50: mol_type = genomic DNA
cgcataaaagattaaactatattcaagaacaaggttttaacttttatgtc

SEQ ID NO: 17968 - DNA, 40 bp, Bacillus subtilis
  source 1..40: mol_type = genomic DNA
agcaatcgacacacttgtaaagcatatggaagacaaacag

SEQ ID NO: 17969 - DNA, 50 bp, Bacillus subtilis
  source 1..50: mol_type = genomic DNA
cgcataaaagattaaactatattcaggaacaaggttttaacttttatgtc

SEQ ID NO: 17970 - DNA, 40 bp, Bacillus subtilis
  source 1..40: mol_type = genomic DNA
agaaatcctcacaattacaaggaatatggaagatatacag

SEQ ID NO: 17971 - protein, 558 aa, Shewanella algae
MSTSPQTPNPKHPTSKVFSYVRFSSAAQELGSSLARQYELTRQWAAQNGYEVDDNLKFEDLGVSGFKQDARREGLERLLAAIDAGYIRSGDVVAIERLDRLSRAGLARSQQLLNSILSRGVNVVAVEEGLFLTKDSPNVFNDVLRVLLAAELANRQSVEKSRRVRDAKRRQRAAAAEGKVIRKRLPIWLTMNEDGTGYTFEPEHVETVKQIISLRRAGRGWSGIAADLNADGRRVRWGKNGWSDTSTRSIIQNPALYGAYQSGEMRPVDGDESAENGRLEWVPGELVLDFYPALISYAEWRDLQPGKQGKAAGQAGGNSRTNALAGVARCAECGGTLTRKCRQRKNKEGNLVHYAFWTCRQGEQGRCPVGASGFKDLGAEVVAACRHLEWVRPSDLGDVNRARDKLEQELDRVAGVLERLQKQLVDGDADDVDIVLPLIKKAKQDKSALENELDLLNRSTSTETAKADIERLGTISGDVVAFNNLLRKVVDRIVVRRRGKLSYSFTVEQTNGHQFRVDVIRTKQGQDPVRFYNRGVEGLPGDIDVEQLYPWETDQEDD

SEQ ID NO: 17972 - DNA, 50 bp, Shewanella algae
  source 1..50: mol_type = genomic DNA
ttttcccaccttccaaacttaatcaccataaactttgacttaagtgaaac

SEQ ID NO: 17973 - DNA, 40 bp, Shewanella algae
  source 1..40: mol_type = genomic DNA
ggtaggcactatgttgaacaccataaagcgcatcagaaaa

SEQ ID NO: 17974 - DNA, 50 bp, Shewanella algae
  source 1..50: mol_type = genomic DNA
ttttcccaccttccaaacttaatcaacataaactttgacttaagtgaaac

SEQ ID NO: 17975 - DNA, 40 bp, Shewanella algae
  source 1..40: mol_type = genomic DNA
gatagccacatagttgaacaacatatagcacagcaaaaaa

SEQ ID NO: 17976 - protein, 484 aa, Hungatella hathewayi
MKGVIYARYSSDNQREESIEGQLRECKEYAERNDIMILGTYIDRALSAKTDNRPEFQHMIKDSAKGLFDVVLVWKLDRFARNRYDSARYKNILKKNGVKVISARENISEGSEGIILEAMLEGYAEYYSAELSEKVIRGLTDNALKCKYNGGTVPIGYYIDEQQYYQIDPKTAPVVLEMFTRYSEGATMQELVNLLNSRGMRSIRGGKITLNIMNHLLKNRRYMGEYSYRDVVKEDGIPAIVPKELFERVQERLAKNKKAPARHKAEDDYLLTTKLYCGKCGSFMVGESGTSHTMKVHRYYRCVNTKKKKLCDKKAVKKDWIEDLVVSYTMKAIMNDEVMERLIDTLMELQKRESTDLPLLKKQLAETEKGINNMLNAIQAGIFTPSTKQRLDELEETKSQLEISILQEEMHKPMLTREQIAFFIYRFRKFDVTKREQRQRLIDSFVNAVYLYEDKIILTFNYKDGSKTITLAEVEGSDLSVLGA

SEQ ID NO: 17977 - DNA, 50 bp, Hungatella hathewayi; identical to SEQ ID NO: 17467
  source 1..50: mol_type = genomic DNA

SEQ ID NO: 17978 - DNA, 40 bp, Hungatella hathewayi
  source 1..40: mol_type = genomic DNA
ggttcaagtcctgttacccgcagtatcaaaagatgttaaa

SEQ ID NO: 17979 - DNA, 50 bp, Hungatella hathewayi
  source 1..50: mol_type = genomic DNA
ggttcggatttatccgtactcggttaaccagataatgataatccgaaccc

SEQ ID NO: 17980 - DNA, 40 bp, Hungatella hathewayi
  source 1..40: mol_type = genomic DNA
gtttcaatttctattacagtaagtatcaacagatgttacc

SEQ ID NO: 17981 - protein, 550 aa, Blautia sp N6H1-15
MKKTKTKCYLYTRVSTSMQVDGYSLDAQRDKLRKYAEYEDMVVAGEYSDEGFSGKNIQGRHEFQRMLQDIQDCKDGVEYVLVFKLSRFGRNAADVLNSLQLMQDFGVNLICVEDGIDSSKDSGKLMISVLSAVAEIERENIRTQTMAGREQKAREGKWNGGFAPYGYRLEKGELLIAEDEVDVIRTIFDRYIHTNDGVSGVAKYLNRQGFVKKLRQNGTIPGFSASFVKSIIDNPVYMGKIAYGRRRTEKKLGTRNEMHVVEQSEFPVYEGKHEAIISEEDWNLAQEKRKVNAYRREKVNDPTHAHILSGILKCPCCGKSLYGNIAKAHSKDKKTRYYYYCKNTVTPTGHECTFRLNIEQTEMNRMVASIISAMVSDPRFADAIKAKIGSAVDTNDLEKQLEALQAQLRQTLGTKARLERQMDNLDVNDPYYDRKISDLQRRYDEQYGKIDEVEVQIDDVQSQIRSIRQEKISGDNIYRLLLAFDQVYEAASEVERKEFMRAFIERIELFPEKQPDGNWIRKIIFNFPVPVNGTEVKELPLENETMVETV

SEQ ID NO: 17982 - DNA, 50 bp, Blautia sp N6H1-15; identical to SEQ ID NO: 3647
  source 1..50: mol_type = genomic DNA

SEQ ID NO: 17983 - DNA, 40 bp, Blautia sp N6H1-15
  source 1..40: mol_type = genomic DNA
ctccaataataccaccgttgagacggttgtacttttgtcc

SEQ ID NO: 17984 - DNA, 50 bp, Blautia sp N6H1-15
  source 1..50: mol_type = genomic DNA
cccttggaaaatgaaacaatggtcgtgacggttgtcttgctttccaaggg

SEQ ID NO: 17985 - DNA, 40 bp, Blautia sp N6H1-15
  source 1..40: mol_type = genomic DNA
caccactaatcccacagatgtcacggtggggcttttgtcc

SEQ ID NO: 17986 - protein, 510 aa, Paenibacillus campinasensis
MRAAIVRRVSTLKEVQENSLQNQKDFFEDYVQSKGWDIAEIYTETETGTKFSRKEMNRLIADAKAKKFDIILAKELSRLARNQRLALEIKEVIEKHGIHLVTLDGAIDTTTGNTHMFGLFAWIYEQEAQRTSERIKMALETKAKKGLYKGSNPPYGYVVREGRLYVSDDGSSEIVERIFQSYLGGKGFDAIARELFEEGVPTPSMIAGKKNQTIYWHGSSVRKILENPHYTGDMVQGRQSTISVTNKSRKEKPKTEFIVVKNTHESIISGEVFESVQQLIAFNRKKSIDNPDVCSRPHQNVHLFTGVIFCPDCGSGFHYKRNGACYICGRSDKLGDKACSKHRIREDALVAIIRWDLQRLSKLLDDQSFYNTVKDKFVKAKSKLEKELKACAGKIENIKNLKSKALSKYLEESITKSDYDDYIAAQDAEIQKLLHNKEKLDSAISASVDVDVLGKIKGIVASSLEFQEINREVINRFIEKIEVTADGNVKLYYRFAGTSKILNELMTDVN

SEQ ID NO: 17987 - DNA, 50 bp, Paenibacillus campinasensis
  source 1..50: mol_type = genomic DNA
ttgcgctacactcggcacccgacacatgttgagtgctgtgtgtcgctcgt

SEQ ID NO: 17988 - DNA, 40 bp, Paenibacillus campinasensis
  source 1..40: mol_type = genomic DNA
tgacactgcttattcaacacatgtggagtgtgtggtgttg

SEQ ID NO: 17989 - DNA, 50 bp, Paenibacillus campinasensis; identical to SEQ ID NO: 17987
  source 1..50: mol_type = genomic DNA

SEQ ID NO: 17990 - DNA, 40 bp, Paenibacillus campinasensis
  source 1..40: mol_type = genomic DNA
tacctctgcttagtcaacacatgtggagtctgtggcctct

SEQ ID NO: 17991 - protein, 503 aa, Subdoligranulum sp; identical to SEQ ID NO: 341

SEQ ID NO: 17992 - DNA, 50 bp, Subdoligranulum sp; identical to SEQ ID NO: 12
  source 1..50: mol_type = genomic DNA

SEQ ID NO: 17993 - DNA, 40 bp, Subdoligranulum sp
  source 1..40: mol_type = genomic DNA
ccgttattaaagtttctgcttccttcttttcaaagaaggg

SEQ ID NO: 17994 - DNA, 50 bp, Subdoligranulum sp; identical to SEQ ID NO: 14329
  source 1..50: mol_type = genomic DNA

SEQ ID NO: 17995 - DNA, 40 bp, Subdoligranulum sp
  source 1..40: mol_type = genomic DNA
ccgttgttcaactttatgccagctccttttcagagaagtt

SEQ ID NO: 17996 - protein, 509 aa, Escherichia coli
MRRAISYIRFSSERQLKGDSVRRQSKLVTDWLDKNPEFYLDSSLSFKDLGKSAFSGKHLKGGLGDFLTAIEKGLVKAGDTLLIESLDRLSRQDIDIASELLRRILRAGVDVVTLSDGEHYTRESLKDPLSLIKSILIMQRAHEESLRKSERVQAAWNRKKELISEGIKVSRRCPAWLRLNDDRRTFTIIPDKVEVVKRAFDLRLQGLSFWAITRTLNDEGHLSLNQYTPKQKGWSDTAVKKLLRNRAVIGCFTPAGREEVQGYYPAIISESLFYRVQQLNTGQYGRASVSSNPLSVNLFRGIIKCSECGATIVLGGYALKRFGMYRCPNRSANRCSAKAISRKQTDATILYMLALCDRFETENTDTIDSLKLQREDLQRKISKMAELAIELDDMTIITEKLRDMKNALSKLNHDIEEETQRIKAITTGSLKDIDRTTKEGMIETQLLIKGVLKEIVLNTAKRRCKVTFHNGKVIDLSITENPSEDVTEAIQSLSEVTERGLIDVDEVII

SEQ ID NO: 17997 - DNA, 50 bp, Escherichia coli
  source 1..50: mol_type = genomic DNA
gtgtatttagggaacaaatatcagcataatgggttcctaaacacatcatt

SEQ ID NO: 17998 - DNA, 40 bp, Escherichia coli
  source 1..40: mol_type = genomic DNA
ggtccggtattgtcttcagtattacatttttattttcggc

SEQ ID NO: 17999 - DNA, 50 bp, Escherichia coli
  source 1..50: mol_type = genomic DNA
gtgtatttagggaacaaatatcaggataatgggttcctaaacacatcatt

SEQ ID NO: 18000 - DNA, 40 bp, Escherichia coli
  source 1..40: mol_type = genomic DNA
ggttccctattgtcatcaggatttccttttaaatttctgc

SEQ ID NO: 18001 - protein, 509 aa, Escherichia coli
MRRAISYIRFSSERQLKGDSVRRQSKLVTDWLDKNPEFYLDSSLSFKDLGKSAFSGKHLKGGLGDFLTAIEKGLVKAGDTLLIESLDRLSRQDIDIASELLRRILRAGVDIVTLSDGEHYTRESLKDPLSLIKSILIMQRAHEESLRKSERVQAAWNRKKELISEGIKVSRRCPAWLRLNDDRRTFTIIPDKVEVVKRAFDLRLQGLSFWAITRTLNDEGHLSLNQYTPKQKGWSDTAVKKLLRNRAVIGCFTPAGREEVQGYYPAIISESLFYRVQQLNTGQYGRASVSSNPLSVNLFRGIIKCSECGATIVLGGYALKRFGMYRCPNRSANRCSAKAISRKQTDTTILYMLALCDRFETENTDTIDSLKLQREDLQRKISKMAELAIELDDMTIITEKLRDMKNALSKLNHDIEEETKRIKAITTGSLKDIDRTTKEGMIETQLLIKGVLKEIVIDAAKRRCKVTFHNGKVIDLSITENPSEDVTEAIQSLSEVTERGLIDVDEVII

SEQ ID NO: 18002 - DNA, 50 bp, Escherichia coli
  source 1..50: mol_type = genomic DNA
gtgtatttagggaattaatatcagcataatgggtccctaaacacatcatt

SEQ ID NO: 18003 - DNA, 40 bp, Escherichia coli; identical to SEQ ID NO: 17998
  source 1..40: mol_type = genomic DNA

SEQ ID NO: 18004 - DNA, 50 bp, Escherichia coli
  source 1..50: mol_type = genomic DNA
gtgtatttagggaattaatatcaggataatgggtccctaaacacatcatt

SEQ ID NO: 18005 - DNA, 40 bp, Escherichia coli; identical to SEQ ID NO: 18000
  source 1..40: mol_type = genomic DNA

SEQ ID NO: 18006 - protein, 509 aa, Escherichia coli
MRRAISYIRFSSERQLKGDSVRRQSKLVTDWLDKNPEFYLDSSLSFKDLGKSAFSGKHLKGGLGDFLTAIEKGLVKAGDTLLIESLDRLSRQDIDIASELLRRILRAGVDIVTLSDGEHYTGESLKDPLSLIKSILIMQRAHEESLRKSERVQAAWNRKKELISEGIKVSRRCPAWLRLNDDRRTFTIIPDKVEVVKRAFDLRLQGLSFWAITRTLNDEGHLSLNQYTPKQKGWSDTAVKKLLRNRAVIGCFTPAGREEVQGYYPAIISESLFYRVQQLNTGQYGRASVSSNPLSVNLFRGIIKCSECGATIVLGGYALKRFGMYRCPNRSANRCSAKAISRKQTDTTILYMLALCDRFETENTDTIDSLKLQREDLQRKISKMAELAIELDDMTIITEKLRDMKNALSKLNHDIEEETKRIKAITTGSLKDIDRTTKEGMIETQLLIKGVLKEIVIDAAKRRCKVTFHNGKVIDLPITENPSEDVTEAIQSLSEVTERGLIDVDVVAI

SEQ ID NO: 18007 - DNA, 50 bp, Escherichia coli; identical to SEQ ID NO: 18002
  source 1..50: mol_type = genomic DNA

SEQ ID NO: 18008 - DNA, 40 bp, Escherichia coli; identical to SEQ ID NO: 17998
  source 1..40: mol_type = genomic DNA

SEQ ID NO: 18009 - DNA, 50 bp, Escherichia coli; identical to SEQ ID NO: 18004
  source 1..50: mol_type = genomic DNA

SEQ ID NO: 18010 - DNA, 40 bp, Escherichia coli; identical to SEQ ID NO: 18000
  source 1..40: mol_type = genomic DNA

SEQ ID NO: 18011 - protein, 529 aa, Geosporobacter ferrireducens
MIPVQYCIYLRKSRADLDAEARGEGETLVRHERALLELAKTLKLSITHIYKEVVSGETISSRPVMQQLLSDVEQGVWDGVLVMEVERLARGDTVDQGIVAQTFKYSNTKIITPMKIYNPANEFDEEYFEFGLFMSRREYKTINRRLQQGKLQSVKEGKFLGNKSAYGYIRKKIEKNKGYTLEIHPEQVDTVRLIFELYTNGEQQEDGSYRRLGPELIAQKLDSLKILPMKKDFWSPQSIRDILRNPVYIGKIRWNWRPTKKKMVNGEIVKERPRAKEEDIILVDGLHEAIIDMQTWETAQEYMKTNQIGPIPKEQPIKNPLSGIIVCGMCNRKMVRRPYGEKQPDTLMCPAASCKNVSSYLYKVEENILESLEKWVKNYKIEIKKAEDENSVQSNIKEKSFKRLEKEIQKLEKQMDNLHDLLEQGVYTTEKFLERSKIISNRMASLRNDSDLLLEEMERDSLIDKTRKNIIPIVEHVLEVYNATEDPGTKNSLLKKILEKVVYIKESGGRWSNKIDDFQIDLYPKLPKK

SEQ ID NO: 18012 - DNA, 50 bp, Geosporobacter ferrireducens
  source 1..50: mol_type = genomic DNA
taccgataacatcatggttctgattcttctgtaccatgatgttatcagta

SEQ ID NO: 18013 - DNA, 40 bp, Geosporobacter ferrireducens
  source 1..40: mol_type = genomic DNA
catttccacgtgagccatctcttctgtaccaatgtcagtt

SEQ ID NO: 18014 - DNA, 50 bp, Geosporobacter ferrireducens
  source 1..50: mol_type = genomic DNA
taccgataacatcatggttctgatttttctgtaccatgatgttatcagta

SEQ ID NO: 18015 - DNA, 40 bp, Geosporobacter ferrireducens
  source 1..40: mol_type = genomic DNA
aatgtaaacattaggcatcttttctgtaccaatgtcaata

SEQ ID NO: 18016 - protein, 540 aa, Ruminococcus bicirculans
MLAKQTDYIVGIYLRLSKDDERAGESLSIENQRRILNNYVREQGWTIYDEYVDDGISGTSFDRPGVQRMLDDAKNGRINLIICKDLSRFGRNYIQVGQYTDYIFPMYNIRFIALNDGIDTLNSDSADMDMMPIRNVFNEWHAANTSKKVRAVIAANAKAGKMMTPYCPYGYVKSDDEMRTPIIDPYAAGIVRRIFEMYASGMKPLQIATVLNEEGVLTPFDYYYKRIGKPNPYNHSHLWSGRNLENILKNPIYIGTLAQLRTTTVSYKNHKRIDRDESEWAVIENNHEAIISKELWDKVREIETSVSRGKRDKKGELSPLSGLLFCDGCGWKMRKASTGGGGYICGYHNRFGKNYCSTHYINRELIEGIILADIQEMCELAKDEKAATAEFLRRKRAYIDVQSISDTKRMKTVGSRLAELDKLIQSVYEDKVAGRIEPDMAFDMLDKYQAEKKTLKAEYDEMNARSEAEMKDEEDVAEFISRLKRYAGATELTREMCLDLIEYATVDENNKGHKDRPRVIHVYYKLIDKPLTNKNRLALT

SEQ ID NO: 18017 - DNA, 50 bp, Ruminococcus bicirculans
  source 1..50: mol_type = genomic DNA
ttttatccatttgggatagttaccgtagtagctttcctaaatggataaaa

SEQ ID NO: 18018 - DNA, 40 bp, Ruminococcus bicirculans
  source 1..40: mol_type = genomic DNA
aatgtacataatagtttccgtggttgcaagtgcagacact

SEQ ID NO: 18019 - DNA, 50 bp, Ruminococcus bicirculans
  source 1..50: mol_type = genomic DNA
ttttatccatttgggatagttaccagagtagctttcctaaatggataaaa

SEQ ID NO: 18020 - DNA, 40 bp, Ruminococcus bicirculans
  source 1..40: mol_type = genomic DNA
aataaacatgataatatccaggcttgtaagtccagacaat

SEQ ID NO: 18021 - protein, 559 aa, Hungatella hathewayi
MSRTKNRGFQQSFSPSYTIRRWRLGEYIRLSKEDLKKGKDDSNSVKNQRDLLNDFYQKHIEEFESVSEYVDDGHTGTDANRENFQRLLADVMSGKINCVVVKDLSRFARNYSDAGSLIDNLFVQMGVRFISLAENVDSYLNPDSVSSIIVPITNVMNDQYCYQTSKKIRQVFDYKRRNGQYIGSFAPYGYIKDPKDKHQLIVDPEAAEIVKLIYNKTLQGETRRAIVYHLNDHGIPSPTTYRKNKGLPYSCSVSDNPMWGDRVLTNILTNPIYTGDLVQGRRRVKSYKVHEIEAVPEDEWVRVADTHEAIIDRETFEKVQALLKRDTRTAPRKKELHLFSGFLRCADCGKSITRSQSGKNVYYACSTYKYRSRAACSMHSIKHERLEAAVLFAVRQQVHLAVSFSEILARINSAPVKKSQSFRLDDLIAAKEKELAKITRYKQSLYQDWKDGEITQQDYRTMKADYERQISSISDVLERLTAERAELTNGVDSEHPALVAFKKHQNIETLNREILIDLVNYIKVYENGNISVKFKFADEFRRIAEYIEINISEIPAAAG

SEQ ID NO: 18022 - DNA, 50 bp, Hungatella hathewayi
  source 1..50: mol_type = genomic DNA
tgttttcctaatatgaaacattcatatgattgtttcttattaggaacgct

SEQ ID NO: 18023 - DNA, 40 bp, Hungatella hathewayi
  source 1..40: mol_type = genomic DNA
catactctttcccatttgctatgatatgggttcccatagg

SEQ ID NO: 18024 - DNA, 50 bp, Hungatella hathewayi
  source 1..50: mol_type = genomic DNA
tgttttcctaatatgaaacattcatttgattgtttcttattaggaacgct

SEQ ID NO: 18025 - DNA, 40 bp, Hungatella hathewayi
  source 1..40: mol_type = genomic DNA
catgctcttgcccttctcctttgatacatggtcccatagg

SEQ ID NO: 18026 - protein, 483 aa, Streptococcus anginosus
MNAVIYARYSSDNQREESIEGQLRECREYAERNNMTIVGTYIDRALSAKTADRPEFQRMIKDSAKELFEIVLVWKLDRFSRDRYDSAHYKHILKKNGVKVISAKEHISEGPEGIILEAMLEGYAELSEKIHRGQKENALKGKNNGGGVPLGYLLDKKAQKLAIDPTTAPLVVEVFEKYADGKSVRSIVEDFNARGLKTKRGQPFNINSFSSLLKNRKYIGEYRYQDVVIEGGVPAIVPEELFNRVQERMEKNRHAPAMAKAKKDYLLTTKLFCGKCERMMVGESGKSHTGAMHYYYKCSGAKRLKDCDKKTVRKDWIERVVVHLTMQRVMDEEKINRLIDAILVMQEQEDTTTPALRSQLAETESSIGNILKAIEQGIFTPSTKQRLDELEARKEEILVNIQTAELQKPKLTREQMTAWFEQFRHGDPANREFQKRLIDTFVNAVYVFDDKLVLTYNYQHGTQTISLDEIESALSSDFDGATP

SEQ ID NO: 18027 - DNA, 50 bp, Streptococcus anginosus
  source 1..50: mol_type = genomic DNA
ttgagttcggattttgatggggctactccaccaaaacaatataatccgaa

SEQ ID NO: 18028 - DNA, 40 bp, Streptococcus anginosus
  source 1..40: mol_type = genomic DNA
aggagttcgactctcctcagctccactgaatgataaaaac

SEQ ID NO: 18029 - DNA, 50 bp, Streptococcus anginosus
  source 1..50: mol_type = genomic DNA
ttgagttcggattttgatggggctattccaccaaaacaatataatccgaa

SEQ ID NO: 18030 - DNA, 40 bp, Streptococcus anginosus
  source 1..40: mol_type = genomic DNA
aagagttcgtctctcctaaattcctctgatttctgataac

SEQ ID NO: 18031 - protein, 521 aa, Paenibacillus faecis
MIKSDRSYVRVSTLKESQQDSPEHQESFIREVAAREGIEIDKVYEDRDTATSIVSRSDVQQMIEDAKRGEIRSIWFASLSRFSRDALDAISLKRILVNALKIRVVSIEDGYDSAKKDDELLFGIKSVVNQNTSGDISISSRRGIRKSALEDGNIIASKPAFGYKKVTVDKRKTYEIIPEQAAIVELIYDLYIGGMGDKTIVNYLNGDNPEGMFYKSYTGKPWGLSTVQSILRNPTYTGYNVSGRYTTEVVYDDITDLMNRRKKLVQRPEAEWEWAEKQTHPAIIPLEKYRHVQEIRLERGGAFRGGRRAFVNVFAKLIFCAECGSAMVTMKSRNRARDKEYRYLLCSRHRRVGDIGCANGKWIPYNDMRDEIITEVLSRISKKLKSLESKGTLEIETSMPKNDLDKEKRKLEKRIEDNRKLLFEIRRQHMLGDIERSQYEFEREQYELEIKEIEKRLAVIYAEEKRSLDIERLVKDAKRALRELSEMKSYTDVEKTRALLQQVLKRIDVSKTGDIDIKTYV

SEQ ID NO: 18032 - DNA, 50 bp, Paenibacillus faecis
  source 1..50: mol_type = genomic DNA
ttgcgtgcttgaaaatgcatctccaatgtaatataatttgaagcacacaa

SEQ ID NO: 18033 - DNA, 40 bp, Paenibacillus faecis
  source 1..40: mol_type = genomic DNA
cgtccgaaatcatatttctaatgtcatgcaaaagttgaac

SEQ ID NO: 18034 - DNA, 50 bp, Paenibacillus faecis
  source 1..50: mol_type = genomic DNA
ttgcgtgcttgaaaatgcatctccactgtaatataatttgaagcacacaa

SEQ ID NO: 18035 - DNA, 40 bp, Paenibacillus faecis
  source 1..40: mol_type = genomic DNA
cgtgagataacatatgtttactgtcatgcataagctgtac

SEQ ID NO: 18036 - protein, 488 aa, Clostridium botulinum
MRIAIYTRKSVYVENSESIETQINLCKTYFKGDNDYEIFEDEGYSGKNTNRPAFKRLILECKMNKFDALICYRLDRISRNVADFSSTLELLQKYNVTFISIKEQFDTSTPMGRAMIYIASVFAQLERETIAERVKDNMLQLAKKGCYTGGTVPKGCKIIKENKKSFLQIIDSDLIHLYFNSYLDNGSLFLGYKFLKEKGITISREGYRKVLRNPIYVKSSKEVTNYLKSKGYEVIGQVDNKSGYMTYGKINNTPIAIVGKHIGVLDSNIWLKVQMQLDERKEQFKNTSEVNFLSSVLKCPYCGGYYQLSQSNKVRYYVCQNRINRTKTGIDKSKEKCKNKKYIKADLLEEKISQFLKQLENKDIFKKLFSDPKEGRESNILILEKQLNKNNNVINGLVEKVALLSTEASKVFIEKIEELTQRNNEIKNKIEIEKLLEMQKKANDTSSEFIYNKIIEFNKLKSTKEKNRILKLIFTNLQYDPYKNKITI

SEQ ID NO: 18037 - DNA, 50 bp, Clostridium botulinum
  source 1..50: mol_type = genomic DNA
tgtattacatttgtcattcatgcattaccatagtagttaaatgtaataga

SEQ ID NO: 18038 - DNA, 40 bp, Clostridium botulinum
  source 1..40: mol_type = genomic DNA
tttttgtttccaccatgcattaccataatttcctgcaaaa

SEQ ID NO: 18039 - DNA, 50 bp, Clostridium botulinum
  source 1..50: mol_type = genomic DNA
tgtattacatttgtcattcatgcatcaccatagtagttaaatgtaataga

SEQ ID NO: 18040 - DNA, 40 bp, Clostridium botulinum
  source 1..40: mol_type = genomic DNA
ttaatgctttcaccaggcatcaccacaatatcctacaaat

SEQ ID NO: 18041 - protein, 572 aa, Eisenbergiella tayi
MTNTGNLGTIEATNPVLTVAPLKEDTEMLRATEKITALYCRLSQEDANEGDSNSITNQKDILLRYAKEHRFPNPTFFVDDGYSGTNYDRPGFQQMLSEIEAGKVAVVLSKDLSRLGRNSSLTGLYINFTFPKYGVRYIAINDHFDTIDPNSTDNDVAGIKNWFNEFFAKDTSRKIRAVQKAKGEQGIPLTTNVPFGYRKDPEDRTKWVVDEAAALVVKRIFKLCMEGRGPMQIAKLLQAEQVLNPTAYKRREGINTPSPETADPYHWNPNTVVHILERREYTGCTVNFKTYTNSIWDKKQRETPIEKQAVFYNTHPAIIEQEVFDKVQEIRKQRHRRTKTGKSSLFSGMVYCADCGAKMRYCTTNYFEKRQDHFVCASYRSNTGTCSAHFIRAVVLEELVWMHMKTVISYVTRHEAHFRAVMEHRLRLSSEEAVRGYKKRLAQAERRLGELDRLFIRIYEDNVAGKLSDERFALMSKTYEDEQMQLKAEIQTLQQEIEVQERQIENLEQFIQRVHKYEDLQEMTPYALRELVKGIYIEAPDKSSGKRRQGIRISYDLVGFIPVDELMKQETA

SEQ ID NO: 18042 - DNA, 50 bp, Eisenbergiella tayi
  source 1..50: mol_type = genomic DNA
ttactttcttatgacccccggctgttagacgggtgctcgtaagaaagtaa

SEQ ID NO: 18043 - DNA, 40 bp, Eisenbergiella tayi
  source 1..40: mol_type = genomic DNA
agaaaaaaggcccctgccatttggtcagggcctttttcca

SEQ ID NO: 18044 - DNA, 50 bp, Eisenbergiella tayi
  source 1..50: mol_type = genomic DNA
ttactttcttatgacccccggctgctagacgggtgctcgtaagaaagtaa

SEQ ID NO: 18045 - DNA, 40 bp, Eisenbergiella tayi
  source 1..40: mol_type = genomic DNA
aaaaaaaaggctctggccacttgattagggctgatttcca

SEQ ID NO: 18046 - protein, 617 aa, Streptococcus agalactiae; identical to SEQ ID NO: 486

SEQ ID NO: 18047 - DNA, 50 bp, Streptococcus agalactiae; identical to SEQ ID NO: 9697
  source 1..50: mol_type = genomic DNA

SEQ ID NO: 18048 - DNA, 40 bp, Streptococcus agalactiae
  source 1..40: mol_type = genomic DNA
agaaatataagctggcagcaggaaaaactgccaagtcaat

SEQ ID NO: 18049 - DNA, 50 bp, Streptococcus agalactiae
  source 1..50: mol_type = genomic DNA
agaaagtccttgacaagttgttacgagagtaatagaattaaggagaacac

SEQ ID NO: 18050 - DNA, 40 bp, Streptococcus agalactiae
  source 1..40: mol_type = genomic DNA
aaaaatataagctagcaatgagaaaaacaagcaggtaaat

SEQ ID NO: 18051 - protein, 612 aa, Streptococcus agalactiae
MRNFEKITALYERLSRDDELQGESNSIINQKKILEEYASKNNLSNIIHFTDDGISGTQFDRPGFMAMMNGVNQGNIGCIIVKDMSRLGRDYLKVGQCMEILRQKGVRLIAINDNVDSFYREDDFTPFRNIMNEWYARDTSRKIQSTFRSKGESGKHTASTPPYGYIKDEKDKNKWIVDEKAAEIVRRIFNLTMQGNGPYRIAKILESEKVDIPAYHQQKLGYGLYQSKNFEHPYRWCSSTIASILKKQEYLGHTVNFKTRKHFKDKKSKYVSEDNWLIFENTHEPIIDQETFDNVQRIRGNVKRYPDGWGEYHPLTGLMYCADCGSKMYVHRTSNYKNIPYYTCSAYTKTPCGMLCPSAHRIKAEVVLNLIQDTLKDIKKYLDEDNEAFICSIQNEMEEKEKIEIEKKKVRLTESQNRLRELERLMCRIYEDMILNKIPNSRYEILNNQYETEQITLSKEIKDLEQQVSRYEKKTDRARKFISLISRYENFDELTTTMINEFVEKIIVHERDRKGSQTSKQKIEIYFNFIGNYELPQAELSEEKKQKLEEEERKIEERKDKLHQNYLKRKASGKQKEYEDKYKARREQKKQEKIKVLKRVGIPVSEYIKTNI

SEQ ID NO: 18052 - DNA, 50 bp, Streptococcus agalactiae; identical to SEQ ID NO: 9697
  source 1..50: mol_type = genomic DNA

SEQ ID NO: 18053 - DNA, 40 bp, Streptococcus agalactiae; identical to SEQ ID NO: 18048
  source 1..40: mol_type = genomic DNA

SEQ ID NO: 18054 - DNA, 50 bp, Streptococcus agalactiae; identical to SEQ ID NO: 18049
  source 1..50: mol_type = genomic DNA

SEQ ID NO: 18055 - DNA, 40 bp, Streptococcus agalactiae; identical to SEQ ID NO: 18050
  source 1..40: mol_type = genomic DNA

SEQ ID NO: 18056 - protein, 616 aa, Streptococcus agalactiae
MRNFEKITALYERLSRDDELQGESNSIINQKKILEEYASKNNLSNIIHFTDDGISGTQFDRPGFMAMMNGVNQGNIGCIIVKDMSRLGRDYLKVGQCMEILRQKGVRLIAINDNVDSFYREDDFTPFRNIMNEWYARDTSRKIKSTFRSKGESGKHTASTPPYGYIKDEKDKNKWIVDEKAAEIVRRIFNLTMQGNGPYRIAKILESEKVDIPAYHQQKLGYGLYQSKNFEHPYRWCSSTIASILKKQEYLGHTVNFKTRKHFKDKKSKYVSEDNWLIFENTHEPIIDQETFDNVQRIRGNVKRYPDGWGEYHPLTGLMYCADCGSKMYVHRTSNYKNIPYYTCSAYTKTPCGTLCPSAHRIKAEAVLNLIRETLKDIKKYLDEDNEAFIRSIQNEMEEKEKIEIEKKRTRLIDSKGRLQELERLMCRIYEDMILNKIPNSRYEILNNQYETEQITLSKEIKDLEQRVSRYEKETDRAKKFISLISRYENFDELTTTMINEFVEKIVVHERDRKGSQTSKQKIEIYFNFIGNYELPQAELSEEEKQKLEEEERKIKERKDKLHQNYLKRKASGKQKEYEDKYKARREQKKQEKLKILKRVGIPITEYMCTHKTDCK

SEQ ID NO: 18057 - DNA, 50 bp, Streptococcus agalactiae; identical to SEQ ID NO: 9697
  source 1..50: mol_type = genomic DNA

SEQ ID NO: 18058 - DNA, 40 bp, Streptococcus agalactiae; identical to SEQ ID NO: 18048
  source 1..40: mol_type = genomic DNA

SEQ ID NO: 18059 - DNA, 50 bp, Streptococcus agalactiae; identical to SEQ ID NO: 18049
  source 1..50: mol_type = genomic DNA

SEQ ID NO: 18060 - DNA, 40 bp, Streptococcus agalactiae; identical to SEQ ID NO: 18050
  source 1..40: mol_type = genomic DNA

SEQ ID NO: 18061 - protein, 612 aa, Streptococcus agalactiae
MRNFEKITALYERLSRDDELQGESNSIINQKKILEEYASKNNLSNIIHFTDDGISGTQFDRPGFMAMMNGVNQGNIGCIIVKDMSRLGRDYLKVGQCMEILRQKGVRLIAINDNVDSFYREDDFTPFRNIMNEWYARDTSRKIQSTFRSKGESGKHTASTPPYGYIKDEKDKNKWIVDEKAAEIVRRIFNLTMQGNGPYRIAKILESEKVDIPAYHQQKLGYGLYQSKNFEHPYRWCSSTIASILKKQEYLGHTVNFKTRKHFKDKKSKYVSEDNWLIFENTHEPIIDQETFDNVQRIRGNVKRYPDGWGEYHPLTGLMYCADCGSKMYVHRTSNYKNIPYYTCSAYTKTPCGTLCPSAHRIKAEAVLNLIRETLKDIKKYLNEDNEAFIRSIQNEMEEKEKAHIEKKKIRLTESQNRLQELERLMCRIYEDMILNKIPNNRYEILNNQYETEQLALSKEIKDLELVISRYEKETDRAKKFISLISRYENFDELTTTMINEFVEKIVVHERDRKGSQTSKQKIEIYFNFIGNYELPQAELSDEEKQKLEEEERKIKKRKDKLHQNYLKRKASGKQKEYEDKYKARREQKKQEKIKVLKRVGIPVSEYIKTNI

SEQ ID NO: 18062 - DNA, 50 bp, Streptococcus agalactiae; identical to SEQ ID NO: 9697
  source 1..50: mol_type = genomic DNA

SEQ ID NO: 18063 - DNA, 40 bp, Streptococcus agalactiae; identical to SEQ ID NO: 18048
  source 1..40: mol_type = genomic DNA

SEQ ID NO: 18064 - DNA, 50 bp, Streptococcus agalactiae; identical to SEQ ID NO: 18049
  source 1..50: mol_type = genomic DNA

SEQ ID NO: 18065 - DNA, 40 bp, Streptococcus agalactiae; identical to SEQ ID NO: 18050
  source 1..40: mol_type = genomic DNA

SEQ ID NO: 18066 - protein, 612 aa, Streptococcus agalactiae; identical to SEQ ID NO: 471

SEQ ID NO: 18067 - DNA, 50 bp, Streptococcus agalactiae; identical to SEQ ID NO: 9697
  source 1..50: mol_type = genomic DNA

SEQ ID NO: 18068 - DNA, 40 bp, Streptococcus agalactiae; identical to SEQ ID NO: 18048
  source 1..40: mol_type = genomic DNA

SEQ ID NO: 18069 - DNA, 50 bp, Streptococcus agalactiae; identical to SEQ ID NO: 18049
  source 1..50: mol_type = genomic DNA

SEQ ID NO: 18070 - DNA, 40 bp, Streptococcus agalactiae; identical to SEQ ID NO: 18050
  source 1..40: mol_type = genomic DNA

SEQ ID NO: 18071 - protein, 497 aa, Fusobacterium gonidiaformans
MSKIALYIRLSVEDQMKKDESESIINQRYFLNDFLDRNDEFKSFQRKEYIDDGYTGTNEKRPSFQRMLEEVKNGKINAIIVKDLSRFMRDYISLGDYLENIFPFLGIRFIAINDGYDSAKEKGNGTDLDIQFKGLLYDFYTKDISQKVKTVTTELKKQGKFLAWSPPFGYMKDPDDKHNIIIDEKTAWIVRKVYDLALTGLASRKIAAVMNEENIPTPNERKKELTSMDYEYNIVSSDTRDAPTWTNGTVVDILSNENYTGTYVFNMQEKSLLTPGSFKFNPKEEWGRVYNHHEAIISREEFDKVQEIKEKNSFLKGKNTDYPWRTKSPLQGFARCPTCNHILGLTQSKFKRPDGSMRIHKYFHCRICKCNNVEHKNSRVDKLEEQVLSLIKEKYGEAEVKPKEKISIKDIEKKIEKLQAKKMSDFEKYKLGKMTKAKFVESKNQIDNEIDRLEEKIKLSSNEAEVVTDNELTRELMEKYVESVICEGSIVQKIIWK

SEQ ID NO: 18072 - DNA, 50 bp, Fusobacterium gonidiaformans; identical to SEQ ID NO: 14077
  source 1..50: mol_type = genomic DNA

SEQ ID NO: 18073 - DNA, 40 bp, Fusobacterium gonidiaformans
  source 1..40: mol_type = genomic DNA
agtatatgaccctacttgtggaagtggttcgttacttcta

SEQ ID NO: 18074 - DNA, 50 bp, Fusobacterium gonidiaformans
  source 1..50: mol_type = genomic DNA
tgtgtcagtcgcttgacacgagagatgtttcgtgtcataataatgacaca

SEQ ID NO: 18075 - DNA, 40 bp, Fusobacterium gonidiaformans
  source 1..40: mol_type = genomic DNA
tctatataactcaaattgtataactgttttgttacttcta

SEQ ID NO: 18076 - protein, 510 aa, Streptococcus constellatus
MKKVITIEPAKQVTHMVDLPSFTKRRVAGYARVSTDHEDQTTSYEAQMTYYTDYINSRSDWEFVKMYSDEGISGTNTKKRLGFQEMVEDALDGKIDLILTKSVSRFARNTVDSLSTVRKLKEAGVEIYFEKENIWTFDSKGELLITIMSSLAQEESRSISENVTWGRRHQLAEGQVTFSYSQVLGFKKCDTGGFEIDQEEAKIVRYIFHQVLLGNNPNKIARELTAQGIPTPQGKRKWSYGTVKRMLRNEKYKGDALLQKSFTTDFLTKSTKPNEGELPQYYVENNHEAIIKREVFDLVQVELDKLEKKRQTSNIFTGRLFCGDCGSAFGSKVWHSTSKYKRTIYQCNAKYKGEHKCQTPHVTEEEIKGWFLSAMNQLLGNREEIIANTELLIDMAKDTTPLESEIADLERHLETIRQDIEDLVDRNARKAQNQDLYQEQYDTLVTAYQEKQKELQETRSALEEQKSKQLSLDGFIQKFKEQDASSQTSTKNSGRPALSDWISKKIRKSA

SEQ ID NO: 18077 - DNA, 50 bp, Streptococcus constellatus
  source 1..50: mol_type = genomic DNA
tgtatgattaaattgatagcaacagaaatcggaataaggtaattgataca

SEQ ID NO: 18078 - DNA, 40 bp, Streptococcus constellatus
  source 1..40: mol_type = genomic DNA
tataaaattagttgcaacagatatggacggcaccttttta

SEQ ID NO: 18079 - DNA, 50 bp, Streptococcus constellatus
  source 1..50: mol_type = genomic DNA
tgtatgattaaattgatagcaacaacaatcggaataaggtaattgataca

SEQ ID NO: 18080 - DNA, 40 bp, Streptococcus constellatus
  source 1..40: mol_type = genomic DNA
tttaaaatcaggttcaccaactaaggacatcactttttta

SEQ ID NO: 18081 - protein, 521 aa, Streptococcus anginosus; identical to SEQ ID NO: 13191

SEQ ID NO: 18082 - DNA, 50 bp, Streptococcus anginosus; identical to SEQ ID NO: 13192
  source 1..50: mol_type = genomic DNA

SEQ ID NO: 18083 - DNA, 40 bp, Streptococcus anginosus; identical to SEQ ID NO: 18078
  source 1..40: mol_type = genomic DNA

SEQ ID NO: 18084 - DNA, 50 bp, Streptococcus anginosus
  source 1..50: mol_type = genomic DNA
tgtatgattaaattgatagcaacaacaataagaagaagttaattgataca

SEQ ID NO: 18085 - DNA, 40 bp, Streptococcus anginosus; identical to SEQ ID NO: 18080
  source 1..40: mol_type = genomic DNA

SEQ ID NO: 18086 - protein, 521 aa, Streptococcus anginosus; identical to SEQ ID NO: 13191

SEQ ID NO: 18087 - DNA, 50 bp, Streptococcus anginosus
  source 1..50: mol_type = genomic DNA
tgtatgattaaattgatagcaacagatatcggaataaggaaattgataca

SEQ ID NO: 18088 - DNA, 40 bp, Streptococcus anginosus; identical to SEQ ID NO: 18078
  source 1..40: mol_type = genomic DNA

SEQ ID NO: 18089 - DNA, 50 bp, Streptococcus anginosus
  source 1..50: mol_type = genomic DNA
tgtatgattaaattgatagcaacaactatcggaataaggaaattgataca

SEQ ID NO: 18090 - DNA, 40 bp, Streptococcus anginosus; identical to SEQ ID NO: 18080
  source 1..40: mol_type = genomic DNA

SEQ ID NO: 18091 - protein, 510 aa, Streptococcus constellatus
MKKVITIEPAKQVTHMVDLPSFTKRRVAGYARVSTDHEDQTTSYEAQMTYYTDYINSRSDWEFVKMYSDEGISGTNTKKRLGFQEMVEDALDGKIDLILTKSVSRFARNTVDSLSTVRKLKEAGVEIYFEKENIWTFDSKGELLITIMSSLAQEESRSISESVTWGRRHQLAEGQVTFSYSQVLGFKKCDTGGFEIDQEEAKIVRYIFHQVLLGNNPNKIARELTAQGIPTPQGKRKWSYGTVKRMLRNEKYKGDALLQKSFTTDFLTKSTKPNEGELPQYYVENNHEAIIKREVFDLVQVELDKLEKKRQTSNIFTGRLFCGDCGSAFGSKVWHSTSKYKRTIYQCNAKYKGEHKCQTPHVTEEEIKGWFLSAMNQLLGNREEIIANTELLIDMAKDTTPLESEIADLERHLETIRQDIEDLVDRNARKAQNQDLYQEQYDTLVTAYQEKQKELQETRSALEEQKSKQLSLDGFIQKFKEQDASSQTSTKNSGRPALSDWISKKIRKSA

SEQ ID NO: 18092 - DNA, 50 bp, Streptococcus constellatus; identical to SEQ ID NO: 18077
  source 1..50: mol_type = genomic DNA

SEQ ID NO: 18093 - DNA, 40 bp, Streptococcus constellatus; identical to SEQ ID NO: 18078
  source 1..40: mol_type = genomic DNA

SEQ ID NO: 18094 - DNA, 50 bp, Streptococcus constellatus; identical to SEQ ID NO: 18079
  source 1..50: mol_type = genomic DNA

SEQ ID NO: 18095 - DNA, 40 bp, Streptococcus constellatus; identical to SEQ ID NO: 18080
  source 1..40: mol_type = genomic DNA

SEQ ID NO: 18096 - protein, 583 aa, Flavonifractor plautii; identical to SEQ ID NO: 12821

SEQ ID NO: 18097 - DNA, 50 bp, Flavonifractor plautii; identical to SEQ ID NO: 12822
  source 1..50: mol_type = genomic DNA

SEQ ID NO: 18098 - DNA, 40 bp, Flavonifractor plautii
  source 1..40: mol_type = genomic DNA
aagaaaaaccctggaaccattgaagttccagggtttctta

SEQ ID NO: 18099 - DNA, 50 bp, Flavonifractor plautii
  source 1..50: mol_type = genomic DNA
atagtaccttatcactatcaagccctggcttaacagtgataaggaactaa

SEQ ID NO: 18100 - DNA, 40 bp, Flavonifractor plautii
  source 1..40: mol_type = genomic DNA
aagaaatccacttaaaccactgatgtgctagggtttcata

SEQ ID NO: 18101 - protein, 583 aa, Flavonifractor plautii
MTQTQIHATISPCTPILSADPTVKEDAMLDQQKITILYCRLSNEDALDGESNSIQNQKEFLTRYAAEHGYTNLKILVDDGYTGTNFDRPGVQEGFALVKQGLVGCWLVKDLSRFGRDYLTVGQYTDIIFPSYDVRFVAVNDGVDSERGDSDGFAAIRNLFNEWYPRDTSKKVRVVFRQKGTSGKHLGKPPYGYRTDPTDKDHWIIDEDAAPVVKRIFDLAIDGKGPEQIARILEKDKVLTTKALYAKQSENHPDPKKRKKMPERPYHWIGQSVAGILERMEYTGCTCNFKTYSKSYKLKKRIPNAIEDMCIFPDTQEAIVSQAQWDRVQELRKNKRRPTKAERQGLFSGLLFCPDCGNKLHFATCKSFDGKQDHYVCSSYKSGRGTCSAHYIREDVLRELVMERIRAVNAYIRQDVEGFQEEWLQCRRSDQERNIREDRKRVEQAKKRLADLDVLLSRLYEDFVLGDLSKERYKKMTADYEAEQERLKLEIEVTEEWLETQETMSADVDAFVALTQKYVDVPELTPTIVNEYIKKIEVFAPDKSSGKRVQKVKIHFNFVDDVEIPVVSELVVAKSTPGRRKTA

SEQ ID NO: 18102 - DNA, 50 bp, Flavonifractor plautii
  source 1..50: mol_type = genomic DNA
atagtaccttatcactattaagccttggcttaacagtgataaggaacgaa

SEQ ID NO: 18103 - DNA, 40 bp, Flavonifractor plautii; identical to SEQ ID NO: 18098
  source 1..40: mol_type = genomic DNA

SEQ ID NO: 18104 - DNA, 50 bp, Flavonifractor plautii
  source 1..50: mol_type = genomic DNA
atagtaccttatcactattaagccctggcttaacagtgataaggaacgaa

SEQ ID NO: 18105 - DNA, 40 bp, Flavonifractor plautii; identical to SEQ ID NO: 18100
  source 1..40: mol_type = genomic DNA

SEQ ID NO: 18106 - protein, 626 aa, Faecalibacterium prausnitzii
MRNEKITPLYERLSRDDELQGESNSISNQKQMLEDFARRNGLPNPTHFTDDGISGTRFDRPGFLAMMEEVEAGRVEAIVIKDMSRLGRDYLKVGQVMEVLRQRGVRLIAINDGVDSLKGDDDFTPFRNIMNEFYARDTSRKIRSVFKAKGMSGKHLTGTVIYGYLWDEKREHWLVDEEAAEVVRRIFSLTLEGYGPYQIACKLSADRIEIPVVHLARFNEGVNRSKPVKDPYGWGSSTIVNILKKREYLGHTINFKTRKHFKDKKSHYVSEDEWTIFENTHEAIIDQQTFDLVQKIRSNVRRYPNGWGEAAPLTGLLYCADCGGKMYVHRTNNGKRISQYTCSNYTKVPCGTLCLTQHRINESAVLTLVSDTLRAIAEYSRNDRTEFIHTVQETQVAQQSADISKKRRHLATAQKRAGELEKLICKIYEDNALGKLPDTRYKALDAQYAKEQDALEIEIAELEKAVTGYEQSQKSAEKFIALIDKYENFDTLTNTMLNEFVEKILVHERSRKGSQDTTQEIEIYFNFLGRYIPPSLQPVPLTPEEQEELRKREERKDRLHQNYLKRKASGAQKRYEDKIKAKKKAEMDAKKALIRAEDMKKGVFSTIGQLPKEEPRKGSIAASAAV

SEQ ID NO: 18107 - DNA, 50 bp, Faecalibacterium prausnitzii; identical to SEQ ID NO: 2337
  source 1..50: mol_type = genomic DNA

SEQ ID NO: 18108 - DNA, 40 bp, Faecalibacterium prausnitzii
  source 1..40: mol_type = genomic DNA
taaaaataattctgcgtccggtggggctggttacagcttt

SEQ ID NO: 18109 - DNA, 50 bp, Faecalibacterium prausnitzii
  source 1..50: mol_type = genomic DNA
aaaagtccttgacaatttgtctctagtgatatatgctctaagtgacttct

SEQ ID NO: 18110 - DNA, 40 bp, Faecalibacterium prausnitzii
  source 1..40: mol_type = genomic DNA
taaaaaaaattttgcatctagtgttgctgcttacaagttt

SEQ ID NO: 18111 - protein, 502 aa, Anaerobutyricum hallii
MEFIREDCIYARQSVDRKDSISIESQIDFCKYELKGGSCRVFKDKGYSGKNTDRPEFQKLLGEIRKGKVRRVIVYKLDRISRSILDFATMMELFQEYDVEFVSSTEKFDTSTPMGRAMLNICIVFAQLERETIQKRVTDAYYSRCLKGFHMSGQAPYGYQLEPTVVEGIRTKKMVADPVAADHVRLMFEMYAESETSFGDITRYFEEHDIKIYGKSMFRTFLSQLLRNPVYAQADLELYEFFKSQGAAIVNDASDFAGTNGCYLYQGRDVKEDKDRCLKDQILVIAPHEALISSDTWLKCRKKLMANTTFQQGRKPKNTWLAGKIKCGHCGYALKATHVPNSTGYFRCTKRTENKGCPGCGKIRKEEFEQFIFSAMQEKFKDFQILHGREEKVNPKLTAYQVELAQVEAEIEKLLDTLTGANATLLSYANKKIEELDTRRQTISKAIAELSVETISPQQIKKLSYYLDNWDSIDFDDKRKAADGLISTIKATSDRVQIEWKI

SEQ ID NO: 18112 - DNA, 50 bp, Anaerobutyricum hallii; identical to SEQ ID NO: 2062
  source 1..50: mol_type = genomic DNA

SEQ ID NO: 18113 - DNA, 40 bp, Anaerobutyricum hallii
  source 1..40: mol_type = genomic DNA
agtatataaaaagaatcggttacaatctattttgttatca

SEQ ID NO: 18114 - DNA, 50 bp, Anaerobutyricum hallii; identical to SEQ ID NO: 17534
  source 1..50: mol_type = genomic DNA

SEQ ID NO: 18115 - DNA, 40 bp, Anaerobutyricum hallii
  source 1..40: mol_type = genomic DNA
attgtattaaaaaaatcaaccaagatttattttgttatca

SEQ ID NO: 18116 - protein, 513 aa, Tissierella praeacuta
MAMDRVCIYLRKSRADEEAEKYGERETLEKHRKILLKVAKEMSLNIIKIREEVVSGESLIHRPEMLELLKEVKNKEYDAVLVIDMDRLGRGNMQEQGLILDTFKESKTKIITPRKTYDLQDEFDEEYSEFEAFMARKELKIINRRLQRGRIRSVEEGNYLAPAPPFGYQIEHDGRIRTLIPHPEQAPIVKMIFDLYINHGMGGGKISNKLNELGYKTYMGKNWSSSLVLNVIRNEVYAGKIQWRKKEYKPSNNLSGVEVKKLPREKWISVKGKHEPLVSKETFKKAQEILNKRSHVPYNTRITNPLAGLIICAKCGTSMVYRPYGKIDPHIVCYNTNCDNKSSKFKFVEEKLLEGLKNWLEQYEAEWDRFQSTENLCEDNNIIKMHKLALNRLKNELKELETQKNNLHDLLERGIYDIDTYLERSQSIAERIENTKLSIKNTSKTLSLEEQSMNAQKNIIPTVKKVLDLYIKTDNAEQKNNLLKTVIDKAIYNKEKKQRNDEFTLVLYPKLQK

SEQ ID NO: 18117 - DNA, 50 bp, Tissierella praeacuta
  source 1..50: mol_type = genomic DNA
tatggataatatagtaatggttattcattgcctttaatagtttatccatt

SEQ ID NO: 18118 - DNA, 40 bp, Tissierella praeacuta
  source 1..40: mol_type = genomic DNA
aatatctaataggtttatttcattgccttccttgtctgtc

SEQ ID NO: 18119 - DNA, 50 bp, Tissierella praeacuta
  source 1..50: mol_type = genomic DNA
tatggataatatagtaatggttattgattgcctttaatagtttatccatt

SEQ ID NO: 18120 - DNA, 40 bp, Tissierella praeacuta
  source 1..40: mol_type = genomic DNA
aagatctcttatttttatttgtttgttttccttgtctttc

SEQ ID NO: 18121 - protein, 471 aa, Streptococcus dysgalactiae
MRKVAIYSRVSTINQAEEGYSIQGQIEALTKYCEAMEWKIYKNYSDAGFSGGKLERPAITELIEDGKNNKFDTILVYKLDRLSRNVKDTLYLVKDVFTANNIHFVSLKENIDTSSAMGNLFLTLLSAIAEFEREQIKERMQFGVMNRAKSGKTTAWKTPPYGYRYNKDEKTLSVNELEAANVRQMFNMIISGYPILSITNYARDNFIGNKWTYTKVKRILKNETYKGLVKYKEQTFLGDHQAIIDEKTYDKAQIALANRTDKTTNARPFQGKYMLSHIVKCGYCGAPLKICTGRVKSDGTRRQTYVCINKTDYLARRGVNSYNIPKICNSGRYEKSHIEKYVIDILYKIQHDKEYLKKIKKDDNKIDIEPLKKEIEIIDKKINRINDLYINDLIDLPKLKKDIEELNHLKDGYNKAIKLNYLDKKNEDSLEMLMDNIDIRKSSYDVQSRIVKQLIDRVEVTVDNIDIIFKF

SEQ ID NO: 18122 - DNA, 50 bp, Streptococcus dysgalactiae
  source 1..50: mol_type = genomic DNA
aagcattatttagggcttgctactgtaataggcgtacctaaaaaacgctg

SEQ ID NO: 18123 - DNA, 40 bp, Streptococcus dysgalactiae
  source 1..40: mol_type = genomic DNA
gttggtatttatagccactgtaataattgtgaatcacctt

SEQ ID NO: 18124 - DNA, 50 bp, Streptococcus dysgalactiae
  source 1..50: mol_type = genomic DNA
aagcattatttagggcttgctactcaaataggcgtacctaaaaaacgctg

SEQ ID NO: 18125 - DNA, 40 bp, Streptococcus dysgalactiae
  source 1..40: mol_type = genomic DNA
gatgatatttatacccattcaaatagttgtgaataaaatg

SEQ ID NO: 18126 - protein, 584 aa, Amedibacterium intestinale
MKEVEVIKARNDLQTRTRGKTIELMRVGAYCRVSTDSADQLNSYKSQVAYYTDMIKKNKEWVLADIYADEAITGTQVAKREDFQRMINDCMNGEIDMVITKSISRFARNTLDTLKYVRMLKERNIAVYFEDEKINTLTMDGELLLVVLSSVAQQEVENISANVKKGLKMKMKRGELVGFQGCLGYDYHKDTKTITVNEEEAEIVRYIFNRYIEGAGGSVIAHELENLGYKTKYGSSTWVQSTVIGIIKNEKYKGDLLLGKTFTVDPISKRRLENFGEEDKFYIRNHHEPIISEEVFEKAQEILARRNVNRGKIGEGNTKREKYSRKYAFSCMLECGFCGGTLTRRNWHSSSQYSKVIWQCVTATKKGKKFCKHSKGIPETAIEEAFVESYRLLCDDNKDVLEEFLQRMDDTLSSSATSKQLAKAEKEIDALEKKKSKLVDMRLEEIIDKETYESKYADLVSKQEQLVEERQKLQETSDNEKDIKKRLKEFKKTLEQNELLDKFDRYVFESIVEKVIVGGLDENGNVDPAQLTFVYKTGLKNSVDGAKFKPQRKNARGRHRTDELCSHDSNEVDKMCSDSSNDTC

SEQ ID NO: 18127 - DNA, 50 bp, Amedibacterium intestinale; identical to SEQ ID NO: 572
  source 1..50: mol_type = genomic DNA

SEQ ID NO: 18128 - DNA, 40 bp, Amedibacterium intestinale
  source 1..40: mol_type = genomic DNA
tttatttccccatacttttcatgttgagagcgtagtattg

SEQ ID NO: 18129 - DNA, 50 bp, Amedibacterium intestinale
  source 1..50: mol_type = genomic DNA
tgtgttccgatagtagtaacgacagatgtggagacttgtgtgttgctaca

SEQ ID NO: 18130 - DNA, 40 bp, Amedibacterium intestinale
  source 1..40: mol_type = genomic DNA
tgtatgtctccatagttaagatgtttagagcatagcattg

SEQ ID NO: 18131 - protein, 538 aa, Cytobacillus firmus
MQKDINNLAAVYVRVSTLKESQKDSPEHQKSICLQKAKMEDLEVRPEFIYEDRSTGTNIMERDDIKLLIEDAKKGYFSTVIFTSLSRFSRDSLDALALKRTLVDALEIRLISINDNYDSKENGNDEMIFTIMSAVNQKLSQQISVSSRAGIRESALKGNFTGSTAPYGYRKITKVDEKSKNKVKTLEVDDKKADIVRKIFNLYINGMGEKKIIEYLNHEEIPSPRNEKWGITTVQRMLQNEAYTGRNVHGKYTVKKVTDVSDVQNRRNKLVQVPKEKWERNEQIEWEPIITDKIFEDAQKIRLNRGGGKRGGVRNVKVNPFSGLVKCAHCGSSYVSMKSGKVGKKGQEYRYLICSSRRRIGTKGCINDLWAPFEEFKEGVLQTIKLELEKKVNIDEVSAGLEIPTTNDEKANKNKRKKLEGQLKQNRTLLMNLRKEFNLEKIDKGQFEFEKETYEAEIKDIQEELKNLEETSKTTNNLDYIKSQVHDGLQRLVNLNFVEIDELQLVLKQLIEVITVNKDGVVLIRTPLGTIELENLQL

SEQ ID NO: 18132 - DNA, 50 bp, Cytobacillus firmus
  source 1..50: mol_type = genomic DNA
agttcgttttcaaacccgattacgaatgtaatgttgtttgaaaacgtaaa

SEQ ID NO: 18133 - DNA, 40 bp, Cytobacillus firmus
  source 1..40: mol_type = genomic DNA
ggttcggaaccatatttctaatgccatgcaaaagcttggt

SEQ ID NO: 18134 - DNA, 50 bp, Cytobacillus firmus
  source 1..50: mol_type = genomic DNA
agttcgttttcaaacccgattacgggtgtaatgttgtttgaaaacgtaaa

SEQ ID NO: 18135 - DNA, 40 bp, Cytobacillus firmus
  source 1..40: mol_type = genomic DNA
ggtttggaaccatatttctggaacctagagaaagattgga

SEQ ID NO: 18136 - protein, 450 aa, Heyndrickxia oleronia
MLFLKAAIYIRVSTQEQVENYSIESQKERIEAYCRSKDWTIYDTYLDPGFSGSNINRPGLQRMLSELPNIDVVVVYKLDRLSRSQKDTLELIEAHFLKNNVEFVSITETLDTSTPFGKAMIGILSVFAQLERETIAERMRMGHIKRAENGYRTSGGDYDPSGYSRINGELVPKEDEVKHIQTAYNLYEQHLSITKVQKHLKDLGFPVWRFRRYNDILRNKLYCGYVSFAGKYYKGRHEPIITEEQFNRVQVLLSRHKGNNAHKAKQSLFSGLITCGRCGEIYHTYQTNDKGKTYRYYLCRARRFPSEYDKKCMNKTWNSSKLEDLIINEINELIKNKETINDNYKIIDYDKLISNVDERENRILDLYELGRIDKNKLDQRIQSLEDEKHELIKKKENQNSQQQNVLTPKELKKYVSDLYTADFNKKQSIIQKLIKQIYIHGENIEIAWNF

SEQ ID NO: 18137 - DNA, 50 bp, Heyndrickxia oleronia
  source 1..50: mol_type = genomic DNA
tttcggtattcatatccggcgattcaaacggctggtaatgaatactaaaa

SEQ ID NO: 18138 - DNA, 40 bp, Heyndrickxia oleronia
  source 1..40: mol_type = genomic DNA
ttctgtttttcctgctccacataccgcccaaaccaaaagc

SEQ ID NO: 18139 - DNA, 50 bp, Heyndrickxia oleronia
  source 1..50: mol_type = genomic DNA
tttcggtattcatatccggcgattttaacggctggtaatgaatactaaaa

SEQ ID NO: 18140 - DNA, 40 bp, Heyndrickxia oleronia
  source 1..40: mol_type = genomic DNA
tgctttaaatccttctccatttaccccacaaaccaaaagt

SEQ ID NO: 18141 - protein, 574 aa, Lachnoclostridium phocaeense
MARIRKPKPSAKLATSHINSAPPKWLICVYIRLSKEDTRNISRQVKNEQQLKSESIKNQKSILTSWIEDYFEPGTYEIVGFFEDDGLTGTDDTREDFMRMIGTIERGEGNCVVVKTLSRAFRNYSDQGYYLEEYFPSRNVRFISTMDSFVDTYTDSEAIYNLDVPMYGVLNDRFAATTSRAVRRTFDDKRSKGNFIGAFPPYGFLKDPENKNHLILDPDTAPIKVQMKDWLLHEGMSLGGVARRLNAMGIPNPTKYKRQKGWKYCNPHVEDNDGLWCSTTVRNVIFSLMNLGHMVQGRQKVVSYKIHDKVAVPEDDWFIVENTHEATFTQEDYDALCALFERDTRTANNSGTVHKFAGLLKCGKCKKAMHRSHAKNHTYFKCGTRKNKSTEACNVKSIRQDKLEQAVLGAIQGQIKLVESLAAIVDKINEAPEVDNSSKRLEKMLTDKGRELQRIRSVYDSLYGDWKLGEISETEYRRMRDRYSVEMSQMEAAIENIKEELKSLGDGVTTENPLFKEFLQYRNITELNRSVLVSLIDVIYVYENNEITIKFQFEDELLRVMEFIEQNNGGRKTA

SEQ ID NO: 18142 - DNA, 50 bp, Lachnoclostridium phocaeense
  source 1..50: mol_type = genomic DNA
ggtagcggataaatagctgccgccaccggagcaatcatttatccgctacc

SEQ ID NO: 18143 - DNA, 40 bp, Lachnoclostridium phocaeense
  source 1..40: mol_type = genomic DNA
ggccagcatcttggcagccacggcgccggcagccacccgc

SEQ ID NO: 18144 - DNA, 50 bp, Lachnoclostridium phocaeense; identical to SEQ ID NO: 18142
  source 1..50: mol_type = genomic DNA

SEQ ID NO: 18145 - DNA, 40 bp, Lachnoclostridium phocaeense
  source 1..40: mol_type = genomic DNA
aaccaccatcatcgcagccacagccccagcagccaccctc

SEQ ID NO: 18146 - protein, 471 aa, Enterobacter cloacae
MKQKLYSYQRWSSAVQSDGTTKARQTFAAEEYAKSNDLEVVEIVDAGISGFKSVNSKSGALSKFLEAVDEGLIPNNAYLFVESLDRITRDEIDVALELFMGILRRGITIVTGMDNKVYTHAGIKGNPIDLLTSIILFTRAHEESKTKQNRTNGNALAMIRRFQSGEPTTIKAVGSHPWWIDCTTDKFEAVRRHPTLWQPAQDAINMFMEGVSVFKVVEYLDKTYPHMYKGKAWKTANIRKLRFNKAVYGLREITVDGKDYALPNYFPALITEGQFLRLEKIRETTKYIGKVGEGKTVTDEEGNSKVVAERNNINLLAGMKLFRCGHCGGTMMAMRHGDTIRYLCEKGRGHQNDCKTWSLPGLLVEHTLMLVTTIAYINIQRKGGVEKEDYTAQIASTEQLIEDISKKISNSTKLVLAGLDDVDEVIEQIQELKESRSNLVLELEVLQRKQLLAQDNTFEVTCSPLINTPRC

SEQ ID NO: 18147 - DNA, 50 bp, Enterobacter cloacae
  source 1..50: mol_type = genomic DNA
agatgtgcagaaatccatgcagggaatcctaaacgaatttctacacatta

SEQ ID NO: 18148 - DNA, 40 bp, Enterobacter cloacae
  source 1..40: mol_type = genomic DNA
tattattagccaccccggcaacccgaagtacccaattgat

SEQ ID NO: 18149 - DNA, 50 bp, Enterobacter cloacae
  source 1..50: mol_type = genomic DNA
agatgtgcagaaatccatgcagggcttcctaaacgaatttctacacatta

SEQ ID NO: 18150 - DNA, 40 bp, Enterobacter cloacae
  source 1..40: mol_type = genomic DNA
tgtgatcacccacctcggcctcccaaagtgctcaagtgat

SEQ ID NO: 18151 - protein, 503 aa, Mobiluncus curtisii
MTTRAAIYLRISLDAAMDGLAIDRQRQDCEALAEQRGWDVVHTYVDQSISASKKDVDRPDYDAMVASFERGEIDAIICWDLDRLTRQPWQLEEWIDRAEEQGLKLVTANGDADLATDGGRMYARIKAAVARGEIERKSMRQSRAQQQRAEQGRWYSGGVRPIGYTSTGEIIPSEAAAVLGMFRAVERGNSMRDIARALSGVDQPGLPDIPTTPRHMYTVVTERNARRRAEGQEEKPVPDAQPWAYTSLHSILRNPVYAGYSTYKKAKRKGVKNKYRRVTHIVRDPDTGEPVKGQWEPIVTPDLWWRVQNVLDDPDRLTNKERRNTRRHLGSGLYVCDECGNPVRTHADRYRCAACGLVRTHSVDDFVLAVIRARLGRDDLADLLPTVDDDEVNAIDDELAELRAKLARVQADYDEELIEARDLKRARNRYEPQIEKLEARRARLAGASALLDTTGYASPVDAFDNAELAVQRRVINTLCQVRLRRGVRGTKTFNPESVQIVWN

SEQ ID NO: 18152 - DNA, 50 bp, Mobiluncus curtisii
  source 1..50: mol_type = genomic DNA
atagttatttatcgacgacactccgtggagtttcgtttcaatgtaacctg

SEQ ID NO: 18153 - DNA, 40 bp, Mobiluncus curtisii
  source 1..40: mol_type = genomic DNA
catgcaggatggcgacatcgtagacttcaagttcaacgtc

SEQ ID NO: 18154 - DNA, 50 bp, Mobiluncus curtisii
  source 1..50: mol_type = genomic DNA
atagttatttatcgacgacactcctaggagtttcgtttcaatgtaacctg

SEQ ID NO: 18155 - DNA, 40 bp, Mobiluncus curtisii
  source 1..40: mol_type = genomic DNA
catgcagaatgccaatatgtaagaactcaagtccaaggtc

SEQ ID NO: 18156 - protein, 571 aa, Schaedlerella arabinosiphila
MVIFIYSRKSKWTGRGESIENQIAMCREYIQCHIEGADQAEIVEYEDEGYSGRNTNRPQFQSMMQSVKKGRCDYLVCYKLDRLGRNIADLANLIEMLNQWDVAFISIKEQFDTSTPIGKAMIYFAGVLAQMEREQIAERVRDNMIMLARKGRWLGGNTPLGFRAESEENVSINGKRKKSFCLVTDEEEIKIVRFIFQEYLQKQSLVGIVKYFLSHGILTKRGKEYKTNTIKDILTNPVYCTADREAYEYFWNLGCQVCMDAEEADGRYGLISYAKTTSAQYKNKENAPEKWIISLGKHQGIVSGKEFAKVQKLLERNRAGGDSWHKPQNQAALLPGLIYCSCGHRMRPKNYASNQLTEQGERKFSYLCTWKDMTNGKKCSVSNVQGNTLDALVCEEVLRCTEENSDFGRMLETAWEQIRESKEEKVSAADLLEQEIQKRKKEVGNLISVLARTGGDEEFIRRIEGEVRKLNAECTALEQEKQESEKACRVMRGGKEQLEFLKDRISSFRALYHTLSVPEKREYLRIILDRVLWDGERAHIFICGSRSTGRECRAAETDDESPPLPSEETGE

SEQ ID NO: 18157 - DNA, 50 bp, Schaedlerella arabinosiphila
  source 1..50: mol_type = genomic DNA
tgttgccgccgcatgcccgtcgcattgccgatggggcggcagcggcaact

SEQ ID NO: 18158 - DNA, 40 bp, Schaedlerella arabinosiphila
  source 1..40: mol_type = genomic DNA
aatggacagcagggtagatttgccgcaccccgaaggcccg

SEQ ID NO: 18159 - DNA, 50 bp, Schaedlerella arabinosiphila
  source 1..50: mol_type = genomic DNA
tgttgccgccgcatgcccgtcgcagcgccgatggggcggcagcggcaact

SEQ ID NO: 18160 - DNA, 40 bp, Schaedlerella arabinosiphila
  source 1..40: mol_type = genomic DNA
gatggaaagcggggacgctgccccccgccccgaaggcccg

SEQ ID NO: 18161 - protein, 521 aa, Pseudomonas guariconensis
MPTAFSYARFSSSVQRKGSSLERQEKMIADWLMQHPEYQRSELRFRDLAKSGWKGEHIKDGGGFAKLLAAVEHGAIQSGDVVLVEAIDRAGRLHTGDMLGDVILPIVKAGVSIITLDDGAVYDWASINTPQSHLLLAKIQAAQQYSDNLSRRLKGSYDSRRRLAKEEKKTPKRHTPVWLTSKGEVIEEIAAQVKLAFELYTSGLGKAVIAKRMRDSGVAALAKTSGPGVEGWLRNEAAIGRWNGVQVYEPIVDLSLYQLAQLEREKRKTAPRAKTATHFLVGLVKCGGCGNNFIMRTIQGVQVSMRCRKRQELNGCGNKKVIPKEIIDTIYRLSSATAALDVVNREHSGVNEKAIVAAETRLLEISKQMQELAAAIVAIGFIPEVQAQLEQKQEEREAVERELTLLKTTIVPAANGWVEQGKVWELERNDPQRLAAMLRSVGYSITIYPDARIVSSHQNAIYRYAGVDRRENKYKLMQDDKLTLVLKGAEQDYPYWEPFEEVAGEVTWNDEDYENLRQQYE

SEQ ID NO: 18162 - DNA, 50 bp, Pseudomonas guariconensis
  source 1..50: mol_type = genomic DNA
gaagtgtacatgtgaaatagttgcttgtagtaattccgtatgtttacaat

SEQ ID NO: 18163 - DNA, 40 bp, Pseudomonas guariconensis
  source 1..40: mol_type = genomic DNA
tttttgcatgagccgttttttgtaggtgctgacggtcttg

SEQ ID NO: 18164 - DNA, 50 bp, Pseudomonas guariconensis
  source 1..50: mol_type = genomic DNA
gaagtgtacatgtgaaatagttgcccgtagtaattccgtatgtttacaat

SEQ ID NO: 18165 - DNA, 40 bp, Pseudomonas guariconensis; identical to SEQ ID NO: 3615
  source 1..40: mol_type = genomic DNA

SEQ ID NO: 18166 - protein, 528 aa, Selenomonas ruminantium
MARKITTIPATINKFTAAPIASNVKRKVAGYARVSTDTDDQISSYTAQVDYYTKYIKERKDWDFVGIYTDEGVTGTSTKKREGFTRMIKDALAGKIQLIITKSVSRFARNTVDCLTTIRKLKAAGVECYFEKEGIWTLDSAGELLITVLSSISQEEARSISENTTWGQRKSFADGKARVPYKRFLGYDRGEDGNLVVNPEQAKVVKLIYKLFLTGLSYNAIGRELMKRGIKSPAGKDRWYSNTVQSILTSEKMKGDALLQKKFTVDFLTKKVKKNEGEIPQYYVTGNHEAIIPPATFDLVQAEIERRKNGRGKGGYSGSTIFSNRIKCGACGHWYGSKVWHSNDKYRRVVYQCNNKFAGAKKCPTPHLTEREIKEAFVKAVNKLLEGKDDMLENIRLVQKQICDTSDLEAESQRLMDEMNALSDRVQKCISENARIAQDQSDYQKRYDELVNRYETTKASYDRTEKSIKDRHAKAERLGAFVKALAAQDASVTEFDEGLWGTIVDFMTVYSKEDISVTFKDGTEIHIG

SEQ ID NO: 18167 - DNA, 50 bp, Selenomonas ruminantium
  source 1..50: mol_type = genomic DNA
tgtatcaatattattcaactaatggacaaaatcatagccgaattgataca

SEQ ID NO: 18168 - DNA, 40 bp, Selenomonas ruminantium
  source 1..40: mol_type = genomic DNA
gtgattaacaagattaatggagtgtatgttttttgagacg

SEQ ID NO: 18169 - DNA, 50 bp, Selenomonas ruminantium
  source 1..50: mol_type = genomic DNA
tgtatcaatattattcaactaatgtacaaaatcatagccgaattgataca

SEQ ID NO: 18170 - DNA, 40 bp, Selenomonas ruminantium
  source 1..40: mol_type = genomic DNA
gtcttcaacaagacaaatgtatttttttttttttgagacg

SEQ ID NO: 18171 - protein, 554 aa, Clostridium tunisiense
MKAAIYARKSVATEKGESIDNQIQLCKEYGSRLGIKEFIIYKDEGFSGGNINRPSFKNMMKDAKEKKFNVLICYRLDRISRSVADFSSTLEELQGKNIDFISIKEQFDTSTPIGRAMVYISSVFAQLERETIAERIRDNMMELAKTGRWLGGTTPLGYKSEAVEYVDENGKNKKMYKLIEVPEEIEIVKLIYDLYLKKKGFPSVATYLCKNNYKGKTGGEFSRTSVEQIIKNPVYAIADGRIEKFFQNHGAITYGDFNGTNGVMPYNKRENGKKDKPINQWIVAVGTHKGIIPSKLWIKCQAINNENVEKSSPRSGTGNKFLLSGMMVCGTCGSGMSSWSKKNPKTGDIARYYRCNLKARAASRCDSKMLNAEIAEDLILSKITAIDINQLIAKIEEDNSEVAAHSEIDENILKINKTIDDNKKSIQGLIRKLALLEDLPIINLIQDEINKLNVENKKLEEELLGLKSQKEPMETLNEYIEYINESLKIFKASMNLIKETAKKREVLKAIVESIVWDSKNEELIVNISGSSSKLPEGVVRRRNNNKLCFGEGFR

SEQ ID NO: 18172 - DNA, 50 bp, Clostridium tunisiense
  source 1..50: mol_type = genomic DNA
aactgtgctttggagaagggtttcgatgcacctacttcagaaacacaggt

SEQ ID NO: 18173 - DNA, 40 bp, Clostridium tunisiense
  source 1..40: mol_type = genomic DNA
taccacaggacagggagcagataaaaccatgcaacaacta

SEQ ID NO: 18174 - DNA, 50 bp, Clostridium tunisiense
  source 1..50: mol_type = genomic DNA
aactgtgctttggagaagggtttctttgcacctacttcagaaacacaggt

SEQ ID NO: 18175 - DNA, 40 bp, Clostridium tunisiense
  source 1..40: mol_type = genomic DNA
caccaaaggacaggcactatttaaaaatatgcaaaaatta

SEQ ID NO: 18176 - protein, 464 aa, Enterococcus faecalis
MKRAALYIRVSTMEQAKEGYSIPAQTDKLKAFAKAKDMAVTKIYTDPGFSGAKMERPALQEMISDIQNKKIDVVLVYKLDRLSRSQKNTLYLIEDVFLKNNVDFISMQESFDTSTPFGRATIGMLSVFAQLERDTITERMHMGRTERAKQGYYHGSGIVPLGYDYVDGELIINDYEAQIIQEIYDLYVNQGKGQQYITKRMVAKYPDKVKTLTIVKYALTNPLYIGKISWDGKVYDGHHTPIIDKSMYDKAQEIIARKAQKGGEQHGNQLGLLLGITYCGKCGAKVFRYVSGGKKYRYNYYMCRSVKKMLPSLVKDWNCKQPSLRQEVVEKKVIDSLKSLDFKKIERELKQVENKTKSKITTINNQISKKHNEKQKILDLYQYGTFDVTMLNERMKKIDNEINALTDNISNLEGTKSESLINKLETLKTFNWETETTENKILIIKEFVERIELFDDEVIIKYKF

SEQ ID NO: 18177 - DNA, 50 bp, Enterococcus faecalis
  source 1..50: mol_type = genomic DNA
tttaggtacatagtgttatttacgctaataaacaagactatatacctaaa

SEQ ID NO: 18178 - DNA, 40 bp, Enterococcus faecalis; identical to SEQ ID NO: 1138
  source 1..40: mol_type = genomic DNA

SEQ ID NO: 18179 - DNA, 50 bp, Enterococcus faecalis
  source 1..50: mol_type = genomic DNA
tttaggtacatagtgttatttacgcaaataaacaagactatatacctaaa

SEQ ID NO: 18180 - DNA, 40 bp, Enterococcus faecalis
  source 1..40: mol_type = genomic DNA
tgcacttgaataaccaatacattcattcagagaaccttta

SEQ ID NO: 18181 - protein, 556 aa, Faecalicatena orotica
MAMMNEMEYRTIGSALAGGYRAAVYCRLSKDDDLQGESASIANQRDMLEKYCEKQGWEVVAVYQDDGFTGLNMERPDLQRMLRAIERRQINLVITKDLSRLGRNYLQTGHLIEDFFPRNGVRYIAMNDGIDTLRDNNDIAPFKNILNEMYSKDISKKVHSSYLLKAQKGQFTGCLAPFGYRKDPEDKNHLLIDEETAPIVRLIFGYALNGHGPNYIRRRLEEEKIPCPTWWNRERGLRNTRTKWEKKDPENGRYMWDFSVIKDLLMNPVYTGAIASQKKDYRFKIGTIGEKKPEDWIVVEGQHEPLIDRMSFDIVQNKLKSRQRPGQTNEISLFAGLIKCGECGKSLTVRYTNAKHPQQIYSCKTYNAFGKNHCTQHRIDYDTLYSHVLRKIRECARAALMDGEAVADRLTNTCEAEQREQREAMERSLTRDEERIEVLDKMVMRLYEDMIAGRISEQNFNTMLEKTQTEQTELKTKVSEGRKRLSDEVQLANDAKQWVEAIQEYANITELDAATLNRLIKEIVVHERIDEDKTRHISIEIHFNLKPIPEVEQVTA

SEQ ID NO: 18182 - DNA, 50 bp, Faecalicatena orotica
  source 1..50: mol_type = genomic DNA
ttttacacctaattggggatgaaacagttcatggctaattaaagggaaca

SEQ ID NO: 18183 - DNA, 40 bp, Faecalicatena orotica
  source 1..40: mol_type = genomic DNA
tgaatcccctgagatgggacagttcatggcaggcggtaaa

SEQ ID NO: 18184 - DNA, 50 bp, Faecalicatena orotica
  source 1..50: mol_type = genomic DNA
ttttacacctaattggggatgaaatagttcatggctaattaaagggaaca

SEQ ID NO: 18185 - DNA, 40 bp, Faecalicatena orotica
  source 1..40: mol_type = genomic DNA
ttaatcccctgagatgggttagtcctttgcaggctatatt

SEQ ID NO: 18186 - protein, 593 aa, Pseudomonas sp UW4
MPLCFPYVRFSSQKQRDGNSVVRQSERIESFVSRHNLTVDTRLEDHGISSFRGANAKKGQLSGFLQRVRDGEIPNGSYLLIENWDRLSRQVLDASIEIFSDLIRSGIKIAVLDEDTVYDDLTSNSFIRAIVQFERAHSESLRKSDMSKASWRAKHKAMDKGTIATEKCPQWLVVKDGAWCKLDDICLHIETMFSLAQTYGVAETGRRLNAQFGTSYKTHQIQYLLRNRRLIGEHSPVELSKEHGKNVPTGQVVEHYYPQVIPPATFEEVQTILKSRKPFSGRQDATNLNIFRNLLVCAECGGSTRFMLRSGKEFYYCTASMTGGCVDDQIRSIRGENLRRVLFKFEHWTAIRDYIAAGSDVLKTLKKEETVAVAKLNRLEIKAEGLKNKFAAEDDEDKAETYVGLLTDTRKAVATANADIDRIKQELANLDGAFALSDSNVDSFESMLTSDSEQARTDRQRLNRYLRGIFLKLELHFPTRRLVTQPIPALANRISPVVAYVEQPKDKRTGDDYGHHTWISKVQQTLIIKRIKARLRRAGIPSPTFEQVKPIYESVAYSLLPKRKPRCKNPPKVADLPTELEGVVWKAPDPFLK

SEQ ID NO: 18187 - DNA, 50 bp, Pseudomonas sp UW4
  source 1..50: mol_type = genomic DNA
tcggtacgaattgttgagtacggccagctgtgatagattatacgtaccga

SEQ ID NO: 18188 - DNA, 40 bp, Pseudomonas sp UW4
  source 1..40: mol_type = genomic DNA
gcgtgcatagcaataaatgcagccgtgctcgcagccgcga

SEQ ID NO: 18189 - DNA, 50 bp, Pseudomonas sp UW4
  source 1..50: mol_type = genomic DNA
tcggtacgaattgttgagtacggcgtgctgtgatagattatacgtaccga

SEQ ID NO: 18190 - DNA, 40 bp, Pseudomonas sp UW4
  source 1..40: mol_type = genomic DNA
gcgtgcggcgcactaaattgtgccgcgctcgcccccgcca

SEQ ID NO: 18191 - protein, 585 aa, Enterococcus hirae
MKKNNVEIIKADSLVRRRGDNFERESKRVAAYCRVSSDSEDQKNSYESQVRHYKDYISQRSDWELAGIYADEGISGTQVGKRQDFQRLINDCVNGEIDYIVTKAIARFARNTLDTLKYVRMLKDMQIGVYFEEENIDTLTMDGELLLTILSSVAQQEVENTSAHVKKGLKMKMQRGELIGFQGCLGYDYDVETKQLSINKKEAKIVRYIFERYLEGIGGKVIARELDELGYKSPRGLDHWNDTTVLGIIKNEKYKGDILMGKTFTVDPISKRRLSNFGEEDKYYIKDNHEPIISKEDFEKAQEIRLRRAGNKKTAANVNGKRERYSKMYAFSSMLECGFCGSILSRRSWHCRSDYRKVVWHCVTSIKKGKKFCKHSKGLEELAIEGAFMEAYRKLYHSNENLMTDLLETIESELNDNSLNKELKRITNKLRTLLKKEENLVNLRLEGKISDTIYNEKYNEISSEKEFLAEEKVNIETTLKSEIDVKKRLTEFKHLLSSQKMLTEFDRAVFESIVEKIIVGGVNSDGEIDPAMLTIIFKTGETQNKDGKQFKSKRKNAKLETDKLCPQNSDEDKKLYSQGTDYTCG

SEQ ID NO: 18192 - DNA, 50 bp, Enterococcus hirae
  source 1..50: mol_type = genomic DNA
tgtattctcaaggaacagactacacacgtggagtgcgtagtgttgctaca

SEQ ID NO: 18193 - DNA, 40 bp, Enterococcus hirae
  source 1..40: mol_type = genomic DNA
tttattcccacaaacacatcatgtggaattagtggcgcta

SEQ ID NO: 18194 - DNA, 50 bp, Enterococcus hirae
  source 1..50: mol_type = genomic DNA
tgtattctcaaggaacagactacaatcgtggagtgcgtagtgttgctaca

SEQ ID NO: 18195 - DNA, 40 bp, Enterococcus hirae
  source 1..40: mol_type = genomic DNA
tttaattcaacaaatacttattgttgaattagtcacacta

SEQ ID NO: 18196 - protein, 624 aa, Faecalibacterium prausnitzii
MKAKKTDNGKITALYERLSRDDDLTGDSNSIINQKKLLEDYAKEHGFTNCVHFTDDGWSGANFDRPNWKRMIAAIEAGEVSHVLVKDLSRVGRDYLQVGFYTEVMFREHGVRFVAIANGVDSDKRESSEFAPFLNIMNEWYVRDSSRKIKSVLRAKGMSGLHTNSIGIYGYKKDPNDKNHWIVDDEAAEVVRRIYRMAIEGKGPYEIARILASEKVERPSYYLAQRGLGKHKTSYNPDEPYTWRGGTVADILSKPEYIGHTVNFRTYKESYKDKHSKMTPKEDLVIFENTQEAIIDKETWERVQTLRKTIRRTDTIGTANPLTGLMFCADCGAKMYNHRGKAGNARDWAGRPTGKKRPDRDEYNCSRYDLGNQHFDDYCTTHLIRTAVVNELLLEAIKEVCDYAQNNEAEFMAQVCSASEDRQAKAAKAIRQRKQRSEKRTDELSRLIRKLYEDNVNGRLSDKLFEQMLHDFEAELEGLTDSITQDQQELDRISRETVNAEKFLALVKKYTDFSELTPAMINEFVEKILVHQAEGKGASRTQEVEIFFNFIGKVEIPRKEIELTEEEKAALAEQERRRAKKAEYNRRYMEKKRRQWKEQQEREKEQQEALELPAASTEKGERIA

SEQ ID NO: 18197 - DNA, 50 bp, Faecalibacterium prausnitzii
  source 1..50: mol_type = genomic DNA
aaacccccttgacaaaacgtatcagaagctatatgctgtgaaagggggat

SEQ ID NO: 18198 - DNA, 40 bp, Faecalibacterium prausnitzii
  source 1..40: mol_type = genomic DNA
cccgccgaagcattttaccgaggaccttctacttcatgca

SEQ ID NO: 18199 - DNA, 50 bp, Faecalibacterium prausnitzii
  source 1..50: mol_type = genomic DNA
aaacccccttgacaaaacgtatcagtagctatatgctgtgaaagggggat

SEQ ID NO: 18200 - DNA, 40 bp, Faecalibacterium prausnitzii
  source 1..40: mol_type = genomic DNA
cctgacgcagcaccttcccgtgggccttctgcttaatgca

SEQ ID NO: 18201 - protein, 558 aa, Acidaminococcus intestini; identical to SEQ ID NO: 3086

SEQ ID NO: 18202 - DNA, 50 bp, Acidaminococcus intestini; identical to SEQ ID NO: 3087
  source 1..50: mol_type = genomic DNA

SEQ ID NO: 18203 - DNA, 40 bp, Acidaminococcus intestini
  source 1..40: mol_type = genomic DNA
ggaaaaggccgggatgaaaaaggaccgtccgggctgcttt

SEQ ID NO: 18204 - DNA, 50 bp, Acidaminococcus intestini; identical to SEQ ID NO: 11104
  source 1..50: mol_type = genomic DNA

SEQ ID NO: 18205 - DNA, 40 bp, Acidaminococcus intestini
  source 1..40: mol_type = genomic DNA
gcaaaaagcaggcaagaaaacagactgtcagggttgcttt

SEQ ID NO: 18206 - protein, 489 aa, Anaerobutyricum hallii
MKQPYNTTIYNTALYLRLSRDDELQGESGSIQTQRMMLRQYAAEHGLTVVDEYIDDGWSGTNFERPSFQRMIDDIEDGKINCVVTKDLSRLGRNYILTGQYTEIYFPSKGVRYIAINDNVDTINGESELAPFLNILNEMHARQTSKKVKAAMRTRFANGAHYGAYAPLGYVKDPDKKGHLLIDPETRWIVEKIFDLAVHGRGAASITRILVEEKVPTPGWLNYERYGTFANIYAGVPAEKAYAWTIAQVKSILKEETYIGHSVHNKQSNISFKNKKKVRKPQEEWYRVENTHEAIISEEVFQKVQELIASRRRKRRNGTTQIFAGLIKCADCGWSLAYGENKQNKNPYGYYHCSKNGQGLRQCSMHYIRYDVLYAYVLARLQYWSMLAQKDEDKLLKRLLNASDRERNSAKKKQAAELKKAEKRKAEVDGLFAKMYEDWSAGRITEYNFNMLSEKYQNEQKELETKIRQLHETMEAAVQTAADAEKWIA

SEQ ID NO: 18207 - DNA, 50 bp, Anaerobutyricum hallii
  source 1..50: mol_type = genomic DNA
aacggtatgtcaaccctgtggagctatccgaagcggaattttattccctc

SEQ ID NO: 18208 - DNA, 40 bp, Anaerobutyricum hallii
  source 1..40: mol_type = genomic DNA
gcaccacagacaaaggagctgaccgccgaacttctgaaca

SEQ ID NO: 18209 - DNA, 50 bp, Anaerobutyricum hallii
  source 1..50: mol_type = genomic DNA
aacggtatgtcaaccctgtggagcaatccgaagcggaattttattccctc

SEQ ID NO: 18210 - DNA, 40 bp, Anaerobutyricum hallii
  source 1..40: mol_type = genomic DNA
gcaccacagggaaaggagcaaagcacagcttttctgaaaa

SEQ ID NO: 18211 - protein, 522 aa, Erythrobacter sp
MRTLIYARYSSQLQNPRSVEDQIAACRKRADDEGWEVVAAFHDRAISGAAGIEDAQRPGLAALLAALDAGGIDQVLTESTDRLARHQGDAFAVRERIEYAGARLFTLMDGVVDEITGTIKGLFDARTRKDLAVRVRRGHKGNITMGRATGGVPYGYRKVARLDEAGEPVRGLREPDPDTAPIVQRIFRDYAKGQSARAIAAALNAEGIPSPRGGIWRASTIAGHRKEATGMLTNPVYIGQLHYGRTKMVSDPRTRRRSSRMGDGEVTIGQAPHLRLIENDLWQAVQDQLEARASTRPERQRRPKHLLSGLGQCGICGGTWVATRATYFGCGQHMGGKACTNTRLIRTSEYEERVLGELKEQMLAPDVVEAYLEEYRTEHARRAGELGRNRARIERRIGDAGRKVERLVAAIADGGAEFTAVKSALAAAQKELAEAEKERASIEALPQLALHPGLARQYRAAIEQLAVELKDEATRLEAAPRLRSLIARIVVTPSKGKRGVDLEIVRHIDEVLDLAQPDRRRA

SEQ ID NO: 18212 - DNA, 50 bp, Erythrobacter sp
  source 1..50: mol_type = genomic DNA
gatgtcgataacgcacaattcggttcggcacactacgcgttctgacaatt

SEQ ID NO: 18213 - DNA, 40 bp, Erythrobacter sp
  source 1..40: mol_type = genomic DNA
caaggccttgccatgcgcctccgcgaattcgtcggagtaa

SEQ ID NO: 18214 - DNA, 50 bp, Erythrobacter sp
  source 1..50: mol_type = genomic DNA
gatgtcgataacgcacaattcggtcgggcacactacgcgttctgacaatt

SEQ ID NO: 18215 - DNA, 40 bp, Erythrobacter sp
  source 1..40: mol_type = genomic DNA
cacggcctcgccatgcgcccgggtgaagccgccggagcca

SEQ ID NO: 18216 - protein, 537 aa, Coprococcus comes
MLKQQTKLRVRLYARLSKDDGDADKESNSITNQLQMLRYNAKEKGFEVIGEYVDDGYSGTTFNRPDLNRMIKDAMDDPEPSGIMVKDMSRFGRNNAMFMYYVEEIFPNNDILFIALNDDVDTRFDENEMMPFKSIMNEYYARDTSKKIRSVKKTTALSGGFCGSFAPYGYVVDPENKRKLLVDPDTAPIVKRIFELSKQGNSVHQIARTLCEDGVLIPRAYRAMKNGTLETSTGFKFPTDWVAKNVKMILENQVYLGHMVSHKTQTKSFKNKKPVAVPKEEWIIVRNTHEAIIDEETFELVQKFISVKKQPNKTGRPNIFVGLVKCPDCGRNMAFSNPNGREPRFRCRTYVRNSNLCTTHAISYEALQQIVMSDIQKHIKNMEALGDQFIQEMHELSEKGGSKKIKQFEKDLEVAEKRIAEIDSVIMKLFEQNALGKISDERFEKMSSAYESEQKELAQKRDELRTKIRAEEKKTQSTNQFLETIRKYETVTELNRSMLVELIDSIYVYQAEGTGKDRKQRVEINYRFLAGSQCGIA

SEQ ID NO: 18217 - DNA, 50 bp, Coprococcus comes
  source 1..50: mol_type = genomic DNA
cggggtctcaatgtggtatcgcctgatggaaaggtaacattgagatacca

SEQ ID NO: 18218 - DNA, 40 bp, Coprococcus comes
  source 1..40: mol_type = genomic DNA
tgggacacagttctttagcgatgacaatggatttatacag

SEQ ID NO: 18219 - DNA, 50 bp, Coprococcus comes
  source 1..50: mol_type = genomic DNA
cggggtctcaatgtggtatcgcctgttggaaaggtaacattgagatacca

SEQ ID NO: 18220 - DNA, 40 bp, Coprococcus comes
  source 1..40: mol_type = genomic DNA
agggacacagaactgaagcgttggccatggattcagacag

SEQ ID NO: 18221 - protein, 526 aa, Vibrio alginolyticus
MKVAAYVRVSSYNQKQTGDSISGQKEYIKNWAYLTGNEIIKWYIDESASAFRDLRRYNFNLMLQDIENPNSEIEAIVVYNLSRFSRNLKNQLTAQNLLETYNVRLISASEGIPDDHNTARLHTSFLGILNEHYSRQNSAVVTDRLQDTARKGYFCGGPIPLGYISVEIEGDTSKKRKVLAVNDDEAPIVKEIFSLAEKGIDGKPMGVKAISIYMNNKGVLNRGKRWNRNSIDRVLTRRDYFGEHIHGKNRDPRKGLEPIIVNVPAIINKDQFFNVQGGLKSRGLKNNENKCYRSDSLLVGMLKCSICNSNMVVVSGKGGKYKYYECSKKIRQDVKSCSSKMLPKPLIDNAVRRLLSERVITEDNINYIYKDLKSRIRNLVEKSARNVASINRRINNNNFKVNNIIEQIASRQLEPNAQINKYITDKRNELESLNRELVTALKGTKLPIKQFGQTQVAQLVKNLKEIVLTGDEARVKQILLILLKEVEITPQKKISILGFNMALVFLASHAKTGTDFSVPVIDTIWR

SEQ ID NO: 18222 - DNA, 50 bp, Vibrio alginolyticus; identical to SEQ ID NO: 15062
  source 1..50: mol_type = genomic DNA

SEQ ID NO: 18223 - DNA, 40 bp, Vibrio alginolyticus
  source 1..40: mol_type = genomic DNA
agctctctaaataagtggcggagagatagggatttgaacc

SEQ ID NO: 18224 - DNA, 50 bp, Vibrio alginolyticus
  source 1..50: mol_type = genomic DNA
ttcccgtaatcgacactatatggctagctacatgggacgattatgggaac

SEQ ID NO: 18225 - DNA, 40 bp, Vibrio alginolyticus; identical to SEQ ID NO: 3675
  source 1..40: mol_type = genomic DNA

SEQ ID NO: 18226 - protein, 519 aa, Vibrio alginolyticus
MNVVLYIRVSSVRQVNEGHSLEGQLKDLRAYCSANSHTIVKEYIESGNSAYKGSRPILNQMLNEVTSRVFNVDAVVVYSLSRFARDLLYQLSTIKRLEDSGIRLFSATENLPEDDTTFKYLTVMLGLVNEMNSKQNGINVQSRLTQTAKDGYFTGGRVPLGYRSVKCEEGKKNTRKKLVIVEEEAAVVRKIFELSLTGTSGKGLGIKAIADFLNRHGFKYRGSSWSNNTVHKILTSTTYYGEFVFRKKTDSPIVISVPAIIDKNKFIEVRKSLKERDAQQLWVKAIRSNNLLTGLLKCGICGGGMTVCSGKSGRYKYYACTKKLKKSVDLCQSKWVPKQELDQLVESTIIEHVINVTNIQAIIDEVKTELLSGRERHKGSLLRLTRKQRAIEQKFESTYEQVALRESLLDDSYASYIESLQTQRADIKKEIQYIKSQDRLPIRRFGEKHVEAFSSSIVELIQTKDEEAKKVLFSNLLRDVTVYADNIVMSGSKLKMLSMVSKMKGGTSNLVPPFISNWR

SEQ ID NO: 18227 - DNA, 50 bp, Vibrio alginolyticus; identical to SEQ ID NO: 15092
  source 1..50: mol_type = genomic DNA

SEQ ID NO: 18228 - DNA, 40 bp, Vibrio alginolyticus; identical to SEQ ID NO: 18223
  source 1..40: mol_type = genomic DNA

SEQ ID NO: 18229 - DNA, 50 bp, Vibrio alginolyticus
  source 1..50: mol_type = genomic DNA
tgccccctttcatatcaaattggctagcagataaggatgaatacgggcac

SEQ ID NO: 18230 - DNA, 40 bp, Vibrio alginolyticus; identical to SEQ ID NO: 3675
  source 1..40: mol_type = genomic DNA

SEQ ID NO: 18231 - protein, 575 aa, Methylorubrum extorquens
MPKCYSYIRFSRPEQMRGDSLRRQTEAAEKWAAENGMVIDESLTDLGVSAYRGLNRLKGALGKFLELVAGGQVPKGSYLIIESLDRFSREDALDVISEFSKVLRSGVTIVTLLDGQVYSRERIKAEPMALFGSLMVMMRAHEESKTKGKRVGEAWEKKRKSASDAVLTARVPGWLQVVEDGGRRRIEFKPHGREVVRRIFADTVNGYGKLKVAQRLKEAGFETFEDGKTWHGSYVQKVLRNRATFGEMQPYKRDEEGRRVPAGPPVKGYYPAAVSEADFMRASAALALRDKSGGPREATGEANLLRNLARCTCGGRMRRENKGGKSSAWLVCAEASRGDCTNTRRWRLDLAEEKLLGCSARIDFRKLLAAEGEKMDAPPTVADYEAKAAEVSKRLAAIMAVVEMGVTAYAHRAVELQKESDEAEAELARVRRLGAIGAHQPTPEQRRRTLAELKARLAGATDAERADLRVRLAQEVRAAFKEVTFGPDRITATYKGMVPFGKVLQPRDVTVLIHTENPDEIAEFQSAALEMDEGNRRSGSVAEFARRQRARSGALENLEPKVDLLDEVFDPMPAV

SEQ ID NO: 18232 - DNA, 50 bp, Methylorubrum extorquens
  source 1..50: mol_type = genomic DNA
accatgacaataggccacgtcatgctgatgacgtggcctattaagcgccg

SEQ ID NO: 18233 - DNA, 40 bp, Methylorubrum extorquens
  source 1..40: mol_type = genomic DNA
cgccggcggccacaacctgctgatgaacggcccgcctggc

SEQ ID NO: 18234 - DNA, 50 bp, Methylorubrum extorquens
  source 1..50: mol_type = genomic DNA
accatgacaataggccacgtcatggcgatgacgtggcctattaagcgccg

SEQ ID NO: 18235 - DNA, 40 bp, Methylorubrum extorquens
  source 1..40: mol_type = genomic DNA
cgccgggggccacgtcctggcgctgcacctcctccctggc

SEQ ID NO: 18236 - protein, 471 aa, Mycobacterium intracellulare
MRAAVYLRQSLDRSGDGLGIDRQREDVRRLIEARGWTLAAEFVDNDVSALSRKPRPQFTAMMARVDAGEFDVIVARHMDRLLRRLSELESTLERCQRASVAIVTASDGVDTSTDGGRLVARILSSVAQGEVERKGSRQRSAAIQAAKQGRWVGGRRPFGYEKDGVTICEPEAAMIKQAYVDVLAGESLSEVARRWNASGIAPAQSDKRWYRGTVKDVLTNPRHAGLRRYRTPEERAKIRQNPELGIVGKAQWPAIVDETTWRAAVRILTDPSRHTGRAGAKGLLTGVALCGVCGQTVHRGGAYGGYPMYRCISGRHVSRRAEPVDDYVMAVAVERLQQPDAASLWAAELPDADELMAEADKLRRERDGIDQDRAEGLIDRVRWRAMNERITGRLGEIESKLAAAGSSSPLSIVASGRVEETWAGLTIAQRRNIIAALMTPVLHLPGRGVRTFRPETVEIRWKALGNQAWER

SEQ ID NO: 18237 - DNA, 50 bp, Mycobacterium intracellulare
  source 1..50: mol_type = genomic DNA
gtgacattgttggttttgtagtcgcgtggcatcaaagttagcagaactgc

SEQ ID NO: 18238 - DNA, 40 bp, Mycobacterium intracellulare
  source 1..40: mol_type = genomic DNA
gaccgcacgttgcgggtcgcgtggagcctcgccgacctgg

SEQ ID NO: 18239 - DNA, 50 bp, Mycobacterium intracellulare
  source 1..50: mol_type = genomic DNA
gtgacattgttggttttgtagtcgcctggcatcaaagttagcagaactgc

SEQ ID NO: 18240 - DNA, 40 bp, Mycobacterium intracellulare
  source 1..40: mol_type = genomic DNA
ggccccacgatgggggtcccctggagcctccaagtcctgg

SEQ ID NO: 18241 - protein, 545 aa, Clostridium paraputrificum
MGNVAIYSRKSKFTGKGESIENQILKCKQFIEFKFSMDPSEVEIFIDEGFTGRNTNRPQYKELMKKVKAGEIEHIVLYQLNRFGRNARDIHNSLQECMDHNCIIYSAQEGFDSATSFGRAIIGIMASLAQLETEQLGERVKDNMYTLAKMGRWLGGQSPLGFNGEREYYIDDNGKERSVTKLVENQEEMNIVKAIYNKYLEEKSLSQVGKWSLTNNFKGKNGGNLDKSALNVILQNPVYVKANKAVFEFFKSKGYDVYGVPNGHGMLRYGKENNIVASAKHKGIIPASDWLEVQSILSSNAYKAPRLGKTNTALLTGILKCKCGSNMRVTYGKANKNGLKQFYYTCNMKNASGGTRCNSKNINGIKLEENLVKYLTSYNKDIFIKEIKNILATTEEINKANDIDNINLSIDNSNKSITKLLNKLKLVDDEDISKIILDEIKYEKNKIKELESKKKVALENESSLALTQQDLFEIATSLEDFCKNFDKLTFEEKKKRLSYLIDTIIYDEGTFSINFNIKKKLDNCFNLLSNLSNKFLSHFSTSCRS

SEQ ID NO: 18242 - DNA, 50 bp, Clostridium paraputrificum
  source 1..50: mol_type = genomic DNA
tatcgcattttagtacatcatgcagaagcatgctgtaccaaagtgagata

SEQ ID NO: 18243 - DNA, 40 bp, Clostridium paraputrificum
  source 1..40: mol_type = genomic DNA
tctttttgttggacatacagaagccatatgtacaggcacc

SEQ ID NO: 18244 - DNA, 50 bp, Clostridium paraputrificum
  source 1..50: mol_type = genomic DNA
tatcgcattttagtacatcatgcatgagcatgctgtaccaaagtgagata

SEQ ID NO: 18245 - DNA, 40 bp, Clostridium paraputrificum
  source 1..40: mol_type = genomic DNA
tattttagttagaaaaacttgagacatatgcacagacacc

SEQ ID NO: 18246 - protein, 486 aa, Paeniclostridium sordellii
MKRNIVLLRVSTDMQDTEYQREAINRYLNDNNIIVKEDDWVEEDGVSGFKTKMEDRVGLMKIKQMALKGEIENLIIFNLDRIGRRMELIGFINLLDECGVKILSVTEGCLNKGEDTDSLLNSVKMWLAEYDSKKKSEYVKNGKRKSALEGNHISGKPTFGYDLKNKKLVINKEESKLIEEIFRMYITFGTGKTVDILRERRSARRGIEWNRTNLKRTLKNTVYIGRKKFKDELLDYDESIRIISDELFYQVQELLDIRNTNEKGTETRFVNKSDALFESILYHKCGDGNIRKLRVDYTNYSSGGRCMFYRCHHCKAEKYKDHKKTYSAKKLQKELEPSIIDLFDNLSVEDLEAKYNEDKKININEIINRREALEKELKNNTKGLENTKAKLKKALINDLDTEVFTELITEFKGNIEVIEKELEVLRDKEEKVKRTNVNNIKLIGKLKDFKYLYETGDILMKKTILQEFIDKIIIDKDDVEIKINMC

SEQ ID NO: 18247 - DNA, 50 bp, Paeniclostridium sordellii
  source 1..50: mol_type = genomic DNA
atgtgggtttagaaactattattaagaaatgagttaccataaacccacaa

SEQ ID NO: 18248 - DNA, 40 bp, Paeniclostridium sordellii
  source 1..40: mol_type = genomic DNA
atttggagggtctcctattagtgtagctgttcccccaata

SEQ ID NO: 18249 - DNA, 50 bp, Paeniclostridium sordellii
  source 1..50: mol_type = genomic DNA
atgtgggtttagaaactattattagcaaatgagttaccataaacccacaa

SEQ ID NO: 18250 - DNA, 40 bp, Paeniclostridium sordellii
  source 1..40: mol_type = genomic DNA
atttggagggtccccgatggcagtggcagctcctccaatg

SEQ ID NO: 18251 - protein, 581 aa, Empedobacter brevis
MLGIYVRTSNAKTNKNDFSIEDQTVSGIKLAKSLNIPYEIYEDKGITGTDENRPSLLRLLKDIKKKKITHFYAIDQARVERKLGVWVLFSGECINHKVEFYLGNQKIELTDPQSMFNANIMSLINSFYAEVTSQKVKSANRLKVSKGKTHGVKALGIGRDENNNFREIPHESKIVREIFDLSINGVGVYEIANKMTARGYITKSGNKKWSGSTIDGILKNKIYKGEFWFSRGDIENRVRYDLDFHIIDPLIFDKVQDFRSNKMIKSGVKNKYSYLLSDKMICGQCGGVHKYVGMHKPSSRTSVYRCSNRNHQVQIECRDSINLTIKKFDTFIVNLIFLSTIFDDVLSKTYSQDQRKKELGNQIKKSKGDLKNLKTRKTKLLNFIDTIDDSQDEDLHERFNNIVKEIAQLEHDISLYKNELLTINTNNPVDEIKEIQQLNYKNISKQQLKDIVNKTINYIKIHSQFSTNEFIVEILFSGFPTPLMFHSTKIMEQFNLLLPKNKIQKNDLLNKLEENHTQKFITPLLENKKFLDLKMNQDDYFSNSDYVDDIALEYEVIKDTPFDVNDYTINLKELQLIDYIN

SEQ ID NO: 18252 - DNA, 50 bp, Empedobacter brevis
  source 1..50: mol_type = genomic DNA
gctaccttatttatacgtgcaaacatgtttgcacgtataaataaggtagc

SEQ ID NO: 18253 - DNA, 40 bp, Empedobacter brevis
  source 1..40: mol_type = genomic DNA
tgccgcaaaacgaattaacatgtatttgcgttggatgatt

SEQ ID NO: 18254 - DNA, 50 bp, Empedobacter brevis
  source 1..50: mol_type = genomic DNA
gctaccttatttatacgtgcaaacttgtttgcacgtataaataaggtagc

SEQ ID NO: 18255 - DNA, 40 bp, Empedobacter brevis
  source 1..40: mol_type = genomic DNA
ggctacaaaactaattgatttatatttgctttggatgact

SEQ ID NO: 18256 - protein, 538 aa, Longicatena caecimuris
MNQQPDKITALYCRLSQDDALDGESNSITNQKSLLSKYATEHGFRNPMFFVDDGFSGTNFQRPGFQEMMKYVEDYSVSTLIVKDLSRLGREYSYMGRLQDFIFPAYDVRFIAINDDVDSAKGENDFAVFKNVFNDYYAKDTSKKIRAVVKMRGEAGEHIASNPPYGYVKDPQNKKKWIVDEESAKVVRRIFDLCIAGKGPMQIAKILTADRVLTVTAYNARQKGWAMPDNLYRWCAKSVAGILERPEYTGCTVNFKTYTKSLKFKKRMENPKENRRIFEDTQPAIIERGQWERVQALRANKRRPTKTGKTSIFSGLVYCADCGAKLYYCTCNTYKNESQDHFVCSNYKSNTGSCQIHYIREVTLYKRVLECIQGTLTYVRLFRDDFTQEMLAQDEASRKAELTQKRKALSGTQKRMEDLDKIIQRLYEDSVLGKLSDLRFQKLSAQYETEQAEIQQLAASLEREIENEAGQIADVGRFLQLADRYSDLQELDASTVNELIEKIVVHSPEKISGKKHVTIEVYFTYVGKSGFHLPNRNY

SEQ ID NO: 18257 - DNA, 50 bp, Longicatena caecimuris
  source 1..50: mol_type = genomic DNA
ttacttccttatgggcctccgtctaatggcagtagcccataaggaaacat

SEQ ID NO: 18258 - DNA, 40 bp, Longicatena caecimuris
  source 1..40: mol_type = genomic DNA
aaaaaaagaggatctatagaatgctggatccccttgattt

SEQ ID NO: 18259 - DNA, 50 bp, Longicatena caecimuris
  source 1..50: mol_type = genomic DNA
ttacttccttatgggcctccgtctattggcagtagcccataaggaaacat

SEQ ID NO: 18260 - DNA, 40 bp, Longicatena caecimuris
  source 1..40: mol_type = genomic DNA
aaaaaaaaaggacatacagattgctggctctcctttatag

SEQ ID NO: 18261 - protein, 462 aa, Bacillus paralicheniformis
MTVGIYIRVSTEEQAREGFSISAQREKLKAYCISQDWQDYKFYVDEGKSAKDTNRPYLKLMLDHIQQGLINVVLVYRLDRLTRSVKDLYKLLDLFDKNNCIFRSATEVYDTGSATGRLFITLVAAMAQWERENLGERVTMGQVEKARQGQYSAPAPFGFKKQDETLVKDKKQGYILMDMIDKVKKGWSIRQIAKYLDQSYLPIRGYKWHIATILSILHNPALYGALRWKDELNETSHEGYLTKEEFEELQNILYSRQNFRKRQIESAHIFQMKLVCPQCGNRLGCERSVYFRKKDQKNVESLHYRCQSCALNERPSISVSEKKLEKALLLFMKNVKFDLEPVVKEEKNETTEIQNAIVKIERQREKFQKAWASDLMTDEEFTARMSETRKAHENFTKRLSEIQRATPLPIDIKKAKKLVNEFKINWAYLNTEEKREFVQSFIEKIEFTKKDQNPHILNVSFY

SEQ ID NO: 18262 - DNA, 50 bp, Bacillus paralicheniformis
  source 1..50: mol_type = genomic DNA
attagggtttatatcaactacacacatgtaaagtagacataaacagcaaa

SEQ ID NO: 18263 - DNA, 40 bp, Bacillus paralicheniformis
  source 1..40: mol_type = genomic DNA
tttcgtgttcagatacaggcatacgaagtgctcctgagac

SEQ ID NO: 18264 - DNA, 50 bp, Bacillus paralicheniformis
  source 1..50: mol_type = genomic DNA
attagggtttatatcaactacacaactgtaaagtagacataaacagcaaa

SEQ ID NO: 18265 - DNA, 40 bp, Bacillus paralicheniformis
  source 1..40: mol_type = genomic DNA
ttttgtgtttagagggagaactcagaagtgctcctgtgac

SEQ ID NO: 18266 - protein, 462 aa, Bacillus paralicheniformis; identical to SEQ ID NO: 18261

SEQ ID NO: 18267 - DNA, 50 bp, Bacillus paralicheniformis
  source 1..50: mol_type = genomic DNA
attagggtttatatcaactatacacatgtaaagtagacataaacagcaaa

SEQ ID NO: 18268 - DNA, 40 bp, Bacillus paralicheniformis; identical to SEQ ID NO: 18263
  source 1..40: mol_type = genomic DNA

SEQ ID NO: 18269 - DNA, 50 bp, Bacillus paralicheniformis
  source 1..50: mol_type = genomic DNA
attagggtttatatcaactatacaactgtaaagtagacataaacagcaaa

SEQ ID NO: 18270 - DNA, 40 bp, Bacillus paralicheniformis; identical to SEQ ID NO: 18265
  source 1..40: mol_type = genomic DNA

SEQ ID NO: 18271 - protein, 570 aa, Lachnotalea glycerini
MRIRKVAIYARVSTEHEAQLSALENQVQYYDNLLNTHPDWILYKYYIDEGITGTSIKKRKHFLEMMEDAKKGRFDLIVTREVSRFARNTVDTLQQTRLLKRMGVEVYFTEDGIWTLNDEDGELRLTIMATLAQNESKKTSTRVKAGQMVSFQNGVIYGNGNVMGYDKIGKEYVIDEVQAKVVRKIYNMYLAGEGYQKIKKQLEYDHDLTAMGKSIWSFSAISSILKNRLYCGQLEYRKEYVPDYLEQKRAPNNGEVEKVIVEGRHQPIISKEEFERVQKIMEQKSPMIKRYHKNKGVYSNDLWRRKLRCKCGHSFLKTKWHVKKEITTYAYKCYSQNATGTVSARKKRGLSIEGICPIPMVQDWKLFTMAQSVFHAVFDCKEDTIQTAEEKLGNGIVDTEKVDILKDKVDTEERLKRERDRYNVLLEMRMNNEIPKEVFYAKREEVESKIAELERLLIQYGDIKEATAEDVADKLKNLTQVLEQGLELENGEFPENAINKYVYGVKVYEEHFEWILNLQVGAEEEADHVDTPVYFKTITVTPDDQRRWFKAHPAWSKSNKYEDLKVKIYI

SEQ ID NO: 18272 - DNA, 50 bp, Lachnotalea glycerini
  source 1..50: mol_type = genomic DNA
agtccactcccaaacaccaccgcacaggcagcgttgaataatagataact

SEQ ID NO: 18273 - DNA, 40 bp, Lachnotalea glycerini
  source 1..40: mol_type = genomic DNA
cgctagattagcagcagctcaggcggcattgaataataaa

SEQ ID NO: 18274 - DNA, 50 bp, Lachnotalea glycerini
  source 1..50: mol_type = genomic DNA
agtccactcccaaacaccaccgcagaggcagcgttgaataatagataact

SEQ ID NO: 18275 - DNA, 40 bp, Lachnotalea glycerini
  source 1..40: mol_type = genomic DNA
ggctacattagtagcagttgaggtggcaagaaataatcaa

SEQ ID NO: 18276 - protein, 540 aa, Clostridioides difficile; identical to SEQ ID NO: 296

SEQ ID NO: 18277 - DNA, 50 bp, Clostridioides difficile; identical to SEQ ID NO: 297
  source 1..50: mol_type = genomic DNA

SEQ ID NO: 18278 - DNA, 40 bp, Clostridioides difficile; identical to SEQ ID NO: 6588
  source 1..40: mol_type = genomic DNA

SEQ ID NO: 18279 - DNA, 50 bp, Clostridioides difficile; identical to SEQ ID NO: 13074
  source 1..50: mol_type = genomic DNA

SEQ ID NO: 18280 - DNA, 40 bp, Clostridioides difficile
  source 1..40: mol_type = genomic DNA
actatatcaatgggtgagttaaaatttgtatccaggtgta

SEQ ID NO: 18281 - protein, 540 aa, Clostridioides difficile; identical to SEQ ID NO: 1671

SEQ ID NO: 18282 - DNA, 50 bp, Clostridioides difficile; identical to SEQ ID NO: 297
  source 1..50: mol_type = genomic DNA

SEQ ID NO: 18283 - DNA, 40 bp, Clostridioides difficile; identical to SEQ ID NO: 6588
  source 1..40: mol_type = genomic DNA

SEQ ID NO: 18284 - DNA, 50 bp, Clostridioides difficile; identical to SEQ ID NO: 13074
  source 1..50: mol_type = genomic DNA

SEQ ID NO: 18285 - DNA, 40 bp, Clostridioides difficile; identical to SEQ ID NO: 18280
  source 1..40: mol_type = genomic DNA

SEQ ID NO: 18286 - protein, 537 aa, Clostridioides difficile; identical to SEQ ID NO: 11881

SEQ ID NO: 18287 - DNA, 50 bp, Clostridioides difficile; identical to SEQ ID NO: 1657
  source 1..50: mol_type = genomic DNA

SEQ ID NO: 18288 - DNA, 40 bp, Clostridioides difficile; identical to SEQ ID NO: 6588
  source 1..40: mol_type = genomic DNA

SEQ ID NO: 18289 - DNA, 50 bp, Clostridioides difficile
  source 1..50: mol_type = genomic DNA
tcatatctttaactaagggaaagctaagtttcccaaacaaaaggatatta

SEQ ID NO: 18290 - DNA, 40 bp, Clostridioides difficile; identical to SEQ ID NO: 18280
  source 1..40: mol_type = genomic DNA

SEQ ID NO: 18291 - protein, 535 aa, Clostridioides difficile
MKQPYNTALYMRLSRDDENYGDSVSIETQRTILQQYAKEHGLSVYGEYVDDGWSGTNFERPSFQRMMDDVEAGKVNCIITKDLSRFGREHVMMDYYLEFVFPEKQIRYIAVAENEDTEKGLSDFVPFKNLFNEWFAKDTSRKVKTALHAKFAAGERTFAYAPLGYIRHPEVKNTLAIDEETRWIIEKIFDLAFHGAGAAKITKSLIAEKVPTAGWLNYQRYGTFANIYANAPEEKSYAWTIAQVKSILQDETYIGNSVHNKQTNISYKNKKKVRKPKEEWIRVENTHEAIISRDVFEQVQKQIASRRRQQKDATTQIFAGLVKCADCGWSMRFGTNRQNKTPYSHFTCSQYGQMGTQCSAHYIRYDTLYVYVLSRIQYWSHRAQLSEEKLLQQILKNGDRERMTAAKRQESELKRAEKRKAEVDGKFVRMYEDWSAGRITEYNFNLLTKKYQAEQLELEEKISRLQAELSEEQQTALDAEKWVALIKQYANPTELTAELLNTLIEKIVIHEATKGADGMREQEIEIYYRFIGKID

SEQ ID NO: 18292 - DNA, 50 bp, Clostridioides difficile
  source 1..50: mol_type = genomic DNA
ccatatccttaacttcgggaaaccggagtttcccatagttaaggatacca

SEQ ID NO: 18293 - DNA, 40 bp, Clostridioides difficile; identical to SEQ ID NO: 6588
  source 1..40: mol_type = genomic DNA

SEQ ID NO: 18294 - DNA, 50 bp, Clostridioides difficile
  source 1..50: mol_type = genomic DNA
ccatatccttaacttcgggaaacctaagtttcccatagttaaggatacca

SEQ ID NO: 18295 - DNA, 40 bp, Clostridioides difficile; identical to SEQ ID NO: 18280
  source 1..40: mol_type = genomic DNA

SEQ ID NO: 18296 - protein, 540 aa, Clostridioides difficile
MKQPYNTTIYNTALYMRLSRDDELQGESGSIQTQRMMLRQYAAEHGLNVIDEYIDDGWSGTNFDRPDFQRMIDDIEDGKINCVVTKDLSRLGRNYILTGQYTEIYFPSKGVRYIAVNDNVDTINGENELAPFLNILNEMHARQTSKKVKAAMRTRFANGAHYGAYAPLGYVKDPDKKGHLLIDPETRWIIEKIFDLAVHGRGAASITRILVEEKVPTPGWLNFQRYGTFANIYAGAPEEKAYAWTIAQVKSILKEETYIGHSVHNKQTNISFKNKKKVRKPKEEWYRVENTHEAIISEDVFRQVQEQICNRRRRQKNGTTQIFSGLVKCADCGWSLAYGMNSQNKNPYAHYHCSKYGQGLHQCSMHYIRYDVLYAYVLSRLQYWSVLAQQDGDKLLKRLLNASDKERNTARKRQTAELKKAEKRKAEVDTLFAKMYEDWSAGRITEYNFNMLSEKYQGEQRELDAKIERLHEAMEAAAQTAVDAEKWIGLMKQYVNPTELTAELLNTLIEKILVHEAVKGEDGSREQEVEIFYRFIGKIE

SEQ ID NO: 18297 - DNA, 50 bp, Clostridioides difficile; identical to SEQ ID NO: 297
  source 1..50: mol_type = genomic DNA

SEQ ID NO: 18298 - DNA, 40 bp, Clostridioides difficile; identical to SEQ ID NO: 6588
  source 1..40: mol_type = genomic DNA

SEQ ID NO: 18299 - DNA, 50 bp, Clostridioides difficile; identical to SEQ ID NO: 13074
  source 1..50: mol_type = genomic DNA

SEQ ID NO: 18300 - DNA, 40 bp, Clostridioides difficile; identical to SEQ ID NO: 18280
  source 1..40: mol_type = genomic DNA

SEQ ID NO: 18301 - protein, 540 aa, Clostridioides difficile
MKQPYNTTIYNTALYMRLSRDDELQGESGSIQTQRMMLRQYAAEHGLNVIDEYIDDGWSGTNFDRPDFQRMIDDIEDGKINCVVTKDLSRLGRNYILTGQYTEIYFPSKGVRYIAVNDNVDTINGENELAPFLNILNEMHARQTSKKVKAAMRTRFANGAHYGAYAPLGYVKDPDKKGHLLIDPETRWIIEKIFDLAVHGRGAASITRILVEEKVPTPGWLNFQRYGTFANIYAGAPEEKAYAWTIAQVKSILKEETYIGHSVHNKQTNISFKNKKKVRKPKEEWYRVENTHEAIISEDVFRQVQEQICNRRRRQKNGTTQIFSGLVKCADCGWSLAYGENRQNSKPYGHYHCSKYGQGLHQCSMHYIRYDVLYAYVLSRLQYWSVLAQQDGDKLLKRLLNASDKERNTARKRQTAELKKAEKRKAEVDTLFAKMYEDWSAGRITEYNFNMLSEKYQGEQRELDAKIERLHEALEAAAQTAVDAEKWIGLMKQYVNPTELTAELLNTLIEKILVHEAVKSEDGSREQEVEIFYRFIGKIE

SEQ ID NO: 18302 - DNA, 50 bp, Clostridioides difficile; identical to SEQ ID NO: 13292
  source 1..50: mol_type = genomic DNA

SEQ ID NO: 18303 - DNA, 40 bp, Clostridioides difficile; identical to SEQ ID NO: 6588
  source 1..40: mol_type = genomic DNA

SEQ ID NO: 18304 - DNA, 50 bp, Clostridioides difficile
  source 1..50: mol_type = genomic DNA
caatatctttaactaagggaaacgtagggttcacttagataaagatacca

SEQ ID NO: 18305 - DNA, 40 bp, Clostridioides difficile; identical to SEQ ID NO: 18280
  source 1..40: mol_type = genomic DNA

SEQ ID NO: 18306 - protein, 540 aa, Clostridioides difficile; identical to SEQ ID NO: 9161

SEQ ID NO: 18307 - DNA, 50 bp, Clostridioides difficile; identical to SEQ ID NO: 13292
  source 1..50: mol_type = genomic DNA

SEQ ID NO: 18308 - DNA, 40 bp, Clostridioides difficile; identical to SEQ ID NO: 6588
  source 1..40: mol_type = genomic DNA

SEQ ID NO: 18309 - DNA, 50 bp, Clostridioides difficile; identical to SEQ ID NO: 18304
  source 1..50: mol_type = genomic DNA

SEQ ID NO: 18310 - DNA, 40 bp, Clostridioides difficile; identical to SEQ ID NO: 18280
  source 1..40: mol_type = genomic DNA

SEQ ID NO: 18311 - protein, 540 aa, Clostridioides difficile
MKQPYNTTIYNTALYMRLSRDDELQGESGSIQTQRMMLRQYAAEHGLNVIDEYIDDGWSGTNFDRPDFQRMIDDIEDGKINCVVTKDLSRLGRNYILTGQYTEIYFPSKGVRYIAVNDNVDTINGENELAPFLNILNEMHARQTSKKVKAAMRTRFANGAHYGAYAPLGYVKDPDKKGHLLIDPETRWIIEKIFDLAVHGRGAASITRILVEEKVPTPGWLNFQRYGTFANIYAGAPEEKAYAWTIAQVKSILKEETYIGHSVHNKQTNISFKNKKKVRKPKEEWYRVENTHEAIISEDVFRQVQEQICNRRRRQKNGTTQIFSGLVKCADCGWSLAYGENRQNSKPYGHYHCSKYGQGLHQCSMHYIRYDVLYAYVLSRLQYWSVLAQQDGDKLLKRLLNASDKERNTARKRQTAELKKAEKRKAEVDTLFAKMYEDWSARRITEYNFNMLSEKYQGEQRELDAKIERLHEALEAAAQTAVDAEKWIGLMKQYVNPTELTAELLNTLIEKILVHEAVKSEDGSREQEVEIFYRFIGKIE

SEQ ID NO: 18312 - DNA, 50 bp, Clostridioides difficile; identical to SEQ ID NO: 13292
  source 1..50: mol_type = genomic DNA

SEQ ID NO: 18313 - DNA, 40 bp, Clostridioides difficile; identical to SEQ ID NO: 6588
  source 1..40: mol_type = genomic DNA

SEQ ID NO: 18314 - DNA, 50 bp, Clostridioides difficile; identical to SEQ ID NO: 18304
  source 1..50: mol_type = genomic DNA

SEQ ID NO: 18315 - DNA, 40 bp, Clostridioides difficile; identical to SEQ ID NO: 18280
  source 1..40: mol_type = genomic DNA

SEQ ID NO: 18316 - protein, 470 aa, Clostridioides difficile; identical to SEQ ID NO: 9186

SEQ ID NO: 18317 - DNA, 50 bp, Clostridioides difficile; identical to SEQ ID NO: 13292
  source 1..50: mol_type = genomic DNA

SEQ ID NO: 18318 - DNA, 40 bp, Clostridioides difficile; identical to SEQ ID NO: 6588
  source 1..40: mol_type = genomic DNA

SEQ ID NO: 18319 - DNA, 50 bp, Clostridioides difficile; identical to SEQ ID NO: 18304
  source 1..50: mol_type = genomic DNA

SEQ ID NO: 18320 - DNA, 40 bp, Clostridioides difficile; identical to SEQ ID NO: 18280
  source 1..40: mol_type = genomic DNA

SEQ ID NO: 18321 - protein, 540 aa, Clostridioides difficile; identical to SEQ ID NO: 12476

SEQ ID NO: 18322 - DNA, 50 bp, Clostridioides difficile; identical to SEQ ID NO: 12477
  source 1..50: mol_type = genomic DNA

SEQ ID NO: 18323 - DNA, 40 bp, Clostridioides difficile; identical to SEQ ID NO: 6588
  source 1..40: mol_type = genomic DNA

SEQ ID NO: 18324 - DNA, 50 bp, Clostridioides difficile
  source 1..50: mol_type = genomic DNA
caatatctttaactatgtgatacctaggattcacttagataaagatacca

SEQ ID NO: 18325 - DNA, 40 bp, Clostridioides difficile; identical to SEQ ID NO: 18280
  source 1..40: mol_type = genomic DNA

SEQ ID NO: 18326 - protein, 470 aa, Clostridioides difficile
MMDDMEAGKVNCIVTKDLSRFGREHVMMDYYLEFLFPEKRVRYIAVAENEDTEKGLSDFVPFKNLFNEWFAKDTSRKVKAAFKAKFATGQRIGAYAPIGYRKHPEIKNKLIIDEETRWIVEKIFDLAIHGRGAASITRILIAEKVPTPGFINFQRDGTFANIYAGAPEEKSYAWTIAQVKSIMKDETYIGHTIHYRETNISFKNKRRVRKPQSEWVRVENTQEPIISEQVFRQVQEQIANRRRKCKDGTTQIFSGLVKCADCGWSLSYGENRQNSKPYGHYHCSKYGQGTRQCSMHYIRYDVLYAYVLSRLQYWSGLVQHDEERLLKQLLNATDKGQAAARKKQAAELKKAEKRKAEVDTLFARMYEDWAAGRITEYNFSMLSGKYQSEQAELDEKIEQLQSAIATESQNAVDAEKWIALMKECVNPTELTAELLNMLIEKIVVHEAVKGEDGSREQEVEIFYRFIGKID

SEQ ID NO: 18327 - DNA, 50 bp, Clostridioides difficile; identical to SEQ ID NO: 12477
  source 1..50: mol_type = genomic DNA

SEQ ID NO: 18328 - DNA, 40 bp, Clostridioides difficile; identical to SEQ ID NO: 6588
  source 1..40: mol_type = genomic DNA

SEQ ID NO: 18329 - DNA, 50 bp, Clostridioides difficile; identical to SEQ ID NO: 18324
  source 1..50: mol_type = genomic DNA

SEQ ID NO: 18330 - DNA, 40 bp, Clostridioides difficile; identical to SEQ ID NO: 18280
  source 1..40: mol_type = genomic DNA

SEQ ID NO: 18331 - protein, 540 aa, Clostridioides difficile; identical to SEQ ID NO: 1671

SEQ ID NO: 18332 - DNA, 50 bp, Clostridioides difficile; identical to SEQ ID NO: 13292
  source 1..50: mol_type = genomic DNA

SEQ ID NO: 18333 - DNA, 40 bp, Clostridioides difficile; identical to SEQ ID NO: 6588
  source 1..40: mol_type = genomic DNA

SEQ ID NO: 18334 - DNA, 50 bp, Clostridioides difficile; identical to SEQ ID NO: 18304
  source 1..50: mol_type = genomic DNA

SEQ ID NO: 18335 - DNA, 40 bp, Clostridioides difficile; identical to SEQ ID NO: 18280
  source 1..40: mol_type = genomic DNA

SEQ ID NO: 18336 - protein, 540 aa, Clostridioides difficile
MKQPYNTTIYNTALYMRLSRDDELQGESGSIQTQRMMLRQYAAEHGLNVIDEYIDDGWSGTNFDRPDFQRMIDDIEDGKINCVVTKDLSRLGRNYILTGQYTEIYFPSKGVRYIAVNDNVDTINGENELAPFLNILNEMHARQTSKKVKATMRTRFANGAHYGAYAPLGYVKDPDKKGHLLIDPETRWIIEKIFDLAVHGRGAASITRILVEEKVPTPGWLNFQRYGTFANIYAGAPEEKAYAWTIAQVKSILKEETYIGHSVHNKQTNISFKNKKKVRKPKEEWYRVENTHEAIISEDVFRQVQEQICNRRRRQKNGTTQIFSGLVKCADCGWSLAYGMNSQNKNPYAHYHCSKYGQGLHQCSMHYIRYDVLYAYVLSRLQYWSVLAQQDGDKLLKRLLNASDKERNTARKRQTAELKKAEKRKAEVDTLFAKMYEDWSAGRITEYNFNMLSEKYQGEQRELDAKIERLHEAMEVAAQTAVDAEKWIGLMKQYVNPTELTAELLNTLIEKILVHEAVKSEDGSREQEVEIFYRFIGKIE

SEQ ID NO: 18337 - DNA, 50 bp, Clostridioides difficile
  source 1..50: mol_type = genomic DNA
caatatctttaactaagggaaaccggggtatcacttagataaagatacca

SEQ ID NO: 18338 - DNA, 40 bp, Clostridioides difficile; identical to SEQ ID NO: 6588
  source 1..40: mol_type = genomic DNA

SEQ ID NO: 18339 - DNA, 50 bp, Clostridioides difficile
  source 1..50: mol_type = genomic DNA
caatatctttaactaagggaaacctaggtatcacttagataaagatacca

SEQ ID NO: 18340 - DNA, 40 bp, Clostridioides difficile; identical to SEQ ID NO: 18280
  source 1..40: mol_type = genomic DNA

SEQ ID NO: 18341 - protein, 470 aa, Clostridioides difficile
MIDDIEDGKINCVVTKDLSRLGRNYILTGQYTEIYFPSKGVRYIAVNDNVDTINGENELAPFLNILNEMHARQTSKKVKATMRTRFANGAHYGAYAPLGYVKDPDKKGHLLIDPETRWIIEKIFDLAVHGRGAASITRILVEEKVPTPGWLNFQRYGTFANIYAGAPEEKAYAWTIAQVKSILKEETYIGHSVHNKQTNISFKNKKKVRKPKEEWYRVENTHEAIISEDVFRQVQEQICNRRRRQKNGTTQIFSGLVKCADCGWSLAYGMNSQNKNPYAHYHCSKYGQGLHQCSMHYIRYDVLYAYVLSRLQYWSVLAQQDGDKLLKRLLNASDKERNTARKRQTAELKKAEKRKAEVDTLFAKMYEDWSAGRITEYNFNMLSEKYQGEQRELDAKIERLHEAMEVAAQTAVDAEKWIGLMKQYVNPTELTAELLNTLIEKILVHEAVKSEDGSREQEVEIFYRFIGKIE

SEQ ID NO: 18342 - DNA, 50 bp, Clostridioides difficile; identical to SEQ ID NO: 18337
  source 1..50: mol_type = genomic DNA

SEQ ID NO: 18343 - DNA, 40 bp, Clostridioides difficile; identical to SEQ ID NO: 6588
  source 1..40: mol_type = genomic DNA

SEQ ID NO: 18344 - DNA, 50 bp, Clostridioides difficile; identical to SEQ ID NO: 18339
  source 1..50: mol_type = genomic DNA

SEQ ID NO: 18345 - DNA, 40 bp, Clostridioides difficile; identical to SEQ ID NO: 18280
  source 1..40: mol_type = genomic DNA

SEQ ID NO: 18346 - protein, 540 aa, Clostridioides difficile; identical to SEQ ID NO: 12471

SEQ ID NO: 18347 - DNA, 50 bp, Clostridioides difficile; identical to SEQ ID NO: 9162
  source 1..50: mol_type = genomic DNA

SEQ ID NO: 18348 - DNA, 40 bp, Clostridioides difficile; identical to SEQ ID NO: 6588
  source 1..40: mol_type = genomic DNA

SEQ ID NO: 18349 - DNA, 50 bp, Clostridioides difficile
  source 1..50: mol_type = genomic DNA
caatatctttaactaagggaaacttagggttcacttagataaagatacca

SEQ ID NO: 18350 - DNA, 40 bp, Clostridioides difficile; identical to SEQ ID NO: 18280
  source 1..40: mol_type = genomic DNA

SEQ ID NO: 18351 - protein, 470 aa, Clostridioides difficile
MIDDIEDGKINCVVTKDLSRLGRNYILTGQYTEIYFPSKGVRYIAVNDNVDTINGENELAPFLNILNEMHARQTSKKVKAAMRTRFANGAHYGAYAPLGYVKDPDKKGHLLIDPETRWIIEKIFDLAVHGRGAASITRILVEEKVPTPGWLNFQRYGTFANIYAGAPEEKAYAWTIAQVKSILKEETYIGHSVHNKQTNISFKNKKKVRKPKEEWYRVENTHEAIISEDVFRQVQEQICNRRRRQKNGTTQIFSGLVKCADCGWSLAYGMNSQNKNPYAHYHCSKYGQGLHQCSMHYIRYDVLYAYVLSRLQYWSVLAQQDGDKLLKRLLNASDKERNTARKRQTAELKKAEKRKAEVDTLFAKMYEDWSAGRITEYNFNMLSEKYQGEQRELDVKIERLHEAMETAAQTAVDAEKWIGLMKQYVNPTELTAELLNTLIEKILVHEAVKSEDGSREQEVEIFYRFIGKIE

SEQ ID NO: 18352 - DNA, 50 bp, Clostridioides difficile; identical to SEQ ID NO: 297
  source 1..50: mol_type = genomic DNA

SEQ ID NO: 18353 - DNA, 40 bp, Clostridioides difficile; identical to SEQ ID NO: 6588
  source 1..40: mol_type = genomic DNA

SEQ ID NO: 18354 - DNA, 50 bp, Clostridioides difficile; identical to SEQ ID NO: 13074
  source 1..50: mol_type = genomic DNA

SEQ ID NO: 18355 - DNA, 40 bp, Clostridioides difficile; identical to SEQ ID NO: 18280
  source 1..40: mol_type = genomic DNA

SEQ ID NO: 18356 - protein, 540 aa, Clostridioides difficile
MKQPYNTTIYNTALYMRLSRDDELQGESGSIQTQRMMLRQYAAEHGLNVIDEYIDDGWSGTNFDRPDFQRMIDDIEDGKINCVVTKDLSRLGRNYILTGQYTEIYFPSKGVRYIAVNDNVDTINGENELAPFLNILNEMHARQTSKKVKAAMRTRFANGAHYGAYAPLGYVKDPDKKGHLLIDPETRWIIEKIFDLAVHGRGAASITRILVEEKVPTPGWLNFQRYGTFANIYAGAPEEKAYAWTIAQVKSILKEETYIGHSVHNKQTNISFKNKKKVRKPKEEWYRVENTHEAIISEDVFRQVQEQICNRRRRQKNGTTQIFSGLVKCADCGWSLAYGVNSQNKNPYAHYHCSKYGQGLHQCSMHYIRYDVLYAYVLSRLQYWSVLAQQDGDKLLKRLLNASDKERNTARKRQTAELKKAEKRKAEVDTLFAKMYEDWSAGRITEYNFNMLSEKYQGEQRELDAKIERLHEAMEVAAQTAVDAEKWIGLMKQYVNPTELTAELLNTLIEKILVHEAVKSEDGSREQEVEIFYRFIGKIE

SEQ ID NO: 18357 - DNA, 50 bp, Clostridioides difficile; identical to SEQ ID NO: 13292
  source 1..50: mol_type = genomic DNA

SEQ ID NO: 18358 - DNA, 40 bp, Clostridioides difficile; identical to SEQ ID NO: 6588
  source 1..40: mol_type = genomic DNA

SEQ ID NO: 18359 - DNA, 50 bp, Clostridioides difficile; identical to SEQ ID NO: 18304
  source 1..50: mol_type = genomic DNA

SEQ ID NO: 18360 - DNA, 40 bp, Clostridioides difficile; identical to SEQ ID NO: 18280
  source 1..40: mol_type = genomic DNA

SEQ ID NO: 18361 - protein, 470 aa, Clostridioides difficile
MIDDIEDGKINCVVTKDLSRLGRNYILTGQYTEIYFPSKGVRYIAVNDNVDTINGENELAPFLNILNEMHARQTSKKVKAAMRTRFANGAHYGAYAPLGYVKDPDKKGHLLVDPETRWIIEKIFDLAVHGRGAASITRILVEEKVPTPGWLNFQRYGTFANIYAGAPEEKAYAWTIAQVKSILKEETYIGHSVHNKQTNISFKNKKKVRKPKEEWYRVENTHEAIISEDVFRQVQEQICNRRRRQKNGTTQIFSGLVKCADCGWSLAYGVNSQNKNPYAHFHCSKYGQGLHQCSMHYIRYDVLYAYVLSRLQYWSVLAQQDGDKLLKRLLNASDKERNTARKRQTAELKKAEKRKAEVDTLFAKMYEDWSAGRITEYNFNMLSEKYQGEQRELDAKIERLHEAMEAAAQTAVDAEKWIGLMKQYVNPTELTAELLNTLIEKILIHEAVKSEDGSREQEVEIFYRFIGKIE

SEQ ID NO: 18362 - DNA, 50 bp, Clostridioides difficile; identical to SEQ ID NO: 9162
  source 1..50: mol_type = genomic DNA

SEQ ID NO: 18363 - DNA, 40 bp, Clostridioides difficile; identical to SEQ ID NO: 6588
  source 1..40: mol_type = genomic DNA

SEQ ID NO: 18364 - DNA, 50 bp, Clostridioides difficile; identical to SEQ ID NO: 18349
  source 1..50: mol_type = genomic DNA

SEQ ID NO: 18365 - DNA, 40 bp, Clostridioides difficile; identical to SEQ ID NO: 18280
  source 1..40: mol_type = genomic DNA

SEQ ID NO: 18366 - protein, 540 aa, Clostridioides difficile; identical to SEQ ID NO: 9161

SEQ ID NO: 18367 - DNA, 50 bp, Clostridioides difficile; identical to SEQ ID NO: 9162
  source 1..50: mol_type = genomic DNA

SEQ ID NO: 18368 - DNA, 40 bp, Clostridioides difficile; identical to SEQ ID NO: 6588
  source 1..40: mol_type = genomic DNA

SEQ ID NO: 18369 - DNA, 50 bp, Clostridioides difficile; identical to SEQ ID NO: 18349
  source 1..50: mol_type = genomic DNA

SEQ ID NO: 18370 - DNA, 40 bp, Clostridioides difficile; identical to SEQ ID NO: 18280
  source 1..40: mol_type = genomic DNA

SEQ ID NO: 18371 - protein, 528 aa, Bradyrhizobium guangzhouense
MKRAAIYARFSTDLQNERSIEDQVALCREAAARERLAVTLVFEDRAVSGFAAVNRPGFQSMLQAAHAKLFDVLVVEDVDRLSRDQGDYHAARKQLDFLGVAIQTPNGKVTRIDGSLRALMSELYIDNLRGHVKRGMQGVIREGRHAGGRAYGYRTVAGEPGRFQINEEEAEIVREIFARFLAGETPRTIASSLNARHVPAPRGTRWNASTINGHAGRGAGILLNALYVGQLVWNRTRMVKAPSNGKRVSRINSPDEHRTTAVPHLQIVDEATWAAVQLRKQQRHVAHSDRQDRGPRRFLSGLLRCGSCGGAMISVGRDKGGYRVQCSAFRESGTCTNGRRVKRDAIENAVLSALDSELRNPTYLAEFVEAYNAERKRLVKEANRERSRLEARVGQISRELNRAIDLVLKEGADPRAMAQRINELEQERTEATGKLSDMLDNGPVALHPTALDRYRQNVARLSELLASSSDVQNNGELVEAVRSLISHVVVVAQPNSTDFAVEIKGRLGELIQAPIYPSGTRGVFVGSG

SEQ ID NO: 18372 - DNA, 50 bp, Bradyrhizobium guangzhouense
  source 1..50: mol_type = genomic DNA
cggggggtgtttgttggtagcgggggtccgctaccgccatactcccccct

SEQ ID NO: 18373 - DNA, 40 bp, Bradyrhizobium guangzhouense
  source 1..40: mol_type = genomic DNA
agggatgattggtagcgggggagggactcgaacccccgac

SEQ ID NO: 18374 - DNA, 50 bp, Bradyrhizobium guangzhouense
  source 1..50: mol_type = genomic DNA
cggggggtgtttgttggtagcgggactccgctaccgccatactcccccct

SEQ ID NO: 18375 - DNA, 40 bp, Bradyrhizobium guangzhouense
  source 1..40: mol_type = genomic DNA
acagatggctggtagcaggacagggattcaaactcccaac

SEQ ID NO: 18376 - protein, 500 aa, Bacillus subtilis
MIAIYVRVSTEEQAIKGSSIDSQIEACIKKAGTKDVLKYADEGFSGELLERPALNRLREDASKGLISQVICYDPDRLSRKLMNQLIIDDELRKRNIPLIFVNGEYANSPEGQLFFAMRGAISEFEKAKIKERTSSGRLQKMKKGMIIKDSKLYGYKFVKEKRTLEILEEEAKIIRMIFNYFTDHKSPFFGRVNGIALHLTQMGVKTKKGAKVWHRQVVRQILMNSSYKGEHRQYKYDTEGSYVSKQAGNKSIIKIRPEEEQITVTIPAIVPAEQWDYAQELLGQSKRKHLSISPHNYLLSGLVRCGKCGNTMTGKKRKSHGKDYYVYTCRKNYSGAKDRGCGKEMSENKLNRHVWGEIFKFITNPQKYVSFKEAEQSNHLSDELELIEKEIEKTKKGRKRLLTLISLSDDDDLDIDEIKAQIIELQKKQNQLTEKCNEIQSKMKVLDDTSSSENALKRAIDYFQSIGADNLTLEDKKTIVNFIVKEVTIVDSDTIYIETY

SEQ ID NO: 18377 - DNA, 50 bp, Bacillus subtilis; identical to SEQ ID NO: 12727
  source 1..50: mol_type = genomic DNA

SEQ ID NO: 18378 - DNA, 40 bp, Bacillus subtilis
  source 1..40: mol_type = genomic DNA
gcgcaaatgcatgaggatttcattttcaatacaccttgca

SEQ ID NO: 18379 - DNA, 50 bp, Bacillus subtilis
  source 1..50: mol_type = genomic DNA
caccccccttttgtaattacaatcccattattaattacaaaaggggggtg

SEQ ID NO: 18380 - DNA, 40 bp, Bacillus subtilis
  source 1..40: mol_type = genomic DNA
acccgcatgcactaggattccattttctctacaccttgcc

SEQ ID NO: 18381 - protein, 463 aa, Hungatella hathewayi
MAKPQTALQRVALYIRVSSDEQAERGDSIRDQKERGTKYIDDHQNMILQDVYIDDGVSGQKLDRDDFTRLIGNVKAGLVDLIIFTKLDRWFRSLRHYLNTQVILDKYNVAWTAIDQPYFDTSTPYGRAFVAQSMTWAELEAQNGGLRVTDVFRSKVEHGEVITGKVPRGYMIQNKHLVFSDEAPAMLDSIQYFHREQGLAKTVNYMRETHGISMSIQNLKNSILRNEKYTGRYRGNENYCPRLISDEMYHDIQRVLDNNSTIRSNQKYPYIFSGILVCDQCGHKMCGCHITVTSHRTSEKVYRYKYPAYECLQYRTYKKCSNGGEIREVRIEEYLLGHVREELSGYLVDFETGETKRIDNRAKKNKLRRKLDRLKDLYLNEVISLDEYKKDRIEYEEQLAALPDMEQPIKNLEPLKQVLDCNFEVIYNKLSNEEKRAFWRSIIKEIRISKSVGRNRKYQIIFL

SEQ ID NO: 18382 - DNA, 50 bp, Hungatella hathewayi
  source 1..50: mol_type = genomic DNA
ttttaccgttaagttaatcagcctgtcagttaatattaattaccggtaaa

SEQ ID NO: 18383 - DNA, 40 bp, Hungatella hathewayi
  source 1..40: mol_type = genomic DNA
tttcccgggccagttaccggtgtgctgattcatccctgtc

SEQ ID NO: 18384 - DNA, 50 bp, Hungatella hathewayi
  source 1..50: mol_type = genomic DNA
ttttaccgttaagttaatcagcctcgcagttaatattaattaccggtaaa

SEQ ID NO: 18385 - DNA, 40 bp, Hungatella hathewayi
  source 1..40: mol_type = genomic DNA
tttttcgtgacagttaccacggtgctgattcatgctgggc

SEQ ID NO: 18386 - protein, 540 aa, Roseburia intestinalis; identical to SEQ ID NO: 12686

SEQ ID NO: 18387 - DNA, 50 bp, Roseburia intestinalis; identical to SEQ ID NO: 3657
  source 1..50: mol_type = genomic DNA

SEQ ID NO: 18388 - DNA, 40 bp, Roseburia intestinalis
  source 1..40: mol_type = genomic DNA
cgtatcaaacagggaaagcggacaggggaggtatgatatc

SEQ ID NO: 18389 - DNA, 50 bp, Roseburia intestinalis
  source 1..50: mol_type = genomic DNA
caatatctttaattaagggaaacgctagtttcccatagttaaagatacca

SEQ ID NO: 18390 - DNA, 40 bp, Roseburia intestinalis
  source 1..40: mol_type = genomic DNA
ctgatcaaatagagaaagcctgcagaggagagatgataac

SEQ ID NO: 18391 - protein, 503 aa, Flavonifractor plautii
MNNRIDAIYARQSVDKKDSISIESQIEFCKYELKGGNCKEYTDKGYSGKNTDRPKFQELVRDIKRGLIAKVVVYKLDRISRSILDFANMMELFQQYNVEFVSSTEKFDTSTPMGRAMLNICIVFAQLERETIQKRVTDAYYSRSQRGFKMGGKAPYGFHTEPIKMDGINTKKLVVNPDEAANIRLMFEMYAQPTTSYGDITRYFAEQGILFNGKELIRPTLAQMLRNPVYVQADLDVYEFFKSQGTIIVNDAADFTGTNGCYLYQGRDVKPSKKNDLKDQMLVLAPHEGIVPADIWLACRKKLMNNMKIQSARKATHTWLAGKIKCGNCGYALMSINNPVGKQYLRCTKRLDNKSCAGCGKIITSELEAVVYQQMVKKLASYKTLTGRKKAAKANPKIAALQVELAHVDGEIEKLVDNLTGANNVLLSYVNVKIAELDGRKQELLARIAELTVEAISPEQVNQISGYLDTWDNVSFDDKRRVVDLMITTVAATSDSLNITWKI

SEQ ID NO: 18392 - DNA, 50 bp, Flavonifractor plautii; identical to SEQ ID NO: 12
  source 1..50: mol_type = genomic DNA

SEQ ID NO: 18393 - DNA, 40 bp, Flavonifractor plautii
  source 1..40: mol_type = genomic DNA
aaaatgtgccgtctggcagttccttcatgtcaaacaaaag

SEQ ID NO: 18394 - DNA, 50 bp, Flavonifractor plautii; identical to SEQ ID NO: 12
  source 1..50: mol_type = genomic DNA

SEQ ID NO: 18395 - DNA, 40 bp, Flavonifractor plautii
  source 1..40: mol_type = genomic DNA
ataaagtactgtctgtcagttcctacatggcaaaccagag

SEQ ID NO: 18396 - protein, 542 aa, Dorea formicigenerans
MKLQKVLSLFNVAIYIRLSREDGDKEESDSVGNQRKLLTEYVAKKEDFIVYDTYIDDGYSGTNFNRPSFQRMIADIEDGKVNCVVVKDLSRFGRDYIDTGRYLERYFPELGVRFISVTDSIDSMKQAYDMLLPIKNIFNEQYARDISKKIQATVKSKQKAGEFIGAFTSYGYKKSPVNKNKLVIDDYAADVVRRIFSLYIQGYGKQKIAKLLNAEGILCPAEYKKVNGENYKNCNRLESTTYWSYSTINSILHREMYVGNMVQGTKHQRMRSKQKKMPKEDWIIVENTHEPIIDKETWDKAQSLLSKRTRELDLETNKNIFAGFVKCGDCGRAMAKNMWRRADGSKTYSLYCGTYKRNGKQYCTPHTLPMAVLEDIVLNDLKAIVHSVDDLKELVQSQSFTASKVKKITDTELSKVKAELERVKKLKKSIYEDYRDELISKEEFLSYREDYLKKEELYSKQIEALEEKKKDNVTEDVFETPWLKRLLELKDIEALDRDIVVEMISEIKVYENRKIKITYNFGNELEHLFSSVYSVELEEKAI

SEQ ID NO: 18397 - DNA, 50 bp, Dorea formicigenerans
  source 1..50: mol_type = genomic DNA
aatttgcgcaattaacacccagcacacgggggaacacagttgcgcaagta

SEQ ID NO: 18398 - DNA, 40 bp, Dorea formicigenerans
  source 1..40: mol_type = genomic DNA
ctgggtatcatcattcccccatgctgcatcaaatgagagc

SEQ ID NO: 18399 - DNA, 50 bp, Dorea formicigenerans; identical to SEQ ID NO: 18397
  source 1..50: mol_type = genomic DNA

SEQ ID NO: 18400 - DNA, 40 bp, Dorea formicigenerans
  source 1..40: mol_type = genomic DNA
ctgggcatcaactataccccaagctgtatcaaatgagaca

SEQ ID NO: 18401 - protein, 491 aa, Corynebacterium afermentans
MATTGAQRAAIYARISLDKQEEAGVKRQIHLATKQAEADEAEIVATYVDNNVSAFSRDPRPGYKKLINAIENREIDVVYVYALDRLTRRTKETLTLFELCKEHNVTVKANRGYNIDPSDPSSLLTIGVLGLVAEQESIDRAARIRAAYEDRARTGRPKTGGRRMFGYEADAVTVVDDEAEALRDAAAMVIAGKTLRETVREVFHARELTATTGRPMTAPTLRDILLNPRVRGISTFTPTDPKKGKRLIKNRQIVGAGNWPAIIDEVTGKKLDAILNDSSRKDSHSGNAPRYFLASVLTCTCGDPMYSRSRKNSKGEPRRFYTCKRTEPGGTHVSIGSEVDDLIEAVILKRMQQPDAMDALQQALAPEDDSLTEQLQELTGQRNALLAKREQFEEVSINGDIDMSTFTRMSKKIEARIAVIDKKVHELTASRDADPLAAELANGPDFAEWWRSASVEDKRRLTRLLMDIHILPGKAGAKTFDPQRVSITWRQ

SEQ ID NO: 18402 - DNA, 50 bp, Corynebacterium afermentans
  source 1..50: mol_type = genomic DNA
cgtacccacaacccgtgttcggttaatcccgagcacgggtttggggtacg

SEQ ID NO: 18403 - DNA, 40 bp, Corynebacterium afermentans
  source 1..40: mol_type = genomic DNA
cggggcgacgggctccggcaagtcggagctgctgcggacc

SEQ ID NO: 18404 - DNA, 50 bp, Corynebacterium afermentans
  source 1..50: mol_type = genomic DNA
cgtacccacaacccgtgttcggttagtcccgagcacgggtttggggtacg

SEQ ID NO: 18405 - DNA, 40 bp, Corynebacterium afermentans
  source 1..40: mol_type = genomic DNA
cggggcgacgggcggcgccaggacggagcgaggggggacc

SEQ ID NO: 18406 - protein, 548 aa, Clostridium paraputrificum
MKVAIYSRKSVFTGKGESIENQIEMCKEYFSRLNGNDVEYSIYEDEGFSGGNINRPRFQQLLKDIKKNSFDALICYRLDRISRNVADFSTTLELLQEHNVDFISIREQFDTSTPMGRAMVYIASVFAQLERETIAERIRDNMLQLSKTGRWLGGVCPLGFTSEKITYVDSEYNERSMFKLSPLEEEMNVVRFIFSKYLATSSIHMALKELLASNIKGKHGGDFASMSLADILKNPVYVQSDSSIKEYYESLGVNFFGEPNGCGIMLYNKKNSKGKLRDMSEWIAAVGKHKGIISSSDWLKVQYSLDRNSKKNNPRQGTSAKALLSGVLKCSICGAPMRVCYGRLRKDGKRNHYYMCTMKAHSCKSRCENPNAKGLELEQEVINRLINYNEETLLRKLTSYADELKSSTPNDMIKNIDKSIDEKKSEMDTLMSQLGKTNNPATQNFILKKADSLSNEIMDLENKLNGIHKKKEQNSIEMRNIEIIMSSFSEFTKLCSTIKDVSNIEDENIKIALRNLINRLVSKISYNGFTKEVVIDIMGSQENCSPSG

SEQ ID NO: 18407 - DNA, 50 bp, Clostridium paraputrificum
  source 1..50: mol_type = genomic DNA
ggtcgcaatacagtaaatcatgcacatgcattccgtgttgtattgcaacc

SEQ ID NO: 18408 - DNA, 40 bp, Clostridium paraputrificum
  source 1..40: mol_type = genomic DNA
agattttccagggcataaacatgccagcctttatgacgtc

SEQ ID NO: 18409 - DNA, 50 bp, Clostridium paraputrificum
  source 1..50: mol_type = genomic DNA
ggtcgcaatacagtaaatcatgcaagtgcattccgtgttgtattgcaacc

SEQ ID NO: 18410 - DNA, 40 bp, Clostridium paraputrificum
  source 1..40: mol_type = genomic DNA
aggtgtccctgggcttaaaagtgccaccatttatgacctg

SEQ ID NO: 18411 - protein, 548 aa, Clostridium paraputrificum
MKVAIYSRKSVFTGKGESIENQIEMCKEYFSRLNRNDVEYFIYEDEGFSGGNINRPRFQQLLKDIKKNSFDALICYRLDRISRNVADFSTTLELLQEHNVDFISIREQFDTSTPMGRAMVYIASVFAQLERETIAERIRDNMLQLSKTGRWLGGVCPLGFTSEKITYVDSEYNERSMFKLSPLEEEMNVVRFIFSKYLATSSIHMALKELLASNIKGKHGGDFASMSLADILKNPVYVQSDSSIKEYYESLGVNFFGEPNGCGIMLYNKKNSKGKLRDMSEWIAAVGKHKGIISSSDWLKVQYSLDRNSKKNNPRQGTSVKALLSGVLKCSICGAPMRVCYGRLRKDGKRNHYYMCTMKAHSCKSRCENPNAKGLELEQEVINRLINYNEETLLRKLTSYADELKNSTPNDMIKNIDKSIDEKKAEMDTLMSQLGKTNNPATQNFILKKADSLSNEIMDLENKLNGIHKKKEQNSIEMRNIEIIMSSFSEFTKLCSTIKDVSNIEDENIKIALRNLINRLVSKISYNGFTKEVVIDIMGSQDNCSPSG

SEQ ID NO: 18412 - DNA, 50 bp, Clostridium paraputrificum; identical to SEQ ID NO: 18407
  source 1..50: mol_type = genomic DNA

SEQ ID NO: 18413 - DNA, 40 bp, Clostridium paraputrificum; identical to SEQ ID NO: 18408
  source 1..40: mol_type = genomic DNA

SEQ ID NO: 18414 - DNA, 50 bp, Clostridium paraputrificum; identical to SEQ ID NO: 18409
  source 1..50: mol_type = genomic DNA

SEQ ID NO: 18415 - DNA, 40 bp, Clostridium paraputrificum; identical to SEQ ID NO: 18410
  source 1..40: mol_type = genomic DNA

SEQ ID NO: 18416 - protein, 548 aa, Clostridium paraputrificum
MKVAIYSRKSVFTGKGESIENQIEMCKEYFSRLNQNNVEYFIYEDEGFSGGNINRPRFQQLLKDIKKNSFDALICYRLDRISRNVADFSTTLELLQEHNVDFISIREQFDTSTPMGRAMVYIASVFAQLERETIAERIRDNMLQLSKTGRWLGGVCPLGFTSEKITYVDSEYNERSMFKLSPLEEEMNVVRFIFSKYLATSSIHMALKELLSSNIKGKHGGDFASMSLADILKNPVYVQSDSSIKEYYESLGVNFFGEPNGCGIMLYNKKNSKGKLRDMSEWIAAVGKHKGIISSSDWLKVQYSLDRNSKKNNPRQGTSAKALLSGVLKCSICGAPMRVCYGRLRKDGKRNHYYMCTMKAHSCKSRCENPNAKGLELEQEVINRLINYNEETLLRKLTSYSDELKSSTPNDMIKNIDKSIDEKKSEMDTLMSQLGKTNNPATQNFILKKADSLSNEILDLENKLNGIHKKKEQNSIEMRNIEIIMSSFSEFTKLYSTIKDVSNIEDENIKIPLRNLINRLVSRISYNGFTKEVVIDIMGSQENCSPSG

SEQ ID NO: 18417 - DNA, 50 bp, Clostridium paraputrificum; identical to SEQ ID NO: 18407
  source 1..50: mol_type = genomic DNA

SEQ ID NO: 18418 - DNA, 40 bp, Clostridium paraputrificum
  source 1..40: mol_type = genomic DNA
agattttccagggcataaacatgccaacctttatgacgtt

SEQ ID NO: 18419 - DNA, 50 bp, Clostridium paraputrificum; identical to SEQ ID NO: 18409
  source 1..50: mol_type = genomic DNA

SEQ ID NO: 18420 - DNA, 40 bp, Clostridium paraputrificum; identical to SEQ ID NO: 18410
  source 1..40: mol_type = genomic DNA

SEQ ID NO: 18421 - protein, 548 aa, Clostridium paraputrificum
MKVAIYSRKSVFTGKGESIENQIEMCKEYFSRLNQNNVEYFIYEDEGFSGGNINRPRFQQLLKDIKKNSFDALICYRLDRISRNVADFSTTLELLQEHNVDFISIREQFDTSTPMGRAMVYIASVFAQLERETIAERIRDNMLQLSKTGRWLGGVCPLGFTSEKITYVDSEYNERSMFKLSPLEEEMNVVRFIFSKYLATSSIHMALKELLASNIKGKHGGDFASMSLADILKNPVYVQSDSSIKEYYESLGVNFFGEPNGCGIMLYNKKNSKGKLRDMSEWIAAVGKHKGIISSSDWLKVQYSLDRNSKKNNPRQGTSAKALLSGVLKCSICGAPMRVCYGRLRKDGERNHYYMCTMKAHSCKSRCQNPNAKGLELEQEVINRLINYNEETLLRKLTSYADKLKSSTPNDMIKNIDKSIDEKKAEMDTLMSQLGKTNNPATQNFILKKADSLSNEIMDLENKLNGIHKKKEQNSIEMRNIEIIMSSFSEFTKLCSTIKDVSNIEDENIKIALRNLINRLVSRISYNGFTKEVVIDIMGSQENCSPSG

SEQ ID NO: 18422 - DNA, 50 bp, Clostridium paraputrificum
  source 1..50: mol_type = genomic DNA
tgtcgcaatatagtaaaacatgcacatgcattccgtgttgtattgcaacc

SEQ ID NO: 18423 - DNA, 40 bp, Clostridium paraputrificum; identical to SEQ ID NO: 18408
  source 1..40: mol_type = genomic DNA

SEQ ID NO: 18424 - DNA, 50 bp, Clostridium paraputrificum
  source 1..50: mol_type = genomic DNA
tgtcgcaatatagtaaaacatgcaagtgcattccgtgttgtattgcaacc

SEQ ID NO: 18425 - DNA, 40 bp, Clostridium paraputrificum; identical to SEQ ID NO: 18410
  source 1..40: mol_type = genomic DNA

SEQ ID NO: 18426 - protein, 479 aa, Mycobacterium avium; identical to SEQ ID NO: 3691

SEQ ID NO: 18427 - DNA, 50 bp, Mycobacterium avium; identical to SEQ ID NO: 3692
  source 1..50: mol_type = genomic DNA

SEQ ID NO: 18428 - DNA, 40 bp, Mycobacterium avium
  source 1..40: mol_type = genomic DNA
cggccccaccgaactgtccaacctggtcctggtctgcccc

SEQ ID NO: 18429 - DNA, 50 bp, Mycobacterium avium; identical to SEQ ID NO: 3694
  source 1..50: mol_type = genomic DNA

SEQ ID NO: 18430 - DNA, 40 bp, Mycobacterium avium; identical to SEQ ID NO: 3695
  source 1..40: mol_type = genomic DNA

SEQ ID NO: 18431 - protein, 479 aa, Mycobacterium avium
MSVRKSAGQRVGVGSAAIYARISSDAEGTGLGVARQLEDCRRLAADRGWPVGAEYVDNDVSAFSGKLRQQYARMLADLESGDRDAVIVYNLDRLHRRPVELEEFVTLCESVGVRDVATVTADIDLGNDDGLFMARIFAAFAAKESGRKSARVQRKMLQNAQAGLPHGSGRPFGYEDDKITVRESEAAVVREMVDRYLAGQSLRSVTIWLNETGIAPSVAKSWQTTSVRQVMSSGRIAGLREHRGEVIGAAVWPAIITAAQRDRVLARLSARSVTKTRTARTYLLSGMLRCGRCGNRLYSQARHSNPQNRVRRYVCLKGPDHGGCGRLTVVAAPVEELLVESVLTRLDSPQLADVLAGKVSADHDVAALAAAVEADQERLDELAGLYADGAISAREWIAARDPITERITAARRDIAAATDTTAIFELVGTGGALRAGWADLDLGRQQAIVKAVLDHAVIAPGTPGARRLDIGRVAPVWRV

SEQ ID NO: 18432 - DNA, 50 bp, Mycobacterium avium
  source 1..50: mol_type = genomic DNA
ggggtagattaccgacttgtcagcaaggtcataattcgttaaactacccc

SEQ ID NO: 18433 - DNA, 40 bp, Mycobacterium avium; identical to SEQ ID NO: 18428
  source 1..40: mol_type = genomic DNA

SEQ ID NO: 18434 - DNA, 50 bp, Mycobacterium avium
  source 1..50: mol_type = genomic DNA
ggggtagattaccgacttgtcagcgcggtcataattcgttaaactacccc

SEQ ID NO: 18435 - DNA, 40 bp, Mycobacterium avium; identical to SEQ ID NO: 3695
  source 1..40: mol_type = genomic DNA

SEQ ID NO: 18436 - protein, 528 aa, Salmonella enterica
MKVPVWSYARVSTLNQVDGFGIQRQVNTINQFIQYLVLDHRLPFVLDTENITQMVAEGKSAFKGKNWNPKTKLGQYRKMVMDGVLPDSVLIVENIDRLTRLDPFQAVEIISGLINRGTTILEIETGMTYSRYIPESITVLTMQINRANGESKRKSVMMKKSHQNRYGNVSKVRPRWFDVVEIDGIKQYRTNDTAKAIQRMYNDYVNGIGAAQIVRTYGKTDNGKAWTLVTVLRVLSDKRVADDPRYPPIIDKELYTKVQAMKVSGNKGKTHQKQMLNIFSGMSRCPVCKQSIIVKRNSHGGLYTVCLGKRTNKDCEARSVAYFALERPLLEAIKGLDFSEVYDREESNVATLRDQWIQNERDIAAFRERLTKASRHEKFAILDELETISKEQDELTIRLKSVDAPKDLQLTYNDDKLDLDVDYRIELNNRLKKIIQRIDVVRVDVDKSKYTIYCSIMYWTDFMTHLVIIDVESKRTASRGGANTLTTTLRSVSSICSDGSISGNPDLEALEYWENVFNKAMAVALPNG

SEQ ID NO: 18437 - DNA, 50 bp, Salmonella enterica
  source 1..50: mol_type = genomic DNA
tgcggtgtacatactttacctactggaacagttagtgtatgatgtacgcc

SEQ ID NO: 18438 - DNA, 40 bp, Salmonella enterica
  source 1..40: mol_type = genomic DNA
gcggccccatcagcagcatggagcagtcggtggtgccgcc

SEQ ID NO: 18439 - DNA, 50 bp, Salmonella enterica
  source 1..50: mol_type = genomic DNA
tgcggtgtacatactttacctactccaacagttagtgtatgatgtacgcc

SEQ ID NO: 18440 - DNA, 40 bp, Salmonella enterica
  source 1..40: mol_type = genomic DNA
gaagccccattgccagcacccagcagtcttgggtgccgcc

SEQ ID NO: 18441 - protein, 560 aa, Bradyrhizobium diazoefficiens
MDAPVRTAARTKAYSYVRFSTPSQAAGASLQRQTEKAAKYALEHGLTLDTELKMTDLGVSAYRGKNAHTGALGGFLKAVEAGYVARGSYLLIENMDRLSRADIVTAQGLFLQLVGSGINLVTLTNGEAYSAERFQREPEAILMVVLELIRANKESVRKAQLVGDAKARKKKRLAEHGLEGKPYTRQTPAWIRWSDTEGRYELIRERADIVKEMFERVDRGDGLGRIARDLNERGVPTWARTGGQRTADHWRISYVRKVLASTAPIGAFTPHTTTHDETTKVRRDEPMAPVENLFPSAIDADTYWRVHRKLSATAARGRNAKQPPKSIVAGIVFCATCGHTVTRVSKGDYIYLVCSRANMRAGGCDYRAVRYDTVEQALRENARRLIKEAPRGQSTAALEKQIDALQNNADGAEGQMADLAELIARERGSPEATAARKRLREIEQYLKDTQKQLRDLRAQRDTMTTASVKDRLKAVERALTSNTDAGGTNAVLRDAIRRIVLDPEQGMLWVRWHHSDETQGITCITRHYKWEDMHEAREPVAALFPERATSANQIEKAIEQ

SEQ ID NO: 18442 - DNA, 50 bp, Bradyrhizobium diazoefficiens
  source 1..50: mol_type = genomic DNA
tgtcattgacaaccagcctttgccattgcagagtgtgaatgccaacgcta

SEQ ID NO: 18443 - DNA, 40 bp, Bradyrhizobium diazoefficiens
  source 1..40: mol_type = genomic DNA
gggcctgccggcctttgccatcgtcggcctgccggacaag

SEQ ID NO: 18444 - DNA, 50 bp, Bradyrhizobium diazoefficiens; identical to SEQ ID NO: 18442
  source 1..50: mol_type = genomic DNA

SEQ ID NO: 18445 - DNA, 40 bp, Bradyrhizobium diazoefficiens
  source 1..40: mol_type = genomic DNA
ggtcaggccggcccttgaaatcgtcgccctgccgcaccag

SEQ ID NO: 18446 - protein, 520 aa, Salinispora arenicola
MVRRKARSGNRGRFDSKDALSAGGADVRALRYQRASQDKKEQGKSVHDQGVLNLAEITKRSWTDSGSFTDNHRSASRRATKEREQFELLIEQIRAGKGDVLVVWEISRKERDLAVFVKIRDMCHEVGLNFWLVGGVLYDLRDKNDRMMLGFQAVQAEWMADSIRDNVLRGIVGAAEAGRPHGKVTYGYRRIYDQRTRALLRQEPDTEIRTAVATDGTVTQYSRAQVVRDNFRKVSEGTPLIAVEAELNRLGIPASEGGLWRRGILRKQVMNPAYIGKRVLRGEIVGDGIWPALVEEETYWSVVRMLGDPSRTTTRPARAVHLLSYLVRCGVCDGPLSSQKVNRHGWTGQVYSCLHKRCAAVKAEYLDEYVQRTVVAWLSRPDVYDILTAASATDEEVAHARAEAQRLRGELEDWRKLGEEGEVTAIAYARAEKGLLAQIAEHEQRAADAGIPAVLRGRIGDEAVQAWQELGDDIAVKREIIRLVADIKLLRAGFKGERRTFGRHRLDWRWKFGPQDQQAA

SEQ ID NO: 18447 - DNA, 50 bp, Salinispora arenicola
  source 1..50: mol_type = genomic DNA
attggcttttatagacgcttgactaccgtcaaggatcgttagatactagg

SEQ ID NO: 18448 - DNA, 40 bp, Salinispora arenicola
  source 1..40: mol_type = genomic DNA
gctcggctgccacgccggcacggtggccagtcagacagcc

SEQ ID NO: 18449 - DNA, 50 bp, Salinispora arenicola
  source 1..50: mol_type = genomic DNA
attggcttttatagacgcttgactggcgtcaaggatcgttagatactagg

SEQ ID NO: 18450 - DNA, 40 bp, Salinispora arenicola
  source 1..40: mol_type = genomic DNA
gctcggctcccgcccgcgcggggcggacagacggacagcc

SEQ ID NO: 18451 - protein, 520 aa, Salinispora arenicola
MVRRNSRHGDRGRFDSKDALLAGGAEVRALRYQRASQDKKEQGKSVHDQGVLNLAEVTKRSWTDAGSFTDNHRSASRRATKEREQFELLIEQIRAGKGDVLVVWEISRKERDLAVFVKIRDMCHEVGLNFWLVGGVLYDLRDKNDRMMLGFQAVQAEWMADSIRDNVLRGIVGAAEAGRPHGKITYGYRRIYDQRTKALLRQEPDIEIRKAVGADGTVMEYSHAQVVRDNFRKIAEGMPLTAREAELNRLGIPASQGGIWRRGILRKQVMNPAYIGKRVLRGEIVGDGIWPALVDEETYWAVVRMLQDPSRTTTRPGRAVHLLSYIVRCGVCDGPLSSQRLNRHGWTGQVYSCLHKRCAAVKAEFLDEYVQRAVVAWLSRPDVYDVLTAASASDEEVTHARAEAQRLRGELEEWRKLGEEGEVTAIAYARAEKGLLTQIAEYEQRAADAGIPAVLRGRIGDEAVAAWQELGDDVAVKREIIRLVADVKLLRAGFKGERRTFGRHRLDWRWKFGPQDQRMA

SEQ ID NO: 18452 - DNA, 50 bp, Salinispora arenicola
  source 1..50: mol_type = genomic DNA
gttggcttcttacgctacttgactactgtcaagaatcgttagaagctatg

SEQ ID NO: 18453 - DNA, 40 bp, Salinispora arenicola; identical to SEQ ID NO: 18448
  source 1..40: mol_type = genomic DNA

SEQ ID NO: 18454 - DNA, 50 bp, Salinispora arenicola
  source 1..50: mol_type = genomic DNA
gttggcttcttacgctacttgactggtgtcaagaatcgttagaagctatg

SEQ ID NO: 18455 - DNA, 40 bp, Salinispora arenicola; identical to SEQ ID NO: 18450
  source 1..40: mol_type = genomic DNA

SEQ ID NO: 18456 - protein, 624 aa, Faecalibacterium prausnitzii
MDAQEVMHMTDYSKITALYSRLSVGDEDRDGGESNSIQNQKIFLENYARGQHLTNIRHYIDDDESGRFFDRSAYSRMMDDVENGKIGVCIMKDLTRWGRDYLQVGNAMEIFRRNNVRFIAVNNGIDSEKPDTLEFAPFINIMSEWYAKDISKKVKTGIKTKGMSGKPIATEAPYGYMKDPDNKDFWIIDEEAAEVVRLIFRLFIGGKNRNQIAVYLTQEQIPTPTFYMKDRGRGTCKNKALNEDNRYKWNKVTLTHILTRQEYCGDVVNFKTTKHFRDKRNHYVDRSQWQITENVHEPIIDRADFETAQRILENAPVRRPNGDGEIHPLSGLLFCKDCGAKMHIRIDYRNGGKRHVAYCSEYHKGKAKNPKCHSPHIIDADLLMQTVAEVLKKIEDYSISNRAEFEALVKKNLAMQQTDQTKKQQKRIPQITTRLEQIDKVLNKLYEDNALGTIPQDRYEQMSQKYSEEYYTLKTELATLQEQLSAYENAGGRAQKFLKLTERYAAFTDLTPAILNEFISRIEVHERDKKRAKQAVQHIGIYFNYIGRFENEVTQLAEPTEQEVRQMREEIEEAQKEKSRAYHRQYSREYRARNLEKQREYDRMKAREYRARRKAQAAAAAPAQ

SEQ ID NO: 18457 - DNA, 50 bp, Faecalibacterium prausnitzii
  source 1..50: mol_type = genomic DNA
aatagcacttgacaaaacgcttcatggagtgcataattttaagtgtaaag

SEQ ID NO: 18458 - DNA, 40 bp, Faecalibacterium prausnitzii
  source 1..40: mol_type = genomic DNA
ggagtatggctctgcccggtggggcaccgccaaggatatt

SEQ ID NO: 18459 - DNA, 50 bp, Faecalibacterium prausnitzii
  source 1..50: mol_type = genomic DNA
aatagcacttgacaaaacgcttcactgagtgcataattttaagtgtaaag

SEQ ID NO: 18460 - DNA, 40 bp, Faecalibacterium prausnitzii
  source 1..40: mol_type = genomic DNA
ggattctggcgctgccctgctggtatcccccaaggatact

SEQ ID NO: 18461 - protein, 459 aa, Staphylococcus chromogenes
MKKKVAIYVRVSTTEQVEHGYSIQDQKDKLIQFCDLNDWPKYDIYEDAGISGATTNRPDLQRLLSEIDKYSLVLVYKLDRLTRNVRDLLDLLDTFESKGVAFRSATEVYDTSNALGRLFVTLVGAIAEWERTTIKERTVSGRKASMRSGNYVQQQPFYYDKVDGKLELNEHADVMRWIINQLKQGVAASQIAKQLNASSHNTPIKRKWSKTAVLRLFRSPVARGHSKFGEYIIENTHEPIMTESEYQSIEKRLKSSVPKRKQRYPFIFRGLLVCPQCGHRFSQRAAKTKYGGWVRTCYCDYCKKSDDYKYISAPLKEFERAFIAYMRNLDLSQFEIVSDHDENDSVKIDIEKVKRQREKYSRAWSMELLTDEEYFKLMAETDELMEDYTKQQQLTEKPQHDLKAIEDAQTLIMDAWGYLSMEEKEELLRAIITKIEVDVEQGVKGRGGNVTIRNIEFAF

SEQ ID NO: 18462 - DNA, 50 bp, Staphylococcus chromogenes
  source 1..50: mol_type = genomic DNA
ggtgggtgttttgttacgtcttgtgtgtaagacgtttctaagcactcatc

SEQ ID NO: 18463 - DNA, 40 bp, Staphylococcus chromogenes
  source 1..40: mol_type = genomic DNA
gataaacggcacaaccaatgttgccccagttccccccata

SEQ ID NO: 18464 - DNA, 50 bp, Staphylococcus chromogenes
  source 1..50: mol_type = genomic DNA
ggtgggtgttttgttacgtcttgtcagtaagacgtttctaagcactcatc

SEQ ID NO: 18465 - DNA, 40 bp, Staphylococcus chromogenes
  source 1..40: mol_type = genomic DNA
aataaactgtgcatccaatcattccccatttcccctcaaa

SEQ ID NO: 18466 - protein, 642 aa, Coprococcus comes
MNAGYVRLSRDDDHKNYVSIENQKLIINQYAADHGAVIDRWYEDDGISGYIFDRPGFQQMMADLDRDVDTVYVKDFSRLGRHNAKVLLLLDEFQERGKHLIVIDDNYDSMDSSDDTIGIKTWFNERYVKDTSKKIKRAIGARQKDGTLMTQPPFGYRRNEKDKTILEIVPQEAENIKLVYELYISGSGYRKIANYLTDQGIPTPSMVRHERELEEGRMTKRSIATKWTDSMVKDLLDNDFYIGTFRLRKRARNTVHGKDKRVPKEEQCIFENHHPAIIDKATFSLVQELKEKRNRTNYRGSRGQWLGSEIPNPFGSCLFCKDCGSRLTPIKRKTSSRERKYYICTTYNTKGKSYCSKAHLIEEEDLMEDVLTYIKMCRNALCEVIATYDLKDFEAEKKSIEEKRQELHTAISERKNQLKVLLTQKVKDLSVAAGNEELINETYDSLQQDLLAQIHGLELQLTELNETAIETPDVKDKLKNALDVVDKIIAGGTLDRRDIELLIDRIDVDENGMPEITLKYGLSNLINYSPADEMNRRENTIIAIVMKLITEDERGYTSAKYLSEHITDLGFKKTKQSILPYIELMKEMGILEATENPLKPYNIMKSKEEITTLIQDFLPDLPAEITAKQLSDDYLHCYECDR

SEQ ID NO: 18467 - DNA, 50 bp, Coprococcus comes
  source 1..50: mol_type = genomic DNA
atttacattgttatgagtgtgacaggtgtcgtacactatacaatgtaaat

SEQ ID NO: 18468 - DNA, 40 bp, Coprococcus comes
  source 1..40: mol_type = genomic DNA
cgttcttggaggaagaaaaggtggcatgccggaaatggtc

SEQ ID NO: 18469 - DNA, 50 bp, Coprococcus comes
  source 1..50: mol_type = genomic DNA
atttacattgttatgagtgtgacagctgtcgtacactatacaatgtaaat

SEQ ID NO: 18470 - DNA, 40 bp, Coprococcus comes
  source 1..40: mol_type = genomic DNA
cgggcctgaaggaagataagctgtcaggctggaaatggta

SEQ ID NO: 18471 - protein, 470 aa, Enterococcus faecalis
MKGESKLDKKAAIYIRVSTQEQATEGYSIQAQTDRLTKYVEAKDFILYKKYIDAGYSASKLERPAMQELIQDVQSKKVDVVIVYKLDRLSRSQKDTMYLIEDIFRPNDVELISMQESFDTSTAFGSATVGMLSVFAQLERKSISERMITGRVERAKKGFYHTGGQDRPPAGYQFNSDNQLIINEYEAAAIKDLFRLYNDGLGKSSISEYLKKNYPGKNKWLPSSIDRMLKNSLYIGKVKFSGAEYDGIHEPIIDEVTFYKTQKEIARRKQTNTKRYNYVALLGGLCECGICGAKMANRRAVGRKGKVYRYYRCYSKKGSPKHMMKTDGCSSRAQQQFIIDEAVINNLKNIDVEAELKRRSAPQTNTSLISSQIESIDKQINKLIDLFQVDSMPLDVISEKIDKLNKEKQSMEKLLERKNKLDKTELQHRFDVLKSFDWDNSSIESKRVVIEMLVQKVIIHDNSIEIILVE

SEQ ID NO: 18472 - DNA, 50 bp, Enterococcus faecalis
  source 1..50: mol_type = genomic DNA
gatgtacaacattgctctttgttttcaaatacagaataatgttgcatata

SEQ ID NO: 18473 - DNA, 40 bp, Enterococcus faecalis; identical to SEQ ID NO: 1388
  source 1..40: mol_type = genomic DNA

SEQ ID NO: 18474 - DNA, 50 bp, Enterococcus faecalis
  source 1..50: mol_type = genomic DNA
gatgtacaacattgctctttgtttgaaaatacagaataatgttgcatata

SEQ ID NO: 18475 - DNA, 40 bp, Enterococcus faecalis
  source 1..40: mol_type = genomic DNA
atgtgccactttgggaactgaaaaaagatcagatgttaag

SEQ ID NO: 18476 - protein, 551 aa, Rhodococcus globerulus
MSTSANPSRVLGRLRISRATEESTSIERQREIISQWADTHGHTVVAWAVDEDVSGSVDAFDTPALGPWLTDPSKMHEWDIIVAWKLDRLGRNAIQLNKLFGWCGEHGKTLVSCSESIDLGTWAGRMLAGVIAGLAEGELEAIRERTLASRAKLRERARWAGGKPPFGYTAVKRTDGQGWALEIDPLASTLVRRIVDSVLDDQPFTATARNLNEEGVLTPGDYYRTVRAGTPSLHKDDGIIEPRSKWAPTTIRQLLRSKALRGHVHHNGETVRGDDGQPLQMAEPLVTTDEWELIQAYLDRRAESRKGIKRSESSPLSGVAVCLVCGNPLHHTRHKTKGHYYRYYRCAEKHTTQIPAAYLEELVEEHFLRQVGDMEVRERVWVPGDSRDADLKNAQSALDELTKALGGMRSAQAVQRIHEQLLAVDTRIIALESTPVREARWEYRATGGTYLDAWGAADTDGRRELLLRSGITVAVHLETGGVRRSKFHDGTVSADIRIPVGFYESLGLQRPEGITGTFEAMTEFDIAGVEIQDRTAVFTSKSGERVEFPLE

SEQ ID NO: 18477 - DNA, 50 bp, Rhodococcus globerulus; identical to SEQ ID NO: 9147
  source 1..50: mol_type = genomic DNA

SEQ ID NO: 18478 - DNA, 40 bp, Rhodococcus globerulus
  source 1..40: mol_type = genomic DNA
attgggtgggatgcggggctcgtggaacatgactcggaac

SEQ ID NO: 18479 - DNA, 50 bp, Rhodococcus globerulus; identical to SEQ ID NO: 9149
  source 1..50: mol_type = genomic DNA

SEQ ID NO: 18480 - DNA, 40 bp, Rhodococcus globerulus
  source 1..40: mol_type = genomic DNA
attgggggggggggggggcaggcggaaggcgactcggacc

SEQ ID NO: 18481 - protein, 536 aa, Lachnospira eligens
MLRQTNQQPITALYPRLSHEDELQGESNSISNQKRILETYAKQNGFSNLRWYTDDGYSGANFQRPGFQAMLADIEAGKVGTVIVKDMSRLGRNYLQVGMYTEMIFPQKGVRFIAINDGVDSAQGDNDFAPLRNIFNEWLVRDTSKKIKAVKRSKGMSGKPITSKPVYGYLMDEDENFIIDEEAAPVVKQIYNFCLAGNGPTKIARMLSEQQIPTPGTLEYRRTGSTRRYHPGYECKWATNTVVHILENREYTGCLVNFKTEKLSYKVKHSVENSPEKQVIFENHHEPIIDTQTWERVQELRKQRKRPNRYDEVGLFSGILFCADCGSVMYQQRYQTDKRKQDCYICGNYKKRTHDCTAHFIRTDLLTAGVLSNLRKVTSYAAKHEARFMKLLIEQNEDGGKRRNAAKKKELEAAEKRIAELSAIFKRLYEDSVTGRISDERFTELSADYEAEQRELKERAAAIQAELSKAQEATVNAEKFMNVVRRHTSFEELTPTLLREFVEKIVVHECSYDENKTRRQDIEIYYSFVGKVDLPE

SEQ ID NO: 18482 - DNA, 50 bp, Lachnospira eligens
  source 1..50: mol_type = genomic DNA
ttgcttctttatcacacatcaataaatgctcatgtacggtagagaagcac

SEQ ID NO: 18483 - DNA, 40 bp, Lachnospira eligens
  source 1..40: mol_type = genomic DNA
gcgtttcattgctggtataaaaggtctggtgatgtaatcc

SEQ ID NO: 18484 - DNA, 50 bp, Lachnospira eligens
  source 1..50: mol_type = genomic DNA
ttgcttctttatcacacatcaatagctgctcatgtacggtagagaagcac

SEQ ID NO: 18485 - DNA, 40 bp, Lachnospira eligens
  source 1..40: mol_type = genomic DNA
gcgattgcttgctggtagggcaggatttgtgttgtaatcc

SEQ ID NO: 18486 - protein, 528 aa, Paenibacillus silvae
MQASEGTSLEGQLELCYKKAKSLNISREEIKEYVESGFTGEDIDRPALNELMQDVKDKKIKKLIVTHPDRLTRDLTDKLIICRELEKNDVELIFVDTEYLTTPEGQLFFNMMSSIAQYELQLIKKRTVRGRIRAVEKEGKIMPMRVAPYGYNLFNGELTINQEEAKFVHLIYQWYVHDGKTLREIGEELSKLGAIPKRAESKAWNASSISRILTSQIYIGKYFYNKRETRKLKGQKTAKGRTKKTYKIRAETEWIQVNVPFIINEELFNLAQIQRGKNLTRKGGNVKHAYLLKSLMRCGHCGRRWESTTYNSKKQGEKVTYPIYRCSGKYPRKFGESVHKCPVPTLRTDILDDFVWNIIIKLLNNPDEIISRLKSTSNSPDDNLKDLVAEYARQLKSKEDERTKIKLMFRKGIINEEELDMDISQLDKEKAKIQSEHDKIQSKLNARNKHEVTQEQLINLAKEYKKFMELNLSNEDKRFIVDKLIDEIIITHEKDKNRFSISCIGYLGNKFTLQDNSYINLVSRTQHQ

SEQ ID NO: 18487 - DNA, 50 bp, Paenibacillus silvae
  source 1..50: mol_type = genomic DNA
accttgtttcacgtacacaacatcaagatgatgtacacgcaaaacaaggt

SEQ ID NO: 18488 - DNA, 40 bp, Paenibacillus silvae
  source 1..40: mol_type = genomic DNA
cctggtggcgcatatcgtcaagaagtttgacaataccggc

SEQ ID NO: 18489 - DNA, 50 bp, Paenibacillus silvae; identical to SEQ ID NO: 18487
  source 1..50: mol_type = genomic DNA

SEQ ID NO: 18490 - DNA, 40 bp, Paenibacillus silvae
  source 1..40: mol_type = genomic DNA
cctggtggcgtctattgtcaacaactgtgacactacagcc

SEQ ID NO: 18491 - protein, 507 aa, Listeria booriae
MKGSLIVRVAIYLRKSRAEDGVQDLAKHKDYLLSICKKNNWQYELYEEIENSQEINRQELQRLRQDISLGKVDAVLINAVDRLSRKTRHFLEIIEDYFLDQGLTRLFVRETEYDLRDNNTITMLQLQATLSQSEYSFIVQRLNQGKQASLKKGIITGKVIYGYKRNKKTKLLEPEPAEAEIVRKIVDLLLQGSPYRAICDQLNSLGFRTRKGNLWDIHNVKSILHSDTLRGNVVYEVADGKGGKQTIEVLNSHEALITDAEYSKIKEITDRRAQSYKGLSKIPKHWLQGLLKCPQCHRVMTIAGTKPNRKKLPDGTVERSGEAVYYIRACREYLKDAGKRCINYGCQAKVIEEAISDIILRYKETINHNIQRLLQTDGKEVVQSRKNVVEELQRALTKLESKEETWLGMIGDDSVPLSTEDIFKQLNKIKDEKADMLLKLNEAKTELSTVDIELNIEQQVKLLDAMEQWNTLPDIQKRQTLQMLFKEIQYSRLSKDCAPSLEFETYE

SEQ ID NO: 18492 - DNA, 50 bp, Listeria booriae
  source 1..50: mol_type = genomic DNA
tgactgcattttatgagttctgatttatctaaacttacaaaatgaagtca

SEQ ID NO: 18493 - DNA, 40 bp, Listeria booriae
  source 1..40: mol_type = genomic DNA
cacgtatcgcacgttggatttattaatccccataccaaac

SEQ ID NO: 18494 - DNA, 50 bp, Listeria booriae; identical to SEQ ID NO: 18492
  source 1..50: mol_type = genomic DNA

SEQ ID NO: 18495 - DNA, 40 bp, Listeria booriae
  source 1..40: mol_type = genomic DNA
cacaaatcgcacgtccggtttgtcaatccccattccaaat

SEQ ID NO: 18496 - protein, 454 aa, Dehalococcoides mccartyi
MAETKRAVAYVRVSSASQVEGYSLDAQERLFTELCKNRGWQAVRIYREEGKSAHVDSTHKRPVFRKLLEDAAKNEFEIVVVHTLDRWSRNLTVTLESLKLLGRYGIGLVSIVENLDYSKPDGILFTQMLGAFAQYFSEALSTHVRKGLDQRAREGKHNGCIPFGYESCWEIGDKGEKKRRCEKEHPGGLHIHSREGPAAAELFRRYSSGTTTLSQLAIWLNEQGFRTHNTKNLPDANGELVSGPRLFTSSSVRNILHNPFYTGQINHRDEILAGAHEALISRELFDTVQLALRKNSGRSETLTTSPGREYLLKGLVRCAYCGMPMWAQTYKSGNSYYREHKASRSIQECPGHGGTIGCHVIDNQIRELVSAIELGPGWLEEVLSIISLKDEVERVKKEKEQVTGKLHRMAKTYIDGLIPEEEYLRQKRLLELSLESLVVPDYDASEQAGKLIQN

SEQ ID NO: 18497 - DNA, 50 bp, Dehalococcoides mccartyi
  source 1..50: mol_type = genomic DNA
caggctgggaaacttatccagaatctcctgtaattgggctggggtgtagt

SEQ ID NO: 18498 - DNA, 40 bp, Dehalococcoides mccartyi
  source 1..40: mol_type = genomic DNA
tgaccagactgtagataacctgcctgtactctggggtaag

SEQ ID NO: 18499 - DNA, 50 bp, Dehalococcoides mccartyi
  source 1..50: mol_type = genomic DNA
caggctgggaaacttatccagaatagcctgtaattgggctggggtgtagt

SEQ ID NO: 18500 - DNA, 40 bp, Dehalococcoides mccartyi
  source 1..40: mol_type = genomic DNA
tgaacagactgttaacaacaggactgagctctgggctagg

SEQ ID NO: 18501 - protein, 506 aa, Clostridium jeddahense
MGKNQKGGSCIANIAIYLRKSRADDADEPVEETLERHRKTLLEFAEKNALAISEQNIYKEVVSGDALYARPEMLRLLKDVEAEKFNAVLCMDIDRLGRGSMAEQGIILETFKTSGTKIMTPVKTVDLDNDADEDYTEFKTFLSRQELKMIKRRLKAGTQRTIKDGGYIANAPYGYEKTYRNKKPTLKIKEDEAKIVRLMFRMYVEEGAGCQMIAETVNAMGARPRRSDRFGRSSVMKILKNNVYIGKIVWNQKTHLRKGSGKTIAVSNPKEKWIITDGIHPSIVDEELFEKAQEIFERRHHPPSYTGRVENPLAGLIYCKNCGGLMQRQVMNRSPEPYLLCQKKGCVVSSQLPMVEQAILRELARQLRELRAKQRPEQQTDHPYAQTLDSIDSEIRAAKKQLDAICELLERGTYTPELFLRREASIKERLAQLDSSRREFAAKLSVKPAAAMSERIEEALRLYPTLDAQSRNRLLKSILERATYYKEKDWKPAQFQLELFFKPLYL

SEQ ID NO: 18502 - DNA, 50 bp, Clostridium jeddahense
  source 1..50: mol_type = genomic DNA
tacctctaagccgcacactcctgcgaataagagtgtgcatcgtatagaac

SEQ ID NO: 18503 - DNA, 40 bp, Clostridium jeddahense
  source 1..40: mol_type = genomic DNA
tatctatgattcgtgcagcgacaaagactgcttagaagat

SEQ ID NO: 18504 - DNA, 50 bp, Clostridium jeddahense
  source 1..50: mol_type = genomic DNA
tacctctaagccgcacactcctgcacataagagtgtgcatcgtatagaac

SEQ ID NO: 18505 - DNA, 40 bp, Clostridium jeddahense
  source 1..40: mol_type = genomic DNA
taagtatgcttcctgcatcaccactgactgcttaaaaggt

SEQ ID NO: 18506 - protein, 618 aa, Streptococcus equi; identical to SEQ ID NO: 11111

SEQ ID NO: 18507 - DNA, 50 bp, Streptococcus equi
  source 1..50: mol_type = genomic DNA
actgtccgcaaaaaatgaccgactgatataggacggattttgcggacatt

SEQ ID NO: 18508 - DNA, 40 bp, Streptococcus equi
  source 1..40: mol_type = genomic DNA
tgtcccttggcgtcctgccgaccttgagcagcgtgcaggt

SEQ ID NO: 18509 - DNA, 50 bp, Streptococcus equi
  source 1..50: mol_type = genomic DNA
actgtccgcaaaaaatgaccgactggtataggacggattttgcggacatt

SEQ ID NO: 18510 - DNA, 40 bp, Streptococcus equi
  source 1..40: mol_type = genomic DNA
tctcgctgggcgtcctgctggcctggctcagcgtgcccgt

SEQ ID NO: 18511 - protein, 489 aa, Pseudomonas aeruginosa
MAKAYSYIRFSSAKQAQGSSLERQQENLSRFLAENPQYELAETRFEDLGISGWSGEHLGHGLGKLQAAVNAGIIEAGDIIVIEAIDRISRLPLEDAVSLTSGILNKGVAIHTVEDRTTYDKTTYRQGHTALALILKTFASWEYSERLSERVKASYSKRAEAVRKGETIRRKNACWHTSDGKVVEEVAVHIRWMFEEYIAGAGVRRLAGEMMGRHPAFARVNPSHIRRWLRDKSLIGTWAKRDGEEVPGAFEPVLTPDVFYQAQALMNPQKNYTHPAKNFLTGLVKCQECGGNFAVKSQGTGNPFMGCYARTYHRCTNGTSIPLLVLHRVVMEEALDYIEDGIRASRLGEHDKHRLVVQGKLEEVQRGINGLSEAIAAHGFMPELNAKLAELKVTRTSLEAELARIPQKGDKEPVTNRELMAVWNGDKLKLNAMLQRAGFAVWCTGRKMKIGADGPEYEYLRYARRAKDFIVKTPVGEWELDGSQGNYHD

SEQ ID NO: 18512 - DNA, 50 bp, Pseudomonas aeruginosa; identical to SEQ ID NO: 15252
  source 1..50: mol_type = genomic DNA

SEQ ID NO: 18513 - DNA, 40 bp, Pseudomonas aeruginosa
  source 1..40: mol_type = genomic DNA
gcccgcggggtcgcgcaggccgcagtagtagccgaccgga

SEQ ID NO: 18514 - DNA, 50 bp, Pseudomonas aeruginosa
  source 1..50: mol_type = genomic DNA
cccggttatagcgtgcatcattgcctgctgcgtgatacactctaactgag

SEQ ID NO: 18515 - DNA, 40 bp, Pseudomonas aeruginosa
  source 1..40: mol_type = genomic DNA
gcccgcggggtcgcggaggctgcggtgatactaggcggga

SEQ ID NO: 18516 - protein, 489 aa, Pseudomonas aeruginosa
MAKAYSYIRFSSAKQAQGSSLERQQENLSRFLAENPQYELAETRFEDLGISGWSGEHLGHGLGKLQAAVNAGIIEAGDIIVIEAIDRISRLPLEDAVSLTSGILNKGVAIHTVEDRTTYDKTTYRQGHTALALILKTFASWEYSERLSERVKASYSKRAEAVRKGETIRRKNACWHTSDGKVVEEVAVHIRWMFEEYIAGAGVRKLAGEMMGRHPAFARVNPSHIRRWLRDKSLIGTWAKRDGEEVPGAFEPVLTPDVFYQAQALMNPQKDYTHPAKNFLTGLVKCQECGGNFAVKSQGTGNPFMGCYARTYHRCTNGTSIPLLVLHRVVMEEALDYIEDGIRASRLGEHDKHRLVVQGKLEEVQRGINGLSEAIAAHGFMPELNAKLAELKVTRTSLEAELARIPQKGDKEPVTNRELMAVWNGDKLKLNAMLQRAGFAVWCTGRKMKIGADGPEYEYLRYARRAKDFIVKTPVGEWELDGSQGNYHD

SEQ ID NO: 18517 - DNA, 50 bp, Pseudomonas aeruginosa; identical to SEQ ID NO: 15252
  source 1..50: mol_type = genomic DNA

SEQ ID NO: 18518 - DNA, 40 bp, Pseudomonas aeruginosa; identical to SEQ ID NO: 18513
  source 1..40: mol_type = genomic DNA

SEQ ID NO: 18519 - DNA, 50 bp, Pseudomonas aeruginosa; identical to SEQ ID NO: 18514
  source 1..50: mol_type = genomic DNA

SEQ ID NO: 18520 - DNA, 40 bp, Pseudomonas aeruginosa; identical to SEQ ID NO: 18515
  source 1..40: mol_type = genomic DNA

SEQ ID NO: 18521 - protein, 674 aa, Vibrio owensii
MIKNDEGAMRIPKIHVYARVSTLGQVESGLSLGLQTNDDMINEYCQRYGAELGKVYSDHGRSAFHQKNLAGKLGDFLTDMADKNNLDVQAGDYLLVRALDRISRANMDDAFWLYLQIMRSGVSILTTMDNRECKPNDSVSQILATLSFDLAGEESRKKQAITLAAMRKRIKQYQTGERAPCGNPYNVSTGLPFYAYAKDNVCYIDDQKFQLAKDICQMALDGKGNVTCRDYLRKHGVDLNVDSVASVFKSECLYGDRQVTLLDLDATNRHPEKKKVYSTFILKDYFPAACTKDEFHRIRAIKDSYKIHDNRRVSYSILGGISRLYCKDTVAIGSRENGGIYKCSSPECACGFYARQQLLDYIVLSCLSEHQIVPVEPDKRKIESIQQQIGAYQHQLSTLKKIMFDNPLAFDLADQDRLSELSTKIQELNNQLTIEQENHAHSNSFISLDDVKNWREKKEAYIYGSDEDKLEAREIVQRLVKEIRIVENTVTIKTIDNKVHWYYIPTPSNRRKKAYVKLLVSDHAQNMRSINEALDKVCFTEEEMKNGKHHYPLEAYAPDLVTVAIKSPAKEKDEFELLLETVTEPFVFKRRVLLSMGLSANQYQRHASVEKAIENGFYAVSVDYTSKNYKYPTDIIVSPREITTDDIHALLCVRKIKTIESIAPKQREFTSKVY

SEQ ID NO: 18522 - DNA, 50 bp, Vibrio owensii
  source 1..50: mol_type = genomic DNA
attataatgatttaaacctggaaaatgttgcctaactgaagtttaatcat

SEQ ID NO: 18523 - DNA, 40 bp, Vibrio owensii
  source 1..40: mol_type = genomic DNA
gaactttgctgcgtgttcaatgttgacgctgtcgccttcc

SEQ ID NO: 18524 - DNA, 50 bp, Vibrio owensii
  source 1..50: mol_type = genomic DNA
attataatgatttaaacctggaaaacgttgcctaactgaagtttaatcat

SEQ ID NO: 18525 - DNA, 40 bp, Vibrio owensii
  source 1..40: mol_type = genomic DNA
gagctgcgctgcgtgttcaacgggaacgcgggcgcctgcc

SEQ ID NO: 18526 - protein, 444 aa, Ralstonia solanacearum
MSTAPLASPKRCAVYCRVSSDERLDQSFNSIDAQKEAGHAFIKSHEGWIAVGDDYDDPGFSGGNMDRPALKRLMVDIEAGRIDIVVVYKIDRLSRSLADFARMVEVFDRCRVSFSAVTQQINSATSMGRLMLNVLLSFAQFEREVTGERIRDKIAASKRKGLWMGGRVPLGYDLRDRLLVANQQEASLVRRIFDDFVTLRSVTLMVRTYAAEGIVTKDGNAFTKQTLGKMLHNRIYLGEIVHKGQRFPGRHEAIVTPAQWDAVHALIASDARERTRATMDRGREPVLLRGLLYTPDGERLVPTYTVKKGKKYRYYAPVRQRRLGAWASQHGSLPAGPIEALVVEQIMGALSAPHVVQAVWDQVRATRPDLSEPEVVLPMRRLAVVWRQLFPVEQCRLAQLLIERVVIADGGLEIVWRDAGWAQLAGELMPGTIGAELQEWEATV

SEQ ID NO: 18527 - DNA, 50 bp, Ralstonia solanacearum
  misc_feature 1..5: note = n is a, c, g, or t
  misc_feature 45..50: note = n is a, c, g, or t
  source 1..50: mol_type = genomic DNA
nnnnnccccgccccgccccccgagccgccgtagtggctggggggnnnnnn

SEQ ID NO: 18528 - DNA, 40 bp, Ralstonia solanacearum
  source 1..40: mol_type = genomic DNA
caccggcccggccaccgagccgccgtagtggctgccggcc

SEQ ID NO: 18529 - DNA, 50 bp, Ralstonia solanacearum
  misc_feature 1..5: note = n is a, c, g, or t
  misc_feature 45..50: note = n is a, c, g, or t
  source 1..50: mol_type = genomic DNA
nnnnnccccgccccgccccccgagcggccgtagtggctggggggnnnnnn

SEQ ID NO: 18530 - DNA, 40 bp, Ralstonia solanacearum
  source 1..40: mol_type = genomic DNA
caccggccgagccaacttccggccgcagaggctgccgggc

SEQ ID NO: 18531 - protein, 562 aa, Vibrio maritimus
MNMILASMRYTNQLRMTKAKAYSYLRFSTPEQFKGDSFRRQTDMAEVYAKQHDLELQELTFRDLGVSGFKGKNLKTGALGRFKQEVENGAIQSDSWLLIEAWDRFSRMPTEYALPEMLSLIEMGITIVTLKGGGKVHRKGSLDMTTLLTCVIEMSQANEFSQNLVRRISAANANKREAIRKTGSGRMNKNCPLWMKPKGDDGFELIEDRAEVVRKIFELTIDGHGRQAVRNYLVQNRIKPFNPKSRTWHTSYIERILKNHQAYGAVQLYKNREPDGEPLRGYYPAAVSEDMYLAALHATRQRKIADAKGVTRRNRVNVFSGLLWCECGDMIRLKNNGKGQFYYKCINVLEHRGCKARTLKQKPTDEMLIQALYLFGDKLVVGQGGKKDDKTSETIHKVKGELERTEAKRDVAMNRLLEFDSDALSAAFRTLDNKVESLQSQLSDLEQEAALARNRVNTKELGVLLSELENTLSGSCIESKVKIASALAELIERIEFGKGLVRIKLRTNLPDYFGDMTERDMLFISIDTSGKLWSTEGLCAETDESIYSQRKVEGSRIPELAW

SEQ ID NO: 18532 - DNA, 50 bp, Vibrio maritimus
  source 1..50: mol_type = genomic DNA
agtagttctaattacccaactattacagttgtggggtattgaagactact

SEQ ID NO: 18533 - DNA, 40 bp, Vibrio maritimus
  source 1..40: mol_type = genomic DNA
taatggcatgccaggctttacactggtaggacttcccgag

SEQ ID NO: 18534 - DNA, 50 bp, Vibrio maritimus; identical to SEQ ID NO: 18532
  source 1..50: mol_type = genomic DNA

SEQ ID NO: 18535 - DNA, 40 bp, Vibrio maritimus
  source 1..40: mol_type = genomic DNA
tagtggcttgcctgccttgacagttgtgggacttcctgag

SEQ ID NO: 18536 - protein, 511 aa, Brachybacterium faecium
MTHKPSDPLRVGIYARQSVEEPMGIVQQLDDCREEARRRGWRVVDEYPDDDTSGSRERSPQSQWHRMLKDFDAGLFDVLVVTETSRLTRALTDVLKVRPPKRDMRIVAIREGVDTVGGDDFLLKQLVLLAEREVWLKTIRARRYAVARRKEGHPPAGRTAYGYRWVHAPNRDDRGTRFRIDEGEATVVRQIFNEFLAGAPLGQIARDLNTDGHRTREGSPWRSPTIRRILINPHYAALLPPTQPAGQNDLAKIAIEDCTAGAWAPVIELDQLLAARGLLVGRQPNHQGTARKHLLSGLAECGVCGGPVRSARASTHPTARIDGSGTAPRRYHSVYRCIQGHFVRKGAMIEEFVKEVCIERLSRPDARDLLTPPDDGPDLAVLHSRRTELEARDGAIASLMVKGKLSPVGAEQALDELADELRSVNEQIALAVKTDPIAAIVGSDDVRAWWDDETTTLARRRAVIETLMTIVIHPVGSGRRVTTLEAAAETIDVRWRRLRGRPYNEGRDQDE

SEQ ID NO: 18537 - DNA, 50 bp, Brachybacterium faecium
  source 1..50: mol_type = genomic DNA
gtacgtcctaacgaccgattggtggccgccattgcgactaaatgacgtac

SEQ ID NO: 18538 - DNA, 40 bp, Brachybacterium faecium
  source 1..40: mol_type = genomic DNA
agcggcgaagccgcaggcggcgagcacggtgatggcgtac

SEQ ID NO: 18539 - DNA, 50 bp, Brachybacterium faecium
  source 1..50: mol_type = genomic DNA
gtacgtcctaacgaccgattggtgtccgccattgcgactaaatgacgtac

SEQ ID NO: 18540 - DNA, 40 bp, Brachybacterium faecium
  source 1..40: mol_type = genomic DNA
gccggcaaagctgcctgcgtcgagcatggtgatgccgttc

SEQ ID NO: 18541 - protein, 534 aa, Streptomyces caniscabiei
MPIDPPGIPTRAIIYCRISRDREGAGLGVDRQREDCEALAKQLGIEVVAIHTDNDLSAYSGKPRPGYLQLLDDLRAGRADTVLAWHTDRLHRSPAELEEYIDVCEPRRVQTRTVKAGHLDLTTATGRMIARQLGVQARYEVERMIERQKRKRDEMAEHGKFFGGRRPFGFESDGVTPRALICLGCARDAPDDFTIVITCQECGTAGGIQGWACTRCKASNGRHVWAECKRCSTPASMVDGSEFHRIREAAESVLAGASLRSIAAEWNAMEPPVLTSTGGGWEGPEVGGMLRRPRNAGILVHRRQEAGPGNWPAPLDEATWRSLVALLDDPSRRTTPGNERKYLGSGLYVCGVCSSTMRCGTSNRRADKKYFAAYNCRVSKHVVRKAEPLDQYVVYLLMERVSRPDAADLLAAREDPVDVRGVQSDLREARLMLDQLAQELGAGQMGLQEWRVASAAARARKERAEESLSRAVEANPVAGLVGAEDPYAVWETLSLSRKRAAIDFAMTVTVHPARRGRLPGGVYFDTESIQIDWK

SEQ ID NO: 18542 - DNA, 50 bp, Streptomyces caniscabiei
  source 1..50: mol_type = genomic DNA
aactgcctttcaccgggcttcgacctagcgaaaccgagacaagagccgtt

SEQ ID NO: 18543 - DNA, 40 bp, Streptomyces caniscabiei
  source 1..40: mol_type = genomic DNA
ggcgggcagtggtttcgacctggcggtggcctgcgcggtc

SEQ ID NO: 18544 - DNA, 50 bp, Streptomyces caniscabiei
  source 1..50: mol_type = genomic DNA
aactgcctttcaccgggcttcgacggagcgaaaccgagacaagagccgtt

SEQ ID NO: 18545 - DNA, 40 bp, Streptomyces caniscabiei
  source 1..40: mol_type = genomic DNA
ggggggcagtggtatagaaggggcagtggcgtgggggggc

SEQ ID NO: 18546 - protein, 653 aa, Streptomyces dengpaensis
MSNVSTPLSSAFETGVRATGTRALRAVDYLRVSTEEQKKGYGVARQSRKTLRHIALKQWTHIATYKDEGVSGSLEAADRGDLKRLMESAQQTPRPFDIVVVPDGRVIGRKGRAFWRWVWALEDIGVYVAVVADDYDNTTTEGRKKMRRDADYAETEWETIRDRTQGGLQEKAELTPAAHIGGRPPYGYRIANKGTPGSYLVIDEDEAEIIRHVYDLVVGEGLNLRKATIRLIAEGVTARSGKTWTRDNLRDRIMSTPVLDGVLVFRGKHASTDENGNPIWGDSVRIDLPRILTEEQSAELRRKVAETAKQSSGQRWFYPLSGRLLGLCGKTYSGISFTPTREGARFYRCSGNAPKDPSQKSCGCSRIDANALEKHVWRRVTEIASDSEKLQALAAEWIGMAEGDTTALVDRIAALDHQIEGMNASITAVIVASAKQSKSAEAIETATAVLNDELQQLQNLRDEAAEWLAEMEESDRQARDLIALASMAKKSFPDMAPEQQAAILSMLELKVTITGPVPDDRRGGVPCTVRAWHAAAGLGIPAAALSDEEWAKVAPLLPKGRRGTVRRSVDAIFYKARTGKSWPVVIKETGATIQASKHFNTWTSDDTWSRVCAALADVEQVPLPELQLLPSMVIEGRVDPSAMLNAEERSRRG

SEQ ID NO: 18547 - DNA, 50 bp, Streptomyces dengpaensis
  source 1..50: mol_type = genomic DNA
gctgaacgcagaagaacgatcccgaacgggatcgtctcggaatgttcccg

SEQ ID NO: 18548 - DNA, 40 bp, Streptomyces dengpaensis
  source 1..40: mol_type = genomic DNA
acggaaggccgcgatgccaaaggggatgccgatgatcgtg

SEQ ID NO: 18549 - DNA, 50 bp, Streptomyces dengpaensis
  source 1..50: mol_type = genomic DNA
gctgaacgcagaagaacgatcccgatcgggatcgtctcggaatgttcccg

SEQ ID NO: 18550 - DNA, 40 bp, Streptomyces dengpaensis
  source 1..40: mol_type = genomic DNA
ccccagggccgcgatggcaatgaggatgacgatgactgtg

SEQ ID NO: 18551 - protein, 535 aa, Pseudomonas otitidis
MPYAVPYARFSSKRQAKGNSLERQQNLINSWLNQNPEYQIYSKTFQDLGKSGFKGDHLKSPDGFGQLLYAIEQKEIKSGDVILVEAIDRLGRLDELEMFSILHDIIKSGVSIVTLSDNARYGPELQKDQLWILTGKFQQARDYSIDLSRRIKSSHSAKEKLAREGKTPKRRTPIWLNSDGSIKPSTANAIKDAFDDALSGMGERRILRRLIEKDPSFLGKNPSTVRKWLTNKIAIGYWKGFRVYPPIVSDEKFYQLQKKFESEYKPAAAPSKHFISGLVKCGSCGSNLQVKANKGSPFSMVCSKRSKFGKEGCDNGKSFPMPVLLPIINDTATRSVETALSRIQLSQKEKETVVIEGEISELNQSINNLTTALIKFPLTPEIENQLETLIKDRKDRQDRLNYLAGLPNETCTSYEAAWDEQYKLIQSDPMRLNALLQLSNFSIKCHPDMTIESSNTDNELSKCKYTGYDRKAHAYKLDLGDRTYRITARDSKFTKERLDNFIHILEQQRKGLITFQPLEEDNFTRELYEFYATTY

SEQ ID NO: 18552 - DNA, 50 bp, Pseudomonas otitidis
  source 1..50: mol_type = genomic DNA
cgtagttgcattgccgccttttgctcgctatagtcggcaaaatgaatacg

SEQ ID NO: 18553 - DNA, 40 bp, Pseudomonas otitidis
  source 1..40: mol_type = genomic DNA
ggtggacgccgccttgaactcgttgttcttgtggtcgatc

SEQ ID NO: 18554 - DNA, 50 bp, Pseudomonas otitidis
  source 1..50: mol_type = genomic DNA
cgtagttgcattgccgccttttgcatgctatagtcggcaaaatgaatacg

SEQ ID NO: 18555 - DNA, 40 bp, Pseudomonas otitidis
  source 1..40: mol_type = genomic DNA
ggtggaggccggctcggacatggtcttctggtggaccatc

SEQ ID NO: 18556 - protein, 604 aa, Streptomyces anulatus
MVASVLVKPGSGTPSVPTGSMNSAPRNPTTGTAYETATLRGVRCVRLSVLTDETTSPERQREADNAIAAELNIDFGSGDSLREAVDLDVSASKVAPFDRPALGSWLARPDDYDALVWWRFDRAIRSMSDMHDLAKWAKAHRKMLVFAEGIGGGKLVFDFRNPMDPVSELMMTFFAFAAQVESQSISDRVTGAMAAIRKMVLRWRGGGRPPYGYMPAPMPKEHGGIGWTLVPDLDAVKVIERIVRELLEGLTVSAIAAGLNADIIPSPRDHWAEKQGRQTGGKTGGVKGLKKDRFLWSPAVITRMLRNETLLGWKMHKGRPVRDAEGNPVMATAEPIMSREEFDRIGAVLDSRSIDNKERTDTDALLLRVIHCDACRGRMYLSKPTKNGASVNPFYKCNSHARGDQCALPANIRASWVDDHVEAEFLRVVGPVQTTHVVEIPGYDPEPELCATVEEFEEHQRQEGRQKSKHAARAWQERADALDNRIATLEAAEKIEPQRIVTPTGRTFADEWAEKDTAGRRAMLIEAGVRLDVRRGVRGGWRKLDVRRVDFTMRGELDPAAEALAGEVSALESVARGDSPTEGASVRLIEPATVAEPVRELVAA

SEQ ID NO: 18557 - DNA, 50 bp, Streptomyces anulatus
  source 1..50: mol_type = genomic DNA
aactggtagtcagatgtgttggggtctcccaacacacggaactagtagtt

SEQ ID NO: 18558 - DNA, 40 bp, Streptomyces anulatus
  source 1..40: mol_type = genomic DNA
gaattcgttgccctccgggtcgaggagggtcacccagtgc

SEQ ID NO: 18559 - DNA, 50 bp, Streptomyces anulatus
  source 1..50: mol_type = genomic DNA
aactggtagtcagatgtgttgggggttcccaacacacggaactagtagtt

SEQ ID NO: 18560 - DNA, 40 bp, Streptomyces anulatus
  source 1..40: mol_type = genomic DNA
gaattcattgcatgccggggtgaggatggtttccgtgtgc

SEQ ID NO: 18561 - protein, 525 aa, Anaerostipes hadrus
MTDHRKTAVYIRLSAEDDNVDGRAKKESDSVTSQRILLKSFVIDQLGVAEADILEYVDDGVSGTHFKRQGFQQLQDDMKSGEIGCVVVKDFSRFGRDYLEVGFYIEYIFPLLQIRFISINDSYDSAASSGMTGGMNVALQNLVYNMYSLDLSKKISSALQTRTRNGTRLPVNARYGYKKGKDGRLEVDPEAAKVVKMIFRMAAEGTSFADITRELNRQAIATCDEQKLSRGDQVQFQRFDTIKKKHWSPTTVAAIVRDEIYIGTRIWGKTRCSMHTGHKAVLNDETEWIRLENHHTAIIDRALFEKANEMHPKKKRSVAESRTNFTLERRKKQPALLICANCGHSLLKETEHLLKCSDARTNGDPVCRSLVIRREPLEENILGLVHQYAASMLEKEKKVSSNRQCDDKEINTAELQKQSRQLTSEKMKLYDAYKDGRIDRDSYKQRAGKISVQLEEIKRKIEDAENSKKLLEQNELSDKIKLKDFLGIQKFDTEKLREIIKVIRVHSQDEIEIEWNFDDIFSEQR

SEQ ID NO: 18562 - DNA, 50 bp, Anaerostipes hadrus
  source 1..50: mol_type = genomic DNA
tttgtcctatacttgacacatccacatggtcgagttataatagggacaag

SEQ ID NO: 18563 - DNA, 40 bp, Anaerostipes hadrus
  source 1..40: mol_type = genomic DNA
gttaccgaacatcacaccacattcattccgacatacttac

SEQ ID NO: 18564 - DNA, 50 bp, Anaerostipes hadrus
  source 1..50: mol_type = genomic DNA
tttgtcctatacttgacacatccatttggtcgagttataatagggacaag

SEQ ID NO: 18565 - DNA, 40 bp, Anaerostipes hadrus
  source 1..40: mol_type = genomic DNA
gttcccaaacataaaaccatttccatttccatataattac

SEQ ID NO: 18566 - protein, 547 aa, Mycobacterium avium
MSLRFAFYGRVSTEDAQDPEASRSWQKRRAMDLITPHGGVLAADYFDVGQSRSLPWKRRPEASRLLADVACRDRSFDAVVIGEPARAFYGPQFALTFPVLTHYGVGLWVPEVGGAVDPGSEAHDLVMTLFGGMSKGERARIQMRVRTAMSALAQDTARYLGGRPPYGYRLVDAGPHPNPAKANLGQRLHRLEPDPATSSVVERIYRMYADGAGLRYIAQQLTDDGVPSPSQYDPVRNRHRDPRGWSHSAIRAILDNPAYRGIRVWGKQEKYEVLVNPDDVAAGYETRMRWRDEADWIAPDRRTHEALIPDELVQAVRLRTQARRGPGLVCSRESTVPYALRGLLFCAACGRRMQGAARVGKRTTRILYRCELGKSRSVPVDLSDHPRTVYLREDEVTARLDEWIASLADPEDLARGQDVDPAAGTGYAALQRQLREANAKVAALVSAVESGVAVEDLTAALRRRTAERDELKARLEQAERPRVMSAAQISELVEELGGLSAVLGAATGAERAEVYASLGLRLDYDPHLRQVKATADLSRVAGCVRGG

SEQ ID NO: 18567 - DNA, 50 bp, Mycobacterium avium
  source 1..50: mol_type = genomic DNA
cgtgtcgccggatgtgtccgaggggggagttgtccacctgcgacacgagt

SEQ ID NO: 18568 - DNA, 40 bp, Mycobacterium avium
  source 1..40: mol_type = genomic DNA
taaagcgggtgtccgaggggggacttgaacccccacgccc

SEQ ID NO: 18569 - DNA, 50 bp, Mycobacterium avium
  source 1..50: mol_type = genomic DNA
cgtgtcgccggatgtgtccgagggtggagttgtccacctgcgacacgagt

SEQ ID NO: 18570 - DNA, 40 bp, Mycobacterium avium
  source 1..40: mol_type = genomic DNA
gaaatggggtttcccaggctggtcttgaactaccacgccc

SEQ ID NO: 18571 - protein, 623 aa, Rhizobium leguminosarum
MPNFRRRSKPTPVRANKPSPKKATTEKPTSTKSPQVEMQTPLEMLFNDVLSRQAKKESANDRRKRLSASTNGSSQTVTAPVRVALYIRVSSDRSVQSDLSMPDQEAQLRKFCDQQKWLIVAVYYEPGKSAKSTARKEFRRMIRDASGEGAPPFDKILIHSTSRFARSARDYSIFEALLHHRHIEILAITQTFSKDAGGMVSLRMTNLMDEFHSIRSSVDSTRARVHMVNKGFWPGGVPPHGYRCIPCPENRQRSRLHVNDEERVTVEKMYSMALYGDGNGPPMGIKSMVVWLNQHGYRTRSGSRWSIQGVHRILTHSIYYGEYFWGVNQIEHQFQEKIEPCLLKVPPIVSRADFDKVQEMLERRNPRMSGAKRVSSPLLLSGIAKCACGASMTLGTGTGKHGRIYRYYRCSSDARGTNARTSVDPGDRKCSRPRVAENDLDSVVLEQVKDQVLSQDRLIELLTRLRDREMLARENENILVPQLRARISAAETALSGLLAIAKQIPSISDQRPYQDDVAAVSVELRAANQMLSDLLRRTYDHAGGITPESVDLFRNDMRELLFGENRATAKIYLSTIVAVVIVGERNIDIQGHISDLALGVDQARERGLEASASGVRTYERRWR

SEQ ID NO: 18572 - DNA, 50 bp, Rhizobium leguminosarum
  source 1..50: mol_type = genomic DNA
ggggttcgtacatatgaacgcagatggcgggctagggagaatataaatgc

SEQ ID NO: 18573 - DNA, 40 bp, Rhizobium leguminosarum
  source 1..40: mol_type = genomic DNA
atattgaaaaacgaggatatggcggacagggtgggattcg

SEQ ID NO: 18574 - DNA, 50 bp, Rhizobium leguminosarum
  source 1..50: mol_type = genomic DNA
ggggttcgtacatatgaacgcagaaagcgggctagggagaatataaatgc

SEQ ID NO: 18575 - DNA, 40 bp, Rhizobium leguminosarum
  source 1..40: mol_type = genomic DNA
atctttaaaaaagaggatgaagtggacagagtacgattgg

SEQ ID NO: 18576 - protein, 548 aa, Mycolicibacterium neoaurum
MNQKLRALVGARVSVVQGPQKVSHLAQIETATKWAEAKGYEIVGTFEDLGVSAEKRPEDRPDLGPWLTEEGAANWDVIVWSKMDRAFRSTRHCVDFARWAEERHKVVAFADDGLTLDYRPKRAGSVKGIDEMMAELFVYLGSFFAQLELNRFKTRAQDAHRAIRQMDRWASGVPPLGFKVVDHPSGKGKGLDTDESGKALLQSMARRLLDGWSFIRIAAWLNEAYADPRCSRKHVQDCECRDGAALTNMDRARIASGKPPKARPWSVNSVIDGLTSPRTQGLKMTGRGKAAMTVLDAEGEPIRLGPPTFDADTWKQLQEAATLRRIGQRTPSKTANPMLGVGFCGCAGCPACEGKQSGVSGSGEAICGASLAQQITRRALASGETGEWRSYRCGRTPLNCNGMSVKADTADSALEAYFLTLWGEEEVTRRVFVPGEDHSAELEQVEATIERLRMESDAGLLTTAEDERQWLERLRSQVAKRDQLAARPSRVAGWVTETTDQTYEEIWDAADHRQLLLDAGVRFVLVSKDPLRFDRYVPMAELAPDPFG

SEQ ID NO: 18577 - DNA, 50 bp, Mycolicibacterium neoaurum
  source 1..50: mol_type = genomic DNA
agtaataattgtgttggcacttctcagcaggtgtagacacgattgcgacc

SEQ ID NO: 18578 - DNA, 40 bp, Mycolicibacterium neoaurum
  source 1..40: mol_type = genomic DNA
ggtcgggatgatgctggaccagcagatcccgatggaggtg

SEQ ID NO: 18579 - DNA, 50 bp, Mycolicibacterium neoaurum
  source 1..50: mol_type = genomic DNA
agtaataattgtgttggcacttctatgcaggtgtagacacgattgcgacc

SEQ ID NO: 18580 - DNA, 40 bp, Mycolicibacterium neoaurum
  source 1..40: mol_type = genomic DNA
ggttgtgatgatggtggtgatggtgatcctgatggtggtg

SEQ ID NO: 18581 - protein, 493 aa, Erysipelotrichaceae bacterium I46; identical to SEQ ID NO: 2041

SEQ ID NO: 18582 - DNA, 50 bp, Erysipelotrichaceae bacterium I46
  source 1..50: mol_type = genomic DNA
cattatgcccttgtaaaaaatagtttaggtttttatacaagggcataatc

SEQ ID NO: 18583 - DNA, 40 bp, Erysipelotrichaceae bacterium I46
  source 1..40: mol_type = genomic DNA
tctgtattcttcttatagcttaccataagcgaaagaaaaa

SEQ ID NO: 18584 - DNA, 50 bp, Erysipelotrichaceae bacterium I46; identical to SEQ ID NO: 18582
  source 1..50: mol_type = genomic DNA

SEQ ID NO: 18585 - DNA, 40 bp, Erysipelotrichaceae bacterium I46
  source 1..40: mol_type = genomic DNA
tttatattcttcatagagcttactatcaaaaaaagaaaaa

SEQ ID NO: 18586 - protein, 555 aa, Acidovorax citrulli
MGECVLKGLVYSYMRFSDPRQAAGHSRERQEAYAAKWAAEHGLQLDDTLTMLDEGLSAYHQRHVKSGALGAFLAGVEAGRISAGSVLVVEGLDRLSRAEPIQAQAQLAQIVNAGITVVTASDGKVYSRERLKDNPMDLVYSLLVMIRAHEESDTKSKRVKASIRRLCEGWRAGTYRGRVRQGHDPDWLHETPEGWEVVPERVNAVRRAIELYVQGHGGKRIVETLDAEGLQLYSTSDANHSSQVYRLVKLPQLAGVKPVSVDGEDYMLEGYYPAILSQAEYDELRRVGTHSGRRRTQGDLPHVITGLGITVCGYCGRPMAGQNLATKKRLPDGRIRDGYRRLLCQSNAAYGGGCAVQASTSVAPVERALMAYCSDIMNLQALFGVDRTEGPRAQVSAAKAKVEDLNAQLERVTDAMLASAAEGTPQVFARRARALETELQDAEKALRQAEHELAGVARKNVQGAEEAWQQLAGGVEAQDVAARLRARQLVADTFERIVVYARGMRPDPAAGERDYCIDLILVGRGGNSRLLRIDRAGNLLQAEDVSQAEDVVVPG

SEQ ID NO: 18587 - DNA, 50 bp, Acidovorax citrulli
  source 1..50: mol_type = genomic DNA
ggcgatatacactcgctccggcctgggcacccgagggataccatacctat

SEQ ID NO: 18588 - DNA, 40 bp, Acidovorax citrulli
  source 1..40: mol_type = genomic DNA
ggaatccgtgagggccttcgggcagccgaggctcacgaac

SEQ ID NO: 18589 - DNA, 50 bp, Acidovorax citrulli
  source 1..50: mol_type = genomic DNA
ggcgatatacactcgctccggcctccgcacccgagggataccatacctat

SEQ ID NO: 18590 - DNA, 40 bp, Acidovorax citrulli
  source 1..40: mol_type = genomic DNA
ggcttccaggaaggccttcccgcagtcggagcacacgaac

SEQ ID NO: 18591 - protein, 544 aa, Sphingobium yanoikuyae
MNRIALYARYSSDQQSAASIEDQLRVCRERAAREGWHVVGVYEDAAISGASMILRPGIQSLVQDAQAGKFDIVLAEALDRVSRDQADVATLFKHLQFARVPLVTLAEGEISELHVGLKGTMNALFLKDLAKKTHRGQRGRVEKGFSAGPVGYGYRTVRRLSSEGELVRGECRIEPSEVPIVERIFREFAAGKSPRAIARDLNADGIPGPSGRPWSDTTIRGKRSLGIGILNNEMYVGVRVWNHKQAVKDPRTGRTVRRPNPEAEWVRAEAPQLRIVSDDMWQTVKQRQDVLGEQYKPMIDGIHAAQASRMHRARRPVTLLSGLVECGACGGKVGLAVNGRFGCINHHRRHTCDNNRTIRREALEERALAGLRDRLVSPEKVQAAVAAYAEHINRENREARAQVEADGRALDKIERAIAGIMTAIEDGLYQPTMKARMAELERQKTEVAARMALAPQAVPDVHPGIAEIYKREMERFTQALEDPETRLDASDAIRSLIHRIVLHPGEKRGEIHATLHGALMGILDFAKEAPRSTPVVTTKVAQGS

SEQ ID NO: 18592 - DNA, 50 bp, Sphingobium yanoikuyae
  source 1..50: mol_type = genomic DNA
tgttacgacaaaggtggctcagggttcgcgggaacacctatgtcgtaact

SEQ ID NO: 18593 - DNA, 40 bp, Sphingobium yanoikuyae
  source 1..40: mol_type = genomic DNA
aggaagtgggatgccagccttcgctggcatgacggagtat

SEQ ID NO: 18594 - DNA, 50 bp, Sphingobium yanoikuyae
  source 1..50: mol_type = genomic DNA
tgttacgacaaaggtggctcagggaccgcgggaacacctatgtcgtaact

SEQ ID NO: 18595 - DNA, 40 bp, Sphingobium yanoikuyae
  source 1..40: mol_type = genomic DNA
gggaagtgggatgccagcaacccatggcctgcagtagcat

SEQ ID NO: 18596 - protein, 584 aa, Sinorhizobium medicae; identical to SEQ ID NO: 1236

SEQ ID NO: 18597 - DNA, 50 bp, Sinorhizobium medicae
  source 1..50: mol_type = genomic DNA
aaggtgcatcgtgatgtctgctccttctttcaagtccaggactgcagttc

SEQ ID NO: 18598 - DNA, 40 bp, Sinorhizobium medicae
  source 1..40: mol_type = genomic DNA
gaaggcctcggccatgccgttggatggcatggacacgccg

SEQ ID NO: 18599 - DNA, 50 bp, Sinorhizobium medicae
  source 1..50: mol_type = genomic DNA
aaggtgcatcgtgatgtctgctccgtctttcaagtccaggactgcagttc

SEQ ID NO: 18600 - DNA, 40 bp, Sinorhizobium medicae
  source 1..40: mol_type = genomic DNA
gaaggccttggcaatgcgggtagctgcgatggacccgcag

SEQ ID NO: 18601 - protein, 488 aa, Propionimicrobium sp Marseille-P3275
MVKRWADSEDLEVVQEYYDAAMSGTTADRPGYQQILAELPTIKPAYVAAWKNDRLARDYVELALAKRKIRAVGAQIKYIEGISPTDSPDSILVEAINDSFAQYYSVQLAANIRRGINYNYEHGLYNGKKIFGYTVDAEKHYIPDPETAPFVKQALDEYASGVRMTTIADRLNAQGVRTIRGNKFTAKTVNAMLKKRAYIGEYYSKLKAIPGGMPQLVDDETFEEVQRRMTINKRRVARTKTQLSALGDDAPDYWLTGRMYCRECGASMQGVSGTSKTGKKHHYYYCSNQRKKKCSTRPVRKTQIEEKVTRIIEDFLDDTEMLASLAVDLAAYYKESHARGDEKLRALEARRKEVEIKLGNFAKAIAQGIFNDTTAEAMQTLEEQKRELDSAIQTEHVKAALLEDEASIGSFYKKYAKATLDSQETRDQLFEYFVDKIFVDGDEVVVVTRYYDTLETFDLEELEEALQDEAPVRELRIYGKEFDSSHSG

SEQ ID NO: 18602 - DNA, 50 bp, Propionimicrobium sp Marseille-P3275
  source 1..50: mol_type = genomic DNA
aaagagttcgacagttcccactcaggttacttagacgttcatattgatac

SEQ ID NO: 18603 - DNA, 40 bp, Propionimicrobium sp Marseille-P3275
  source 1..40: mol_type = genomic DNA
gttcgacacgcatgtcgtgagtggaggtggcgagaattga

SEQ ID NO: 18604 - DNA, 50 bp, Propionimicrobium sp Marseille-P3275
  source 1..50: mol_type = genomic DNA
aaagagttcgacagttcccactcatgttacttagacgttcatattgatac

SEQ ID NO: 18605 - DNA, 40 bp, Propionimicrobium sp Marseille-P3275
  source 1..40: mol_type = genomic DNA
gtttgactgggatgttgcctgtggaggtggagagaaatga

SEQ ID NO: 18606 - protein, 508 aa, Bacillus velezensis
MFFEEKNTEELIRYEDYPYAVYARVSSEKDSQTTSIQNQIDICHHWIEKNNYEWKDEAIQLDDGISGTILLDRKAMQLILNKAKNHKLKMVVFKSISRLARDLKDALDIKEVLLAHGVRVVTLEEGYDSLYEGKNSMKFEMFSMFAAQYPQTISVSASSALAAKARRGEHSGRVPYGYKKNGKFLEIYEEQAKVIRMIFDLYNNHGYGQKRVVNKLNEELLLGNIPKPQQNERWQLSTVQRILQNPIYCGVFIANRYTQVKIGGRKKFIRNPEEKWTIYKDWAPKIITLEDYEKANNKKHVLKKRRFNPKNELRGLMKCGVCGANMVILFSYRRRKKDGVKVEHNYVKCSAYRRGGKNMCISHPPIQYKDLREIVIEKLKEKGRKLKLNVKSDYEEKKKRRIRETKVQIEAAEKKHKRLLELFLEDQMISKAEFQSKRKEIEDQLEQLNDKLFLLEREEEESIDITNIKIAFSLLKKKDQDLYEAFHALIEKLVIHEDGTVDFHYKFQ

SEQ ID NO: 18607 - DNA, 50 bp, Bacillus velezensis
  source 1..50: mol_type = genomic DNA
tgtttgcaaaagatatgcataacaaatgagatgcatacctgttgcaaaca

SEQ ID NO: 18608 - DNA, 40 bp, Bacillus velezensis
  source 1..40: mol_type = genomic DNA
tgtacggaatcacatttcaaatgccatgcagaaattaggt

SEQ ID NO: 18609 - DNA, 50 bp, Bacillus velezensis
  source 1..50: mol_type = genomic DNA
tgtttgcaaaagatatgcataacaattgagatgcatacctgttgcaaaca

SEQ ID NO: 18610 - DNA, 40 bp, Bacillus velezensis
  source 1..40: mol_type = genomic DNA
tgtatggattacaatttaaattgccattcagagattaagt

SEQ ID NO: 18611 - protein, 536 aa, Clostridium chromiireducens
MKAAIYSRKSKFTGKGESVENQIELCKKYASDNGYNEILIYEDEGFSGGNVNRPEFKSMMKDAKLKKFDAIICYRLDRISRNVSDFSTLIDELKLLGIDFISIREQFDTTSPMGTAMMFISSVFAQLERETIAERIKDNMYELAKTGRWLGGTPPFGFSSEPEYYLDNNSKQKKMMKLSPIEEEINVVKLFFEQYLVLGSLGKLQKYLIKNNINTKRNAAWDIKALQLLLRNPVYVKSSDLVVSYLSTKGATVFGNPNSNGILSYNKKDSKDKYRDISEWILSVSMHEGIIEDTLWLKTQKLLDRNKDLAPRLVSGSSSGLFNSVLYCSKCGGRMIQKQGHKSKKTGDLLRYYVCVNKMNSGGDICKSKNIRVDKLENDVMNALFQETSDKGSLIKAIENYKKSLESEMIDKFDIKNYEKQISQKEIQIKNLLDKISLNPNLYDLFEKRIEELSEEIKSLKFKKFELENINNNFKLATKEINASTSMLLNFKKLWIGADSSMRKLLINSLVDYIQYNPDTKEAKIKLFCAKKKGAI

SEQ ID NO: 18612 - DNA, 50 bp, Clostridium chromiireducens
  source 1..50: mol_type = genomic DNA
aggcgctatttaatgtagcgcccaaatgctcggtacataaaaagacgata

SEQ ID NO: 18613 - DNA, 40 bp, Clostridium chromiireducens
  source 1..40: mol_type = genomic DNA
gtctccagtaccacctttaaatgcacctgcagttgcagca

SEQ ID NO: 18614 - DNA, 50 bp, Clostridium chromiireducens
  source 1..50: mol_type = genomic DNA
aggcgctatttaatgtagcgcccagctgctcggtacataaaaagacgata

SEQ ID NO: 18615 - DNA, 40 bp, Clostridium chromiireducens
  source 1..40: mol_type = genomic DNA
atttccagcaccacatgcagcagcacctgcagcagcagca

SEQ ID NO: 18616 - protein, 524 aa, Lachnospiraceae bacterium; identical to SEQ ID NO: 10886

SEQ ID NO: 18617 - DNA, 50 bp, Lachnospiraceae bacterium; identical to SEQ ID NO: 10887
  source 1..50: mol_type = genomic DNA

SEQ ID NO: 18618 - DNA, 40 bp, Lachnospiraceae bacterium
  source 1..40: mol_type = genomic DNA
gtgtggagtgcgtatgggagagttgttagcactgacaccg

SEQ ID NO: 18619 - DNA, 50 bp, Lachnospiraceae bacterium
  source 1..50: mol_type = genomic DNA
tttagacttatattgacaaaagcatgtgatgatgataaaataagactaaa

SEQ ID NO: 18620 - DNA, 40 bp, Lachnospiraceae bacterium
  source 1..40: mol_type = genomic DNA
gagtgaagtccatatgggatggatgtgagcactgacatga

SEQ ID NO: 18621 - protein, 545 aa, Vibrio anguillarum; identical to SEQ ID NO: 8231

SEQ ID NO: 18622 - DNA, 50 bp, Vibrio anguillarum
  source 1..50: mol_type = genomic DNA
atgtcgtcaatcatacagttagcaaatgacaactgcatgttatactacat

SEQ ID NO: 18623 - DNA, 40 bp, Vibrio anguillarum; identical to SEQ ID NO: 8233
  source 1..40: mol_type = genomic DNA

SEQ ID NO: 18624 - DNA, 50 bp, Vibrio anguillarum
  source 1..50: mol_type = genomic DNA
atgtcgtcaatcatacagttagcaagtgacaactgcatgttatactacat

SEQ ID NO: 18625 - DNA, 40 bp, Vibrio anguillarum
  source 1..40: mol_type = genomic DNA
ttgcaagccccagttagcaagtgacaggatggccaccctc

SEQ ID NO: 18626 - protein, 565 aa, Dehalobacter restrictus
MAREKICGYCRVSTKDKEQLSSFENQMSYFQREFGESDNYELVELYSDCGRSGTSLKRPGFDKMIADAGIDKSKMDGDLYLVTGKPKFTRILVKNTSRFARNVSADMLIKTLTQNGVHIDFIDTGLSTERAADIIVVQMLQVLDENDSRDKSRKVLFGIEEGIKRGNIHTHGNLYGYKYYPKPENRLEIIEEEAEVIRLIFDLYVNHNMGVHRIRQHLIEHGVFARSGKPFSERGLRVMIQNETYSGRAVRKKFTNGLIFNKHATRETGQAIIFETDKIPAIISIETFEKAQAVLESRVQHSTQKGIHKGKTLFAGKIICGCCGSTYYASSSDYIKSAGGRVRSYACSKKRTMHKDKDGNRVMLCNNRNVSETVLNEFVYGISYVSSIYEKASFGSLALYSLSVALLSRINKQDVKAINELKQQLELVQEKKKKLLGLYLENSFSKEQLDAYLEPLDAEQIELGAKINSLSKSNDEIYADIKEIEESVSYLNTLKDKAEREIESGQFTATKEEIVADIEYITVREDGKLAVRYKAFEEIERLMDKHRHFIPIEKQIEFGIARRVS

SEQ ID NO: 18627 - DNA, 50 bp, Dehalobacter restrictus
  source 1..50: mol_type = genomic DNA
accgttgaaatgtagtatatatcgtttgttatgtactacatttcaacggt

SEQ ID NO: 18628 - DNA, 40 bp, Dehalobacter restrictus
  source 1..40: mol_type = genomic DNA
gaagttgacaaaaatatcattgaacatatttctgatccgc

SEQ ID NO: 18629 - DNA, 50 bp, Dehalobacter restrictus
  source 1..50: mol_type = genomic DNA
accgttgaaatgtagtatatatcgaatgttatgtactacatttcaacggt

SEQ ID NO: 18630 - DNA, 40 bp, Dehalobacter restrictus
  source 1..40: mol_type = genomic DNA
gaaggtgtcaaatatttcaaagaacatatgtgaaatcctc

SEQ ID NO: 18631 - protein, 507 aa, Clostridium perfringens
MIHKKIIVLHRVSSDSQDFESQNNAIEDYIRENNIVVDEYIKEEGVSGYSNKLFEREAIKKIYDMALLDELDTLIVFNLDRIGRTTEVAEFLKKLTYCDVKVYSVTEGLLNGGEDTQDLINYIKSFSAQMESKKTSLRVRSGKEATNKKGLFSGGTVNFGYGVENQKMFIIEQEAEIVRLIFDLYIKEGKAGTVRILKEKGITKRGRPFSHHMVNDILKDTIYIGLKRYGHYILTDKDPTIKARKFSKESMKFQPYNESLRIISDDLFYKVQEKIQGNTIKKGNVTKLTNKTNVLFEGLLYHRCGDREIRKLHLDRKKDKYSNYIYSYRCSHCRRQFYKNVIKTYGCKKYNPVIEEHILNNLSLLSIEELEQKIIDNNKNGVILIQKSLNESEKELTKREKALSNARKELELIFLGESDMEKGVINTLIIKLTKDIEELRDNIKILNDRLEEAKSNFTIDSNLINKYKNFNFAYSKADSNYKKLLMQEVVEKIIIDGEELRIKFYID

SEQ ID NO: 18632 - DNA, 50 bp, Clostridium perfringens; identical to SEQ ID NO: 17077
  source 1..50: mol_type = genomic DNA

SEQ ID NO: 18633 - DNA, 40 bp, Clostridium perfringens
  source 1..40: mol_type = genomic DNA
gtcaggaattccagactcagttgacacgccagctcctcca

SEQ ID NO: 18634 - DNA, 50 bp, Clostridium perfringens
  source 1..50: mol_type = genomic DNA
aagtgggtttatattctatttacttcagtatcttgaatagtaacccactt

SEQ ID NO: 18635 - DNA, 40 bp, Clostridium perfringens
  source 1..40: mol_type = genomic DNA
gtgaggagttccagagccatcttacatgccaattcctaca

SEQ ID NO: 18636 - protein, 507 aa, Clostridium perfringens
MIHKKIIVLHRVSSDSQDFESQNNAIEDYIRENNIVVDEYIKEEGISGYSNKLFEREAIKKIYDMALLDELDTLIVFNLDRIGRTTEVAEFLKKLTYCDVKVYSVTEGLLNGGEDTQDLINYIKSFSAQMESKKTSLRVRSGKEATNKKGLFSGGTVNFGYGVENQKMFIIEQESEIVRLIFDLYIKEGKAGTVRILKEKGITKRRRPFSHHMVNDILKDTIYIGLKRYGHYILTDKDPTIKARKFSKESMKFQPYNESLRIISDDLFYKVQEKIQGNTIKKGNVTKLTNKTNVLFEGLLYHRCGDREIRKLHLDRKKDKYGNYIYSYRCSHCRRQFYKNVIKTYGCKKYNPVIEEHILNNLSLLSIEELEQKIIDNNKNGVILIQKSLNESEKELTKREKALSNARKELELIFLGESDMEKGVINTLIIKLTKDIEELRDNIKILNDRLEEAKSNFTIDSNLINKYKNFNFAYSKADSNYKKLLMQEVVEKIIIDGEELRIKFYID

SEQ ID NO: 18637 - DNA, 50 bp, Clostridium perfringens; identical to SEQ ID NO: 17077
  source 1..50: mol_type = genomic DNA

SEQ ID NO: 18638 - DNA, 40 bp, Clostridium perfringens; identical to SEQ ID NO: 18633
  source 1..40: mol_type = genomic DNA

SEQ ID NO: 18639 - DNA, 50 bp, Clostridium perfringens; identical to SEQ ID NO: 18634
  source 1..50: mol_type = genomic DNA

SEQ ID NO: 18640 - DNA, 40 bp, Clostridium perfringens; identical to SEQ ID NO: 18635
  source 1..40: mol_type = genomic DNA

SEQ ID NO: 18641 - protein, 507 aa, Clostridium perfringens
MIHKKIIVLHRVSSDSQDFESQNNAIEDYIRENNIVVDEYIKEEGISGYSNKLFEREAIKKIYDMALLDELDTLIVFNLDRIGRTTEVAEFLKKLTYCDVKVYSVTEGLLNGGEDTQDLINYIKSFSAQMESKKTSLRVRSGKEATNKKGLFSGGTVNFGYGVENQKMFVIEKEAKIVRLIFDLYMKEGKAGTVRFLKEKGITKRGRPFSHHMVNDILKDTIYIGLKRYGHYILIDKDPTIKARKFSKESMKFQPYNESLRIISDDLFYKVQEKIQGNTIKKGNVTKLTNKTNVLFEGLLYHRCGDREIRKLHLDRKKDKYGNYIYSYRCSHCRRQFYKNVIKTYGCKKYNPVIEEHILNNLSLLSIEELEQKIIDNNKNGVILIQKSLNENEKELTKREKALSNARKELELIFLGESDMEKGVINTLIIKLTKDIEELRDNIKILNDRLEEAKSNFTIDSNLINKYKNFNFAYSKADSNYKKLLMQEVVEKIIIDGEELRITFYID

SEQ ID NO: 18642 - DNA, 50 bp, Clostridium perfringens
  source 1..50: mol_type = genomic DNA
aagtgggtttatattcgatttactgtagtatcttgaatagtaacccactt

SEQ ID NO: 18643 - DNA, 40 bp, Clostridium perfringens; identical to SEQ ID NO: 18633
  source 1..40: mol_type = genomic DNA

SEQ ID NO: 18644 - DNA, 50 bp, Clostridium perfringens
  source 1..50: mol_type = genomic DNA
aagtgggtttatattcgatttacttcagtatcttgaatagtaacccactt

SEQ ID NO: 18645 - DNA, 40 bp, Clostridium perfringens; identical to SEQ ID NO: 18635
  source 1..40: mol_type = genomic DNA

SEQ ID NO: 18646 - protein, 507 aa, Clostridium perfringens
MIHKKIIVLHRVSSDSQDFESQNNAIEDYIRENNIVVDEYIKEEGISGYSNKLFEREAIKKIYDMALLDELDTLIVFNLDRIGRTTEVAEFLKKLTYCDVKVYSVTEGLLNGGEDTQDLINYIKSFSAQMESKKTSLRVRSGKEATNKKGLFSGGTVNFGYGVENQKMFIIEQEAEIVRLIFDLYIKEGKAGTVRILKEKGITKRGRPFSHHMVNDILKDTIYIGLKRYGHYILTDKDPTIKARKFSKESMKFQPYNESLRIISDDLFYKVQEKIQGNTIKKGNVTKLTNKTNVLFEGLLYHRCGDREIRKLHLDRKKDKYGNYIYSYRCSHCRRQFYKNVIKTYGCKKYNPVIEEHILNNLSLLSIEELEQKIIDNNKNGVILIQKSLNESEKELTKREKALSNARKELELIFLGESDMEKGVINTLIIKLTKDIEELRDNIKILNDRLEEVKSNFTIDSNLINKYKNFNFAYSKADSNYKKLLMQEVVEKIIIDGEELRIKFYID

SEQ ID NO: 18647 - DNA, 50 bp, Clostridium perfringens; identical to SEQ ID NO: 17077
  source 1..50: mol_type = genomic DNA

SEQ ID NO: 18648 - DNA, 40 bp, Clostridium perfringens; identical to SEQ ID NO: 18633
  source 1..40: mol_type = genomic DNA

SEQ ID NO: 18649 - DNA, 50 bp, Clostridium perfringens; identical to SEQ ID NO: 18634
  source 1..50: mol_type = genomic DNA

SEQ ID NO: 18650 - DNA, 40 bp, Clostridium perfringens; identical to SEQ ID NO: 18635
  source 1..40: mol_type = genomic DNA

SEQ ID NO: 18651 - protein, 507 aa, Clostridium perfringens
MIHKKIIVLHRVSSDSQDFESQNNAIEDYIRENNIVVDEYIKEEGISGYSNKLFEREAIKKIYDMALLDELDTLIVFNLDRIGRTTEVAEFLKKLTYCDVKVYSVTEGLLNGGEDTQDLINYIKSFSAQMESKKTSLRVRSGKEATNKKGLFSGGTVNFGYGVENQKMFIIEQEAEIVRLIFDLYIKEGKAGTVRILKEKGITKRGRPFSHHMVNDILKDTIYIGLKRYGHYILTDKDPTIKARKFSKESMKFQPYNESLRIISDDLFYKVQEKIQGNTIKKGNVTKLTNKTNVLFEGLLYHRCGDREIRKLHLDRKKDKYGNYIYSYRCSHCRRQFYKNVIKTYGCKKYNPVIEEHILNNLRLLSIEELEQKIIDNNKNGVILIQKSLNENEKELTKREKALSNARKELELIFLGESDMEKGVINTLIIKLTKDIEELRDNIKILNDRLEEAKSNFTIDSNLINKYKNFNFAYSKADSNYKKLLMQEVVEKIIIDGEELRITFYID

SEQ ID NO: 18652 - DNA, 50 bp, Clostridium perfringens; identical to SEQ ID NO: 18642
  source 1..50: mol_type = genomic DNA

SEQ ID NO: 18653 - DNA, 40 bp, Clostridium perfringens; identical to SEQ ID NO: 18633
  source 1..40: mol_type = genomic DNA

SEQ ID NO: 18654 - DNA, 50 bp, Clostridium perfringens; identical to SEQ ID NO: 18644
  source 1..50: mol_type = genomic DNA

SEQ ID NO: 18655 - DNA, 40 bp, Clostridium perfringens; identical to SEQ ID NO: 18635
  source 1..40: mol_type = genomic DNA

SEQ ID NO: 18656 - protein, 503 aa, Mycobacterium intracellulare
MAERAVLYARISVDKTGEQIGVTRQLHDMHALAQACGYEVVAEIVENDVTASKGLHRPGYEQVWELVRAEEIDHVLAWQSSRLMRSRRDRAEVINTFGKHNVDIIAVKGPSLDLRSAYGRGMADMMTSFDTMEGEVKAERVSAAIADLARRGKAWGYCPYGWDRVGHGVHARQVINQHEAAVVQELVDRLLAGNSLNELHRDMNKREIPAPGYAQWMKIPPERREQLLAKGRKPPTEAWAKSTIRTLVLRDANVAIRRYRKRDGGGVEMPGDWPAIVERTKHDRVVALLGLATRRSHCGPRPGARKHLLTHGIGKCGICGDMLRVARRNGRRDQVLIYTCNGPKGCTGRMQAHVDELVAKVVIGRLSKPDAMDWLLGDSERARELTERCNELQRRLDEAADSQADGKITIGQLERITARLVPQLEAARRERDAALQSVDMEQLKKLAGPEAAACWMAMSVSQRRATLQTIGLEAVVLQRRQKHGPGFEPETVHFVWRQPHPVG

SEQ ID NO: 18657 - DNA, 50 bp, Mycobacterium intracellulare
  source 1..50: mol_type = genomic DNA
aattccctttagtgacagcccagacagctggtaagttcttacatggggct

SEQ ID NO: 18658 - DNA, 40 bp, Mycobacterium intracellulare
  source 1..40: mol_type = genomic DNA
caggtccgcgcagcccaggcagctcgtcaccccggggatc

SEQ ID NO: 18659 - DNA, 50 bp, Mycobacterium intracellulare
  source 1..50: mol_type = genomic DNA
aattccctttagtgacagcccagagggctggtaagttcttacatggggct

SEQ ID NO: 18660 - DNA, 40 bp, Mycobacterium intracellulare
  source 1..40: mol_type = genomic DNA
caggagcgcgttgcccaggggcctccccaacccggggagc

SEQ ID NO: 18661 - protein, 503 aa, Eubacterium rectale
MNNRIDAIYARQSVDKKDSISIESQIEFCKYELKGGNCKEYKDKGYSGKNTERPQFQQLMRDIESGLVRKVVVYKLDRISRSILDFAKMMDFFQKYEVEFVSSTEKFDTSTPMGRAMLNICIVFAQLERETIQKRVTDAYYSRSQRGFKMGGKAPYGFHTEPIKMDGINTKKLVVNSDEAANIRLMFEMYAQPTTSYGDITRYFAEQGILFNGKELIRPTLAQMLRNPVYVQADLDVYEFFKSQGTIIVNDAADFTGMNGCYLYQGRDVKPSKKNDLKDQMLVLAPHEGIVPSDIWLTCRKKLMNNMKIQSARKATHTWLAGKIKCGNCGYALMSINNPVGKQYLRCTKRLDNKSCAGCGKIITSELEAVVYQQMVKKLASYKTLTGRKKAAKANPKIAALQVELAHVDGEIEKLVDSLTGANNVLLSYVNVKIAELDGRKQELVKQIAELTVEAISPEQVNQISGYLDTWDNVSFDDKRRVVDLMITTIAATSDSLNITWKI

SEQ ID NO: 18662 - DNA, 50 bp, Eubacterium rectale; identical to SEQ ID NO: 12
  source 1..50: mol_type = genomic DNA

SEQ ID NO: 18663 - DNA, 40 bp, Eubacterium rectale
  source 1..40: mol_type = genomic DNA
tagttttttatactatcacttcttatgtacgtaaaaactg

SEQ ID NO: 18664 - DNA, 50 bp, Eubacterium rectale; identical to SEQ ID NO: 12
  source 1..50: mol_type = genomic DNA

SEQ ID NO: 18665 - DNA, 40 bp, Eubacterium rectale
  source 1..40: mol_type = genomic DNA
taaatttttaaactatcacttcataggtaggtgaaaaata

SEQ ID NO: 18666 - protein, 502 aa, Clostridioides difficile; identical to SEQ ID NO: 13996

SEQ ID NO: 18667 - DNA, 50 bp, Clostridioides difficile; identical to SEQ ID NO: 2062
  source 1..50: mol_type = genomic DNA

SEQ ID NO: 18668 - DNA, 40 bp, Clostridioides difficile
  source 1..40: mol_type = genomic DNA
gtttaatatttcctcaactttacctgtcccaatgtaaaat

SEQ ID NO: 18669 - DNA, 50 bp, Clostridioides difficile; identical to SEQ ID NO: 3519
  source 1..50: mol_type = genomic DNA

SEQ ID NO: 18670 - DNA, 40 bp, Clostridioides difficile
  source 1..40: mol_type = genomic DNA
gtttaatatttcctcaactataactttcctcaattttcat

SEQ ID NO: 18671 - protein, 614 aa, Burkholderia multivorans
MPPAPTPKAYSYIRFSTPEQQFGDSSRRQTELSQKYAEAHGLTLDENLTYRDLGVSAFDKSNIRNGELGAFLRAIDSGAVEPGSYLLVESLDRLSRAKVTDALEIFMSIINRGIRLVTLVDGREYSKERINEQFTDLIISIVVMSRAHEESQTKSKRLKEAWKAKRGRIGDAKLTEMAPAWLKLNDERTAYSLIPDRVELIQRMFQWSKDGIGSETIARRLNQQGLPNWGTRSADQWHASYIKKILDNRAVLGEFQPHTLVNGKRVPEGDPALDYFPRIISDEDFVLAKTARQSRRTNSAGRKGQTFSNVFSGILRCGYCNGSMVYVNKGHNGPRARLLVCARAKAGKGCHYVPWEYSQFERSVLTYCKGLDFDAFLQTRDTVKSELAALSARIAVLESSIMDNEQKQAYILEAIESGAKFQQFEARMVELEQNRMKFNAELDATRQKYDLRANAKVDVTAVRASIDGLLQRISELEGDELYDMRARLSQHIKRLIVRIAMYPGGYIEQPFFVEKLRAHLISRGTDVKAADEYIASRLKLTPNVSERFFTMISRSDAVRTIRPDLDNPEILHLQQDEGRQGLAAHAEIISAMLEKLSEIAGQSTDGMKTVPPRF

SEQ ID NO: 18672 - DNA, 50 bp, Burkholderia multivorans
  source 1..50: mol_type = genomic DNA
ctgggtctaattggccacaagttaaggacatagggccaaataaacccaag

SEQ ID NO: 18673 - DNA, 40 bp, Burkholderia multivorans
  source 1..40: mol_type = genomic DNA
gccgggcgggccgaccatcagcatgtggtggccgcccgcg

SEQ ID NO: 18674 - DNA, 50 bp, Burkholderia multivorans
  source 1..50: mol_type = genomic DNA
ctgggtctaattggccacaagttagggacatagggccaaataaacccaag

SEQ ID NO: 18675 - DNA, 40 bp, Burkholderia multivorans
  source 1..40: mol_type = genomic DNA
gccgggcgcgccggccgtcgggtggtggtggtggccggcg

SEQ ID NO: 18676 - protein, 615 aa, Burkholderia multivorans
MPATPTPKAYSYIRFSTPEQQKGDSSRRQTELSQKYAEAHGLTLDENLTYRDLGVSAFDKSNIRNGELGAFLRAIDSGAVEPGSYLLVESLDRLSRAKVTDALEVFMSIINRGIRLVTLVDGREYSQERINEQFTDLIISIVVMSRAHEESQTKSKRLKEAWKAKRGRIGDAKLTEMAPAWLKLNEDRTAYSLVQDRVELVQRMFQLSKDGIGSESIARRLNQQGIPTWGTRSADQWHASYIKKILDNRAVLGEFQPHMLVSGKRVPEGHPAPDYFPRIISDEDFVLAKVARQSRRTNSAGRKGQTFSNVFSGILRCGYCNGSMVYVNKGHSGPRAKLLVCARAKAGKGCHYVPWEYPQFERSVLTYCKGLDFDAFLQTRDTVKSELAALSARIAVLESSITDNERKQANILEAIESGAKFQQFEARMVELEQNRMKFNAELDETRQKYDLRANAKADVTAVRASIDELLQRLSELEGDELYDVRARLSQHIKRLIVRIAMYPGGYIEKPFFVEKLRAHLISKGTDTKETDEYIASRLKLTPNISERFFTMISRSDAIRTIRPDLENPEILHLQSLGDGQGLGTHAEAIGAMLHRLADIASKSPGSGEKLCDTDG

SEQ ID NO: 18677 - DNA, 50 bp, Burkholderia multivorans
  source 1..50: mol_type = genomic DNA
tggggtctaattggccacaagttaaggatataaggccaaataaacccaga

SEQ ID NO: 18678 - DNA, 40 bp, Burkholderia multivorans; identical to SEQ ID NO: 18673
  source 1..40: mol_type = genomic DNA

SEQ ID NO: 18679 - DNA, 50 bp, Burkholderia multivorans
  source 1..50: mol_type = genomic DNA
tggggtctaattggccacaagttagggatataaggccaaataaacccaga

SEQ ID NO: 18680 - DNA, 40 bp, Burkholderia multivorans; identical to SEQ ID NO: 18675
  source 1..40: mol_type = genomic DNA

SEQ ID NO: 18681 - protein, 508 aa, Bacteroidaceae bacterium
MNVILYCRVSTDEQADGCSLDVQERCLRAYCENHHYNIIGEEQPYREDYSAKHYDLRRPKLKKLYEYCRKHRHEVDKVLFLRWDRYSRNVEFAFAYKRKFYDELGIEINAIESPIDFKGTEWSTLLSLYCGVAHTEDEKISRRTKEGIHGTLLKGRCPNKAPRGYVNKRRENGEPYVEIDETKANAIRQAFKEVAKGVETANYIRRRLCPSIPQATFFKMLHNIFYKGEILVPAFKDEPMQIVKGQHEAIIDAETFNKVQDILSGKRKHEPKLSKAIDPDLYLRKYIICPICGYSITGATSRGKGGKYKYYNCCHDGKHLRRPAEYVNDKFASWVGGLKPNKEVLELYTEILQELRGEHKKDRQREVEALRKEIEKVNERLAKADEKYLEGNLNAENYNRITENCKKQIQEIQERIELLQTDTIGLKDKIDYSMNIIANLGLFMKNAPVKTKCKILSSMFPQKIEFDGEKYRTQSYNQVLDLIYMETNKLRGDEKKESEKSEEISHSV

SEQ ID NO: 18682 - DNA, 50 bp, Bacteroidaceae bacterium
  source 1..50: mol_type = genomic DNA
atctgaagagatttctcactcagtagccctaaagaaactgttctcgaact

SEQ ID NO: 18683 - DNA, 40 bp, Bacteroidaceae bacterium
  source 1..40: mol_type = genomic DNA
gtctgcgttctgaagtggtagcgcctacgagaatcgaact

SEQ ID NO: 18684 - DNA, 50 bp, Bacteroidaceae bacterium
  source 1..50: mol_type = genomic DNA
atctgaagagatttctcactcagtctccctaaagaaactgttctcgaact

SEQ ID NO: 18685 - DNA, 40 bp, Bacteroidaceae bacterium
  source 1..40: mol_type = genomic DNA
gaatgtgttctgaaatgctctagagtaggagaatcgaact

SEQ ID NO: 18686 - protein, 481 aa, Mycolicibacterium fortuitum
MRTSADQHIQRAVVYTRVSSDKAKGRSVAEQETECRAECERRGWPVADVLTDNDRSATRFATKDRPQYARLGQVLRPGDVLVVWEPSRAGRSLDHYVDLRRLCTDRGVMLSYSGKLFDLDDGDDRFTTGLDALIAEREAEDARKRIQRAHRANLAAGKPHGKLSYGYRIVRDPQTGKSIGREPDPVRAPLVAEAARRMLDGHSFKSVLAWIAAQDPDQKWSDVQLRRVLTNPTSAGLRTHRGEVTGPGTWEPILTEDQHADLVAMFAARRSAPRGPGPRHLLSGIAACARCEEPMWRHTGGKLADGSRSVVYTCRHRHAARSLAVVDKAVLAVIEGILTSPEALAALATAPDQPDATAAAKAELADLKGQLQAVEDRMADLSMPAEVGARVATRLGERIAELEAAVVPVFTDPVVRELATAPDAVKAWRALPLEQKREFIRAVLVVTVAPVGKGRGRWNGNKEEGITVTPRRALVSTTATS

SEQ ID NO: 18687 - DNA, 50 bp, Mycolicibacterium fortuitum
  source 1..50: mol_type = genomic DNA
ttgcgggggtatctgaccattaagtggttaaacgttggtaaattgccatt

SEQ ID NO: 18688 - DNA, 40 bp, Mycolicibacterium fortuitum
  source 1..40: mol_type = genomic DNA
cttggcggcgacgatggtgtggttgaaggtgattgccata

SEQ ID NO: 18689 - DNA, 50 bp, Mycolicibacterium fortuitum
  source 1..50: mol_type = genomic DNA
ttgcgggggtatctgaccattaagttgttaaacgttggtaaattgccatt

SEQ ID NO: 18690 - DNA, 40 bp, Mycolicibacterium fortuitum; identical to SEQ ID NO: 3800
  source 1..40: mol_type = genomic DNA

SEQ ID NO: 18691 - protein, 495 aa, Elizabethkingia anophelis
MKTAYLYVRVSTDEQKRKGYSLPEQEDRLLKYCKYNNIEVKGIYREDYSAKNFNRPEWKELFSEIKKKSSEDKNILFIKWDRFSRNVEYAYEMIGKLRKYKTTAMAIDQPIDFSVPESTVMLAVYLAVPEAENTRRAQNTSNGIRRAKLMGRYPNKAPIGFINVTLIDGKKAIVPKEPEAEIIKWAFSQAVQNHHKISEISKIANEKGLICSRSYFFRILRNPIYCGIISVKLNSNERQMIKGLHEPLISEALFDQVQSVINTKRKMTAKRDDLKEMFFLRGFLTCPVCGRKLTGSFSKGKQNRYPYYHCDNRCKIRIGAVLLNDSYQNKLQELILADNTMELFKNILENQNIKTQKASYLYAQQLVDRKIKEEKLTLSRGRKLFIAGILKIDDYNELKQESQINTKNLKKEERDITLNLRVIDKMNQMENKTFREIFQKFVKFDTSDKKYLVNLIPPVDIDYKTGDLSLELKPAFSKILSKKSNRKNNRKNEFH

SEQ ID NO: 18692 - DNA, 50 bp, Elizabethkingia anophelis
  source 1..50: mol_type = genomic DNA
tatttattagttgtctccttaagtgacctcagcggtgcattttccgaaca

SEQ ID NO: 18693 - DNA, 40 bp, Elizabethkingia anophelis
  source 1..40: mol_type = genomic DNA
ggcctttttgttttcgagtgagcgcgggaggagtcgaacc

SEQ ID NO: 18694 - DNA, 50 bp, Elizabethkingia anophelis
  source 1..50: mol_type = genomic DNA
tatttattagttgtctccttaagttgcctcagcggtgcattttccgaaca

SEQ ID NO: 18695 - DNA, 40 bp, Elizabethkingia anophelis
  source 1..40: mol_type = genomic DNA
ggccttttcttttttgagttggccaggctggattcgaact

SEQ ID NO: 18696 - protein, 556 aa, Anaerobutyricum hallii
MAMMNEMEYRTIGSALAGGYRAAVYCRLSKDDDLQGESASIANQRDMLEKYCEKQGWEVVAVYQDDGFTGLNMERPDLQRMLRAIERRQINLVITKDLSRLGRNYLQTGHLIEDFFPRNGVRYIAMNDGIDTLRDNNDIAPFKNILNEMYSKDISKKVHSSYLLKAQKGQFTGCLAPFGYRKDPEDKNHLLIDEETAPIVRLIFGYALNGHGPNYIRRRLEEEKIPCPTWWNRERGLRNTRTKWEKKDPENGRYMWDFSVIKDLLMNPVYTGAIASQKKDYRFKIGTIGEKKPEDWIVVEGQHEPLIDRMSFDIVQNKLKSRQRPGQTNEISLFAGLIKCGECGKSLTIRYTNAKHPQQIYSCKTYNAFGKNHCTQHRIDYDTLYSHVLRKIRECARAALMDGEAVADRLTNTCEAEKREQREAMERSLTRDEERIEVLNKMVMRLYEDMIAGRISEQNFNTMLEKTQTEQTELKTKVSDGRKRLSDEVQLANDAKQWVEAIQEYANITELDAATLNRLIKEIVVHERIDEDKTRHISIEIHFNLKPIPEVEQVTA

SEQ ID NO: 18697 - DNA, 50 bp, Anaerobutyricum hallii
  source 1..50: mol_type = genomic DNA
ttttacacctaattgggtataaaacagtttatggctaattaaagggaaca

SEQ ID NO: 18698 - DNA, 40 bp, Anaerobutyricum hallii; identical to SEQ ID NO: 8173
  source 1..40: mol_type = genomic DNA

SEQ ID NO: 18699 - DNA, 50 bp, Anaerobutyricum hallii
  source 1..50: mol_type = genomic DNA
ttttacacctaattgggtataaaagtgtttatggctaattaaagggaaca

SEQ ID NO: 18700 - DNA, 40 bp, Anaerobutyricum hallii
  source 1..40: mol_type = genomic DNA
aaaggcagcagaaataaaggtgtgcgtggcgggaggtggc

SEQ ID NO: 18701 - protein, 556 aa, Blautia massiliensis
MAMMNEMEYRTIGSALAGGYRAAVYCRLSKDDDLQGESASIANQRDMLEKYCEKQGWEVVAVYQDDGFTGLNMERPDLQRMLRAIERRQVNLVITKDLSRLGRNYLQTGHLIEDFFPRNGVRYIAMNDGIDTLRDNNDIAPFKNILNEMYSKDISKKVHSSYLLKAQKGQFTGCLAPFGYRKDPEDKNHLLIDEETAPIVRLIFGYALNGHGPNYIRRRLEEEKIPCPTWWNRERGLRNTRTKWEKKDPENGRYMWDFSVIKDLLMNPVYTGAIASQKKDYRFKIGTIGEKKPEDWIVVEGQHEPLIDRMSFDIVQNKLKSRQRPGQTNEISLFAGLIKCGECGKSLTIRYTNEKHPQQIYSCKTYNAFGKNHCTQHRIDYDTLYSHVLRKIRECARAALMDGEAVADRLTNTCEAEQREQREAMERSLTRDEERIEVLDKMVMRLYEDMIAGRISEQNFNTMLEKTQTEQTELKAKVSEGRKRLSDEVQLANDAKQWVEAIQEYANITELDVATLNRLIKEIVVHERIDEDKTRHISIEIHFNLKPIPEVEQVTA

SEQ ID NO: 18702 - DNA, 50 bp, Blautia massiliensis
  source 1..50: mol_type = genomic DNA
ttttacacctaattggggataaaacagttcatggctaattaaagggaaca

SEQ ID NO: 18703 - DNA, 40 bp, Blautia massiliensis; identical to SEQ ID NO: 8173
  source 1..40: mol_type = genomic DNA

SEQ ID NO: 18704 - DNA, 50 bp, Blautia massiliensis
  source 1..50: mol_type = genomic DNA
ttttacacctaattggggataaaagtgttcatggctaattaaagggaaca

SEQ ID NO: 18705 - DNA, 40 bp, Blautia massiliensis; identical to SEQ ID NO: 18700
  source 1..40: mol_type = genomic DNA

SEQ ID NO: 18706 - protein, 449 aa, Mycobacterium pseudokansasii
MGVARQLEDCRKLAADRGWPVGAEYVDNDVSAFSGKPRRQYARMLAELASGDRDAVIVYNLDRLHRRPVELEEFVTLCESVGVRDVATVTADIDLGNDDGLFMARIFAAFAAKESGRKSARIRRKMLQNAQAGLPHGSARPFGYEADKITVRESEAAVVRQMVDRYLAGQSLRSLTIWLNQAGIAPSVAASWQTTAVRQVLSSGRIAGLREHRGEVIGDAVWPAIITVAERDRVLARMAARSVSKSRTARTYLLSGMLRCGRCGNRLYSQARHSNPQNRVRRYVCLRGPDHGGCGRLTVVAAPVEELLTEAVLARLDSPQLADVLAGKATADADVAALAAQVDADQQRLDELAGLYADGAITAREWIAARDPITDRITAARRDIAAATDTTAVYELAGTGSALRTGWADLDLGRQQAIVKAVLDHAVIAPGTPGARRLDIDRVAPVWRV

SEQ ID NO: 18707 - DNA, 50 bp, Mycobacterium pseudokansasii
  source 1..50: mol_type = genomic DNA
agggtagctttagaacttgtctccaaagtcagatgttgttaatataccct

SEQ ID NO: 18708 - DNA, 40 bp, Mycobacterium pseudokansasii
  source 1..40: mol_type = genomic DNA
tggcgccaccgagctggacaacctggtactgctctgcccc

SEQ ID NO: 18709 - DNA, 50 bp, Mycobacterium pseudokansasii
  source 1..50: mol_type = genomic DNA
agggtagctttagaacttgtctccccagtcagatgttgttaatataccct

SEQ ID NO: 18710 - DNA, 40 bp, Mycobacterium pseudokansasii
  source 1..40: mol_type = genomic DNA
aggcgcgagccagctgcaccccccggccctgctgtgcccc

SEQ ID NO: 18711 - protein, 605 aa, Streptomyces griseus
MVASVLVKPGSGNLSVPTGGMNSAPRNPLAGTAFETRTLRGVRCVRLSVLTDETTSPERQREADDRVAAELNIDFGSGDTLREAVDLDVSASTFGPFDRPELGGWLARPDEYDALVWWRFDRAIRSMAHMHELAKWAREHRKMLVFAEGIGGGKLVFDFRNPMDPMAEFQMMMLAFAAQVESQSIKDRVTGAMAAIRRMTLRWRGGGRPPYGYMPAPMPAEFGGIGWTLVPDPDAVKVIERIVRELLEGATVSAIAAGLNADIIPSPRDHWAVKMKREKGGKTGGAKGSHVVRDAFKWTPAVITRMLRNETLLGWKMHKGRPVRDTEGNPIMATTQPIMTREEFDRIGAVLDKRSINTGDRTDTDALLLRVIHCDSCEGRMYRDKMSASTNQTPIYKCNAHGRGINCEAAAHVRADWVEEYVTAEFLRVVGPVQTTHVVETPGYDPEPELRATVAEFEEHQRQEGRQKSKHAARAWQERADALDNRIATLEAAEKVEPQRIVTPTGRTFADEWAEKDTAGRRAMLVEAGVRLDVRRGVRGGWRKLDVRRVDFTMRGELDPAAEALAGEVSALESVVRGDSPTEGASVRLVEPATVAEPVRELVAA

SEQ ID NO: 18712 - DNA, 50 bp, Streptomyces griseus
  source 1..50: mol_type = genomic DNA
aactggtagttagatgtgttggggtctcccaacacacggaactagtagtt

SEQ ID NO: 18713 - DNA, 40 bp, Streptomyces griseus
  source 1..40: mol_type = genomic DNA
gaagcggttgccctcggggtcggcgagcaccacgaagtcc

SEQ ID NO: 18714 - DNA, 50 bp, Streptomyces griseus
  source 1..50: mol_type = genomic DNA
aactggtagttagatgtgttggggagtcccaacacacggaactagtagtt

SEQ ID NO: 18715 - DNA, 40 bp, Streptomyces griseus
  source 1..40: mol_type = genomic DNA
gaagctgtggccctcggggagggggagagcctgatagtcc

SEQ ID NO: 18716 - protein, 510 aa, Pseudomonas monteilii
MPSAIPYIRFSSVRQIGSNSIERQRQMVNQWLLKHNEYTLSNLTYEDLGRSGYHGEHLKDDSGFTRLLQAVNAGLIKAGDCVLVEAIDRTGRLSPMRMLREVISPIIESGVSIITLDDGVTYDQTSVEGGHLFLLVAKIQAAHSYSKALSERTKASYAIRREQARKTGKVKRHTPIWLTSDGEVIEHIAMHVREAFDLYISGMGKTAIANRIRASSIGELKKCSGPTITNWLSNRAAIGYWNDVKVYPAIVSVEKFTLAHQRAKKLATAPPQRTGKSLFSGLLVCGVCNSNYITHWKDGKENNMRCGLHHRLKHAGCSNAETIPIQIARHVYRLTAPKFNSKALAATKLTNAGKRIIEIRDRISAISDNISRLVKMIALADMPEIEQQLNELNNERSILNNELNSLKNAQTEAPLITTTEHIEFKKLSISDPVKASAMLKQAGYKIVVHPGKKLSVAETEHLFIYKGIHRHGNKTIGYKLEYNGTLSFIPPTGSSVALSSIGESVNPNDN

SEQ ID NO: 18717 - DNA, 50 bp, Pseudomonas monteilii
  source 1..50: mol_type = genomic DNA
tggtgtacttagtgaaaatcttgctcacaacattttcacatggtacactc

SEQ ID NO: 18718 - DNA, 40 bp, Pseudomonas monteilii
  source 1..40: mol_type = genomic DNA
catgcccatcaggcccaggtcccagcccttgatcacacgc

SEQ ID NO: 18719 - DNA, 50 bp, Pseudomonas monteilii
  source 1..50: mol_type = genomic DNA
tggtgtacttagtgaaaatcttgccaacaacattttcacatggtacactc

SEQ ID NO: 18720 - DNA, 40 bp, Pseudomonas monteilii
  source 1..40: mol_type = genomic DNA
cttccccatcagcctcaggcaccagccctggcagacaccc

SEQ ID NO: 18721 - protein, 522 aa, Neobacillus mesonae
MVKQYHVAIFNRKSRNEGDTDETLRNHRQITIRLCEEKGYTYDNYEEIISGASKFEERKELIRLLENVDKGMYDAVVTVEVSRLARSGQYSQIIADTLAENNVLIITPKETIDLTIDSQRLLYDIQAAVNSNEYRVIRNRMRTGMIEKAKRGEYVSAKAPFGYDAVIKNKIRTLQPNENASTVKFCYDLAEKGYGMKQIVKELNLRGLKSSSGGKFAFKSVQNILKNKQYTGTNIFKLSDKKGNITNVIEVPDAFTKIVSLEQWLKVQDAIKERTSGDNEVRNRARGEVRTILKDLLYCSNCGAKIGFQFNPARNLMVKKCRCGMRGITEQALLEYFWDELISVEKHFRKEWEKALEISSEGTAKEITLQIDALNSSKSKLNKKLKRARDEYLDGVFTKEEYLSDKADIEKEIQEVESNIVELEKRLLAVDTEGLRKKLQDRVHWIEEVKRITKKRQGKLTMPIGEEMPAVQPEDFPEVNRLLKLVIDKIYYRRDDEHTWVDEEGNVEVTKEIYVHLNITTK

SEQ ID NO: 18722 - DNA, 50 bp, Neobacillus mesonae
  source 1..50: mol_type = genomic DNA
ttagtatctataagtgcatttgtttcatcaattgaacttatagataacta

SEQ ID NO: 18723 - DNA, 40 bp, Neobacillus mesonae
  source 1..40: mol_type = genomic DNA
tgatatggactcaattgcgtcagcaattgggtaccccctg

SEQ ID NO: 18724 - DNA, 50 bp, Neobacillus mesonae
  source 1..50: mol_type = genomic DNA
ttagtatctataagtgcatttgttcaatcaattgaacttatagataacta

SEQ ID NO: 18725 - DNA, 40 bp, Neobacillus mesonae
  source 1..40: mol_type = genomic DNA
tggtctggactgaattgcccaagcccttggctccccccgg

SEQ ID NO: 18726 - protein, 464 aa, Eubacterium maltosivorans
MKKRAGLYIRVSTEEQVDNYSIPEQKRRLEAYCQSHDWAVAEEYIDGGFSGAKLDRPAMQKMIADSKAGNLDVVVSIKLDRLSRSQKDTLHLIEDIFLPYHVDYVSVNESFDTGTSFGRAMVGILSVFAQLEREQILERMHSGMEARAKTGLYHGSKPPYGYTLEKGILKIDPTEAVAVRKVFDLWLKGYSYNKISEIMEETYHGEKAWMHPSAINQLLTNPAYIGKIRFAGNVIDGQHEAIIDEISFKKANLRLETRAANRGRQTTYLLTGVVWCGNCGSRYGINLSTCKGIRYTYYTCSPNRRKKGNEGIRCCGNKPIPTKKLDPLIIEKIKRLAISKDFFEEIQKPDASLSDAIASLESAAAEIDKRIGKLMELYSMDGIPTDTLSQQINTLYAQKKDLESQISEKQSGFKQTYEDYKEVFDKVDYAFESGTIEEQKSIVRSLIKRIDILNQEITITWNFQ

SEQ ID NO: 18727 - DNA, 50 bp, Eubacterium maltosivorans
  source 1..50: mol_type = genomic DNA
cttacctgaataaaactaagtattttagttcttggttttattcaggtaat

SEQ ID NO: 18728 - DNA, 40 bp, Eubacterium maltosivorans
  source 1..40: mol_type = genomic DNA
tttagaacccttgacaattttcccatccttttctccataa

SEQ ID NO: 18729 - DNA, 50 bp, Eubacterium maltosivorans; identical to SEQ ID NO: 18727
  source 1..50: mol_type = genomic DNA

SEQ ID NO: 18730 - DNA, 40 bp, Eubacterium maltosivorans
  source 1..40: mol_type = genomic DNA
tttagaaacctcaacaaatttcccattttttacaccagaa

SEQ ID NO: 18731 - protein, 585 aa, Kibdelosporangium aridum
MNDTSLNSTVAAYASGVKRRKRAVLYLRVSTPGQVNTDFNPEGISIPAQREAAKRKAESLDADIVREFVEPGRTATSIEKRPTFQEMIAWVKSQKDIDYVIVYHFNRVFRDAVDAGITKRDLKKVGTRIVSTILDMGESPESAMVETILHAVDQYQSQASGADIKYKMGQKARNGGTIGQARLGYLNVRIPKPEGGEIRTVMVDKERAPLVRLAFELYATGEYTLADLSGELYDRGLRTRATARHPSKQVSINKLSMMLRDRYYIGYVTYQDEEFKGRHEPLISEELFEAVQAIIETRATAQERRRVHHHYLKGSLYCGRCHRAGVTSRMIIQHTVNSRGTEYTYFFCRNKQNGTCPSPHINVIHVEDAVEAHYATVRFAPGFVADVRSHVAKALEDEEAATRLLHRQLTTEIHALDVKESNLIDLVADGDETIPQAKVKEKLRDIERQRQRLQVRLEDTNEELAVTARLIELSLELLENPQELYRRCDDEQRRLLNQAIFEKLYVDQDQVTEHELHEPFGLLHDMQRDRDEPPDKPDTGTPYGRIPHARRAVSLVGDGPSGISSVEALLGGMDLVHCSSKPSRV

SEQ ID NO: 18732 - DNA, 50 bp, Kibdelosporangium aridum
  source 1..50: mol_type = genomic DNA
attgttctagtaagccctccagggtggaccccaggggaggccactacaac

SEQ ID NO: 18733 - DNA, 40 bp, Kibdelosporangium aridum
  source 1..40: mol_type = genomic DNA
cacaggtcccctgacgacgtggagctgaggggaatcgaac

SEQ ID NO: 18734 - DNA, 50 bp, Kibdelosporangium aridum; identical to SEQ ID NO: 18732
  source 1..50: mol_type = genomic DNA

SEQ ID NO: 18735 - DNA, 40 bp, Kibdelosporangium aridum
  source 1..40: mol_type = genomic DNA
gacagggcccctgacctcgtggacctcatgggaaatgaac

SEQ ID NO: 18736 - protein, 477 aa, Bacillus cereus; identical to SEQ ID NO: 17946

SEQ ID NO: 18737 - DNA, 50 bp, Bacillus cereus; identical to SEQ ID NO: 17947
  source 1..50: mol_type = genomic DNA

SEQ ID NO: 18738 - DNA, 40 bp, Bacillus cereus
  source 1..40: mol_type = genomic DNA
tttcgttccttcttttctgcctaagaaactagaaccatgc

SEQ ID NO: 18739 - DNA, 50 bp, Bacillus cereus
  source 1..50: mol_type = genomic DNA
cttatgtattataagaagttttgcttgaaaaacctcttgtaacacataaa

SEQ ID NO: 18740 - DNA, 40 bp, Bacillus cereus
  source 1..40: mol_type = genomic DNA
tttgattccttcttgtcagttaaagaaactagaaccccat

SEQ ID NO: 18741 - protein, 556 aa, Enterocloster bolteae
MAMMNEMEYRTIGSALAGGYRAAVYCRLSKDDDLQGESASIANQRDMLEKYCEKQGWEVVAVYQDDGFTGLNMERPDLQRMLRAIERRQINLVITKDLSRLGRNYLQTGHLIEDFFPRNGVRYIAMNDGIDTLRDNNDIAPFKNILNEMYSKDISKKVHSSYLLKAQKGQFTGCLAPFGYRKDPEDKNHLLIDEETAPIVRLIFGYALNGHGPNYIRRRLEEEKIPCPTWWNRERGLRNTRTKWEKKDPENGRYMWDFSVIKDLLMNPVYTGAIASQKKDYRFKIGTIGEKKPEDWIVVEGQHEPLIDRMSFDIVQNKLKSRQRPGQTNEISLFAGLIKCGECGKSLTIRYTNAKHPQQIYSCKTYNAFGKNHCTQHRIDYDTLYSHVLRKIRECARAALMDGEAVADRLTNTCEAEQREQREAMERSLTRDEERIEVLDKMVMRLYEDMIAGRISEQNFNTMLEKTQTEQTELKTKVSEGRKRLSDEVQLANDAKQWVEAIQEYANITELDAATLNRLIKEIVVHERIDEDKTRHISIEIHFNLKPIPEVEQVTA

SEQ ID NO: 18742 - DNA, 50 bp, Enterocloster bolteae; identical to SEQ ID NO: 18702
  source 1..50: mol_type = genomic DNA

SEQ ID NO: 18743 - DNA, 40 bp, Enterocloster bolteae
  source 1..40: mol_type = genomic DNA
aaaatcacagggcatgaagcagctcatggccggcgctggt

SEQ ID NO: 18744 - DNA, 50 bp, Enterocloster bolteae
  source 1..50: mol_type = genomic DNA
ttttacacctaattggggataaaagcgttcatggctaattaaagggaaca

SEQ ID NO: 18745 - DNA, 40 bp, Enterocloster bolteae
  source 1..40: mol_type = genomic DNA
aaattcacatggcaggcaggcgcccaccgccggcggtgat

SEQ ID NO: 18746 - protein, 479 aa, Streptococcus anginosus; identical to SEQ ID NO: 14481

SEQ ID NO: 18747 - DNA, 50 bp, Streptococcus anginosus; identical to SEQ ID NO: 14052
  source 1..50: mol_type = genomic DNA

SEQ ID NO: 18748 - DNA, 40 bp, Streptococcus anginosus
  source 1..40: mol_type = genomic DNA
aacatggtctattccaggcggtgcaatggagcttggcgaa

SEQ ID NO: 18749 - DNA, 50 bp, Streptococcus anginosus
  source 1..50: mol_type = genomic DNA
tgcgtcattttcttgacatgagagttgtattgtgtcataataatgacagg

SEQ ID NO: 18750 - DNA, 40 bp, Streptococcus anginosus
  source 1..40: mol_type = genomic DNA
aatatgatctcctacaggatttgcaatagagcttgacaaa

SEQ ID NO: 18751 - protein, 558 aa, Mycobacteroides abscessus
MSQPANETALRAVSYLRVSTKDQASRGGLAEGLSIPAQRGAITAKARAIGAEILMEFADAGESGRSVDRPQLQEMLHYLRNNNVDVVIVHKIDRLARNRADDVTINLAIRQAGAQLVSVTENVDETPQGQLVHGIFSAVADFYSANLAQEVLKGMEQKVRNGGSIGRAPVGYINVRTTINGREARQVAIDPERADHVRWAFDTYATNPDMTLSRLTTLLQDRGLTLRATAKQPERAVQRSHTHKMLTNRFYVGITRMRGVEYPGYHEPLIDERTFQQVQDRLATNRGSGNRERKHLQYLSGSLYCGRCRSRLVYTINRGRHGGLYEYYACSGRQMKKTDCDAPHFALARIEEAVALVWDAEHAAWQTHAVPAVHEELIQHLRALREESGRSTSLIQRRIDKVQRDRHKWAESAMDGIVPADIAREKQAQLARQLVSLTAELASLEAAGVDTEATLNQLIDQISDPGRAYRRLDEGLRRTYNQAWFSRIYIDVVPDGPDSVLQTDTDRTTISQALEACRQIITATENNSADPEGSAEIIDIGSRHARGSIKNPLVELRG

SEQ ID NO: 18752 - DNA, 50 bp, Mycobacteroides abscessus
  source 1..50: mol_type = genomic DNA
gccaggggttcgattaagaacccttttgtggagctaacgggacaactatc

SEQ ID NO: 18753 - DNA, 40 bp, Mycobacteroides abscessus
  source 1..40: mol_type = genomic DNA
ggtcgtctgacctgggattatggtggagctaaggggactc

SEQ ID NO: 18754 - DNA, 50 bp, Mycobacteroides abscessus
  source 1..50: mol_type = genomic DNA
gccaggggttcgattaagaaccctcatgtggagctaacgggacaactatc

SEQ ID NO: 18755 - DNA, 40 bp, Mycobacteroides abscessus
  source 1..40: mol_type = genomic DNA
ggcagcctgacatgggattcaggtgctgctgagaggcctc

SEQ ID NO: 18756 - protein, 538 aa, Mycobacteroides abscessus
MATAVIYLRVSTKDQATRGNEAEGFSIPAQRDACERKAQALGATVVHEFVDAGESARSADRPELQRMLKYLAANPTTYVIVHKLDRLARNRADDVQITLAIQASGSTLVSVTENIDSTPSGALLHGIMSSIAEFYSRNLANEIMKGTKQKALSGGTPTIAPIGYLNVRETVNGREIRTIRTDPDRAHHIRWAFEQYATGDWTLRTLSTALNSRGLSQRPTPNRPARPLPTNKLHKVLRNRYYLGYVTWQGIEYPGSHEPLIDPATFDQVQHTLTAHQRSGERSSRRKHHLAGSLYCGRCNSKLIYAVSTGRHGGKYGYWFCIGRHTLRNGCHLPYLPEERVEAAVAGLWHTTQLPTATIETIRASLSDDLAVYGAHTDQELTLLNRRIKEVERERLKWADLAMDGTVPRDIARDKQAALATQLGQLEHQRTSLTSTNIDHTEVINTALDLLGRCSDAYERATEATRRDLNQAYFERLLLDSTDGEPIIKSAEQTEIIELIATAEREPELTTSGKADLALTTYSTVKGSKIASMVELRG

SEQ ID NO: 18757 - DNA, 50 bp, Mycobacteroides abscessus
  source 1..50: mol_type = genomic DNA
gtcaagggttcgaagatcgcctctattgtggggctaaggggaacactctc

SEQ ID NO: 18758 - DNA, 40 bp, Mycobacteroides abscessus; identical to SEQ ID NO: 18753
  source 1..40: mol_type = genomic DNA

SEQ ID NO: 18759 - DNA, 50 bp, Mycobacteroides abscessus
  source 1..50: mol_type = genomic DNA
gtcaagggttcgaagatcgcctctcatgtggggctaaggggaacactctc

SEQ ID NO: 18760 - DNA, 40 bp, Mycobacteroides abscessus; identical to SEQ ID NO: 18755
  source 1..40: mol_type = genomic DNA

SEQ ID NO: 18761 - protein, 556 aa, Mycobacteroides abscessus
MSQPANEAALRAVSYLRVSTKDQASRGGLAEGLSIPAQRSAIAAKASAIGAEIVMEFADAGESGRSADRPQLQEMLRYLRNNHADVVIVHKIDRLARNRADDVTINLAIRQAGAQLVSVTENVDETPQGQLIHGIFSAVADFYSANLAQEVLKGMEQKVRSGGTIGRAPVGYINVRTTINGREARQIAIDHERADHVRWAFDTYATNPDMTLSRLTTLLQDRGLTLRATAKQPERPVQRSHTHKMLTNRFYVGRTRLRGVEYPGNHEPLIDERTFQQVQDRLAANRGTGNRERKHLQYLSGSLYCGRCRSRLVYTINRGRHGGVYEYYACSGRQIKKTDCDAPHFAVARIEEAVALVWDAEHAAWQTHAVPTVHEELIQHLRALREESGRNTSLIQRRIDKVQRDRHKWAESAMDGIVPADIAREKQAQLARQLVSLTAELASLEAAGVDTEATLNQLIEQISDPGRAYRRLEEGLRRTYNQAWFSRIYIDAVPEDVNSLLQADTDRTTISQALEACRQIITAAENNSADPEGSAEIIDIGSRHARGSIKNPLVEL

SEQ ID NO: 18762 - DNA, 50 bp, Mycobacteroides abscessus
  source 1..50: mol_type = genomic DNA
gccaggggttcgattaagaacccttttgtggacctaagtggacaactatc

SEQ ID NO: 18763 - DNA, 40 bp, Mycobacteroides abscessus; identical to SEQ ID NO: 18753
  source 1..40: mol_type = genomic DNA

SEQ ID NO: 18764 - DNA, 50 bp, Mycobacteroides abscessus
  source 1..50: mol_type = genomic DNA
gccaggggttcgattaagaaccctcatgtggacctaagtggacaactatc

SEQ ID NO: 18765 - DNA, 40 bp, Mycobacteroides abscessus; identical to SEQ ID NO: 18755
  source 1..40: mol_type = genomic DNA

SEQ ID NO: 18766 - protein, 590 aa, Mycobacteroides abscessus
MKPYDITATMFGTPTEDAAVDVKDAVSLLRVSSKRQMDTAVDIDPDGLSIATQRRVVELKANSVGTHVVKEFLEPGYSAKTIDERPIFKELLHYLNTHPNIGFVIVYMRSRAFRNQYDAAMVQMHLQKRGIRLISAKEDFGEGPYAEAMEGMVDIMNGLTNKLQGLDIQTKMYEKARHGGTNGQTRLGYLNVRDVYDGKPFNTVRLDPKRAPLVKKAWELYATGDYTLERLADTMTDLGLTARANRRWPERPVSYKWYHRMFKDIYYLGFITYKGKGEQTQIFPGRHEPLIEQELFDRVQDVLNQRSRKGQRDRIHQHYLKGHLFCARCERHGRTSRLIYTEAKSRNGSYYRYFMCRARQDKLGCDLPLLPAELVEDTITDHYHTLALPADFIDSVRELLSQTLADEQGSVRTMHAQLAKRIKDLDQKEERLIDLAADDSLPQDKIRIRLRRIQNDRASAQAGLLSTTAELNTGADILKSALAALSNPASYYQRADDTTRRFMNQTFYTKFLLDDEGVVDHRLNPPFDDFHQAKATWNTTKPATLTDYLNAHPPQTQKRPPSRETPSHNLEPTLAGIVSVPGLSTASMVE

SEQ ID NO: 18767 - DNA, 50 bp, Mycobacteroides abscessus
  source 1..50: mol_type = genomic DNA
gtacccggtttgagtacggcttctatggtggagctcctgagacactattc

SEQ ID NO: 18768 - DNA, 40 bp, Mycobacteroides abscessus; identical to SEQ ID NO: 18753
  source 1..40: mol_type = genomic DNA

SEQ ID NO: 18769 - DNA, 50 bp, Mycobacteroides abscessus
  source 1..50: mol_type = genomic DNA
gtacccggtttgagtacggcttctcaggtggagctcctgagacactattc

SEQ ID NO: 18770 - DNA, 40 bp, Mycobacteroides abscessus; identical to SEQ ID NO: 18755
  source 1..40: mol_type = genomic DNA

SEQ ID NO: 18771 - protein, 554 aa, Mycobacteroides abscessus
MPQPATEVALSAVSYLRVSTKDQASRGGLAEGLSIPAQRSAIAAKARTIGAEIVMEFADAGESGRSTDRPQLQEMLRYLRNNHVDLVIVHKIDRLARNRADDVTINLAIRQAGAQLVSVTENVDESPQGQLIHGIFSAVADFYSANLAQEVLKGMEQKVRGGGTIGRAPVGYINIRTTINGREARQVAIDPERADHVRWAFDTYATNPDMTLSRLTTLLHDRGLTIRATANQAERPLQRSQVHKMLTRRFYVGYTTLRGVEYPGNHQALIDERTFQQVQDRLATNRGTGNRERKHLQYLAGSLYCGRCRSRLVYTINRGRHGGLYEYYACTGRQSKKTDCDAPHFAVARIEDAVALVWDAEHAAWQTQSIPAIHEELVQYLRALREESGRNTRLIRHRIDKIQRDRHKWAENAIDGIVPADIARDKQAQLARQLASLTTELASLEAAGIDTEATLNQLIDQISDPGRAYRRLDDGLRRTYNQAWFSRIYIDVVPNNPDSPLRTNTDRTVISQSLETCRQILLAAQNNPADPEGPAEIIDIGSRRTRGSIKNPLV

SEQ ID NO: 18772 - DNA, 50 bp, Mycobacteroides abscessus
  source 1..50: mol_type = genomic DNA
accaggggttcgattaagaaccctttggtggacctaacagaacaactatc

SEQ ID NO: 18773 - DNA, 40 bp, Mycobacteroides abscessus; identical to SEQ ID NO: 18753
  source 1..40: mol_type = genomic DNA

SEQ ID NO: 18774 - DNA, 50 bp, Mycobacteroides abscessus
  source 1..50: mol_type = genomic DNA
accaggggttcgattaagaaccctcaggtggacctaacagaacaactatc

SEQ ID NO: 18775 - DNA, 40 bp, Mycobacteroides abscessus; identical to SEQ ID NO: 18755
  source 1..40: mol_type = genomic DNA

SEQ ID NO: 18776 - protein, 589 aa, Mycobacteroides abscessus
MKPYDITATMFGTPTEDATVEVKDAVSLLRVSSKRQMDTAIDIDPDGLSIATQRRVVELKANSVGTRVVKEFLEPGYSAKTIDERPIFKELLHYLNTHPNIGFVIVYMRSRAFRNQYDAAMVQMHLQKRGIRLISAKEDFGEGPYAEAMEGMVDIMNGLTNKLQGLDIQTKMYEKARHGGTNGQARLGYLNVRDVYDGKPFNTVRLDPKRAPLVKKAWELYATGDYTLERVADTMTDLGLTARANRRCPERPVSYKWYHRMFKDIYYLGFITYKGKGEQTQIFPGRHEPLIEQELFDRVQDVLNQRSRKGQRDRIHQHYLKGHLFCARCERHGRTSRLIYTEAKSRNGSYYGYFMCRARQDKLGCDLPLLPVELVEDTITDHYHTLALPADFIDSVRELLSQTLADEQGSVRTMHAQLAKRIKDLDQKEERLIDLAADDSLPQDKIRIRLRRIQSDRASAQAGLLSTTAELNTGADILKSALAALSNPASYYQLADDTTRRFMNQTFYTKFLLDDEGVVDHCLNPPFDDFHQAKAAWNTTKPATLTDYLNAHPPQTQKRLPSRETPSHNLEPTLAGIVSVPGLSTASMV

SEQ ID NO: 18777 - DNA, 50 bp, Mycobacteroides abscessus
  source 1..50: mol_type = genomic DNA
gtacccggtttgagtacggcttctattgtggacctcctgagacactactc

SEQ ID NO: 18778 - DNA, 40 bp, Mycobacteroides abscessus; identical to SEQ ID NO: 18753
  source 1..40: mol_type = genomic DNA

SEQ ID NO: 18779 - DNA, 50 bp, Mycobacteroides abscessus
  source 1..50: mol_type = genomic DNA
gtacccggtttgagtacggcttctcatgtggacctcctgagacactactc

SEQ ID NO: 18780 - DNA, 40 bp, Mycobacteroides abscessus; identical to SEQ ID NO: 18755
  source 1..40: mol_type = genomic DNA

SEQ ID NO: 18781 - protein, 589 aa, Mycobacteroides abscessus
MKPYDITATMFGTPTEDATVDVKDAVSLLRVSSKRQMDTAIDIDPDGLSIATQRRVVELKATSAGTRVVKEFLEPGYSAKTIDERPIFKELLHYLNTHPNIGFVIVYMRSRAFRNQYDAAMVQMHLQKRGIRLISAKEDFGEGPYAEAMEGMVDIMNGLTNKLQGLDIQTKMYEKARHGGTNGQARLGYLNVREEYDGKPFNTVRLDPKRAPLVKKAWELYATGDYTLERVADTMTDLGLTARANRRCPERPVSYKWYHRMFKDIYYLGFITYKGKGEQAQIFPGRHEPLIEQELFDRVQDVLNQRSRKGQRDRIHQHYLKGHLFCARCERQGRTSRLIYTEAKSRNGSYYGYFMCRARQDKLGCDLPLLPVELVEDTITDHYHTLALPADFIDSVRELLSHTLADEQGSVRTMHAQLAKRIKDLDQKEERLIDLAADDSLPQDKIRIRLRRIQNDRASAQAGLLSTTAELNTGADTLESALAALSNPASYYQRADDTTRRFMNQTFYTKFLLDDEGVVDHCLNPPFDDFHQAKAAWNTTKPATLTDYLNAHPPQTKKRLPSRETPSHNLEPTLAGIVSVPGLSTASMV

SEQ ID NO: 18782 - DNA, 50 bp, Mycobacteroides abscessus
  source 1..50: mol_type = genomic DNA
gtacccggtttgagtacggcttctatggtggacctcctgagacactattc

SEQ ID NO: 18783 - DNA, 40 bp, Mycobacteroides abscessus; identical to SEQ ID NO: 18753
  source 1..40: mol_type = genomic DNA

SEQ ID NO: 18784 - DNA, 50 bp, Mycobacteroides abscessus
  source 1..50: mol_type = genomic DNA
gtacccggtttgagtacggcttctcaggtggacctcctgagacactattc

SEQ ID NO: 18785 - DNA, 40 bp, Mycobacteroides abscessus; identical to SEQ ID NO: 18755
  source 1..40: mol_type = genomic DNA

SEQ ID NO: 18786 - protein, 589 aa, Mycobacteroides abscessus
MKPYDITATMFGTPTEDATVDVKEAVSLLRVSSKRQMDTAIDIDPDGLSIATQRRVVELKANSVGTHVVKEFLEPGYSAKTIDERPIFKELLHYLNTHPNIGFVIVYMRSRAFRNQYDAAMVQMHLQKRGIRLISAKEDFGEGPYAEAMEGMVDIMNGLTNKLQGLDIQTKMYEKARHGGTNGQARLGYLNVREEYDGKPFNTVRLDPKRAPLVKKAWELYATGDYTLERVADTMTDLGLTARANRRWPERPVSYKWYHRMFKDIYYLGFITYKGKGEQTQIFPGRHEPLIEQELFDRVQDVLNQRSRKGQRDRIHQHYLKGHLFCARCERHGRTSRLIYTEAKSRNGSYYGYFMCRARQDKLGCDLPLLPAELVEDTITDHYHTLALPADFIDSVRELLSQTLADEQGSVRTMHAQLAKRIKDLDQKEERLIDLAADDSLPQDKIRIRLRRIQNDRASAQAGLLSTTAELNTGADVLKSALAALSNPASYYQRADDTTRRFMNQTFYTKFLLDDEGVVDHHLNPPFDDFHQAKAAWNTTKPATLTDYLNAHPPQTQKRLPSRETPSHNLEPTLAGIVSVPGLSTASMV

SEQ ID NO: 18787 - DNA, 50 bp, Mycobacteroides abscessus; identical to SEQ ID NO: 18782
  source 1..50: mol_type = genomic DNA

SEQ ID NO: 18788 - DNA, 40 bp, Mycobacteroides abscessus; identical to SEQ ID NO: 18753
  source 1..40: mol_type = genomic DNA

SEQ ID NO: 18789 - DNA, 50 bp, Mycobacteroides abscessus; identical to SEQ ID NO: 18784
  source 1..50: mol_type = genomic DNA

SEQ ID NO: 18790 - DNA, 40 bp, Mycobacteroides abscessus; identical to SEQ ID NO: 18755
  source 1..40: mol_type = genomic DNA

SEQ ID NO: 18791 - protein, 589 aa, Mycobacteroides abscessus
MKPYDITATMFGTPTEDATVDVKEAVSLLRVSSKRQMDTAVDIDPDGLSIATQRRVVELKANSVGTRVVKEFLEPGYSAKTIDERPIFKELLHYLNTHPNIGFVIVYMRSRAFRNQYDAAMVQMHLQKRGIRLISAKEDFGEGPYAEAMEGMVDIMNGLTNKLQGLDIQTKMYEKARHGGTNGQARLGYLNVRDVYDGKPFNTVRLDPKRAPLVKKAWELYATGDYTLERVADTMTDLGLTARANRRCPERPVSYKWYHRMFKDIYYLGFITYKGKGEQTQIFPGRHEPLIEQELFDRVQDVLNQRSRKGQRDRIHQHYLKGHLFCARCELHGRTSRLIYTEAKSRNGSYYGYFMCRARQDKLGCDLPLLPVELVEDTITDHYHTLALPADFIDSVRELLSQTLADEQGSVRTMHAQLAKRIKDLDQKEERLIDLAADDSLPQDKIRIRLRRIQNDRASAQAGLLSTTAELNTGADIVKSALAALSNPASYYQRADDATRRFMNQTFYTKFLLDDEGVVDHCLNPPFDDFHQAKAAWSTTKPATLTDYLNAHPPQTQKRLPSRETPSHNLEPTLAGIVSVPGLSTASMV

SEQ ID NO: 18792 - DNA, 50 bp, Mycobacteroides abscessus; identical to SEQ ID NO: 18782
  source 1..50: mol_type = genomic DNA

SEQ ID NO: 18793 - DNA, 40 bp, Mycobacteroides abscessus; identical to SEQ ID NO: 18753
  source 1..40: mol_type = genomic DNA

SEQ ID NO: 18794 - DNA, 50 bp, Mycobacteroides abscessus; identical to SEQ ID NO: 18784
  source 1..50: mol_type = genomic DNA

SEQ ID NO: 18795 - DNA, 40 bp, Mycobacteroides abscessus; identical to SEQ ID NO: 18755
  source 1..40: mol_type = genomic DNA

SEQ ID NO: 18796 - protein, 559 aa, Pseudomonas chlororaphis
MKKKVFCYVRFSSKKQEHGDSIERQQRLINDYLEKNNAEVVEQFNDLGVSAFRGKNVKAGQLSRFLDRVKKGEIGTGDTLIVESLDRISRQKELDTISILASILNAGVVIFTLADQRVYNAQDEDHANLIFQINFIISRAHDESLTKQRRSISAWTRKHEEARSGKAVMTRKLPYWLRTIEDNGTTKIVVIEERAKEVRRVFELASYKLGAQAIATKINSEGAEKRWTLIAIRHLLSSKSVYGSFEAFKTKSLSGTLEKNQTYEEIEGYFPPVIEKSEFYKVQASLEKNKEIYATRGRTPKGFRNVFKGLIKCLDCDSYLHQSFMKRKGKEYMYLICHKSLVNACPSGKKVIIPYRHVLEPFLLFFKNYGVEKLLSSSNSQELKNKLSAVNQERISKNESLLRISSDIEKNNGETPKTLMSLMTKIESQLSKLEEEYNVLLGQLENLEASDVIKNEITRTELHELLDSEEGRLKFNSLLSIQKIEVLISRNFGEEYSSMFIFFHEKGFSENIKFNRKEAILPFTGRYNFYTRTYSDGFVGEPTPIENVDHENFKIDWSL

SEQ ID NO: 18797 - DNA, 50 bp, Pseudomonas chlororaphis
  source 1..50: mol_type = genomic DNA
attttgtgaaatcgctagctaatcgcgcttagatgttgtattctcaaact

SEQ ID NO: 18798 - DNA, 40 bp, Pseudomonas chlororaphis
  source 1..40: mol_type = genomic DNA
ggtgggcctgcccgaagcggcggtcaaggaaagcaaggac

SEQ ID NO: 18799 - DNA, 50 bp, Pseudomonas chlororaphis
  source 1..50: mol_type = genomic DNA
attttgtgaaatcgctagctaatcgtgcttagatgttgtattctcaaact

SEQ ID NO: 18800 - DNA, 40 bp, Pseudomonas chlororaphis
  source 1..40: mol_type = genomic DNA
agagcttctgcctgaagcggtggaaaagaaaagcaaggac

SEQ ID NO: 18801 - protein, 532 aa, Pseudomonas viridiflava
MKQAISYIRFSSARQEGGSSVERQEGMIAKWLLDHQDYELSKLNYSDLGKSGFHGEHVKEGGNFGKLLKAVMDGYIERGDVVLVEAIDRTGRLPALQMLSDVIAPILRAGVSIITLDDNTTYTEASVGGPHLFMLVAKIQAAHEYSRTLSRRVEDSYKKRRKDAKEKGVAPKRMTPVWLNSDGTVREDVAPWIKTAFELYVSGVGKSTIAKRLRESGVERLAKTSGPSVEGWLRNKAVIGKWETLIGTPEHTVIDDVYPPIIEPSLFYKAQVHAEKMRTQRPVKTAKHFLVGLVRCSECGKNYVMQNLHGKPHSMRCRTRQSQNNCANSYVVPKPVLDAIYRYTSVTAAIEAVKQQQLGVNEKEIVTREAELLTITKRVEGFVEAVKEAGPMPELLTALKQARIDRENAENALVILRSTVVTPSANQWREMGKVWSLEAEDAQRLAAMLRMVGYHMTVSLGGIITSSHSNTVYQYMGVDRMKDMYKMTVDGKLQLIHKAHIDDYPYHEPFQAVEGEVAWHEADYDNLRLQYQ

SEQ ID NO: 18802 - DNA, 50 bp, Pseudomonas viridiflava
  source 1..50: mol_type = genomic DNA
cagtgttacttacaaaaagcttgctcccaacattttcacatgtaacactg

SEQ ID NO: 18803 - DNA, 40 bp, Pseudomonas viridiflava
  source 1..40: mol_type = genomic DNA
catgcccatcagaccctgatcccagcccttgatcacgcgc

SEQ ID NO: 18804 - DNA, 50 bp, Pseudomonas viridiflava; identical to SEQ ID NO: 18802
  source 1..50: mol_type = genomic DNA

SEQ ID NO: 18805 - DNA, 40 bp, Pseudomonas viridiflava; identical to SEQ ID NO: 3815
  source 1..40: mol_type = genomic DNA

SEQ ID NO: 18806 - protein, 532 aa, Pseudomonas viridiflava
MKQAISYIRFSSARQEGGSSVERQEGMIAKWLLDHQDYELSKLNYSDLGKSGFHGEHVKEGGNFGKLLKAVMDGYIERGDVVLVEAIDRTGRLPALQMLSDVIAPILRAGVSIITLDDNTTYTEASVGGPHLFMLVAKIQAAHEYSRTLSRRVEDSYKKRRKDAKEKGVAPKRMTPVWLNSDGKVREDVAPWIKTAFELYVSGVGKSTIAKRLRESGVERLAKTSGPSVEGWLRNKAVIGKWETLIGTPEHTVIDDVYPPIIEPSLFYKAQVHAEKMRTQRPVKTAKHFLVGLVRCSECGKNYVMQNLHGKPHSMRCRTRQSQNNCANSYVVPKPVLDAIYRYTSVTAAIEAVKQQQLGVNEKEIVTREAELLTITKRVEGFVEAVKEAGPMPELLTALKQARIDRENAENALVILRSTVVTPSANQWREMGKVWSLEAEDAQRLAAMLRMVGYHMTVSLGGIITSSHSNTVYQYMGVDRMKDMYKMTVDGKLQLIHKAHIDDYPYHEPFQAVEGEVAWHEADYDNLRLQYQ

SEQ ID NO: 18807 - DNA, 50 bp, Pseudomonas viridiflava; identical to SEQ ID NO: 18802
  source 1..50: mol_type = genomic DNA

SEQ ID NO: 18808 - DNA, 40 bp, Pseudomonas viridiflava; identical to SEQ ID NO: 18803
  source 1..40: mol_type = genomic DNA

SEQ ID NO: 18809 - DNA, 50 bp, Pseudomonas viridiflava; identical to SEQ ID NO: 18802
  source 1..50: mol_type = genomic DNA

SEQ ID NO: 18810 - DNA, 40 bp, Pseudomonas viridiflava; identical to SEQ ID NO: 3815
  source 1..40: mol_type = genomic DNA

SEQ ID NO: 18811 - protein, 458 aa, Staphylococcus aureus; identical to SEQ ID NO: 11826

SEQ ID NO: 18812 - DNA, 50 bp, Staphylococcus aureus
  source 1..50: mol_type = genomic DNA
ttgtgcggaactacgaacagtttataaatacgaagtgtacaaacttccat

SEQ ID NO: 18813 - DNA, 40 bp, Staphylococcus aureus
  source 1..40: mol_type = genomic DNA
atgtatggaggcacttgtatcaacataggatgtattgctt

SEQ ID NO: 18814 - DNA, 50 bp, Staphylococcus aureus
  source 1..50: mol_type = genomic DNA
ttgtgcggaactacgaacagtttattaatacgaagtgtacaaacttccat

SEQ ID NO: 18815 - DNA, 40 bp, Staphylococcus aureus
  source 1..40: mol_type = genomic DNA
atgtatggctgtacatgtattcacataggttttatttcat

SEQ ID NO: 18816 - protein, 460 aa, Staphylococcus lugdunensis
MKVAIYTRVSTLEQREKGHSIDEQERKLRSFCDINDWTVQDVYVDAGFSGAKRDRPELNRLLDDISKFDLVLVYKLDRLTRSVRDLLDLLEVFENNNVAFRSATEVYDTTTAIGRLFVTLVGAMAEWERETIRERSLMGKRAAIKKGMILTAPPFYYDRVNNTYIPNQYKDVVLDVYNKVKKGYSIAHIARLYNNSDVKPPNDNKEWTTRMLMHALRNPVTRGHYQWGEIYIEDSHEPIITDEMYNTIIDRLDKHTNTKVVAHTSVFRGKLICPNCGYALTLNSQKRKRKNDTIIYKTYYCNNCKITKGMKPHHITETETLRVFKDHLSKIDLKQYETQEKEKQSHVTIDLSKVMEQRKRYHKLYASGMMQENELFELIKETDEMIEEYEKQRKQVDVKEFDICKIKEIKDVLLKSWDIFTLEDKADFIQMSIKAINIEYTKLKRGKSSNSMKIKDIEFY

SEQ ID NO: 18817 - DNA, 50 bp, Staphylococcus lugdunensis
  source 1..50: mol_type = genomic DNA
gtacggaagtagatactatctttcaatatagaacgtttatagttccatac

SEQ ID NO: 18818 - DNA, 40 bp, Staphylococcus lugdunensis
  source 1..40: mol_type = genomic DNA
gtatggcggtacatgtatcaacattggttgtattcctaca

SEQ ID NO: 18819 - DNA, 50 bp, Staphylococcus lugdunensis
  source 1..50: mol_type = genomic DNA
gtacggaagtagatactatctttccatatagaacgtttatagttccatac

SEQ ID NO: 18820 - DNA, 40 bp, Staphylococcus lugdunensis
  source 1..40: mol_type = genomic DNA
gtatggctgtacatgtattcacataggttttatttcattc

SEQ ID NO: 18821 - protein, 460 aa, Staphylococcus lugdunensis
MKVAIYTRVSTLEQREKGHSIDEQERKLRSFCDINDWTVKDVYVDAGFSGAKRDRPELTRLLDDISEFDLVLVYKLDRLTRSVRDLLDLLEVFENNNVAFRSATEVYDTTTAIGRLFVTLVGAMAEWERETIRERSLMGKRAAIKKGMILTAPPFYYDRVNNTYIPNQYKDVVLDVYNKVKKGYSIAHIARLYNNSDVKPPNGNEEWTTRMLMHALRNPVTRGHYQWGEIYIEDSHEPIITDEMYNTIIDRLDKHTNTKVVAHTSVFRGKLICPNCGYALTLNSQKRKRKNDTIVYKTYYCNNCKITKGMKPHHITETETLRVFKDHLSKIDLKQYETQEKEKQSHVTIDLSKVMEQRKRYHKLYASGMMQENELFELIKETDEMIEEYEKQRKQVDVKEFDICKIKEIKDVLLKSWDIFTLEDKADFIQMSIKAINIEYTKLKRGKSSNSMKIKDIEFY

SEQ ID NO: 18822 - DNA, 50 bp, Staphylococcus lugdunensis
  source 1..50: mol_type = genomic DNA
gtacggaagtagatactatctttcaatatccatgttacttagtgccatac

SEQ ID NO: 18823 - DNA, 40 bp, Staphylococcus lugdunensis; identical to SEQ ID NO: 18818
  source 1..40: mol_type = genomic DNA

SEQ ID NO: 18824 - DNA, 50 bp, Staphylococcus lugdunensis
  source 1..50: mol_type = genomic DNA
gtacggaagtagatactatctttccatatccatgttacttagtgccatac

SEQ ID NO: 18825 - DNA, 40 bp, Staphylococcus lugdunensis; identical to SEQ ID NO: 18820
  source 1..40: mol_type = genomic DNA

SEQ ID NO: 18826 - protein, 460 aa, Staphylococcus lugdunensis
MKVAIYTRVSTLEQREKGHSIDEQERKLRSFCDINDWTVKDVYVDAGFSGAKRDRPELTRLLDDISEFDLVLVYKLDRLTRSVRDLLDLLEVFENNNVAFRSATEVYDTTTAIGRLFVTLVGAMAEWERETIRERSLMGKRAAIKKGMILTAPPFYYDRVNNTYIPNQYKDVVLDVYNKVKKGYSIAHIARLYNNSDVKPPNGNEEWTTRMLMHALRNPVTRGHYQWGEIYIEDSHEPIITDEMYNTIIDRLDKHTNTKVVAHTSVFRGKLICPNCGYALTLNSQKRKRKNDTIVYKTYYCNNCKITKGMKPHHITETETLRVFKDHLSKIDLKQYETQEKEKQSHVTIDLSKVMEQRKRYHKLYASGMMQENELFELIKETDEMIEEYEKQRKQVDVKEFDIGKIKEIKNVLLKSWDIFTLEDKADFIQMSIKAINIEYTKLKRGKASNSMKIKDIEFY

SEQ ID NO: 18827 - DNA, 50 bp, Staphylococcus lugdunensis; identical to SEQ ID NO: 18822
  source 1..50: mol_type = genomic DNA

SEQ ID NO: 18828 - DNA, 40 bp, Staphylococcus lugdunensis; identical to SEQ ID NO: 18818
  source 1..40: mol_type = genomic DNA

SEQ ID NO: 18829 - DNA, 50 bp, Staphylococcus lugdunensis; identical to SEQ ID NO: 18824
  source 1..50: mol_type = genomic DNA

SEQ ID NO: 18830 - DNA, 40 bp, Staphylococcus lugdunensis; identical to SEQ ID NO: 18820
  source 1..40: mol_type = genomic DNA

SEQ ID NO: 18831 - protein, 460 aa, Staphylococcus lugdunensis; identical to SEQ ID NO: 18821

SEQ ID NO: 18832 - DNA, 50 bp, Staphylococcus lugdunensis; identical to SEQ ID NO: 18817
  source 1..50: mol_type = genomic DNA

SEQ ID NO: 18833 - DNA, 40 bp, Staphylococcus lugdunensis; identical to SEQ ID NO: 18818
  source 1..40: mol_type = genomic DNA

SEQ ID NO: 18834 - DNA, 50 bp, Staphylococcus lugdunensis; identical to SEQ ID NO: 18819
  source 1..50: mol_type = genomic DNA

SEQ ID NO: 18835 - DNA, 40 bp, Staphylococcus lugdunensis; identical to SEQ ID NO: 18820
  source 1..40: mol_type = genomic DNA

SEQ ID NO: 18836 - protein, 540 aa, Subdoligranulum sp; identical to SEQ ID NO: 17726

SEQ ID NO: 18837 - DNA, 50 bp, Subdoligranulum sp; identical to SEQ ID NO: 3657
  source 1..50: mol_type = genomic DNA

SEQ ID NO: 18838 - DNA, 40 bp, Subdoligranulum sp
  source 1..40: mol_type = genomic DNA
ggtatcccgctgggaaaacggagagactgtgcccaacaca

SEQ ID NO: 18839 - DNA, 50 bp, Subdoligranulum sp; identical to SEQ ID NO: 3659
  source 1..50: mol_type = genomic DNA

SEQ ID NO: 18840 - DNA, 40 bp, Subdoligranulum sp
  source 1..40: mol_type = genomic DNA
ggtagcaagctgggaaaactttgagattgtgctaatcaaa

SEQ ID NO: 18841 - protein, 447 aa, Cellulomonas sp
MTRAAIYLRQSLDSKDDRLAISRQDKECQALCERRGWTVVSTFTDNDVSATRAAQRPQYRAMLQSWEARDFDAIVAWDLDRLYRKPRDLEDLIDMAEKRGLLLATVGGDADLSTDNGRLFARIKAAVAKGEGERKSARQKASSRQRVAMGKPWWSVAPFGYTKDGTLTQQADLVRSAYDQVLAGVTIAEITHTWNDAGALSPRGKRWIRTSVLAVLKAPRNAGLVTYLGEVARQGNWEPIVSEGTFYAVQGVLADPGRGKGGGARKHLLTGLAECGLCGRKMVSATQGAAKYRYRSYRCPTGHLSCKAEWLEAIVLDAQNAPKERREPGAAPAFRHHVTRPSLELLYGEASTLRERLDGITDSYAAGAIPLQMMTRGAADIERRLAEVQARMVVEVDKGQMTTGGTPWDEMTLDERARHLRSSVDVVVEAIPRYTKRPPTSVKVNVR

SEQ ID NO: 18842 - DNA, 50 bp, Cellulomonas sp
  source 1..50: mol_type = genomic DNA
ctgtctgtttgccgacacaacaggtccatggtgtgacggttcccgcatac

SEQ ID NO: 18843 - DNA, 40 bp, Cellulomonas sp
  source 1..40: mol_type = genomic DNA
cgacgcccacttgaacaggtccatgttcgcgtgcaggcac

SEQ ID NO: 18844 - DNA, 50 bp, Cellulomonas sp
  source 1..50: mol_type = genomic DNA
ctgtctgtttgccgacacaacaggctcatggtgtgacggttcccgcatac

SEQ ID NO: 18845 - DNA, 40 bp, Cellulomonas sp
  source 1..40: mol_type = genomic DNA
tgacgcccagttgaaaagacttatgttcgtgtgaggccac

SEQ ID NO: 18846 - protein, 464 aa, Mycobacterium paraintracellulare
MTTATITAARAVIYTRVSSDKAKGRSVKEQEGECRAECERNGWTVADVLTDNDRSATRFATKDRPQYARLRDVLQPGDVLVVWEPSRAGRSLDHYVDLRRLCSERKVLLSYSGRTFDLNDGDDRFTTGLDALVAEKQAEDTRKQILRAHAANLAAGKPHGKLVYGYRIVRHPGTGKSAGREPDPVTAPLVAEAARRVLAGESLASVARWMETLDPQGWRGERLRRILINPTIAGHRTHHGQITGPGTWEPIITDDQHRDLVALFAAREAGPRGMPVRHLLSGIAVCGFCGDRLWRNKARDGRSNYICRNTCVCRDKDRVDAAVLAVVEGILAKPESRAALAQPPADTAGAEKAESHLAELKRRLEAVEQQIIDGTMAPASGARITARLTEQIAAAEVSVAPRFTVPVVRELATAPDPVAAWRSLPLAAKRDFIKATMTVTVDRIGRGRWHDKRDGITVEPRRAG

SEQ ID NO: 18847 - DNA, 50 bp, Mycobacterium paraintracellulare
  source 1..50: mol_type = genomic DNA
aacaatccattgttcaccttcaactagttgaaggtgcataataggtagtt

SEQ ID NO: 18848 - DNA, 40 bp, Mycobacterium paraintracellulare
  source 1..40: mol_type = genomic DNA
gacgatggacgccttcgactacttcatcgtggtgctcgtc

SEQ ID NO: 18849 - DNA, 50 bp, Mycobacterium paraintracellulare
  source 1..50: mol_type = genomic DNA
aacaatccattgttcaccttcaacatgttgaaggtgcataataggtagtt

SEQ ID NO: 18850 - DNA, 40 bp, Mycobacterium paraintracellulare
  source 1..40: mol_type = genomic DNA
gacgaagcaggccttcgacatcaccatcatgatcctcatc

SEQ ID NO: 18851 - protein, 482 aa, Mycolicibacterium fortuitum
MRTSSDQQHIERAVVYTRVSSDKAKGRSVAEQETECRAECERRGWPVADVLTDNDRSATRFATKDRPQYARLGEVLRPGDVLVVWEPSRAGRSLDHYVDLRRLCTDRGVMLSYSGKLFDLDDGDDRFTTGLDALIAEREAEDARKRIQRAHRANLAAGKPHGKLSYGYRIVRDPQTGKSVGREPDPVRAPLVAEAARRMLEGHSFKSVLAWIESRDPDQKWSDVQLRRLLTNPTTAGLRTHRGAVTGPGTWEAILTEDQHADLVALFAARRSAPRGTGPRHLLSGIAVCAKCEEPMWRHTGGKLADGSRSVVYTCRDRHAARSQAVVDNAVLAVIEGILTTPAALAALATAPDLPDTTAAAKAELADLKGQLQAVEDRMADLSMPAEVGARVATRLGARIAELEAAAAPVFTDPVVRELATAPDAVKAWRSLPLEQKREFIRAVLVVTVAPVGKGRGRWNGNKEEGITVTPRHTLVSTTATS

SEQ ID NO: 18852 - DNA, 50 bp, Mycolicibacterium fortuitum
  source 1..50: mol_type = genomic DNA
ttgcgggggttatcaacctttaactggttgaaagttggtaagttgccatt

SEQ ID NO: 18853 - DNA, 40 bp, Mycolicibacterium fortuitum
  source 1..40: mol_type = genomic DNA
cctggcggcgacgatggtgtgattgaaggtgattgccatt

SEQ ID NO: 18854 - DNA, 50 bp, Mycolicibacterium fortuitum
  source 1..50: mol_type = genomic DNA
ttgcgggggttatcaacctttaacacgttgaaagttggtaagttgccatt

SEQ ID NO: 18855 - DNA, 40 bp, Mycolicibacterium fortuitum
  source 1..40: mol_type = genomic DNA
cttggtgtcaatgatggtgacattgaaggtgactcccttg

SEQ ID NO: 18856 - protein, 506 aa, Vibrio coralliirubri
MGKVYSYIRFSKKEQGAGSSTARQLKYAEEYAKKHGLVLDSTLVDDGLSAYHAKHLSKGALGLFLAAVESGDVEPDSTLIIERLDRLSRQKPRQAQALLSQIIDYGITVVTASDGAVYNEKTIDNDPMKLVYSLLIAIRANEESETKAQRSKAAIQHNINQFQKHKIRSLGGAVPAWFDRFNAAQGWEYKLNQNTDTVRRIVELSLNGTGAKTIARMINSEGHTTFGKSENWGMTSVVSVLKNPALFGRRVVNSNGSVMLDDYYPAVVTRKDFDAVQYRLNKRKNTKGSEKFVNLITGLGKGFCTCGYCGSAIATQNQIFKTKSGERIVRRMHCTATKESGQCHSSKRIEKVEEAVLMFMMEHNLDTLKTGDTQSYEIEIDTIDKKIRKMVSLQLALETSELPDDFLDSLAQLRARKAELSDKAAKGGIDIELNEQFKALGEKAIKLENSEARTTVRQIIRDSVASIRIWTCGIELVNEPDIAIEFKNGTRGLISIRGNEIIAQQL

SEQ ID NO: 18857 - DNA, 50 bp, Vibrio coralliirubri
  source 1..50: mol_type = genomic DNA
caataatggggcatttctgagggacagacgctcaacgtaaccaatcacac

SEQ ID NO: 18858 - DNA, 40 bp, Vibrio coralliirubri
  source 1..40: mol_type = genomic DNA
atgcaagatatccactggacagacggcgcattcggttact

SEQ ID NO: 18859 - DNA, 50 bp, Vibrio coralliirubri
  source 1..50: mol_type = genomic DNA
caataatggggcatttctgagggatagacgctcaacgtaaccaatcacac

SEQ ID NO: 18860 - DNA, 40 bp, Vibrio coralliirubri
  source 1..40: mol_type = genomic DNA
ttgcaagatagccatgggatagaaggttaattgggttact

SEQ ID NO: 18861 - protein, 526 aa, Vibrio lentus
MRFSRPEQARGTSIERQSHFAEQYALEHGFELDKSLTMMDKGLSAFHGVHKKKGAFGQFLAAVTADKVKSGSVLVVESLDRLSREDPLIAQSALNDLILSGITVVTAADNQVYSREEIQQNPFKLVMSLVVMIRANEESETKQRRSNAFLKSALNQYQTNGKVRRLGADPSWLDFNKDDGTYSFNERIEVIRQILGLYNQGFGSLKIARRLTEENVPTLSGKRSAWGQTTVANIVKSHALYGMKRINVQGVDYDLEDFYPELITKSKWLALQQHRTKRSKSMHGRGETVHLITGHGKGFTTCGYCGGGLGAQTQKQYKRSGEYSKTVTRLHCLTHKETSSCCSSVFLEPIENAVLFAACIGVEPQSLVPTANNVNYSALIDDIENKVKHIVEQVTAGAPWHLFKDSHDRLNSEKQKLIKERDSQKPDVNQSDVQKWVEKLIELADKARADNKDARLKCRTLINSVCKSIVIQLRGHDLKSEPLITITFVTDEQFEFKVGKDGAVRFIDNNMAVNKRLKPLLTELLV

SEQ ID NO: 18862 - DNA, 50 bp, Vibrio lentus
  source 1..50: mol_type = genomic DNA
tagttatgcactgtacattcgctttctgtctaatgtatagtgataactta

SEQ ID NO: 18863 - DNA, 40 bp, Vibrio lentus
  source 1..40: mol_type = genomic DNA
gaagtaaccgaatgcgccgtctgtccaatggatatcttgc

SEQ ID NO: 18864 - DNA, 50 bp, Vibrio lentus; identical to SEQ ID NO: 18862
  source 1..50: mol_type = genomic DNA

SEQ ID NO: 18865 - DNA, 40 bp, Vibrio lentus
  source 1..40: mol_type = genomic DNA
aaagtaacccaattaaccttctatcccatggctatcttgc

SEQ ID NO: 18866 - protein, 500 aa, Streptomyces lunaelactis
MDPVNEDSQVNNDSERLRRLARIAGSQRDRRSRTDWTGKPAAIYCRISHVNDDDQTGVDRQERICRDIAERLGVTVDHRMVFVDNNRSAWQRNRQRKGWDALLDAARSGGVRHILTYHPDRLMRQPRDLEELLQIADDHSISLHGQANQRDLADPDDRFFLRIEVAHACRSSDDTSRRLKDALIDRAQDGKPHTGKRRYGYDRSGTAIIPAEAEIVREIFSRYLDGDTTTTIAVDLNKRGELTSLGRGWNSFNVRAILDSRHVAGIRVFRGAELGQGEWPAIIPRGTWDEAQERRSYRTAASQGKYAPKHPYILRGLVVCKGCGNRMGGSGGKYMCNRAARSDSLRCYRTASGAPLEKFVTDAAIKLLERLDVTGQEGAAVLAPVDQAAIVADREELVELKDMWNSRELKTQEYRAMKKTVEERIAKIERKLVVRPAVEVLRGLVGPNARKAWADLVKAKEYDRMNAVLRFLFNAVIIAEPSTKGRYFDFGRVEIDPNPL

SEQ ID NO: 18867 - DNA, 50 bp, Streptomyces lunaelactis
  source 1..50: mol_type = genomic DNA
gaagactacgaagaaggcttgactgtggtcataacttcttcatagccttt

SEQ ID NO: 18868 - DNA, 40 bp, Streptomyces lunaelactis
  source 1..40: mol_type = genomic DNA
ctgcagcttggacttgagcgtggtcatgccgtccagtctg

SEQ ID NO: 18869 - DNA, 50 bp, Streptomyces lunaelactis
  source 1..50: mol_type = genomic DNA
gaagactacgaagaaggcttgactctggtcataacttcttcatagccttt

SEQ ID NO: 18870 - DNA, 40 bp, Streptomyces lunaelactis
  source 1..40: mol_type = genomic DNA
ctgcatcttggtcttgcccctggccgtgccgtgcagcgtg

SEQ ID NO: 18871 - protein, 535 aa, Xanthobacteraceae bacterium
MTAPAIPLRAALYLRVSTARQAEHDVSIPDQKRQGEAYCEARNLQLVETFIEPGASATNDRRPEFQRMIEAGTSKPVPFDVVVVHSFSRFFRDHFELEFYVRKLAKNGVKLVSITQEMGDDPMHVMMRQIMALFDEYQSKENAKHVMRALKENARQGFWNGSLPPIGYRTVAAEQRGAKTKKKLEIDPLHADTVRLIYRLALEGDGTTGQMGVKNIASYLNNRRIFTRDGGRWGIGQVHRILTRRTYMGEHEFNKRTKTKELKPKTEVVVVPVPPIINKETFEAVQKLLKGRNPKIMPSRVISGPTMLTGLIHCAKCGGAMTIRTGKGGRYRYYACSMKARQGPTACEGMAVPMEKLDDLVVNHLEHQLLQPERLETVLAAALDRREEHAERRREHIAELNKRSAESELRLKRLYDAIEAGIADLDDPALKDRIDGLKAIRDQAKADAERAQAMLQNSGQKAVTPQMLRKFATTARERIRLEGGGYRRDHLRALAQRVEVAEGEVRIMGSKSRLLQTLVAGSGVNSVPTQGLKWR

SEQ ID NO: 18872 - DNA, 50 bp, Xanthobacteraceae bacterium
  source 1..50: mol_type = genomic DNA
tgcccactcagggactgaagtggcgggccgcgatcgatagtgatgatcac

SEQ ID NO: 18873 - DNA, 40 bp, Xanthobacteraceae bacterium
  source 1..40: mol_type = genomic DNA
cgggggaaagcgggctggcggagacggagggattcgaacc

SEQ ID NO: 18874 - DNA, 50 bp, Xanthobacteraceae bacterium
  source 1..50: mol_type = genomic DNA
tgcccactcagggactgaagtggcaggccgcgatcgatagtgatgatcac

SEQ ID NO: 18875 - DNA, 40 bp, Xanthobacteraceae bacterium
  source 1..40: mol_type = genomic DNA
cagggcagagaaggctggcagagccggagggatgggaagc

SEQ ID NO: 18876 - protein, 518 aa, Peribacillus asahii
MEINAVNHIKDVAIYLRKSRGQEEDLDKHREELVELCEKNGWRYVEYGEIGSSQKLMDRPELSRLLKDIQEDMYDAVVVMDKDRLSREGVGQAQINKILAENDCLIVTPTRVYDLTNESDMMVSEFEDLMARFEYRAIVKRLKRGKRRGAKQGKWTNGTPPIPYIYNPKFRDKTDKSIEKGEDLDSLIVDEEKLEIYRFIVDSFLNGMSPYTIAWELNKRKIASPRGSTWNNTGIRRLLKDETHLGRIIANKTTGSKKRLSTGRLDYKVNKREDWIIVENCHKAVKTKEEHEKILIEMQKRKRDSYATTGENALSGLIVCSKCGATMAQKKSKIESERYSYVEACKNFLEDGITKCDNHGGSTMYLMKEIERQLVMYRDDIEKENERVSKGGGLTKTIESEKKKKEERIIELEDELEQVTTLALAKFFTPEEAVQQKKKILDNISKLESELYALNLQTDNLGNMTRSEKVNAINKFLEVMDMPHISNSDLNRLYKTIIHSIIWDKSNPDELKVTINFL

SEQ ID NO: 18877 - DNA, 50 bp, Peribacillus asahii
  source 1..50: mol_type = genomic DNA
gtcgtaaattaccacatgctattggggagaagtagtgtaaaaggtacttg

SEQ ID NO: 18878 - DNA, 40 bp, Peribacillus asahii
  source 1..40: mol_type = genomic DNA
ctcattgtatttcgcagtggggacatgattttcggccaag

SEQ ID NO: 18879 - DNA, 50 bp, Peribacillus asahii; identical to SEQ ID NO: 18877
  source 1..50: mol_type = genomic DNA

SEQ ID NO: 18880 - DNA, 40 bp, Peribacillus asahii
  source 1..40: mol_type = genomic DNA
ctcattgtgtttcccaatgggggcatgactttcgtcctga

SEQ ID NO: 18881 - protein, 469 aa, Enterocloster clostridioformis
MMKKIAVLYMRMSTDMQEHSIESQERVLMEYAKRNGYVVIRKYIDRGISGQHASKRPDFLKMIDDSETGEFQFVLIYDSSRFARNLVESLTYKSILKENCVRLISMTEPNLEDDEMSLYIDAMQGATNEIYVRKLSKSVKRGHNDRALRGDLPGDVQFGLKRLKDGSIVLDEVKAPIMRWMYEAIYYDDSSYYSICETLAAKGIKSQRGNIIDSRQVKRMLMNIKNKAYHWAEKDGKPILKKGNYPAIVDEEIFDAVQEIIAERAKHYKKNEKPAEFRKHWLSGLLVCPHCGAGYSYNTRKPPQHDAFRCGNQTRGACKKGSSILVDVAVEMVLDKLSEVYAGPLAPYVKNITVSQPEPQIDYDKEIKLLEAQLKRAKQAYLAEIDTIDEYAQNKRRIASNIKELQEAKNQAQEGAALNEPQFKVKLLNAITLLKSDCPMSEKIPAARSIIEKILVDPRNKTMDIYFFA

SEQ ID NO: 18882 - DNA, 50 bp, Enterocloster clostridioformis
  source 1..50: mol_type = genomic DNA
cggtgtaacaacctgtactggaagcacattcagtacaggttgttacatta

SEQ ID NO: 18883 - DNA, 40 bp, Enterocloster clostridioformis
  source 1..40: mol_type = genomic DNA
aagggcaggtatttgataacaaagggattttccggcccca

SEQ ID NO: 18884 - DNA, 50 bp, Enterocloster clostridioformis; identical to SEQ ID NO: 18882
  source 1..50: mol_type = genomic DNA

SEQ ID NO: 18885 - DNA, 40 bp, Enterocloster clostridioformis
  source 1..40: mol_type = genomic DNA
cagagcagggagctgatagcatagggattttcctgcccct

SEQ ID NO: 18886 - protein, 572 aa, Phocea massiliensis
MTNSQNLGTIEATNPVLAVAPLKEETEMLRATEKITALYCRLSQEDANEGDSNSITNQKDILLRYAKEHRFPNPTFFVDDGYSGTNYDRPGFQQMLSEIEAGKVAVVLTKDLSRLGRNSSLTGLYINFTFPKYSVRYIAINDHFDTIDPNSTDNDVAGIKNWFNEFFAKDTSRKIRAVQKAKGERGVPLTTNVPFGYRKDPEDRTKWIVDEAAALVVKRIFKLCMEGRGPMQIAKLLQAEKVLNPTSYKRREGIKSPSPETADPYHWNTNTVVHILERREYTGCTVNFKTYTNSIWDKKQRETPIEKQAVFYNTHLAIIEQEVFDKVQQIRKQRHRRTKTGKSSLFSGMVYCADCGAKMRYCTTNYFEKRQDHFVCANYRSNTGSCSAHFIRAVVLEELVWMHMKAVIFYVTRYEKHFRAVMEQRLRMSSEEAIRGYKTQLAQAERRLAELDRLFIRIYEDNVSGRITDERFSLMSKTYEDEQAQLKVDIHRLRQEIEVQERQIEDLEKFIQRVHKYEDLQEMTPYALRELVKGIYIEAPDKSSGKRRQGVRISYDLVGFVPVEELLKQETA

SEQ ID NO: 18887 - DNA, 50 bp, Phocea massiliensis
  source 1..50: mol_type = genomic DNA
ttactttcttatgacccccgccgattaggcgggtgctcgtaagaaagtaa

SEQ ID NO: 18888 - DNA, 40 bp, Phocea massiliensis
  source 1..40: mol_type = genomic DNA
tgtaaaacaccctgggaaatttcccagggtgttttttcac

SEQ ID NO: 18889 - DNA, 50 bp, Phocea massiliensis
  source 1..50: mol_type = genomic DNA
ttactttcttatgacccccgccgaacaggcgggtgctcgtaagaaagtaa

SEQ ID NO: 18890 - DNA, 40 bp, Phocea massiliensis
  source 1..40: mol_type = genomic DNA
tggaaaactccctaagtaaacacacaggttattttttcac

SEQ ID NO: 18891 - protein, 586 aa, Streptococcus uberis
MKTNNVEIIKADSLVRRRCVNVERNLKRVAAYCRVSSDSEDQKNSYESQVRHYKDYISQRSDWELADIYADEGISGTQVGKRQDFQRLINDCVNGEIDYIVTKAIARFARNTLDTLKYVRMLKDMQIGVYFEEENIDTLTMDGELLLTILSSVAQQEVENTSAHVKKGLKMKMQRGELIGFQGCLGYDYDVETKQLSINKKEAKIVRYIFERYLEGIGGKVIARELDELGYKSPRGLDHWNDTTVLGIIKNEKYKGDILMGKTFTVDPISKRRLSNFGEEDKFYIKDNHEPIISKEDFEKAQEIRLRRAGNKKTVANVNGKRERYSKMYAFSSMLECGFCGSLLSRRSWHCRSDYRKVVWHCVTSIKKGKKYCKHSKGLEELAIEGAFMEAYRQLYHSNENIVADLLETIESELNDNSLNKELKKITNKLRTLLKKEENLVNLKLEGKISDSIYNEKYNELSLEKEYLAEEKVNVETTLKSEIDVKKRLTEFKQLLSSQKMLTEFDRIVFESIVEKIIVGGVNSDGEIDPAMLTIIFKTGETQNKDGKQFKSKRKNAKLEPDKLCPQNCDEDKKLYSQGIDNTRGV

SEQ ID NO: 18892 - DNA, 50 bp, Streptococcus uberis
  source 1..50: mol_type = genomic DNA
tgtattctcaaggaatagacaacacacgtggagtgcgtagtgttgctaca

SEQ ID NO: 18893 - DNA, 40 bp, Streptococcus uberis
  source 1..40: mol_type = genomic DNA
tctttttccgcatacgcatcacgtggagtgtgtgagcctg

SEQ ID NO: 18894 - DNA, 50 bp, Streptococcus uberis
  source 1..50: mol_type = genomic DNA
tgtattctcaaggaatagacaacagacgtggagtgcgtagtgttgctaca

SEQ ID NO: 18895 - DNA, 40 bp, Streptococcus uberis
  source 1..40: mol_type = genomic DNA
ggtttttccccatccgcgtgacaaggtgtgtgtgagcgtg

SEQ ID NO: 18896 - protein, 650 aa, Streptomyces dengpaensis
MSNVSTPLSSAFETGVRATGTRALRAVDYLRVSTEEQKKGYGVARQSRKTLRHIALKQWTHIATYKDEGVSGSLEAADRGDLKRLMESAQQTPRPFDIVVVPDGRVIGRKGRAFWRWVWALEDIGVYVAVVADDYDNTTTEGRKKMRRDADYAETEWETIRDRTQGGLQEKAELTPAAHIGGRPPYGYRIANKGTPGSYLVIDEDEAEIIRHVYDLVVGEGLNLRKATIRLIAEGVTARSGKTWTRDNLRDRIMSTPVLDGVLVFRGKHASTDENGNPIWGDSVRIDLPRILTEEQSAELRRKVAETAKQSSGQRWFYPLSGRLLGLCGKTYSGISFTPTREGARFYRCSGNAPKDPSQKSCGCSRIDANALEKHVWRRVTEIASDSEKLQALAAEWIGMAEGDTTALVDRIAALDHQIEGMNASITAVIVASAKQSKSAEAIETATAVLNDELQQLQNLRDEAAEWLAEMEESDRQARDLIALASMAKKSFPDMAPEQQAAILSMLELKVTITGPVPDDRRGGVPCTVRAWHAAAGLGIPAAALSDEEWAKVAPLLPKGRRGTVRRSVDAIFYKARTGKSWPVVIKETGATIQASKHFNTWTSDDTWSRVCAALADVEQVPLPELQLLPSMVIEGRVDPSAMLNAEERS

SEQ ID NO: 18897 - DNA, 50 bp, Streptomyces dengpaensis
  source 1..50: mol_type = genomic DNA
gatgctgaacgcagaagaacgatcccaaacgggatcgtctcggaatgttc

SEQ ID NO: 18898 - DNA, 40 bp, Streptomyces dengpaensis
  source 1..40: mol_type = genomic DNA
gatacggaaggccgcgatgccgaaggggatgccgatgatc

SEQ ID NO: 18899 - DNA, 50 bp, Streptomyces dengpaensis
  source 1..50: mol_type = genomic DNA
gatgctgaacgcagaagaacgatcggaaacgggatcgtctcggaatgttc

SEQ ID NO: 18900 - DNA, 40 bp, Streptomyces dengpaensis
  source 1..40: mol_type = genomic DNA
gatagggatggtgatgatggggatggggatggcgatgatg

SEQ ID NO: 18901 - protein, 576 aa, Pseudomonas aeruginosa
MRLIRLRRPAMHRKTPVYAYIRMSTVEQAKGESERRQLGQIERFLQENDGELVEPVFLDRLSSFNGKNIKKGAIKDFLDRVKKGEIEKGSILVIESFDRISRQGGYIAHSVILDIINNGVDIATLSPYKRYSIDSENQFIENIEIQTLLYRAHEESRTKSDRITRQHQNRREKAKDKKVVYGSLPFWLERTPDWIEFREPEASDVKLCLSLLKTYGMYTATAKINEQRKSSKIFSKETVSHLLNRSAVCGDLQTHKIEYDEHGNKIRVQGEVIHDYYPALISRAEFEELRAEIQNRRTTKSTGRVSGFKNIFRNVMTCTYCFAPMRLAHMKWKSGGKKYLVCTKSETNQCIEKGRLWYDYDDVERVFFNEVNLSILKKSLTQKTKIDDAEIEKLRSNFLKAEDQKSNILKAIEMGTVSKALVNRLEELEKESDEIQKRIDELKAESALKRSQNEAEIFDYEQLDAALNDEEQRAIINKILRTNQADISISKGEEGCDFIIEISIDDRLETEISYHKQDDFINRVEHDLPENQTSDLVIHEDHTDPYADEIEGQIFEVFDSASMPIIEINQHNKKPD

SEQ ID NO: 18902 - DNA, 50 bp, Pseudomonas aeruginosa
  source 1..50: mol_type = genomic DNA
aacatacgaattgactacgccagtatgcagccctaagctattcgtatggc

SEQ ID NO: 18903 - DNA, 40 bp, Pseudomonas aeruginosa
  source 1..40: mol_type = genomic DNA
gaccatctgctacgccttcatgcaggccagcggcatggtc

SEQ ID NO: 18904 - DNA, 50 bp, Pseudomonas aeruginosa
  source 1..50: mol_type = genomic DNA
aacatacgaattgactacgccagtgggcagccctaagctattcgtatggc

SEQ ID NO: 18905 - DNA, 40 bp, Pseudomonas aeruginosa
  source 1..40: mol_type = genomic DNA
gagcctctgctacgcacagggggaggccagcagcatggcc

SEQ ID NO: 18906 - protein, 547 aa, Pseudomonas putida
MPRLISYVRMSTSEQLKGFSLERQRNLIADFARKNGLSLEDSHILEDIGRSSFSDDTEQKELTKFFEDLGNDKFQKGDVFALENIDRLTRRGPIDALMKVNQIISKGLKLAIISDKEQRILEEIDVFSIITLSIDASRANKESQVKSDKGLQNWAFKRELAATHKIAMTAQAPAWIDTETYYIMDETKNKQVKRRRYVLNEDRAKTVKLIFELFQNGNGSLKIKNILNEQNIPTFKGIEYWEPSTISKIIRNPATYGMYQPKKQNTGKRDLVAIGEPIENYFPAVIGKEVFDQCQQITATNTTRKGRRGKLFTNLFTGLLKCADCDGPIHLLNPGIDKRAKNPKPVNYLICKKGKFTKECITKRLRYEDFENVMLKAIQEINLADVLHENNPLENLIKQQRNLQADIEKKKKLLENFERNFVENDGDLPSFMIAQAKQAEIDIKSLDSEIKSIRLEISQLNVYNSNIDNAIDELKVNGTYEARSKINLILHEIIKHIVIDFELDDYGVMFKNGAKRFINNGIIQNVFRTENTKQRDDEINEILNHKN

SEQ ID NO: 18907 - DNA, 50 bp, Pseudomonas putida
  source 1..50: mol_type = genomic DNA
tacaggtaaaatatggacgacttgatcaagtctgtcgtataatacctgta

SEQ ID NO: 18908 - DNA, 40 bp, Pseudomonas putida
  source 1..40: mol_type = genomic DNA
gccaggcaacgcggtgctcatcaagtcggcctatccttgg

SEQ ID NO: 18909 - DNA, 50 bp, Pseudomonas putida
  source 1..50: mol_type = genomic DNA
tacaggtaaaatatggacgacttgaccaagtctgtcgtataatacctgta

SEQ ID NO: 18910 - DNA, 40 bp, Pseudomonas putida
  source 1..40: mol_type = genomic DNA
gcctggccacgtggtgcccaccagcacggcctttcctttg

SEQ ID NO: 18911 - protein, 547 aa, Pseudomonas asiatica
MPRLISYVRMSTSEQLKGFSLERQRNLIADFARKNGLSLEDSHILEDIGRSSFSDDTEQKELTKFFEDLEKDKFQPGDVFALENIDRLTRRGPIDALMKVNQIISKGLKLAIISDKEQRILEEIDVFSIITLSIDASRANKESQVKSDKGLQNWAFKRELAATHKIAMTAQAPAWIDTETYYIMDETKNKQVKRRRYVLNEDKAKTVRLIFELFQNGNGSLKIKNILNEQNIPTFKGIEYWEPSTISKIIRNPATYGMYQPKKQNTGKRDLVAIGEPIENYFPAVISKEIFDQCQQITATNTTRKGRRGKLFTNLFTGLLKCADCDGPIHLLNPGIDKRAKNPKPVNYLICKKGKFTKECITKRLRYEDFENVMLKAIQEINLADVLHENNPLENLIKQQRNLQADIEKKKKLLENFERNFIENDGDLPSFMIAQAKQAEIDIKSLDSEIKSIRLEISQLNVYNSNIDNAIDELKVNSTYEARSKINLILHEIIKHIVIDFELDDYGVMFKNGAKRFINNGIIQNVFRTENTKQRDDEINEILNHKN

SEQ ID NO: 18912 - DNA, 50 bp, Pseudomonas asiatica
  source 1..50: mol_type = genomic DNA
tacaggttaaatatggacgacttgatcaagtctgtcgtataatacctgta

SEQ ID NO: 18913 - DNA, 40 bp, Pseudomonas asiatica; identical to SEQ ID NO: 18908
  source 1..40: mol_type = genomic DNA

SEQ ID NO: 18914 - DNA, 50 bp, Pseudomonas asiatica
  source 1..50: mol_type = genomic DNA
tacaggttaaatatggacgacttgaccaagtctgtcgtataatacctgta

SEQ ID NO: 18915 - DNA, 40 bp, Pseudomonas asiatica; identical to SEQ ID NO: 18910
  source 1..40: mol_type = genomic DNA

SEQ ID NO: 18916 - protein, 612 aa, Streptococcus pyogenes; identical to SEQ ID NO: 3506

SEQ ID NO: 18917 - DNA, 50 bp, Streptococcus pyogenes; identical to SEQ ID NO: 9697
  source 1..50: mol_type = genomic DNA

SEQ ID NO: 18918 - DNA, 40 bp, Streptococcus pyogenes
  source 1..40: mol_type = genomic DNA
gtttatctgctgttgttgctggtattacaaaagctgattt

SEQ ID NO: 18919 - DNA, 50 bp, Streptococcus pyogenes; identical to SEQ ID NO: 9699
  source 1..50: mol_type = genomic DNA

SEQ ID NO: 18920 - DNA, 40 bp, Streptococcus pyogenes
  source 1..40: mol_type = genomic DNA
gtttattttcagtttttgctattactaataaagctgatgt

SEQ ID NO: 18921 - protein, 452 aa, Listeria immobilis
MKAAIYIRVSTQEQVENYSIQAQTEKLTALCRSKDWDVYDTFIDGGYSGSNMNRPALNEMLSKLHEIDAVVVYRLDRLSRSQKDTITLIEEYFLKNNVEFVSLSETLDTSSPFGRAMIGILSVFAQLERETIRDRMVMGKIKRVESGLPLTTAKGRTFGYDVVDTKLYVNKEEAQHLQLIYDIFEEEKSITFLQKRLKKLGFKVKSYSSYNKWLMNDLYIGYVSYGDKVHVKGVHEAIISEEQFYRVQEIFSRMGKNPNMNKESSSLLNNLIVCEKCGLSFVHRVKDTVSRGKKYRYRYYSCKTYKHTHELEKCGNKIWRADKLEEIVIDRVKNYSFATRNLDKEDELDSINAKLQVEHSKKKRLFDLYMNGSYEVAELDKLMADIDAQINYYNSQIEANEELKRNKKVQESLAELATVDFDSLEFREKQIYLKSIINKIYISDEQVTIEWI

SEQ ID NO: 18922 - DNA, 50 bp, Listeria immobilis
  source 1..50: mol_type = genomic DNA
tttagtacctcgtttcctctcgctggacggagacgaatcgagaaactaaa

SEQ ID NO: 18923 - DNA, 40 bp, Listeria immobilis
  source 1..40: mol_type = genomic DNA
tttcggttctagctatgatggtcgtaaggagggaacaaag

SEQ ID NO: 18924 - DNA, 50 bp, Listeria immobilis
  source 1..50: mol_type = genomic DNA
tttagtacctcgtttcctctcgctgcacggagacgaatcgagaaactaaa

SEQ ID NO: 18925 - DNA, 40 bp, Listeria immobilis
  source 1..40: mol_type = genomic DNA
atttggttctagctatcatgctggtaagaatataacaatg

SEQ ID NO: 18926 - protein, 487 aa, Bacillus thuringiensis
MKYAVYVRVSTDKDEQVSSIQNQIEICRYWIEKNGFEWDENSIYKDEAVSGTAWLERRAMQLILGKARKKELDTVVFKSIHRLGRDLRDALEIKEILLGHGVRLVTIEEGYDSYYEGKNDLKFEMYAMFASQLPKTLSVSISAALAAKVRRGEYTGGTVPYGYKIVDKKYVINQEEAEIVREMYELYDNGLGYLRISNALNDVGKYKRSGKLWTYSAVKLIITNPMYKGDYVMGRSTEVKVDGRKKRIQEPREKWVVFENHHPAIIERSLWDKINNPKINKKIKRRVAVTNELRGIARCIHCGSPFVLHTYKYKNKEGEELNYGYLTCGTYKLTGGRGCVKHSGLRYERLRSLVLRKLKEKERDLEKVFKLNDKDKHQEKQKKLRKEKKELEIKRERLLDLYLDGGSIDKATFTKRDANFAKNIKEKELEILKLDDVKALIVEQQKVKDAFKLLEDSENLYPVFKKLIARIDISQNGAVDIRYRFEE

SEQ ID NO: 18927 - DNA, 50 bp, Bacillus thuringiensis
  source 1..50: mol_type = genomic DNA
ttttgtctatataggctgtcggcatctgcggtatgcttatagggacaaaa

SEQ ID NO: 18928 - DNA, 40 bp, Bacillus thuringiensis
  source 1..40: mol_type = genomic DNA
cttttctcgaatttcagcatctgcgtgtctcataacgtat

SEQ ID NO: 18929 - DNA, 50 bp, Bacillus thuringiensis
  source 1..50: mol_type = genomic DNA
ttttgtctatataggctgtcggcacatgcggtatgcttatagggacaaaa

SEQ ID NO: 18930 - DNA, 40 bp, Bacillus thuringiensis
  source 1..40: mol_type = genomic DNA
cttttctctatttttagcacatgtgtatctcaaacattat

SEQ ID NO: 18931 - protein, 487 aa, Bacillus cereus
MKYAVYVRVSTDKDEQVSSIQNQIEICRYWIEKNGFEWDENSIYKDEAVSGTAWLERRAMQLILGKARKKELDTVVFKSIHRLGRDLRDALEIKEILLGHGVRLVTIEEGYDSYYEGENDLKFEMYAMFASQLPKTLSVSISAALAAKVRRGEYTGGTVPYGYKIVDKKYVINQEEAEIVREMYELYDNGLGYLRISNALNDVGKYKRSGKLWTYSAVKLIITNPMYKGDYVMGRSTEVKVDGRKKRIQEPREKWVVFENHHPAIIERSLWDKINNPKINKKIKRRVAVTNELRGIARCIHCGSPFVLHTYKYKNKEGEELNYGYLTCGTYKLTGGRGCVKHSGLRYERLRSLVLRKLKEKERDLEKVFKLNDKDKHQEKQKKLRKEKKELEIKRERLLDLYLDGGSIDKATFTKRDANFAKNIKEKELEILKLDDVKALIVEQQKVKDAFKLLEDSENLYPVFKKLIARIDISQNGAVDIRYRFEE

SEQ ID NO: 18932 - DNA, 50 bp, Bacillus cereus
  source 1..50: mol_type = genomic DNA
ttttgtctatatagtctgtcggcatctgcggtatgcttatagggacaaaa

SEQ ID NO: 18933 - DNA, 40 bp, Bacillus cereus; identical to SEQ ID NO: 18928
  source 1..40: mol_type = genomic DNA

SEQ ID NO: 18934 - DNA, 50 bp, Bacillus cereus
  source 1..50: mol_type = genomic DNA
ttttgtctatatagtctgtcggcacatgcggtatgcttatagggacaaaa

SEQ ID NO: 18935 - DNA, 40 bp, Bacillus cereus; identical to SEQ ID NO: 18930
  source 1..40: mol_type = genomic DNA

SEQ ID NO: 18936 - protein, 487 aa, Bacillus cereus
MKYAVYVRVSTDKDEQVSSIQNQIEICRYWIEKNGFEWDENSIYKDEAVSGTAWLERRAMQLILGKARKKELDTVVFKSIHRLGRDLRDALEIKEILLGHGVRLVTIEEGYDSYYEGKNDLKFEMYAMFASQLPKTLSVSISAALAAKVRRGEYTGGTVPYGYKIVDKKYVINQEEAEIVREMYELYDNGLGYLRISNALNDVGKYKRSGKLWTYSAVKLIITNPMYKGDYVMGRSTEVKVDGRKKRIQEPREKWVVFENHHPAIIERPLWDKINNPKINKKIKRRVAVTNELRGIARCIHCGSPFVLHTYKYKNKEGEELNYGYLTCGTYKLTGGRGCVKHSRLRYERLRSLVLRKLKEKERDLEKVFKLNDKDKHQEKQKKLRKEKKELEIKRERLLDLYLDGGSIDKETFTKRDANFAKNIKEKELEILKLDDVKALIVEQQKVKDAFKLLEDSENLYPVFKKLIARIDISQNGAVDIRYRFEE

SEQ ID NO: 18937 - DNA, 50 bp, Bacillus cereus
  source 1..50: mol_type = genomic DNA
ttttgtctatattggctgtcggcatctgcggtatgcttatagggacaaaa

SEQ ID NO: 18938 - DNA, 40 bp, Bacillus cereus; identical to SEQ ID NO: 18928
  source 1..40: mol_type = genomic DNA

SEQ ID NO: 18939 - DNA, 50 bp, Bacillus cereus
  source 1..50: mol_type = genomic DNA
ttttgtctatattggctgtcggcacatgcggtatgcttatagggacaaaa

SEQ ID NO: 18940 - DNA, 40 bp, Bacillus cereus; identical to SEQ ID NO: 18930
  source 1..40: mol_type = genomic DNA

SEQ ID NO: 18941 - protein, 487 aa, Bacillus cereus
MKYAVYVRVSTDKDEQVSSIQNQIEICRYWIEKNGFEWDENSIYKDEAVSGTAWLERRAMQLILGKARKKELDTVVFKSIHRLGRDLRDALEIKEILLGHGVRLVTIEEGYDSYYEGKNDLKFEMYAMFASQLPKTLSVSISAALAAKVRRGEYTGGTVPYGYKIVDKKYVINQEEAEIVREMYELYDNGLGYLRISNALNDVGKYKRSGKLWTYSAVKLIITNPMYKGDYVMGRSTEVKVDGRKKRIQEPREKWVVFENHHPAIIERPLWDKINNPKINKKIKRRVAVTNELRGIARCIHCGSPFVLHTYKYKNKEGEELNYGYLTCGTYKLTGGRGCVKHSGLRYERLRSLVLRKLKEKERDLEKVFKLNDKDKHQEKQKKLRKEKKELEIKRERLLDLYLDGGSIDKETFTKRDANFAKNIKEKELEILKLDDVKALIVEQQKVKDAFKLLEDSENLYPVFKKLIARIDISQNGAVDIRYRFEE

SEQ ID NO: 18942 - DNA, 50 bp, Bacillus cereus; identical to SEQ ID NO: 18927
  source 1..50: mol_type = genomic DNA

SEQ ID NO: 18943 - DNA, 40 bp, Bacillus cereus; identical to SEQ ID NO: 18928
  source 1..40: mol_type = genomic DNA

SEQ ID NO: 18944 - DNA, 50 bp, Bacillus cereus; identical to SEQ ID NO: 18929
  source 1..50: mol_type = genomic DNA

SEQ ID NO: 18945 - DNA, 40 bp, Bacillus cereus; identical to SEQ ID NO: 18930
  source 1..40: mol_type = genomic DNA

SEQ ID NO: 18946 - protein, 487 aa, Bacillus cereus
MKYAVYVRVSTDKDEQVSSIQNQIEICRYWIEKNGFEWDENSIYKDEAVSGTAWLERRAMQLILGKARKKELDTVVFKSIHRLGRDLRDALEIKEILLGHGVRLVTIEEGYDSYYEGKNDLKFEMYAMFASQLPKTLSVSISAALAAKVRRGEYTGGTVPYGYKIVDKKYVINQEEAEIVREMYELYDNGLGYLRISNALNDVGKYKRSGKLWTYSAVKLIITNPMYKGDYVMGRSTEVKVDGRKKRIQEPREKWVVFENHHPAIIERPLWDKINNPKINKKIKRRVAVTNELRGIARCIHCGSPFVLHTYKYKNKEGEELNYGYLTCGTYKLTGGRGCVKHSGLRYERLRSLVLRKLKEKERDLEKVFKLNDKDKHQEKQKKLRKEKKELEIKRERLLDLYLDGGSIDKETFTKRDTNFAKNIKEKELEILKLDDVKALIVEQQKVKDAFKLLEDSENLYPVFKKLIAGIDISQNGAVDIRYRFEE

SEQ ID NO: 18947 - DNA, 50 bp, Bacillus cereus
  source 1..50: mol_type = genomic DNA
ttttgtctgtattggctgtccgcatctgcggtatgcttatagggacataa

SEQ ID NO: 18948 - DNA, 40 bp, Bacillus cereus; identical to SEQ ID NO: 18928
  source 1..40: mol_type = genomic DNA

SEQ ID NO: 18949 - DNA, 50 bp, Bacillus cereus
  source 1..50: mol_type = genomic DNA
ttttgtctgtattggctgtccgcacatgcggtatgcttatagggacataa

SEQ ID NO: 18950 - DNA, 40 bp, Bacillus cereus; identical to SEQ ID NO: 18930
  source 1..40: mol_type = genomic DNA

SEQ ID NO: 18951 - protein, 588 aa, Streptococcus pseudoporcinus
MKKDVKVIKGDTTLKRTASGCVERSIKRVAAYCRVSTDTEDQINSYNSQVEHYTEFIQKNNEWTLAGIYADEAITGTQVDRRIDFQRLINDCINGDIDMIITKSISRFARNTLDTLKYVRKLKEFNVAVFFEEENINTLTMDGELLLTILSSVAQQEVENISANVKKGLRMKMERGEMVGFQGCLGYDYDPETKSISINEKEAEIVRYIFRRYIEGVGGMVISRELEEQGYLSPRGNKRWTETTVLGIIKNEKYKGDLMMGKTYTVDPISKRRLDNYGEQDKFYIENHHEPIISEEDFEKAQGIRLRRSKNRNTVANNGGKREKYSRKYAFSSMLECGFCGHNLSRRNWHSSSEYTKVIWQCVNATKNGKKYCPHSKGIEEEAIEKAFMESYRQVCHNNVEITNEFLKTVEEELKDNSLAKDLKKINNQLDKILKKEKDLVELRLNESISMDIYQDKYNEIAISKEKLLAEKRTLEVTLTDEKALKKRLEGFKKLLESNKYLEEFDRAVFESIVDKIIIGGTNDEGEIDPAMITIIYKTGKKDSQDGRLFKSRRKNAKEVDEKTDNKLYPQSSDEVNNLCSYPMDNTR

SEQ ID NO: 18952 - DNA, 50 bp, Streptococcus pseudoporcinus
  source 1..50: mol_type = genomic DNA
gtgttcctatcctatggacaacacacgtcgagtgcatagcgttgatacaa

SEQ ID NO: 18953 - DNA, 40 bp, Streptococcus pseudoporcinus
  source 1..40: mol_type = genomic DNA
cttttcccacatacccatcacgtggagacggtagcacttt

SEQ ID NO: 18954 - DNA, 50 bp, Streptococcus pseudoporcinus
  source 1..50: mol_type = genomic DNA
gtgttcctatcctatggacaacacaagtcgagtgcatagcgttgatacaa

SEQ ID NO: 18955 - DNA, 40 bp, Streptococcus pseudoporcinus
  source 1..40: mol_type = genomic DNA
cctttcccacagacctatcaagtggggagggaaggaggtt

SEQ ID NO: 18956 - protein, 525 aa, Clostridium butyricum
MKKVAIYSRKSKFTGKGESIENQILKCKQFIQFKFDIDTKNTEIFIDEGFSGKNENRPRYQEMIKKVKNKEIDHIIIYQLNRLGRNARDIHNTMQMCEDLGCVIYSATEGFDSSTSFGRALIGILASLAQLEREQLAERVKDNMYTLAKMGRWLGGQSPLGFDGTREYYIDESGKERSVTRLKANNEELKIVKLIYEKYLEEKSISQVSKWTLTNNFKGKNGGNIDKSAINVILKNPVYVKSNTDVFKFLENNGYEVYGEANGNGLLRYGKNNKDNSTGIIATGNHKGIIDSSNWLKIQEILQENTEKAPALGKSKACLLTGLLKCSCGSNMQMRYGPKRKDGTKPYYYVCTMKINSGGTRCNSKNLNGQLFEEKLINHFKKYSEERLIKQLESTLNASKNLEKNINIESIDKDIESAEKSVKSLLNNLKQTTDTNIVNIIFSEISELQNTIKDLKYKKDNLLEDQSEIVLSQSEIISMINTFNDFISLYDTLSIDEKQKRLKTLFKEILYDGNKIHVKFNLKKN

SEQ ID NO: 18957 - DNA, 50 bp, Clostridium butyricum
  source 1..50: mol_type = genomic DNA
catgtcaaattaacacaacacgcttctgctcgatgttcaaatttgacatg

SEQ ID NO: 18958 - DNA, 40 bp, Clostridium butyricum
  source 1..40: mol_type = genomic DNA
tgttcctgtacatattgcttctgtatggccaacaaataaa

SEQ ID NO: 18959 - DNA, 50 bp, Clostridium butyricum
  source 1..50: mol_type = genomic DNA
catgtcaaattaacacaacacgctgatgctcgatgttcaaatttgacatg

SEQ ID NO: 18960 - DNA, 40 bp, Clostridium butyricum
  source 1..40: mol_type = genomic DNA
tgttcctgatcacatagctgattaaaggccaaaaaaaaaa

SEQ ID NO: 18961 - protein, 626 aa, Enterocloster clostridioformis
MISKLTDTPEIIDGYVRLSRDDNKRNYSSIENQKKIIQQYAEENNMIIRHIYEDDGISGYSFNRPDFQKMMASLDTINIIVAKDLSRIGRHNAKVLLFLEEMEEMGKRVILIDDNYDSFYSDDDIIGIKTWDNERHVKNTSRKVKRIKRMEQESGTLVSQTPFGYTRHPLNKQMILIDEEAAAILNLEKEIYLDGNGIRKTAEILSERGVPTPSMIDKERHESLGLVYNKQVAYQWSYGMVKDTLFNDYNNGVLRTHKRERVTINGKDKKVPKENQYIFPNHHPKIFDDNTMKLLNEVKDSRHHSQYRGQRAHVNLFSGCLYCKDCGWKLTAINRPNRGKYYVCGTYNKKGKQFCQHAHLVTEETLMDALVKYLVLCRDSLADIIQNFDLSKLKVETYTPTDSKQRLEAELEKVKEELKVLITQKVKEITANPSMNEIITETYAALQSDKMERISAIEKTLQDLTKEPHIPSTTIKPSLQTALDILNEVLEKKELSRKDIEVLVEKIIVDKDGNVDIYLKHGLGNLAAYDFKADKENLKLTMLIESIRLLEKDETGFTSVKFLADSLKEMGYPMHKKKFVTYMEHLLDLGLVEKTGIYHYPYRIVASRQQLRDVEKMFIVVGQTGG

SEQ ID NO: 18962 - DNA, 50 bp, Enterocloster clostridioformis
  source 1..50: mol_type = genomic DNA
atgttcatcgtggtagggcagactggcggccgacctaagcatgatgtaac

SEQ ID NO: 18963 - DNA, 40 bp, Enterocloster clostridioformis
  source 1..40: mol_type = genomic DNA
ggtcctcggcggacgcgcaggcggcatgcctcagatggtc

SEQ ID NO: 18964 - DNA, 50 bp, Enterocloster clostridioformis
  source 1..50: mol_type = genomic DNA
atgttcatcgtggtagggcagactctcggccgacctaagcatgatgtaac

SEQ ID NO: 18965 - DNA, 40 bp, Enterocloster clostridioformis
  source 1..40: mol_type = genomic DNA
gctcctcggcggccgcggtctcggcctgtctcggacggtg

SEQ ID NO: 18966 - protein, 456 aa, Clostridioides difficile
MDNIKRVALYIRVSTEEQVLHGDSIRTQTEALEQYAKDNAFIVVDKYIDEGYSATNLNRPNLQRLLADIKENKIDLILLTKLDRFSRGVKNFYKILDTLEKHKCDWKTILEDYDSSTASGRLHINIMLSFAENEASQTSERIKFVFNNKIQKKEVISGKVPFGYEIKNKHLVIKEDEAEIVRESFDTYIKFSALTKTIQHINSKFNMRHMYKWMQKLLKNKIYIGIYERENILIEDYCEQIISEEQFYFVQSLLKKNKRVSKNKFDINYIFAGMIICSCGRKMSGSYHLNPYGTLYLHYRCSLSYGAKLCSNTSRLGEKKVEAFLLENVKTELYNAILKHESNNKKSSNKNDTEKLKNKLKKQIEKLQDLYFDDLISKDNYRFKYKKLNDDLLELEKKENEEKVVINDLQKMKNFLKINFEDDYVNMSSLEKRTLWTSLIDRIEVQKDGNLVIKFL

SEQ ID NO: 18967 - DNA, 50 bp, Clostridioides difficile
  source 1..50: mol_type = genomic DNA
tgttgtactaaattgtccatatcatgtggttaaatactttttatacaact

SEQ ID NO: 18968 - DNA, 40 bp, Clostridioides difficile
  source 1..40: mol_type = genomic DNA
tacaggatgttccataccatgtggtaaggctgtccctgct

SEQ ID NO: 18969 - DNA, 50 bp, Clostridioides difficile
  source 1..50: mol_type = genomic DNA
tgttgtactaaattgtccatatcatctggttaaatactttttatacaact

SEQ ID NO: 18970 - DNA, 40 bp, Clostridioides difficile
  source 1..40: mol_type = genomic DNA
ttcaggaatttcaggagcatctggtaagggtttccctgct

SEQ ID NO: 18971 - protein, 540 aa, Eisenbergiella massiliensis
MKQPYNTTIYNTALYMRLSRDDENYGDSVSIETQRTILQQYAKEQGLHVVGEYVDDGWSGTNFERPDFQRMMDDVEAGKVNCIVTKDLSRFGREHVMMDYYLEFLFPEKRVRYIAVAENEDTEKGLSDFVPFKNLFNEWFAKDTSRKVKAAFKAKFATGQRIGAYAPIGYRKHPEIKNKLIIDEETRWIVEKIFDLAFHGRGAASITSILIAEKVPTPGFINFQRDGTFANIYAGAPEEKSYAWTIAQVKSIMKDETYIGHTIHYRETNISFKNKRRVRKPQSEWVRVENTQEPIISEQVFRQVQEQIANRRRKCKDGTTQIFSGLVKCADCGWSLSYGENRQNSKPYGHYHCSKYGQGTRQCSMHYIRYDVLYAYVLSRLQYWSGLVQHDEERLLKRLLNANDKGQAAARKKQAAELKKAEKRKSEVDTLFARMYEDWAAGRITEYNFSMLSGKYQSEQAELDEKIEQLQSAIATESQNTADAEKWIALMKECVNPTELTAELLNTLIEKIVVHEAVKGEDGSREQEVEIFYRFIGKID

SEQ ID NO: 18972 - DNA, 50 bp, Eisenbergiella massiliensis; identical to SEQ ID NO: 4067
  source 1..50: mol_type = genomic DNA

SEQ ID NO: 18973 - DNA, 40 bp, Eisenbergiella massiliensis
  source 1..40: mol_type = genomic DNA
agtgtccaactgggaaaggggaaactccatgccggatatt

SEQ ID NO: 18974 - DNA, 50 bp, Eisenbergiella massiliensis; identical to SEQ ID NO: 4069
  source 1..50: mol_type = genomic DNA

SEQ ID NO: 18975 - DNA, 40 bp, Eisenbergiella massiliensis
  source 1..40: mol_type = genomic DNA
agtgtccagcttggaaaggcacaactccgtgcagcaatta

SEQ ID NO: 18976 - protein, 550 aa, Clostridioides difficile; identical to SEQ ID NO: 10391

SEQ ID NO: 18977 - DNA, 50 bp, Clostridioides difficile; identical to SEQ ID NO: 10392
  source 1..50: mol_type = genomic DNA

SEQ ID NO: 18978 - DNA, 40 bp, Clostridioides difficile
  source 1..40: mol_type = genomic DNA
tcatataagtaaacaagttgagaaagcagcatcaggagga

SEQ ID NO: 18979 - DNA, 50 bp, Clostridioides difficile
  source 1..50: mol_type = genomic DNA
agtttggaaaatgatgagcaagtttggacggtagcgttattgtccaaact

SEQ ID NO: 18980 - DNA, 40 bp, Clostridioides difficile
  source 1..40: mol_type = genomic DNA
tcatttaagtaaacaaggttggctattagcttcagaagaa

SEQ ID NO: 18981 - protein, 475 aa, Blautia faecis
MTEQKSDDLRMGALYIRVSTHEQDELSPDAQKRLLLDYAKSNGIVVQKDAVFVESVSGRNVKKRKEFQRMIAQAKSPEHPYDVILVWKFSRFARNQEESIVYKSMLKKDRVDVISVSEPVIDGPFGSLIERIIEWMDEYYSIRLSGEVLRGMGEKALKQGYQISPPLGYDAVGDGKPYKINEKEFKIVSYIMSQYDDYCQDTTAIARKCNDLGYRTKRGNLFERRNIDYILRNPFYAGIVNWNGQTFEGTHEARYTTEQLDKRIKLMDARRRPAKHRNASTCKHWLSGLIKCSICGATLSYTGSGACPYFQCWKYAKGYHKTSVAISVKKMEQLVIDYLKQLLDGADFQYVPKTTAPVQNGELEQLKQELARLSTRELRIKLAYENEIDTLEEYKENKIRLQKQRESLLENIKELETQKPEDPSRDNVLSQIRSVYDVLLDPAAESSTKGNFIRTIVDQIVFDKEAEMVYFDIII

SEQ ID NO: 18982 - DNA, 50 bp, Blautia faecis
  source 1..50: mol_type = genomic DNA
tattatagggtatcggactccggtggcccggagtgcagtaacctatacta

SEQ ID NO: 18983 - DNA, 40 bp, Blautia faecis
  source 1..40: mol_type = genomic DNA
cattatgagccagtatggtggcccggatggagaaatcggt

SEQ ID NO: 18984 - DNA, 50 bp, Blautia faecis
  source 1..50: mol_type = genomic DNA
tattatagggtatcggactccggttgcccggagtgcagtaacctatacta

SEQ ID NO: 18985 - DNA, 40 bp, Blautia faecis
  source 1..40: mol_type = genomic DNA
tgttatgaaacaatatggttgcccgcatgaagaaatatgt

SEQ ID NO: 18986 - protein, 555 aa, Proteus terrae
MLCYSYVRFSTPEQARGDSHRRQMEFAKNYCKLNNLTLVEDLSFNDFGVSAYKGDNLKNGALGKFLELVHSEYIPNGSTLIIESFDRLSRQTAIKAQAIFSEIISAGITIVTAMDNRSYNLKSVTENPFDLMYSLMIMIRANEESETKSKRVKEAIKANIRNKKIVSSKLPYWIKHNKEKDILELIPERVEVILYIIEKYLSGLGISKLTQHLNDNIKPFAGKNWYPAYLQKLLRSPSLYGERQYNIDNTLHIMDNYYPAIINKSKFAVIQENLNLRAPTRGGKISSAITGIRKAYCGYCYGVLVSQSTRRNGKIVDGLRRVRCNSNHNGTHCITSTFRASIVEHAIAEYCSQHIDLSFLEPTSNASKLKLSEYKLELHELNKKINNYVKFISEGHVSPAIIVSLNEAENRKKEIEYNINKLDLDILSDNKEELIKKWREIKTNLESYNEENILKLRELIRISVKTIYVFQYGVWGKESSIILPSGESIPIEKGDFTIQITFKSGVRKTLVLGDKIDDMEVIPQNRTIKKNGKTYTSEEYTKMLEDKIKIEYEQK

SEQ ID NO: 18987 - DNA, 50 bp, Proteus terrae
  source 1..50: mol_type = genomic DNA
tgtttaccctacataaactttgcacaggcaaagtttatgtagggtaaata

SEQ ID NO: 18988 - DNA, 40 bp, Proteus terrae
  source 1..40: mol_type = genomic DNA
attgactgtttttgaagggcaaccgcagtttaaatcaact

SEQ ID NO: 18989 - DNA, 50 bp, Proteus terrae
  source 1..50: mol_type = genomic DNA
tgtttaccctacataaactttgcaacggcaaagtttatgtagggtaaata

SEQ ID NO: 18990 - DNA, 40 bp, Proteus terrae
  source 1..40: mol_type = genomic DNA
tttgatttttttttatggtacaccaaaggttaaatcaact

SEQ ID NO: 18991 - protein, 627 aa, Klebsiella variicola
MKKIFLYHRVSTEQQVEDGSGMARQAELLQSYIDRTRIVESMDDPVPVVLEDGGLSAFKGHNFLHGQLGRWMEEVRAGMWDGSILVVENIDRFSRQNPFNVMGYLHDLINHSVAIHDVNMNMVISRENSAMLPMVMMQAQRAYDESKFKSNRIRAGWAKKRDNAFNNGTIVTNKRPKWIDIVDNQYVLNAKARIVTEIFRLYQTGIGCPTIAKTLREMGDDWRFDRIWTGEAVHKILRNRRVTGVIFISELIRDYNSTENSIVQKRYEMNVYPPVIGEDEFNLVQQLLSSRRSGKATGGKRITKKRNDDGSVVTDINGYPTYDTIDCGEITKSNIFNAVCRCAKCGSPMYHNIVVSKRTPAKATSPVEQEYRYIRCLNERDGLCDNKSLRYDVIERFIMEHVKGLDFSTIIQENRINPEVEFVRLKLEEEREHIREYEHGIKRLRNLGKKVPFDVLLELEDAQERLKALEDKQATFADVHVDLDVLKNVDLDALYDVTNIELRGRVENELSKVLEKVELHRDSKNYVITFKYRRVDVLKHVLMITASKTPVLVSGVCIETLGDTVAYSTPSFDIIVVDGGDLRFQPIDDEPLSIIDYSLLMNYVDGTEGADAVAAWMRHNMNFLFTK

SEQ ID NO: 18992 - DNA, 50 bp, Klebsiella variicola; identical to SEQ ID NO: 1947
  source 1..50: mol_type = genomic DNA

SEQ ID NO: 18993 - DNA, 40 bp, Klebsiella variicola
  source 1..40: mol_type = genomic DNA
tttgcgtgataatcatacaaataagtgccattacaacaaa

SEQ ID NO: 18994 - DNA, 50 bp, Klebsiella variicola
  source 1..50: mol_type = genomic DNA
tttgtacaatgttgccactactcaactgaatagtatatagttcaaagtaa

SEQ ID NO: 18995 - DNA, 40 bp, Klebsiella variicola
  source 1..40: mol_type = genomic DNA
tttgcgtgagtttcatgcaactaatttccataaaaataaa

SEQ ID NO: 18996 - protein, 627 aa, Klebsiella quasipneumoniae; identical to SEQ ID NO: 15426

SEQ ID NO: 18997 - DNA, 50 bp, Klebsiella quasipneumoniae; identical to SEQ ID NO: 1957
  source 1..50: mol_type = genomic DNA

SEQ ID NO: 18998 - DNA, 40 bp, Klebsiella quasipneumoniae; identical to SEQ ID NO: 18993
  source 1..40: mol_type = genomic DNA

SEQ ID NO: 18999 - DNA, 50 bp, Klebsiella quasipneumoniae
  source 1..50: mol_type = genomic DNA
tttgtacaatgttgccactattcaactgaatagtacatagttcaaagtaa

SEQ ID NO: 19000 - DNA, 40 bp, Klebsiella quasipneumoniae; identical to SEQ ID NO: 18995
  source 1..40: mol_type = genomic DNA

SEQ ID NO: 19001 - protein, 537 aa, Enterococcus faecium
MKQQIYNTALYLRLSRDDELQGESSSITTQRSMLRLYAKEHHLNVIDEYIDDGWSGTNFDRPSFQRMIEDIEAGKINCVVTKDLSRLGRNYIMTGQYTELYFPSHNVRYIAIDDGVDSEKGESEIAPFKNIINEWVARDTSRKVKSAFKTKFAEGAHYGAYAPLGYKKHPDIKGKLLVDDETKWIIEKIFSLAYQGYGSAKITKQLRAEKVPTASWLNFTRYGTFAHIFEGKPESKRYEWTIAHVKAILKSEVYIGNSVHNMQSTVSFKSKKKVRKPESEWFRVENTHEPIIDKEVFYRVQEQIKSRRRQTKEKATPIFAGLVKCADCGWSMRFGTNKTNKTPYSYYACSYYGQFGKGNCSMHYIRYDVLYQAVLERLQYWAKAVQQDEEKVLNKIKKAGNAERIREKKKKASTLKKAENRQNEIDRLFAKMYEDRACEKITERNFVMLSSKYQKEQIELEQQITSLREELSKMEQDMIGAEKWIELIKEYSVPKELTAPLLNAMIEKILIHEATTNEDNERIQEIEIYYRFIGRVE

SEQ ID NO: 19002 - DNA, 50 bp, Enterococcus faecium; identical to SEQ ID NO: 402
  source 1..50: mol_type = genomic DNA

SEQ ID NO: 19003 - DNA, 40 bp, Enterococcus faecium
  source 1..40: mol_type = genomic DNA
ggtgaaaggatgggaaaaaggcggtgtctatacttgggtc

SEQ ID NO: 19004 - DNA, 50 bp, Enterococcus faecium; identical to SEQ ID NO: 404
  source 1..50: mol_type = genomic DNA

SEQ ID NO: 19005 - DNA, 40 bp, Enterococcus faecium
  source 1..40: mol_type = genomic DNA
ggtgaatgaataaggaaaatgtggtgtatatacttgtgtg

SEQ ID NO: 19006 - protein, 537 aa, Enterococcus faecium
MKQQIYNTALYLRLSRDDELQGESSSITTQRSMLRLYAKEHHLNVIDEYIDDGWSGTNFDRPSFQRMIEDIVAGKINCVVTKDLSRLGRNYIMTGQYTELYFPSHNVRYIAIDDGVDSEKGESEIAPFKNIINEWVARDTSRKVKSAFKTKFAEGAHYGAYAPLGYKKHPDIKGKLLVDDETKWIIEKIFSLAYQGYGSAKITKQLRAEKVPTASWLNFTRYGTFAHIFEGKPESKRYEWTIAHVKAILKSEVYIGNSVHNMQSTVSFKSKKKVRKPESEWFRVENTHEPIIDKEVFYRVQEQIKSRRRQTKEKATPIFAGLVKCADCGWSMRFGTNKTNKTPYSYYACSYYGQFGKGNCSMHYIRYDVLYQAVLERLQYWAKAVQQDEEKVLNKIQKAGNAERIREKKKKASTLKKAENRQNEIDRLFAKMYEDRACEKITERNFVMLSSKYQKEQIELEQQITSLREELSKMEQDMIGAEKWIELIKEYSVPKELTAPLLNAMIEKILIHEATTNEDNERIQEIEIYYRFIGRVE

SEQ ID NO: 19007 - DNA, 50 bp, Enterococcus faecium; identical to SEQ ID NO: 402
  source 1..50: mol_type = genomic DNA

SEQ ID NO: 19008 - DNA, 40 bp, Enterococcus faecium; identical to SEQ ID NO: 19003
  source 1..40: mol_type = genomic DNA

SEQ ID NO: 19009 - DNA, 50 bp, Enterococcus faecium; identical to SEQ ID NO: 404
  source 1..50: mol_type = genomic DNA

SEQ ID NO: 19010 - DNA, 40 bp, Enterococcus faecium; identical to SEQ ID NO: 19005
  source 1..40: mol_type = genomic DNA

SEQ ID NO: 19011 - protein, 537 aa, Enterococcus faecium
MKQQIYNTALYLRLSRDDELQGESSSITTQRSMLRLYAKEHHLNVIDEYIDDGWSGTNFDRPSFQRMIEDIEAGKINCVVTKDLSRLDRNYIMTGQYTELYFPSHNVRYIAIDDGVDSEKGESEIAPFKNIINEWVARDTSRKVKSAFKTKFAEGAHYGAYAPLGYKKHPDIKGKLLVDDETKWIIEKIFSLAYQGYGSAKITKQLRAEKVPTASWLNFTRYGTFAHIFEGKPESKRYEWTIAHVKAILKSEVYIGNSVHNMQSTVSFKSKKKVRKPESEWFRVENTHEPIIDKEVFYRVQEQIKSRRRQTKEKATPIFAGLVKCADCGWSMRFGTNKTNKTPYSYYACSYYGQFGKGNCSMHYIRYDVLYQAVLERLQYWAKAVQQDEEKVLNKIQKAGNAERIREKKKKASTLKKAENRQNEIDRLFAKMYEDRACEKITERNFVMLSSKYQKEQIELEQQITSLREELSKMEQDMIGAEKWIELIKEYSVPKELTAPLLNAMIEKILIHEATTNEDNERIQEIEIYYRFIGRVE

SEQ ID NO: 19012 - DNA, 50 bp, Enterococcus faecium; identical to SEQ ID NO: 402
  source 1..50: mol_type = genomic DNA

SEQ ID NO: 19013 - DNA, 40 bp, Enterococcus faecium; identical to SEQ ID NO: 19003
  source 1..40: mol_type = genomic DNA

SEQ ID NO: 19014 - DNA, 50 bp, Enterococcus faecium; identical to SEQ ID NO: 404
  source 1..50: mol_type = genomic DNA

SEQ ID NO: 19015 - DNA, 40 bp, Enterococcus faecium; identical to SEQ ID NO: 19005
  source 1..40: mol_type = genomic DNA

SEQ ID NO: 19016 - protein, 537 aa, Enterococcus faecium; identical to SEQ ID NO: 10201

SEQ ID NO: 19017 - DNA, 50 bp, Enterococcus faecium; identical to SEQ ID NO: 402
  source 1..50: mol_type = genomic DNA

SEQ ID NO: 19018 - DNA, 40 bp, Enterococcus faecium; identical to SEQ ID NO: 19003
  source 1..40: mol_type = genomic DNA

SEQ ID NO: 19019 - DNA, 50 bp, Enterococcus faecium; identical to SEQ ID NO: 404
  source 1..50: mol_type = genomic DNA

SEQ ID NO: 19020 - DNA, 40 bp, Enterococcus faecium; identical to SEQ ID NO: 19005
  source 1..40: mol_type = genomic DNA

SEQ ID NO: 19021 - protein, 529 aa, Enterococcus faecium
MKQQIYNTALYLRLSRDDELQGESSSITTQRSMLRLYAKEHHLNVIDEYIDDGWSGTNFDRPSFQRMIEDIEAGKINCVVTKDLSRLGRNYIMTGQYTELYFPSHNVRYIAIDDGVDSEKGESEIAPFKNIINEWVARDTSRKVKSAFKTKFAEGAHYGAYAPLGYKKHPDIKGKLLVDDETKWIIEKIFSLAYQGYGSAKITKQLRAEKVPTASWLNFTRYGTFAHIFEGKPESKRYEWTIAHVKAILKSEVYIGNSVHNMQSTVSFKSKKKVRKPESEWFRVENTHEPIIDKEVFYRVQEQIKSRRRQTKEKATPIFAGLVKCADCGWSMRFGTNKTNKTPYSYYACSYYGQFGKGNCSMHYIRYDVLYQAVLERLQYWAKAVQQDEEKVLNKIQKAGNAERIREKKKKASTLKKAENRQNEIDRLFAKMYEDRACEKITERNFVMLSSKYQKEQIELEQQITSLREELSKMEQDMIGAEKWIELIKEYSVPKELTAPLLNAMIEKILIHEATTNEDNERIQEIEIY

SEQ ID NO: 19022 - DNA, 50 bp, Enterococcus faecium; identical to SEQ ID NO: 402
  source 1..50: mol_type = genomic DNA

SEQ ID NO: 19023 - DNA, 40 bp, Enterococcus faecium; identical to SEQ ID NO: 19003
  source 1..40: mol_type = genomic DNA

SEQ ID NO: 19024 - DNA, 50 bp, Enterococcus faecium; identical to SEQ ID NO: 404
  source 1..50: mol_type = genomic DNA

SEQ ID NO: 19025 - DNA, 40 bp, Enterococcus faecium; identical to SEQ ID NO: 19005
  source 1..40: mol_type = genomic DNA

SEQ ID NO: 19026 - protein, 500 aa, Anaerofilum sp
MNVVIYARYSSHSQTEQSIEGQLHTCYEYARNNGYLVVGEYIDRAQSGTTDSRAEFQRMIADSDKHTFEGVLVYQLDRFARNRYDSAINKAKLKKNGVRVISARENISDDASGILVEGVLESMAEYYSAELSQKIRRGMEINAQKCLANGSNPGLGYKVDSERRYYVDEEEAKIVREIFERYASGETVADIIRDLNRRKLTTSLGKPFNKNSVHRILNNRRYIGYYLYKGQETPGGMPRIIEDELFERVHYILDRNKKAPARARGREEYLLTTKLFCGYCREMMTGYGGTGKSGKTYHYYACNNFKRRKCKKKVIGKERIEDRVVLECRKLLTDSNIERIAASVSEVCESNRDTAPIKRIKAAIQEADTAIENLWKALERGQATDMITERIEKRQHEKEELQAQLAVEMAKQVTLTAPQVRAYLYSLRQGDKNDENIKRGIINIFLRAVYLYDDRFTLVLNGSDTPITIDDILLDEIEEGLEGDLTNCERCSSLVADAPP

SEQ ID NO: 19027 - DNA, 50 bp, Anaerofilum sp
  source 1..50: mol_type = genomic DNA
gttcatcgttggttgcggacgctccaccagatggacattgcacgaacacc

SEQ ID NO: 19028 - DNA, 40 bp, Anaerofilum sp
  source 1..40: mol_type = genomic DNA
gttcgattcccgtcatctccaccaaaagcaccgcaatttt

SEQ ID NO: 19029 - DNA, 50 bp, Anaerofilum sp
  source 1..50: mol_type = genomic DNA
gttcatcgttggttgcggacgctcccccagatggacattgcacgaacacc

SEQ ID NO: 19030 - DNA, 40 bp, Anaerofilum sp
  source 1..40: mol_type = genomic DNA
tttctattcccaacatttcccctaaagtcacctcaatttt

SEQ ID NO: 19031 - protein, 484 aa, Enterocloster clostridioformis
MNGVIYARYSSDNQREESIEGQLRECKEYAQRNDITILGTYIDRALSAKTDNRPEFQHMIKDGAKGLFDIALVWKLDRFARNRYDSARYKNMLKKNGVKVISARENISEGSEGIILEAMLEGYAEYYSAELSEKVIRGLTDNALKCKHNGGTVPMGYYIDEQQYYQIDPKTAPIVLEMFTRYSEGNTMQELVNLLNDRGVRSIRGGKITLNIINHLLKNRRYMGEYSYRDVIKEDGIPAIVSKELFERVQERLEKNKKAPARHKAEDDYLLSTKLYCGKCNSFMVGESGTSHTLKVHHYYRCVNTKKKKLCTKKAVKKDWIEDLVINYTMKAIMNDEVMKRLIDTLMELQKKESTNLPLLKKQLAETEKGINNMLNAIQAGIFTPSTKQRLDELEETKSQLEVSILQEEMQKPMLTREQIAFFIYRFRKFDTTKREQRQRLIDSFVNAVYLYEDKVVMTFNYKDGSKTVTLAEVEGSDLSCFGA

SEQ ID NO: 19032 - DNA, 50 bp, Enterocloster clostridioformis
  source 1..50: mol_type = genomic DNA
ggttcggatttatcctgcttcggtgcactgaatcatgataatccgaaccc

SEQ ID NO: 19033 - DNA, 40 bp, Enterocloster clostridioformis
  source 1..40: mol_type = genomic DNA
ggttcaagtcccgctgccggcatcaaattggaaccgtgaa

SEQ ID NO: 19034 - DNA, 50 bp, Enterocloster clostridioformis; identical to SEQ ID NO: 19032
  source 1..50: mol_type = genomic DNA

SEQ ID NO: 19035 - DNA, 40 bp, Enterocloster clostridioformis
  source 1..40: mol_type = genomic DNA
ggttcaaatcctgcctctggcatcaaaatggatcaatgaa

SEQ ID NO: 19036 - protein, 585 aa, Clostridium beijerinckii
MKEVEVIKAKGITAGRNKGKTIERLRVAAYCRVSTDSEDQLNSYKSQVAYYTELINKNKEWAMAGIFADEAITGTQVTKREDFQRMINECMNDEIDMVITKSISRFARNTLDTLKYVRMLKEKNIAVYFEDEKINTLTMDGELLLVVLSSVAQQEVENISANVKKGLKMKMKRGELVGFQGCLGYDYHPEDKTITVNQEEAKIVQYIFNRYIEGAGGSVIGKELENLGYKTRYGSSSWAQSTVIGIIKNEKYKGDLLMGKTFTVDPISKRRLDNFGEEDKFYIRDHHEAIINEETFEKAQAILERRNQNRVKISDGNIKREKFSRQYAFSCLLECGFCGNTLTRRNWHSGTDHSKVVWQCVTATKKGKKFCSDSKAIPEKAIEDAFVESYRLLCSDNKEVLEEFLQRMEENLNSSSVNKQISKIDKEINTLEKKKNKLIDMRLEDSIDKATYEAKYADLILTQENLIKDRKKLGEISENEKEIKHRLKEFKTTLEQNEVLEEFDRYVFESVVEKVIIGGIDEDGNKDPAQITFIYKTGFKSSINGDKFKPQRKNARGRHRTDELCSHDNNEVEKLCSDSSSDTCG

SEQ ID NO: 19037 - DNA, 50 bp, Clostridium beijerinckii
  source 1..50: mol_type = genomic DNA
tgatagtagctccgatacatgtggagacttgcgtgttgctacaacggaaa

SEQ ID NO: 19038 - DNA, 40 bp, Clostridium beijerinckii
  source 1..40: mol_type = genomic DNA
ccaaatacaaagcatgtggaagcagtagctaaattaatta

SEQ ID NO: 19039 - DNA, 50 bp, Clostridium beijerinckii
  source 1..50: mol_type = genomic DNA
tgatagtagctccgatacatgtggttacttgcgtgttgctacaacggaaa

SEQ ID NO: 19040 - DNA, 40 bp, Clostridium beijerinckii
  source 1..40: mol_type = genomic DNA
ccaaataaatgccatgtcattgcagtggctaatttaatca

SEQ ID NO: 19041 - protein, 564 aa, Clostridium perfringens
MPRSRKSQMSRLTNNRTIWKVAVYIRLSREDGNDESLSVINQKKILKEYLEEMFEDEYVLVDFYVDDGLTGTDDERESFQRMIKDVKQGKVNCIICKTLARAFRNYSDQGYFLEEFLPLYRTRFICLGSPKFDTYLNPEAITDGLDVPITGLMNDRYAARASADIRRTFNTKRRNGEFIGAFAPYGYKKSPDNKNKLIIDEEAAQVIRDIFRWRVEEGINKLGIVRRLNELGTLTPTKYKHSKGLMLKNPNLDKQDGMWSMNTICTILKNRMYIGDMVQGRQRVISYKVHKTICTPENEWFIVENTHEAIIDKDTYLKAQELDQRGIRMSPKGRNVYLFSGFLRCADCKRSMTKKTNKNKLNDGTVKEYNYYICSTYALKNKSKCSRHSIKLEILEEAVLKAIQIQVAMVENMSEVISEINKQATIVNQSSRLKKQLNEKQKELEKIICVTDNLYMDWKSEEISRNEYARMKSKFEIKAEEIRRIISNIEAEIQSSSKEFGDNDPYLKTFLKYKNIKELNRGILIELIDAIYIHENNEITIQFKFADQYKRLKEFIKDNHFSKN

SEQ ID NO: 19042 - DNA, 50 bp, Clostridium perfringens; identical to SEQ ID NO: 11272
  source 1..50: mol_type = genomic DNA

SEQ ID NO: 19043 - DNA, 40 bp, Clostridium perfringens
  source 1..40: mol_type = genomic DNA
aatgggattaatagggccaaatggagcaggaaagactaca

SEQ ID NO: 19044 - DNA, 50 bp, Clostridium perfringens
  source 1..50: mol_type = genomic DNA
acttgtctatacgtcaatggttcacatgaaccgtaaaggtatagataata

SEQ ID NO: 19045 - DNA, 40 bp, Clostridium perfringens
  source 1..40: mol_type = genomic DNA
aagaagataaattggaccacagtgagcaggaaagattaca

SEQ ID NO: 19046 - protein, 564 aa, Clostridium perfringens
MPRSRKSQMSRLTNNRTIWKVAVYIRLSREDGNDESLSVINQKKILKEYLEEMFEDEYVLVDFYVDDGLTGTDDERESFQRMIKDVKQGKVNCIICKTLARAFRNYSDQGYFLEEFLPLYRTRFICLGSPKFDTYLNPEAITDGLDVPITGLMNDRYAARASADIRRTFNTKRRNGEFIGAFAPYGYKKSPDNKNKLIIDEEAAQVIRDIFRWRVEEGINKLGIVRRLNELGTLTPTKYKHSKGLMLKNPNLDKQDGMWSMNTICTILKNRMYIGDTVQGRQRVISYKVHKTICTPENEWFIVENTHEAIIDKDTYLKAQELDQRGIRMSPKGRNVYLFSGFLRCADCKRSMTKKTNKNKLNDGTVKEYNYYICSTYALKNKSKCSRHSIKLEILEEAVLKAIQIQIAMVENMSEVISEINKQATIVNQSSRLKKQLNEKQKELEKIICVTDNLYMDWKSEEISRNEYARMKSKFEIKAEEIRRIISNIEAEIQSSSKEFGDNDPYLKTFLKYKNIKELNRGILIELIDAIYIHENNEITIQFKFADQYKRLKEFIKDNHFSKN

SEQ ID NO: 19047 - DNA, 50 bp, Clostridium perfringens; identical to SEQ ID NO: 11272
  source 1..50: mol_type = genomic DNA

SEQ ID NO: 19048 - DNA, 40 bp, Clostridium perfringens; identical to SEQ ID NO: 19043
  source 1..40: mol_type = genomic DNA

SEQ ID NO: 19049 - DNA, 50 bp, Clostridium perfringens; identical to SEQ ID NO: 19044
  source 1..50: mol_type = genomic DNA

SEQ ID NO: 19050 - DNA, 40 bp, Clostridium perfringens; identical to SEQ ID NO: 19045
  source 1..40: mol_type = genomic DNA

SEQ ID NO: 19051 - protein, 540 aa, Enterocloster clostridioformis; identical to SEQ ID NO: 296

SEQ ID NO: 19052 - DNA, 50 bp, Enterocloster clostridioformis
  source 1..50: mol_type = genomic DNA
gatacccaacaatatctttaactaagggagacaggagtttcccaaagtta

SEQ ID NO: 19053 - DNA, 40 bp, Enterocloster clostridioformis
  source 1..40: mol_type = genomic DNA
gcctcctgctgtcagcaaatgggaaacgggtgcctcctgt

SEQ ID NO: 19054 - DNA, 50 bp, Enterocloster clostridioformis
  source 1..50: mol_type = genomic DNA
gatacccaacaatatctttaactattggagacaggagtttcccaaagtta

SEQ ID NO: 19055 - DNA, 40 bp, Enterocloster clostridioformis
  source 1..40: mol_type = genomic DNA
gccttgtgctgtcagaatcttggcaagggttgccacctgt

SEQ ID NO: 19056 - protein, 505 aa, Klebsiella quasipneumoniae
MTLAFSYVRFSTKHQASGTSLERQVNASKLFCSQNGLTLSNQSYHDLGISGFKNVRRPELEQMLEAIQTGDIPSGSYILIEAIDRLSRKGISHTQDILKKILQYDVKVAFVGEDAKTLQGHILNKDSLNDLSSVILVALAADLAHKESLRKSKLVKASKAIAREKAADGEILPGKSVFYLDYDRKNKKYVFNKRVDLARKIIQMRVEGKGVRKIARILNEENIPGPTGKQWYQMSVKRLLKSPVLYGAYQTHQIIEEKYIPVSLIENYYPALIDYQTFSQIQFDDKRVSKGRPSRHKFSGVLYCECGAVLCRKVNTSVTKKGIKEYQYFNCFGAFESRCKNNKAIRDLHIPLEKAIDKLQIKTRSVKNIKNEQIIAKREKIDQLNKMLLELEMPPVSVLKTISTLEKELQELLEQPDVQPPKSADIKTLVEIKDAEQYNLYLKRLVKRITIFQLNGPKNIRIKIEKTDGHYQSFIVNNGKIMFNADTKALQEHLRKLKEGTSDEV

SEQ ID NO: 19057 - DNA, 50 bp, Klebsiella quasipneumoniae
  source 1..50: mol_type = genomic DNA
ttttgtcaaaatgaaactgttcttcaggtaatagtatcattttacaaaag

SEQ ID NO: 19058 - DNA, 40 bp, Klebsiella quasipneumoniae
  source 1..40: mol_type = genomic DNA
ccctgaaagaaatgtgccgcaggtaatagttctttcatat

SEQ ID NO: 19059 - DNA, 50 bp, Klebsiella quasipneumoniae
  source 1..50: mol_type = genomic DNA
ttttgtcaaaatgaaactgttcttatggtaatagtatcattttacaaaag

SEQ ID NO: 19060 - DNA, 40 bp, Klebsiella quasipneumoniae
  source 1..40: mol_type = genomic DNA
ccaggtaagcaatgtgactattgtcatagttcttacatat

SEQ ID NO: 19061 - protein, 507 aa, Clostridium perfringens
MIHKKIIVLHRVSSDSQDFESQNNAIEDYIRENNIVVDEYIKEEGISGYSNKLFEREAIKKIYDMALLDELDTLIVFNLDRIGRTTEVAEFLKKLTYCDVKVYSVTEGLLNGGEDTQDLINYIKSFSAQMESKKTSLRVRSGKEATNKKGLFSGGTVNFGYGVENQKMFIIEQEAEIVRLIFNLYIKEGKAGTVRILKEKGITKRGRPFSHHMVNDILKDTIYIGLKRYGHYILTDKDPTIKARKFSKESMKFQPYNESLRIISDDLFYKVQEKIQGNTIKKGNVTKLTNKTNVLFEGLLYHRCGDREIRKLHLDRKKDKYGNYIYSYRCSHCRRQFYKNVIKTYGCKKYNPVIEEHILNNLSLLSIEELEQKIIDNNKNGVILIQKSLNESEKELTKREKALSNARKELELIFLGESDMEKGVINTLIIKLTKDIEELRDNIKILNDRLEEAKSNFTIDSNLINKYKNFNFAYSKADSNYKKLLMQEVVEKIIIDGEELRIKFYID

SEQ ID NO: 19062 - DNA, 50 bp, Clostridium perfringens; identical to SEQ ID NO: 17077
  source 1..50: mol_type = genomic DNA

SEQ ID NO: 19063 - DNA, 40 bp, Clostridium perfringens
  source 1..40: mol_type = genomic DNA
gtcaggaattccagactcagttgacactccagctcctcca

SEQ ID NO: 19064 - DNA, 50 bp, Clostridium perfringens
  source 1..50: mol_type = genomic DNA
aagtgggtttatattctatttactggagtatcttgaatagtaacccactt

SEQ ID NO: 19065 - DNA, 40 bp, Clostridium perfringens
  source 1..40: mol_type = genomic DNA
ggaaggaatccaagactaaggtgacaatccaggtctacca

SEQ ID NO: 19066 - protein, 507 aa, Clostridium perfringens
MIHKKIIVLHRVSSDSQDFESQNNAIEDYIRENNIVVDEYIKEEGISGYSNKLFEREAIKKIYDMALLDELDTLIVFNLDRIGRTTEVAEFLKKLTYCDVKVYSVTEGLLNGGEDTQDLINYIKSFSAQMESKKTSLRVRSGKEATNKKGLFSGGIVNFGYGVENQKMFIIEQEAEIVRLIFDLYIKEGKAGTVRILKEKGITKRGRPFSHHMVNDILKDTIYIGLKRYGHYILTDKDPTIKARKFSKESMKFQPYNESLRIISDDLFYKVQEKIQGNTIKKGNVTKLTNKTNVLFEGLLYHRCGDREIRKLHLDRKKDKYGNYIYSYRCSHCRRQFYKNVIKTYGCKKYNPVIEEHILNNLSLLSIEELEQKIIDNNKNGVILIQKSLNESEKELTKREKALSNARKELELIFLGESDMEKGVINTLIIKLTKDIEELRDNIKILNDRLEEAKSNFTIDSNLINKYKNFNFAYSKADSNYKKLLMQEVVEKIIIDGEELRIKFYID

SEQ ID NO: 19067 - DNA, 50 bp, Clostridium perfringens; identical to SEQ ID NO: 17077
  source 1..50: mol_type = genomic DNA

SEQ ID NO: 19068 - DNA, 40 bp, Clostridium perfringens; identical to SEQ ID NO: 19063
  source 1..40: mol_type = genomic DNA

SEQ ID NO: 19069 - DNA, 50 bp, Clostridium perfringens; identical to SEQ ID NO: 19064
  source 1..50: mol_type = genomic DNA

SEQ ID NO: 19070 - DNA, 40 bp, Clostridium perfringens; identical to SEQ ID NO: 19065
  source 1..40: mol_type = genomic DNA

SEQ ID NO: 19071 - protein, 566 aa, Clostridium leptum
MTTANNINGQTEEKITALYCRLSVDDEKKDAESNSITNQKQILLDYCQKQGFTNTMFFVDDGISGTSFERGGFQQMQKMVEEGKICRVIVKDLSRFGREMVEAGRLTQIVYPSLGVTFISLHENVNSTTGEGMEMLPFYNIFNEWYAAQTSKKIRAVWQSKAENGKRVSPTVPFGYVKDPDDKEKWLIDEPAAEVVRKIYALCLAGRGPSQIARQLEKEKILVPSAYYESVGRSHAQKVPTNPYSWDQKTVVGIIENRQYTGCAVNFKSTTVSYKVHKKIHNATEDYQIIPNMQEPIISEEQWLRVQELRKHRCRPTATGRASLFSGLVYCPDCGAKLHFCAAKSLKRNQEFWRCSNYKDGRGTCQIHYIRDVVLERIVLEAISSLADFVKCHEPVFLYMLAKKTNAMRQKEHKRLEQAVEQGTKRIAEIDRLIEKVFEQNAIGVLSDERFSKMLQSYEKEQKALTQEVAESRQTLEEAKQKATDLRLLLRTLREMTEINELTPTLVNSLIERIEVHNNDKSSGHCYVKVDIYFTAVGMIDIPTEQEILAMMEEIRANPQDFRFVA

SEQ ID NO: 19072 - DNA, 50 bp, Clostridium leptum
  source 1..50: mol_type = genomic DNA
aaacttccttatctggcgttgccaaatgctaacaccatataaggatataa

SEQ ID NO: 19073 - DNA, 40 bp, Clostridium leptum
  source 1..40: mol_type = genomic DNA
aaaaaacctcccgttcccaaaacgcagactccctgcaggc

SEQ ID NO: 19074 - DNA, 50 bp, Clostridium leptum
  source 1..50: mol_type = genomic DNA
aaacttccttatctggcgttgccacatgctaacaccatataaggatataa

SEQ ID NO: 19075 - DNA, 40 bp, Clostridium leptum
  source 1..40: mol_type = genomic DNA
aaaaaatctccagatcccccaaaacagactgactgcagtc

SEQ ID NO: 19076 - protein, 520 aa, Gordonibacter urolithinfaciens
MAHKKKFELNDNNLAIAYYRFSSHSQNEASIDQQRELAHAWADAHGFKIVKEYEDAAISGTTENRPGFQQMLSEVAKIRPRVLIMWKTDRLGRDKYVLAMAKRTIRDAGCEIRLLAENIPTDGPEGVLIEGLMDAMAEYYSRQLSQNIQRGMDYNAQHALYNGHKLFGYGVDKSTKRYIVDPDTAPFVQRMFAEYAEGKAMQTICDELNAQGLRTTRGAKFGVKTMNKMLQNRAYIGEYRHGDIVVEGGMPALVDEETFDKVQRKFAENKRKGSQRARGMDENDAPRYWLTGKVYCGKCGSTLQGVSGTSGTGRTYYYYYCSAQRRKQCTLKKVRKEKLEDAVTMILRSILHDSENLMSLAVDAAAYYEKNYRDTGYLDGLEAKRREVEKSLANLVKVIESGLISETVTERLVQLEEQKRALNEAIEAENIRAALCEDEHTIKAYFEKFLHADFDNPETRDQVLEYFVDKIYLTDDGLVVTSWYSEDRTEVTWDMLYGEDGNPFVKGEAVKFDCFPFGST

SEQ ID NO: 19077 - DNA, 50 bp, Gordonibacter urolithinfaciens
  source 1..50: mol_type = genomic DNA
cgactgcttcccctttggctccaccagagtaggaagcgtcgaactattct

SEQ ID NO: 19078 - DNA, 40 bp, Gordonibacter urolithinfaciens
  source 1..40: mol_type = genomic DNA
cgattctccgcgcctccaccaaccaaaggcaggagccctg

SEQ ID NO: 19079 - DNA, 50 bp, Gordonibacter urolithinfaciens
  source 1..50: mol_type = genomic DNA
cgactgcttcccctttggctccactggagtaggaagcgtcgaactattct

SEQ ID NO: 19080 - DNA, 40 bp, Gordonibacter urolithinfaciens
  source 1..40: mol_type = genomic DNA
ctattccacgtgggtccactgaccaacggcagcagcactg

SEQ ID NO: 19081 - protein, 524 aa, Atopobium minutum
MKTVKKIEAKPKLRGIISSTDENYLMKVAGYARVSTDNEEQLTSYQAQLDYYTNFIQAHDGWEFAGMYADEGITGTNTKKRDGFNTMIADALAGKIDIIVTKSISRFARNTVDSLTTIRKLKEKGIEVWFEKENIHTLDAKGELLITIMSSLAQEESRSISENTTWGKRKQMADGKVSLGYSRFLGYDRGPDGKMVINEEQAKVVRKIYRLFLTGYSAHGIKKRLEADGDLTPTGKKKWPFTSIKRILVNEKYRGDALLQKEYTVDFLTKEKRKNTGELPMYYVEGDHEPIIDPTIFDIVQEEVKRRNSMSRYNGLFIFSSRIHCMDCGAYFGRRIWHSNDKGRKVVWQCTNIYHGTRNCHMVAIPEESIKILFVKAIDKLMGVKDSVIEDARILQSQLEDTSSLEEHAEALNDEMKITLRAFEEAIRESGREGKGNEREVHLLKSYDAKETEYKSLLSQVQANKAHALETGLFIDTLKKLKPDGRFSETMWGLLLSEVEVYSRDDIRYVFKDGSIVKMELDQV

SEQ ID NO: 19082 - DNA, 50 bp, Atopobium minutum
  source 1..50: mol_type = genomic DNA
ggtatctgagtgagaagccctatgaacgtaatccttctgagcttgatact

SEQ ID NO: 19083 - DNA, 40 bp, Atopobium minutum
  source 1..40: mol_type = genomic DNA
cttactcatagctgctgctaacccctgtccttgtggctgg

SEQ ID NO: 19084 - DNA, 50 bp, Atopobium minutum
  source 1..50: mol_type = genomic DNA
ggtatctgagtgagaagccctatgggcgtaatccttctgagcttgatact

SEQ ID NO: 19085 - DNA, 40 bp, Atopobium minutum
  source 1..40: mol_type = genomic DNA
ctcactcatagctgctgctggctactgccactgggactga

SEQ ID NO: 19086 - protein, 471 aa, Cytobacillus oceanisediminis
MTVGIYIRVSTIEQAKEGYSIAAQKERLTAYCAAQGWSDIRFYVDEGVSAKDTNRPQLQLLLEHVKSEKISTILVYRLDRFTRSVIDLYNLLNLLEKHKCTFKSATEIYDTSSAMGRMFIGLVALLAQWERENLSERVKMALEEKVSSGERVGNVPYGFDLSDEEKLIKNDKATVVLDMIDKVKKGMSASKLAAYLNKTNNDRTWHPQGVLRILKNPALYGATYWQGKIYENTHPKEAIISKDEFNRLQNMLNDRSIHHRRDVESHYLFQGKLICPNCQKPLSVNRYVRKRKDGSQYQGCIYKCQNCWKQGKTMLSIGEQRFVDALYEYMKNVEITNIEKPIESNHDSKPLIDQLDQIEKMREKYQRAWAMDKMTDEEFDKRMDETREVSEDLKRRLKEIESPESIDTEAIKKMIFTFNESFRYLNQEEKSMYVSQFIRRIEFNLKPQPPQRPDKAKKGKDLVVITNVEFY

SEQ ID NO: 19087 - DNA, 50 bp, Cytobacillus oceanisediminis
  source 1..50: mol_type = genomic DNA
attagtctttatctaacgttaggagttgataaagttacataaatacacct

SEQ ID NO: 19088 - DNA, 40 bp, Cytobacillus oceanisediminis
  source 1..40: mol_type = genomic DNA
ggtggtttttccgcttccagttgggcctgtgaaaataatt

SEQ ID NO: 19089 - DNA, 50 bp, Cytobacillus oceanisediminis
  source 1..50: mol_type = genomic DNA
attagtctttatctaacgttaggagctgataaagttacataaatacacct

SEQ ID NO: 19090 - DNA, 40 bp, Cytobacillus oceanisediminis
  source 1..40: mol_type = genomic DNA
ggaggtttttcagcgtcctgctggtcctgtgacattacgt

SEQ ID NO: 19091 - protein, 643 aa, Vibrio alginolyticus
MLYAYCRVSSGKQLEGLSMSLQGDEALLSRIAKEYHTTVSDRIYIDEGVSSYKGKNLESGQLGEIVRDIEKGRIKKGDIIVMRALDRLSRQELTDSENLYNRIVGAGVNIYTTIDNHLYKPNCVHSAILKTLALNTAHEESAKKAYLTNRYALHRIEEFQRGEKPENGTAWDIGVGKHPFWIQLDNKVVQPHRLYFQAAKDIVKLIIDGKGNREIMRYLEENHPRYDKDGERIEWSYSLVASFHRKEALTGLRSVKLEDIEYKLEDYYPRVCTELEFHQMSLRKEEKYVSNGNRARPTLLGGIRRLYCSCGRAMGGITPKDSPAFYRCLHILNPCISYISLRVVDRIVLDAIQTHVFESEKFDDTLLNELLSKADLMRIKYSKQESMLMSDPDLFTPEFKQQLRKSKLEIEQVEQEIMAERKKHAVIEDVDLKSYAEWQAAISEFQEQRDDEEIIKLRDKVQKLVRRIDIDGQLITITMVDGKKIYRHIVKDNTHDTVYCKVHVVDSETLEMVTLTNPALSDVYCLESELERFKSACNINQTFITRIAIREKTDHLGIVQQAVSDYLDEHDVLRWRRSDVMKLGVTTTQWQMFKEPEHMSGTGVVIEELKYKDKNYAKKSAVVAYKRYNEQAILNLLNARSLI

SEQ ID NO: 19092 - DNA, 50 bp, Vibrio alginolyticus
  source 1..50: mol_type = genomic DNA
atctcactagttttgactttcgcatcacttaaagtaaaatagtgtgatac

SEQ ID NO: 19093 - DNA, 40 bp, Vibrio alginolyticus
  source 1..40: mol_type = genomic DNA
ctcaacactttctttcgcatcaccaaatagcattgatgta

SEQ ID NO: 19094 - DNA, 50 bp, Vibrio alginolyticus
  source 1..50: mol_type = genomic DNA
atctcactagttttgactttcgcattacttaaagtaaaatagtgtgatac

SEQ ID NO: 19095 - DNA, 40 bp, Vibrio alginolyticus
  source 1..40: mol_type = genomic DNA
ctaaacactttctttggcattttgaaacagctttgttata

SEQ ID NO: 19096 - protein, 547 aa, Clostridium paraputrificum
MNTIAIYTRKSKFTGKGESIENQIEKCKKFIEFKFNIDSENVNIFIDEGFSGKNENRPQYQLMMEKIKKKEIDSIVIYQLNRLGRNARDIHNTMQLCDDLGVIIYSATEGFDSSTSFGRAVIGILASLAQLEREQLAERVKDNMYTLAKMGRWLGGQSPLGFDGSREYYIDETGKERSITKLKKNEEELKLVKLLYDKYLEEKSLSQVGKWALINHLTGKNGGNLNKNAINVILQNPVYVKSSKEVFEYLSNEGYEVCGEPNGNGLLRYGKDDEQIVATAKHKGVIPSDKWIEVQKILKDNVSKAPRMGKTNTALLTGLLRCKCGSTMRISYGQKRKDGTKPFYYICNMKINSGGARCNLKNLNGNLFEKNFIQFLKNYSKETLFAELQKLLNNSKDLESTISSNKIDLEIEKSNKAIKQILNKLKLTDDDELSKILLQEIKVENNKLKALSKQKEELLNDQSEVVITQSEVLAILDDLDNFQKTFDDLNLEDKQKALKSLIESITLTDDKFIVDFNIKKKLDNAIKKLSSLFAKYKSSQLRHPCRS

SEQ ID NO: 19097 - DNA, 50 bp, Clostridium paraputrificum
  source 1..50: mol_type = genomic DNA
catcgcaattaagacatccatgcagaagctcgtcattccaaattgcgatg

SEQ ID NO: 19098 - DNA, 40 bp, Clostridium paraputrificum
  source 1..40: mol_type = genomic DNA
cctttttgttggacataccgaagctatatgtacaggaact

SEQ ID NO: 19099 - DNA, 50 bp, Clostridium paraputrificum
  source 1..50: mol_type = genomic DNA
catcgcaattaagacatccatgcatgagctcgtcattccaaattgcgatg

SEQ ID NO: 19100 - DNA, 40 bp, Clostridium paraputrificum
  source 1..40: mol_type = genomic DNA
catttttgttgggaatgcctgagctgtaggtacagaaaac

SEQ ID NO: 19101 - protein, 545 aa, Clostridium paraputrificum
MGNVAIYSRKSKFTGKGESIENQILKCKQFIEFKFSMDPSEVEIFIDEGFTGRNTNRPQYKELMKKVKAGEIEHIVLYQLNRFGRNARDIHNSLQECMDHNCIIYSAQEGFDSATSFGRAIIGIMASLAQLETEQLGERVKDNMYTLAKMGRWLGGQSPLGFNGEREYYIDDNGKERSVTKLVENQEEMNIVKAIYNKYLEEKSLSQVGKWSLTNNFKGKNGGNLDKSALNVILQNPVYVKANKAVFEFFKSKGYDVYGIPNGHGMLRYGKENNIVASAKHKGIIPASDWLEVQSILSSNAYKAPRLGKTNTALLTGILKCKCGSNMRVTYGKANKNGLKQFYYTCNMKNASGGTRCNSKNINGIKLEENLVKYLTSYNKDIFIKEIKNILATTEEINKANDIDNINLSIDTSNKSITKLLNKLKLVDDEDISKIILDEIKYEKNKIKELESKKKVALENESSLALTQQDLFEIATSLEDFCKNFDKLTFEEKKKRLSYLIDTIIYDEGTFSINFNIKKKLDNCFNLLSNLSNKFLSHFSTSCRS

SEQ ID NO: 19102 - DNA, 50 bp, Clostridium paraputrificum
  source 1..50: mol_type = genomic DNA
tatcgcattttagtacatcatgcagaagcatgttgtaccaaagtgagata

SEQ ID NO: 19103 - DNA, 40 bp, Clostridium paraputrificum; identical to SEQ ID NO: 19098
  source 1..40: mol_type = genomic DNA

SEQ ID NO: 19104 - DNA, 50 bp, Clostridium paraputrificum
  source 1..50: mol_type = genomic DNA
tatcgcattttagtacatcatgcatgagcatgttgtaccaaagtgagata

SEQ ID NO: 19105 - DNA, 40 bp, Clostridium paraputrificum; identical to SEQ ID NO: 19100
  source 1..40: mol_type = genomic DNA

SEQ ID NO: 19106 - protein, 502 aa, Clostridium perfringens
MKKVAIYSRKSVYTEGSISIESQVNMCKEYMLKKFPNSTFEIFEDEGFSGGNTNRPAFKKMIKAAELKQIDIVVCYKIDRIARNTLDFLNILEMFKENNVKLISITEGFDPNTQMGKVMLTLLASFAEMERANIQQRVKDSMFSLAQKGDWTGGTPPIGFKTGENGGLELENPKLILDIFNMKFNKLKNSEIIEYVKEKYNHTFVNNTLANTLRRPFYAKSSKEVSIYLRSKGFEIIKEENNINSYYTYKNNDKYYAIVSNDIEGLIEPNIWIAVNKIMDNSLPSKTNRFSEKFWLTKTLKCKYCGKTYCGQTNNSKSKYETKSGELKIYTSIYEYYMCRDMMNGRLKTCENTRRIKKVTLESKVEKLIYKFKDKNFFEKAYKTTDIDNTEELNTLKSNLKKIDSNIDNLTNKLSLLSNEAAMIVIDKIESSIAEKKILNDKILELELNSINNLNGNSNFIYENIMKFNSDLSVDAKRNLAMNIFKEIIYDYKEDKFEVFFN

SEQ ID NO: 19107 - DNA, 50 bp, Clostridium perfringens
  source 1..50: mol_type = genomic DNA
tttattcaaataaatactggtgcacctactcctatattcatttaaataaa

SEQ ID NO: 19108 - DNA, 40 bp, Clostridium perfringens
  source 1..40: mol_type = genomic DNA
tataataccaactccagcgccagctataattggtagtaat

SEQ ID NO: 19109 - DNA, 50 bp, Clostridium perfringens
  source 1..50: mol_type = genomic DNA
tttattcaaataaatactggtgcatatactcctatattcatttaaataaa

SEQ ID NO: 19110 - DNA, 40 bp, Clostridium perfringens
  source 1..40: mol_type = genomic DNA
tctaatacccagcccagggtaaattataattgatggtaat

SEQ ID NO: 19111 - protein, 558 aa, Pseudomonas aeruginosa
MPRAYAYVRWSTAEQGEEGRDSHDRQTTPLQAFTESTGIPVVETIIDKGVSAFKGANARIGQLKGLLDRIESGEIERGDYIIVESIDRLTRQKLNDSVDLIQSILKKGVRLHTVIDQKTYSHDDPSRDLETLLMVGVIAKRAHEESDTKSKRLKSSWLKKRNAAETTIIRKQCPYGLRYDEEAQAFAIVEDEAQEIRDIFENLKYMGILESIKRVNQYSKRRWTRKHIDELIKNKSPIGVLSLRRRNDEDGTKIFDRYVPGYYPKIIDETEFDAAVSAVKGRFNERKSGRRSQKHYNIFRHCIQCSQHKVGMSFNLQGLGVEKKRYAYLVCSNRAERVCECHNRIRFDLVFGTFLAFVKQLSENRYIDERTDKKRKDFTWFSQDNYKQMDAVNDAFSRFFSVRDTSAPKEEIRAKKAQLTSEKTALEMLDASLAQFDGLIPKTFIKRIADTEARITALEVEIQNLEGSLAIEAETLEVTTYQDILDLYATEQGRLKLNTFFISRGITFEVNSDKESNMVGLQIRIKGDEKFKLYTSQFFTTKDPLTPFGIPDLSHIIK

SEQ ID NO: 19112 - DNA, 50 bp, Pseudomonas aeruginosa
  source 1..50: mol_type = genomic DNA
ttattagaaaatgctagaccattgaacaacggaggggtattttctaataa

SEQ ID NO: 19113 - DNA, 40 bp, Pseudomonas aeruginosa
  source 1..40: mol_type = genomic DNA
gccgtcgatgctgccctggaacagcacctcgaaggccagg

SEQ ID NO: 19114 - DNA, 50 bp, Pseudomonas aeruginosa
  source 1..50: mol_type = genomic DNA
ttattagaaaatgctagaccattgggcaacggaggggtattttctaataa

SEQ ID NO: 19115 - DNA, 40 bp, Pseudomonas aeruginosa; identical to SEQ ID NO: 3880
  source 1..40: mol_type = genomic DNA

SEQ ID NO: 19116 - protein, 576 aa, Intestinimonas butyriciproducens
MLIKNAGADTIKISNPVLADCPPMKGAETMLRQSDKITALYCRLSRDDELQGDSNSIVNQKAILSKYAKENHFSNTAFFVDDGYSGTNFNRPSWSELLERIENGEVATLIVKDMSRLGRDYLKVGFYTEVLFVEKGVRFIAINNGIDSANQQDSDFTPFLNIINEWYAKDTSKKIRAVMKSKGEAGEHLCTNPPYGYMKDPDNKKRWIVDGDAAEVVKRIFALCLDGYGPSQIARILKEDKVITPTVHFQQTGRATRNAPPDNPYNWTGDTIADILERPEYQGHTVNFKTYKQSYKSKKTCYNPEEKWLVFENTHEAIIDADTWARVQELRKNKRRPTRTGKTNMFSGVVRCADCGEKLYYCTSKNFEARQDHFVCSTSRLKGKEICSTHFVRAVVLEQGILAHMKLTIACVANHEEQFRKAMGAKQKAEAKKELAAKRRQLTQAERRIEELDRLFKRIYEDNANGKLSDSRFQMLSDDYEQEQEELREKLLRLSEEINEQEEQTENIDRFISKVRKYLDLDELTPSVLNDMVKAVYVHAPDKSKGHREQQIDISYDLVGILPASLLNDLQNGETA

SEQ ID NO: 19117 - DNA, 50 bp, Intestinimonas butyriciproducens
  source 1..50: mol_type = genomic DNA
atactgtcttatgagtgccgcccttatggtagctactcataaaacagtat

SEQ ID NO: 19118 - DNA, 40 bp, Intestinimonas butyriciproducens
  source 1..40: mol_type = genomic DNA
taaaataaggggcggcccatagggccgccccttttgtttt

SEQ ID NO: 19119 - DNA, 50 bp, Intestinimonas butyriciproducens
  source 1..50: mol_type = genomic DNA
atactgtcttatgagtgccgccctattggtagctactcataaaacagtat

SEQ ID NO: 19120 - DNA, 40 bp, Intestinimonas butyriciproducens
  source 1..40: mol_type = genomic DNA
taaaataaagtgctccccaatgggcccccactttagtcct

SEQ ID NO: 19121 - protein, 555 aa, Achromobacter spanius
MKTKPIVYSYLRFSDPKQAAGSSADRQIEYAKRWASEHGMTLDSTLSLRDEGLSAYHQRHVKQGALGVFLRAVEDGHIPAGSVLIVEGLDRLSRAEPIQAQAQLAQIVNSGITVVTASDGREYNRESLKRQPMDLVYSLLVMIRAHEESDTKSKRVKAAIRRQCQNWLAGTWKGQIRNGKDPQWVHSEDGQFRLVPERVSAIRLGISLFKEGHGAVTIMRHLTANGLKLTIKGNGASQFYKTIHNRALIGEKSLEVDGETFRLPGYYPAMLSDDEFLELQQLAATRGLRKGRGEIAGFVTGLKITYCGYCGQAMVAQNLMGRNRRPDGTPQHGHRRMICVGNSHNQGCSVPGSCSIVPVERAVMNFCADQMNLSRLAEGGSRETEIVARLARARARAADLSQQLERITAAILDGEGVAPASFRRKATELESEEVMAQADIASLERELASISRGPTTATAKAWRALMAGVEALDNEARMKARQLVADTFSRIVVFHRGVTPGPVGAKTGVIDLLLVGKHGNTRMLHIDRQTGEWKAGEDLHLPSRAAGEVPLPPGL

SEQ ID NO: 19122 - DNA, 50 bp, Achromobacter spanius
  source 1..50: mol_type = genomic DNA
agtttagttacagcagcttacgggcaccctaaggagaccatagctatact

SEQ ID NO: 19123 - DNA, 40 bp, Achromobacter spanius
  source 1..40: mol_type = genomic DNA
gtcgaccagcgccttcggacagcccagcgacacgaagccg

SEQ ID NO: 19124 - DNA, 50 bp, Achromobacter spanius
  source 1..50: mol_type = genomic DNA
agtttagttacagcagcttacggggtccctaaggagaccatagctatact

SEQ ID NO: 19125 - DNA, 40 bp, Achromobacter spanius; identical to SEQ ID NO: 3890
  source 1..40: mol_type = genomic DNA

SEQ ID NO: 19126 - protein, 549 aa, Intestinimonas butyriciproducens
MKKTKTKCYLYTRVSTSMQVDGYSLDAQRDKLRKYAEYEDMVVAGEYSDEGFSGKNIQGRHEFQRMLQDIQDCKDGVEYVLVFKLSRFGRNAADVLNSLQLMQDFGVNLICVEDGIDSSKDSGKLMISVLSAVAEIERENIRTQTMAGREQKAREGKWNGGFAPYGYRLEKGELLIAEDEVDVIRTIFDRYIHTNDGVSGVAKYLNRQGFVKKLRQNGTIPGFSASFVKSIIDNPVYMGKIAYGRRRTEKKIGTRNEMHVVEQSEFPVYEGKHEAIISEEDWNLAQEKRKINAYRREKVNDPTHAHILSGILKCPCCGKSLYGNIAKAHSKDKKTRYYYYCKNTVTPTGHECTFRLNIEQMEMNRMVASIISAMVSDPRFADAIKAKIGSAVDTNDLEKQLEALQAQLRQTLGTKARLERQMDGLDVNDPYYDRKISDLQRRYDEQYGAIDEIEVQIDDVQSQIRSIRQEKISGDNIYRLLLAFDQVYEAASEVERKEFMRAFIERIELFPEKQPDGNWIRKIIFNFPVPVNGTEVKELPLENETIVET

SEQ ID NO: 19127 - DNA, 50 bp, Intestinimonas butyriciproducens; identical to SEQ ID NO: 3407
  source 1..50: mol_type = genomic DNA

SEQ ID NO: 19128 - DNA, 40 bp, Intestinimonas butyriciproducens
  source 1..40: mol_type = genomic DNA
tccccggactgcccacgtggagacggtggtgctgctgcaa

SEQ ID NO: 19129 - DNA, 50 bp, Intestinimonas butyriciproducens
  source 1..50: mol_type = genomic DNA
cccttggaaaatgaaacaatagtcctgacggttgttttgctttccaaggg

SEQ ID NO: 19130 - DNA, 40 bp, Intestinimonas butyriciproducens
  source 1..40: mol_type = genomic DNA
tcctctgactgccctcctgctgctgctgctgctgctgcga

SEQ ID NO: 19131 - protein, 550 aa, Xanthomonas sacchari
MRFSDPSQAAGHSRERQEAYASKWAAEHGLQLDNKLTMLDEGLSAYHQRHVTSGALGAFLAAVQAGRIEAGSVLVVEGLDRLSRAEPIQAQAQLAQIVNAGITVVTASDGKAYSRERLKANPMDLVYSLLLMIRAHEESDTKSKRVKASIRWLCEGWQAGTYRGRIRQGHDPEWLREVPGGPNNGWELVPERVAAVRRAVALYVQGAGGLRIMQVLDAEGLQLYTTSKNHAPQFYRLIKMPQLVGNMPVRVDGEEFLLEGYYPGVLSQAEWEELCRVRAQSGRRRVKGDLPHVITGIGITTCGYCGRAMCGQNLASKKRLPDGRIRDGYRRLLCCSNASFGDGCSVKASTSVAPIERALMKYCSDIINLQALFGAEGIDAPRARAASARAKVAEINAQLEKVMDAMLATSGEGTPQVFARRARALEKDLHDAESALRDAELELGKVSRRDLRGADQAWRDLAAGVEAQEIEARLRARQLVADTFERIVIYARGMRPDPEASGRDYSIDVVLVGRGGNARLLQIDREGNLLQAEDVAHLQAVEVEPPRHST

SEQ ID NO: 19132 - DNA, 50 bp, Xanthomonas sacchari
  source 1..50: mol_type = genomic DNA
gagataaataggttggcttttgggcacccaaggcttaccatacctatacg

SEQ ID NO: 19133 - DNA, 40 bp, Xanthomonas sacchari
  source 1..40: mol_type = genomic DNA
atcgacaagggctttggggcagcccagcgaaacgaacccc

SEQ ID NO: 19134 - DNA, 50 bp, Xanthomonas sacchari
  source 1..50: mol_type = genomic DNA
gagataaataggttggcttttgggggcccaaggcttaccatacctatacg

SEQ ID NO: 19135 - DNA, 40 bp, Xanthomonas sacchari
  source 1..40: mol_type = genomic DNA
atagacactggctttgctggggcccagcggcactagcccc

SEQ ID NO: 19136 - protein, 479 aa, Mycobacterium kansasii
MGMGLRAAIYVRISQDRDGTRRGVERQEQDCRKLAKQLGWDVRNVYVDNDISAYSGKRRPQYEALLADIEAGALDGVIAWHPDRLHRSPLELEHYIDLSDKFGIQTNTVQAGIWDLSTPSGRLVARQLGSVARYESEHKGERIRRARQQQAKAGGWHGGIRPYGFEKDGVTIRPAEAAEIAKATEAIVSGVSLRSLVRDLNERGIPTATGRGPWTSVALKDTIMRPRTAGWSSYRGEIVGPAVWAPIVPEDTWRAACAILSDPARCTNGGRGGTIRWLGSGLYVCGVCGEAKLRVGTGGSVKRHTYRCGNRNIRDGGGHVTREASTLDAYVEELIVGRLSEPDVLERLIAADADHDTTAQRVELVAVRERQDELARQFAAGRITGRQLAIATEDLTAKEETLVKALASAGRRNPMQMLAGAKDLRSLWFGTREDRSDGLTLGQRRAILDVLMTVTVAPAPRNRGGFDPDYVRIDWKATH

SEQ ID NO: 19137 - DNA, 50 bp, Mycobacterium kansasii
  source 1..50: mol_type = genomic DNA
gggcgctatagctgcattgcggtctttccggccctcaatctatggcacac

SEQ ID NO: 19138 - DNA, 40 bp, Mycobacterium kansasii
  source 1..40: mol_type = genomic DNA
ggcagccagcagggttgtctttccggcgccggtgcccccg

SEQ ID NO: 19139 - DNA, 50 bp, Mycobacterium kansasii; identical to SEQ ID NO: 19137
  source 1..50: mol_type = genomic DNA

SEQ ID NO: 19140 - DNA, 40 bp, Mycobacterium kansasii
  source 1..40: mol_type = genomic DNA
cgcccccaccgggggtctctttccgccgccggtggccccg

SEQ ID NO: 19141 - protein, 676 aa, Bacteroides nordii; identical to SEQ ID NO: 10986

SEQ ID NO: 19142 - DNA, 50 bp, Bacteroides nordii; identical to SEQ ID NO: 10987
  source 1..50: mol_type = genomic DNA

SEQ ID NO: 19143 - DNA, 40 bp, Bacteroides nordii
  source 1..40: mol_type = genomic DNA
cagaatgtgttctactgaatgcataggaggatactcctgt

SEQ ID NO: 19144 - DNA, 50 bp, Bacteroides nordii
  source 1..50: mol_type = genomic DNA
aagggtgtgttcatttcgactgtactcataggtgcgattgacacatcctg

SEQ ID NO: 19145 - DNA, 40 bp, Bacteroides nordii
  source 1..40: mol_type = genomic DNA
caggatgtgttatacaaaacttataggaggctattacttt

SEQ ID NO: 19146 - protein, 653 aa, Streptomyces ipomoeae
MSNVSTALPSAIETAARVTGTHALRAVDYLRVSTEEQKKGYGVARQSRKTLRHIALKQWEHVGTYKDEGVSGSLEAADRGDLKRLMEDAQKFPRPFDIVVVPDGRVIGRKGRAFWRWVWALEDLGVYVAVVADDYDNTTTEGRKKMRRDADYAETEWETIRDRTQGGLQEKAELIPAAHIGGRPPYGYRIADKGTPGSYLVIDQDEAEAIRHVYELVVGEGLNLRQATIRLNAEGITARSGKAWTRDNLRDRVMSTPVLDGLLVFRGKHAKTDENGNPLWGDTVRIELPRILSEEQSAELQRKVAETAKHSSGQREFYPLTGRVLSLCRRTYTGISRASERKDARYYRCAGSAPRDPSQRPCGCSYIDADALEAYVWKHVTEIASDSEKLQELAAEWIGMAEGDKSALADRIADLDQQIEGMNASITAVIVATAKQSKSADAIEAATAALNEELQQLQHLRDEAAEWLAEMEESDQRARDLRALANMAKTSFPDMAPEQQAAILSMLELKVTVTGPVPDGRRGGVPCTVRAWYTTTDLDVPAAPLSDDDWARVAPLLPKGRMGTVRRSVDAIFCKARTGKSWPEVIEETGATRQASNHFNAWTSDDTWSRVNAALLDVDRVPLPEPELLPSMIIEGRVDPSAMLHAEERSRTG

SEQ ID NO: 19147 - DNA, 50 bp, Streptomyces ipomoeae
  source 1..50: mol_type = genomic DNA
gctgcacgcagaagaacgatcccgaacgggatcgtctccgaacgttcccg

SEQ ID NO: 19148 - DNA, 40 bp, Streptomyces ipomoeae
  source 1..40: mol_type = genomic DNA
cctgaaggccgcgatgccgaacgggatgccgatgatggtg

SEQ ID NO: 19149 - DNA, 50 bp, Streptomyces ipomoeae
  source 1..50: mol_type = genomic DNA
gctgcacgcagaagaacgatcccgcgcgggatcgtctccgaacgttcccg

SEQ ID NO: 19150 - DNA, 40 bp, Streptomyces ipomoeae
  source 1..40: mol_type = genomic DNA
cctgatggctccgaggacgcggaggatgacgatgatgatg

SEQ ID NO: 19151 - protein, 451 aa, Enterococcus casseliflavus
MQRVAIYMRVSTDQQAKHGDSLREQQETLDEYIKRNKNLKVVDKYIDGGISGQKLNRDEFQRLLDDVKNDQIDLILFTKLDRWFRNLRHYLNTQEILEKHNVSWNAVSQQYYDTTTAYGRTFIAQVMSFAELEAQMTSERIKSVFSNKIQQGEVVSGKVPLGYKIENKRLVPTPDKDIVIDLFDYYVRVGSLRKTTTYLEEKHGIVRDYQSVRKLLTNEKYIGKLRNNTNYCEPIIDKDVFETVQLRLSQNVKTSGSHDYIFRGLVRCADCNGSMSCSTLKSKYIKKTDGEVSYYIRSCYRCTRRRNNPTRCKNKKTYYERALERYLLDNIQTNIAMHVRTLKKEVTKKDSVKRKKDALFVKIERLKKAYLNEIIELDEYKRDREMLENEIASLKEPKINKNIAPLKKVLSDDFFEKYEKASINQKNELWRSIIESIEVSVDGNITVNFLP

SEQ ID NO: 19152 - DNA, 50 bp, Enterococcus casseliflavus
  source 1..50: mol_type = genomic DNA
tatgtgcctaactgatactttccgcttgggtgataataattagtactaca

SEQ ID NO: 19153 - DNA, 40 bp, Enterococcus casseliflavus
  source 1..40: mol_type = genomic DNA
tgaggcttggggacagccgctgggatggttgtggacgacg

SEQ ID NO: 19154 - DNA, 50 bp, Enterococcus casseliflavus
  source 1..50: mol_type = genomic DNA
tatgtgcctaactgatactttccgcctgggtgataataattagtactaca

SEQ ID NO: 19155 - DNA, 40 bp, Enterococcus casseliflavus
  source 1..40: mol_type = genomic DNA
ggaggctccggggcagccgccggggtggtcgtgggcagcg

SEQ ID NO: 19156 - protein, 517 aa, Brevibacterium aurantiacum
MGNRGVIYGRASKDVKHTGTSVRKQIERGERWARGEGIELLEPIRDDNMGATRGSRERPGFKKVRALIEQRAIDVLILWEVSRSTRDATESMGLLDAAEDNNVDIAVDGKRYDPSDDADRMQLQFMFMMADSEGRRTKKRNIDSVTTNAQRGTPHGRFPYGYRRIYDSTSGVLLEQTPFAGDGQLLPEAKTLQEAASAVLSGTPLRRVCRNLNERGVPSPRKPRAKTLAENPNGVVNVWERATLRQLLLNPTIAGRRVYQGEDIGPAQWDAIVPFDEWLELRALLTDPSRLTVAVPRGPEPRHLLSGIARCGECGARMKASTNERRMKRAYACRHEGCMRVMVTAGKVDEMVEATILGLFDTPGFRGKLAAAHKERDEARTAGPSLSSQIAAKEAERTEIDGLRDSDPPRISLHAYIAETNRIEKRLEELRASESAQVTSPALRKMMTSKSVSEGWKQADLMDRREIIRMLLDVKIDRATVNRGRRFDFSRVTIDPSAFILDDVLEGQSMEWFGSGD

SEQ ID NO: 19157 - DNA, 50 bp, Brevibacterium aurantiacum
  source 1..50: mol_type = genomic DNA
cactctcccaatcacatgttcgccccggcaagcatataaaaggggacgtg

SEQ ID NO: 19158 - DNA, 40 bp, Brevibacterium aurantiacum
  source 1..40: mol_type = genomic DNA
ggaggaggagatgttcgccccggccagaagcggcagggtg

SEQ ID NO: 19159 - DNA, 50 bp, Brevibacterium aurantiacum
  source 1..50: mol_type = genomic DNA
cactctcccaatcacatgttcgccgaggcaagcatataaaaggggacgtg

SEQ ID NO: 19160 - DNA, 40 bp, Brevibacterium aurantiacum
  source 1..40: mol_type = genomic DNA
gcagacagagaggtacgcagaggacagaaggggcagggtg

SEQ ID NO: 19161 - protein, 499 aa, Alistipes sp
MTKNCFIWSRVSTKHQEENGGSLDDQKCRCERFARENGYTIKGYFGGKHESAKTPGKLIKEMIKAVKKDKSVKYIIVNHADRFSRNAGQAINIINDLNAQGVIIVEALSGTDTSTPEGVMMMQVKLSLAQWDNTNRTNKFVSGRKHCMNSGVWIGKRPLGYDKEGKSINAKFTINATGKLIQKAFKWKLQGVDNFRIMDRLSAMGLNVSKQKLHKILTNPFYAGKIQSKFTDGEIIDGKHPALISWVEFLQVQEILSGRTGVYKVKAETPRFPLKRHIRCAEDGLPLTAYTVKRKNIDYYKCNRTGCKNNVSAKKLHRLYAELLDSYTIPPMLLEWFSDVVSGIIFEEDSEHKEQLSLLKKQKSELENKLKKCKVSRGMGDIDEDIYTTTVEVIQEKLAKIEVEMAKVKRNLSNLTSTVDEVVATCCKLGCLWSNSELELCQKIQNLLFPSGIFWDKENENYRTIDCNQALSIIQRISSGYKNKNEEKSENFSSNFKMC

SEQ ID NO: 19162 - DNA, 50 bp, Alistipes sp
  source 1..50: mol_type = genomic DNA
aatttctcctcaaattttaagatgtgccacatcgtgccagactatcgaac

SEQ ID NO: 19163 - DNA, 40 bp, Alistipes sp
  source 1..40: mol_type = genomic DNA
tgccaaatgcagtcgctcgtgcggataaagggactcgaac

SEQ ID NO: 19164 - DNA, 50 bp, Alistipes sp; identical to SEQ ID NO: 19162
  source 1..50: mol_type = genomic DNA

SEQ ID NO: 19165 - DNA, 40 bp, Alistipes sp
  source 1..40: mol_type = genomic DNA
tgcccaatgcagttcctggtgcgggggaagggactctgac

SEQ ID NO: 19166 - protein, 634 aa, Vibrio parahaemolyticus
MKLEHFSHTEPQIYSYSRFSNIRQEKGRSLARQKKFIDEVSAKFNLKINKDLVMTDRGLSAFHGHHKTKGALGVFLAAVEKQLIKPGSVLIVESLDRLSREQPYIAQATLASLVNADIVVVTAADEKIYSKETMAKDPLGTMILSVLEMVRAHKESLRKTEASIDFLHGQIATHEEGGVSDLAGPLPFWISRKQRPHPKIKTGFELNEHEEIIRLIVDMHFKQGMGLRPISVELLNRGIKPPSQLKHSPANSRKPKNDVWGVSTLSHIVSNQALCGRYVVNLNYQKDGKKHVEDYVLRSYYPAIMSEEEFDTFQAIKKRRYGSNKGDKSKRNGLVYLLTDYGNKSVCAKCGRSIGSQPQKQKHGIRRRLHCSKHKETANCCKSIIQDYIEDAFLISVARHIDYNLINTQVKPADIIRNSDRLEEIDLEMANVIDMRRTVKDEKIKLKLKFDYETLENEKEDLIKQKLEFKQFKIAPNDIKKFIRTVNDARDYNNNEARTFVKSILMQCIRKIEVHMEKKKLECYGYPNLFENAIVNVVDVEFYTDKKLSIFVSAETNALLFSKISDEFADESLGSFTEEQLKAWNDVGFDNFQNLGERGTLVNENENSTENLWFASDLAEAFMNEIINQSEDES

SEQ ID NO: 19167 - DNA, 50 bp, Vibrio parahaemolyticus
  source 1..50: mol_type = genomic DNA
gttgtgatgagtgttcgtccaccgtctgcatattgaacactgatactttt

SEQ ID NO: 19168 - DNA, 40 bp, Vibrio parahaemolyticus
  source 1..40: mol_type = genomic DNA
gaaataaccaaaagagccgtctgtccaatggatgtcttgc

SEQ ID NO: 19169 - DNA, 50 bp, Vibrio parahaemolyticus
  source 1..50: mol_type = genomic DNA
gttgtgatgagtgttcgtccaccgagtgcatattgaacactgatactttt

SEQ ID NO: 19170 - DNA, 40 bp, Vibrio parahaemolyticus
  source 1..40: mol_type = genomic DNA
gaaataaccgaatgtgctcagtgcccaatggaggccttgg

SEQ ID NO: 19171 - protein, 630 aa, Vibrio cyclitrophicus
MLVCSPVNLVHFMKIEKSLVPQVYSYNRFSDMEQKKGSSLARQENYALKAAKEYGLELNEELIMTDLGKSAFHANHKKTGSYGVFLNAVNKGLVAKGSYLIVESFDRLSRQQARLAQIDIGQLIEADINIITASDNQLYNKKTLDQNPHLLFTMAAIMIRAHEESLMKQKRSISSIEEKLGKFRSGESVDVGGPVPFWIERNRLGSDKLFEFSEKTPAARIITNSFLEGKSYGQIQDLLTKTGIRTPKGDDKWGTTTISNILQSESLYGRKTVRLPALKDGSKDAQEHLLDGYYPALISKSDFDLIQQIKKVKKKGRTGYRFNSVKDDEVKSVVYLLSGYGRDKDRKSRSVCSKCGGGLGSRLVDQYTRKKKYVRTVMRLDCLNRTRKKSCDAKGIAQRELEKSFLLAISEHVDYSLLNKEDSDVRAVEVIDSKIDELDGIIERASDLYLLGKSSSVRDKAKSQLDLAEAEREELLKDKVDGKELIISAESIKEFEGYIHRAHENDDDFEARSYVKDILLQCVEKLIVDTEPRPVESLGYKNLYKNARVWTVTVDFRSGKRITVYHDCDTNMSLFNQIEGGTSTFHSYTPEALSILDNQGPEAFAQHLRDSGFGTNTSYVQDFISSLENK

SEQ ID NO: 19172 - DNA, 50 bp, Vibrio cyclitrophicus
  source 1..50: mol_type = genomic DNA
gtaagctacattaccactatgaggctctgtctggtgtgcaatgtgacttg

SEQ ID NO: 19173 - DNA, 40 bp, Vibrio cyclitrophicus
  source 1..40: mol_type = genomic DNA
gaaaatagccgaatgcgccgtctgtccagtggatgtcttg

SEQ ID NO: 19174 - DNA, 50 bp, Vibrio cyclitrophicus
  source 1..50: mol_type = genomic DNA
gtaagctacattaccactatgaggcactgtctggtgtgcaatgtgacttg

SEQ ID NO: 19175 - DNA, 40 bp, Vibrio cyclitrophicus
  source 1..40: mol_type = genomic DNA
ggaaataaccgaatgtgctcagtgcccaatggaggccttg

SEQ ID NO: 19176 - protein, 616 aa, Bifidobacterium catenulatum
MSNYNKITALYSRLSVGDEDRDGGESNSIQNQKIFLENYAKGQHLTNIRHYIDDDESGRFFDRSAYSRMIEDVESGKIGVCIMKDLTRWGRDYLQVGNAMEIFRRNNVRFIAVNNGIDSENPDTLEFAPFINIMSEWYAKDISKKVKTGIKTKGMSGKPVATEAPYGYIKDPDNKDFWIIDKEAAEVVRLIFRLFLDGKNRNQIAVYLTQEQIPTPTFYMKDRGRGTCKNKTLNENNRYKWNKATLTHILTRQEYCGDVVNFKTAKHFRDKRNHYVDRSQWHITENVHEPIIDRTDFENVQRILENAPVKRPNGDGEIHPLSGLLFCKDCGAKMHIRIDYRNGGKRHVAYCSEYHKGKAKNPKCSSPHIMDADLLMQTVADVLKKIAEYSISNRAEFEALVKKSLAMQQTDKVKKQQKRIPQITTRLEQIDKVLNKLYEDNVLGTIPQDRYEQMSQKYSEEYYSLKAELEQLREQLSAFENAGGRAQKFVKLIDRYADFTDLTPTVLNEFISRIEVHERDKKRAKQAIQHIGIYFNHIGRFENELTQLAEPTEQEIRQMREEIEEARKEKSRAYHRNYSREYRARNLEKQREYDRIKAREYRAKKKAQAAAALSAP

SEQ ID NO: 19177 - DNA, 50 bp, Bifidobacterium catenulatum
  source 1..50: mol_type = genomic DNA
aaaggcacttgacaaaacgcttcatggagtgcataatcttaactgtaaac

SEQ ID NO: 19178 - DNA, 40 bp, Bifidobacterium catenulatum
  source 1..40: mol_type = genomic DNA
atcgccttcagtggcagcgtgggaggcaaagccgtggtca

SEQ ID NO: 19179 - DNA, 50 bp, Bifidobacterium catenulatum
  source 1..50: mol_type = genomic DNA
aaaggcacttgacaaaacgcttcagcgagtgcataatcttaactgtaaac

SEQ ID NO: 19180 - DNA, 40 bp, Bifidobacterium catenulatum
  source 1..40: mol_type = genomic DNA
aactccttccgtggcagcggcgggggctcctccgtgctca

SEQ ID NO: 19181 - protein, 512 aa, Bacteroides thetaiotaomicron
MNANVIIYCRVSSDEQTLGASLDVQEERLRKYCNQMGYNIIDNIPYREDESAKTFEKRPVIQGIMNYIRKNKGRVNKLLFLRWDRYSRDIISASENLKELLKLGVEPNAIEAPLDFNSDTWPLLLGVHIGSAQCDNIKRSKATMDGIHGTLAKGKCANKAPRGYKNVRISKHETHVEIDTNTAPFIQAMFKEVAKGIETPCYIRRKFARKGYNIPESSFLEMLRNKFYIGKIRVPAYKGEPEYYVNGEHEAIIDEETFYKVQEILDGKRKKTPKLSKAINPDLFLRKFLICPVCGCALTGATSSGNGGKYTYYFCCNNQKHIRMRAENVNEEFARYTAQLKPNKTVLDLYNEILKDLQNERKGESKKEAAALQNELSTVQKRINSIEDKYLDGDLTKEQYNRMLERYTKEASAMQQQIEMRENPNRSNIEPKLNYSINLINNIDSYIRNASVGVKIKLISSMFPEKIEFDGKTYRTNSYNKVLDLIYQQTNELRGVEKKNGESFSTFSASVP

SEQ ID NO: 19182 - DNA, 50 bp, Bacteroides thetaiotaomicron
  source 1..50: mol_type = genomic DNA
tttttcaactttctccgcttcagtacccttaaccgttctgttctcgaacc

SEQ ID NO: 19183 - DNA, 40 bp, Bacteroides thetaiotaomicron
  source 1..40: mol_type = genomic DNA
attcttagcttttcgtggtacccagacccggggtcgaacc

SEQ ID NO: 19184 - DNA, 50 bp, Bacteroides thetaiotaomicron
  source 1..50: mol_type = genomic DNA
tttttcaactttctccgcttcagttgccttaaccgttctgttctcgaacc

SEQ ID NO: 19185 - DNA, 40 bp, Bacteroides thetaiotaomicron
  source 1..40: mol_type = genomic DNA
acacttggactttggtggttggcagagctggggtcgaacc

SEQ ID NO: 19186 - protein, 512 aa, Bacteroides thetaiotaomicron
MNANVIIYCRVSSDEQTLGASLDIQEERLRKYCNQMGYNIIDNIPYREDESAKTFEKRPVIQGIMNYIRKNKGKVNKLLFLRWDRYSRDIISASENLKELIKLGVEPNAIEAPLDFNSDTWPLLLGVHIGSAQCDNIKRSKATMDGIHGTLAKGKCANKAPRGYKNVRISKHETHVEIDTNTAPFIQAIFKEVAKGIETPCYIRRKFARKGYNIPESSFLEMLRNKFYIGKIRVPAYKGEHEYYVNGEHEAIIDEETFYKVQEILDGKRKKTPKLSKAINPDLFLRKFLICPVCGCALTGATSSGNGGKYTYYFCCNNQKHIRMRAENVNEEFARYTAQLKPNKTVLDLYNEILKDLQNERKGESKKEAAALQNELSTVQKRINSIEDKYLDGDLTKEQYNRMLERYTKEASAMQQQIEMRENPNRGNIEPKLNYSINLINNIDSYIRNASVGVKIKLISSMFPEKIEFDGKTYRTNSYNKVLDLIYQQTNELRGVEKKNGESFSTFSASVP

SEQ ID NO: 19187 - DNA, 50 bp, Bacteroides thetaiotaomicron; identical to SEQ ID NO: 19182
  source 1..50: mol_type = genomic DNA

SEQ ID NO: 19188 - DNA, 40 bp, Bacteroides thetaiotaomicron; identical to SEQ ID NO: 19183
  source 1..40: mol_type = genomic DNA

SEQ ID NO: 19189 - DNA, 50 bp, Bacteroides thetaiotaomicron; identical to SEQ ID NO: 19184
  source 1..50: mol_type = genomic DNA

SEQ ID NO: 19190 - DNA, 40 bp, Bacteroides thetaiotaomicron; identical to SEQ ID NO: 19185
  source 1..40: mol_type = genomic DNA

SEQ ID NO: 19191 - protein, 503 aa, Clostridioides difficile; identical to SEQ ID NO: 11

SEQ ID NO: 19192 - DNA, 50 bp, Clostridioides difficile; identical to SEQ ID NO: 12
  source 1..50: mol_type = genomic DNA

SEQ ID NO: 19193 - DNA, 40 bp, Clostridioides difficile
  source 1..40: mol_type = genomic DNA
atactacttactgttaagcttggagttgttcaaataacta

SEQ ID NO: 19194 - DNA, 50 bp, Clostridioides difficile; identical to SEQ ID NO: 15049
  source 1..50: mol_type = genomic DNA

SEQ ID NO: 19195 - DNA, 40 bp, Clostridioides difficile
  source 1..40: mol_type = genomic DNA
atacaacacactcttgagcatgcacttgttgaaataactg

SEQ ID NO: 19196 - protein, 494 aa, Aeromonas dhakensis
MLYHIYSRISSTKQTQGVGLDRQEQLALDYAKRNNFEVANISSDVASAYHSKHMEGKLGAFMESIATKEIVVPCGLIVESLDRLGREHELTALSRFIDIVQSGVEIHEVSTGIIYNQKDTHLLHVALSIMTRAYNESLMKAKRSNDAIQRKLGEAQNGKIIRTNVPAWIDVQGDKLVLNEHQTTVKSIFDMYLSGMSLRPIARTLNTGNVPYMAPKIAKKGPNNGSYNWTSSRILTVLASSAVYGVYTPKTGEPIENYYPACVDEATWLKAKEIRESRKVHAAKVNDLLSVLSSCCVCSLCGLSYIANLRSWETKEGKQTSVGMRCNSRQMGSTCKGKLVPNEHLEKYILPLVPNLDITKLNRTKMKTLDNLKARHQQLTEQQSTLLDLVVMGSAAAKEKFIQLEEKIEILKEKIEKAQARIVVDATEDVSLLALDTQNLEIRRKVNTALQLMELKVHVECTQTGTAKIKMQLKNVTVHEGTLKWSRKKRIDSK

SEQ ID NO: 19197 - DNA, 50 bp, Aeromonas dhakensis
  source 1..50: mol_type = genomic DNA
cgtgtagtatcgttgtacgctgcgagctaagcacggcagtatgccacaaa

SEQ ID NO: 19198 - DNA, 40 bp, Aeromonas dhakensis
  source 1..40: mol_type = genomic DNA
tgcggcggggtgccaaccgacgtgcgcatcaccacccgct

SEQ ID NO: 19199 - DNA, 50 bp, Aeromonas dhakensis
  source 1..50: mol_type = genomic DNA
cgtgtagtatcgttgtacgctgcggtctaagcacggcagtatgccacaaa

SEQ ID NO: 19200 - DNA, 40 bp, Aeromonas dhakensis
  source 1..40: mol_type = genomic DNA
ggcggcggggagccagcacgtgtgcgcagctccgccctct

SEQ ID NO: 19201 - protein, 520 aa, Clostridium innocuum
MARKKKFELNDNNIAIAYYRFSSHSQNEASIDQQRELAHAWADAHGFKIVKEYEDAAISGTTENRPGFQQMLSEVAKIRPRVLIMWKTDRLGRDKYVLAMAKRTIRDAGCEIRLLAENIPTDGPEGVLIEGLMDAMAEYYSRQLSQNIQRGMDYNAQHALYNGHKLFGYGVDKSTKRYIVDPDTAPFVQRMFAEYAEGKAMQTICDELNAQGLRTTRGAKFGVKTMNKMLQNRAYIGEYRHGDIVVEGGMPALVDEETFDKVQRKFAENKRKGSQRARGMDENDAPRYWLTGKVYCGKCGSTLQGVSGTSGTGRTYYYYYCSAQRRKQCTLKKVRKEKLEDAVTMILRSILHDSENLMSLAVDAAAYYEKNYRDTGYLDGLEAKRREVEKSLANLVKVIESGLISETVTERLVQLEEQKRALNEAIEAENIRAALCEDEHTIKAYFEKFLHADFDNPETRDQVLEYFVDKIYLTDDGLVVTSWYSEDRTEVTWDMLYGEDGNPFVKGEAVKFDCFPFGST

SEQ ID NO: 19202 - DNA, 50 bp, Clostridium innocuum
  source 1..50: mol_type = genomic DNA
cgactgcttcccctttggctccaccagaataggaagcgtcgaactattct

SEQ ID NO: 19203 - DNA, 40 bp, Clostridium innocuum
  source 1..40: mol_type = genomic DNA
cgactctcctcacctccaccaaataaaagtgccaagttgg

SEQ ID NO: 19204 - DNA, 50 bp, Clostridium innocuum
  source 1..50: mol_type = genomic DNA
cgactgcttcccctttggctccacaagaataggaagcgtcgaactattct

SEQ ID NO: 19205 - DNA, 40 bp, Clostridium innocuum
  source 1..40: mol_type = genomic DNA
agactctcctcttctctacaaaaaaaaattgaaaagttag

SEQ ID NO: 19206 - protein, 581 aa, Shewanella algae
MTNNHQTPSPRSTSSTTSTPPQVVSYSRYSTKKQSKGFSLERQDENLKRWSDANGIPISDLSFADLGISAFSGTAVREGLSNMLEAVRHGAVPRGWWIAFERIDRLSRRGITETRRLIDQILQHEVNIVCIGEGIELRSDDDANDELKGSLMVAIHAHLAREQSAKASERIRATAAAKRRRARETGAPIKKRLPYWLELSPDGTKYQFKAGRIETVRYIVKRRLEGRGFHGICAELNAMNTPPLTRMSKQWNDMAVASTVRNVALFGQYQPAITNEVEKVDSDGRRKMVRVAIPDGEPLDNYFPAVVDRATWDAIQSDSRTKMKAGRRGDNPVSGLTFCRHCGGTLPMKPASKTSTNGTRHTYRYWTCRGAVDGKCSHGKGIKDLDLFVIKACRRIVPRTLGQGGGGQDPAAAFEYQSLLEQRGKLIAQIATLDAAMADPELGAASLKHIARQIDVATANLEQVDAEIAAVEARQKADQDTTPEAVERLKQLEGDPVAYNLHLKTLVHRIVAGAVRLDDGSWSDVALLFRFTVELLNGSRIDVTVSRRNRWDKDPVEFYSHSEDATAGGEDDLYPWEQDQD

SEQ ID NO: 19207 - DNA, 50 bp, Shewanella algae
  source 1..50: mol_type = genomic DNA
gattccacccaatcaaatatacattataatgtaattgatattgcacaact

SEQ ID NO: 19208 - DNA, 40 bp, Shewanella algae
  source 1..40: mol_type = genomic DNA
agtccagtgccagcaacagcatgatagcgttttccaatac

SEQ ID NO: 19209 - DNA, 50 bp, Shewanella algae
  source 1..50: mol_type = genomic DNA
gattccacccaatcaaatatacatagtaatgtaattgatattgcacaact

SEQ ID NO: 19210 - DNA, 40 bp, Shewanella algae
  source 1..40: mol_type = genomic DNA
gctccagtgcaggcaacagagtgagagcgtgtttcaaaaa

SEQ ID NO: 19211 - protein, 500 aa, Shewanella algae
MLEAVRQGAVPRGWWIAFERIDRLSRRGITETRRLIDQILQHGINIVCIGEGIEIRPDDDANDELKGSLMVAIHAHLAREQSAKASERIRATAAAKRRRARETGSPIKKRLPYWLELSPDGTKYQFKAGRIETVRYIVKRRLEGRGFHGICAELNAMKTPPLTRMSKQWNDMAVASTVRNVALFGQYQPAITNEVEKVDSDGRRKLVRVAVPDGEPLDNYFPAVVDRATWDQIQSDSRTKMKAGRRGDNPVSGLTFCRHCGGTLPMKPASKTSTNGTRHTYRYWTCRGAVDGKCDHGKGIKDLDQFVIKACRRIVPRTMGQGDDVGQDPAAAFEYQSLLERRGKVTAQIATLDAAMADPELGAASLKHIARQIDVATANLEQVDVEIATVEARQKAELDTTPEAVERLKQLESDPVAYNLHLKTLVHRIVAGAVRLDDGEWSDVALMFRFTVELLNGQRIDVTVSRRNRWDKNPVEFYSHSEDATAGGEDDLYPWEQDQD

SEQ ID NO: 19212 - DNA, 50 bp, Shewanella algae; identical to SEQ ID NO: 19207
  source 1..50: mol_type = genomic DNA

SEQ ID NO: 19213 - DNA, 40 bp, Shewanella algae; identical to SEQ ID NO: 19208
  source 1..40: mol_type = genomic DNA

SEQ ID NO: 19214 - DNA, 50 bp, Shewanella algae; identical to SEQ ID NO: 19209
  source 1..50: mol_type = genomic DNA

SEQ ID NO: 19215 - DNA, 40 bp, Shewanella algae; identical to SEQ ID NO: 19210
  source 1..40: mol_type = genomic DNA

SEQ ID NO: 19216 - protein, 489 aa, Mycobacterium chimaera
MAERAALYARISLDRTGEEVGVNRQLHDMRLLAEARGYEIVAELVDNDMSASKGLRRPGYEQVWQLVTAEKVDHVVVWQSSRLMRSRNDRAAVIETFGRHRVDVVAVKGPSLDLRSAYGRGAADLMTAIDSMEGEIKAERVAAAIGDLARRGQAWGLCPYGWDRINGEQVINDHEAAIVRELVDRLLAGESLNELYRDMNARGEPAPGWATWMKLPAARREQLLAKGRKEPTKQWAKSTVRTLVVRDANAGIRRYRKRVNGGTEMPGGWQPIVERAQHDRVVALLAQPDRRSHTGPRPGARKHLLTNGIGKCGVCGDMLRVGNRARSQGRIYMCRGRGCTGRVQAHVDEVVAVAVIGRLQMPDALDWLLGDDEQAHRLQKRCDELQGRLDAAADSQADGKITIGQLERITARLMPELEAAKRERDAAAKALDVELLRELAGPQGSQRWDAMPVSARRAVLETLKVEVVLMPRKKHGPGFEPETVDVVFR

SEQ ID NO: 19217 - DNA, 50 bp, Mycobacterium chimaera
  source 1..50: mol_type = genomic DNA
agtcccatctagtaactacctaggcagctagtgtaatcttagggggtaat

SEQ ID NO: 19218 - DNA, 40 bp, Mycobacterium chimaera
  source 1..40: mol_type = genomic DNA
caggtccgcgcagcccaggcagctcgtcacgccggggatc

SEQ ID NO: 19219 - DNA, 50 bp, Mycobacterium chimaera
  source 1..50: mol_type = genomic DNA
agtcccatctagtaactacctaggctgctagtgtaatcttagggggtaat

SEQ ID NO: 19220 - DNA, 40 bp, Mycobacterium chimaera
  source 1..40: mol_type = genomic DNA
gaaggccgcgcagccacggctgctcacgacgccgcggatc

SEQ ID NO: 19221 - protein, 594 aa, Aeromonas caviae
MQEENAALQALSKRYNLPIYERMVDNGKSAFHGHHIEGGQLGGFIKAVESGEIAPGSILVVSNLDRFSRQEPKASTLNLAVVFHAGVALHSIMDARTYCDPYDKSRDHGFDIAEALAELRRAYKESETKQKRTNARADLDIERHQREERHPSGYAYSIEVVGNNSWWVDTSDGSVKPHEIYHDIARQIALRLIDGESPESIAKSLNDTGPKAPTKRLDKRAPGTWSAYMIREFHKQRTLIGEKMIKGQLLLNYYPPVLSDDEYHRLVHVRTKRQQPRTNSKATAVNLFAGVKNAVCGHCGAGINMAKVPGGYRYYCSQRRYELHCPGWRKDRNLIEKSLLDVCLHKLWEEPEQKAASRVPIIMAQIAELERKIAVLAEQAEEAGFPKILTLKLKEFENDRDALKVELGKAQVEDAASQMQSTASLQARWREVTDEVMDISNHDARRYMRALIMDSVSELVICRPSLANLSRRLHMLKHGQSIKEKIPSGSERFTLSMRIKFVDGAIHRIRLTRDGIERLSVSKLEEQSPEARERLASIETVSGFFNECQPRTEESDMRLREALAAMEALDPLPSDEYPPDEFHADEHSAYWGDE

SEQ ID NO: 19222 - DNA, 50 bp, Aeromonas caviae
  source 1..50: mol_type = genomic DNA
aaaatgtctcattgtaattttgggttcccatggcaacaatgagtaacttt

SEQ ID NO: 19223 - DNA, 40 bp, Aeromonas caviae; identical to SEQ ID NO: 5933
  source 1..40: mol_type = genomic DNA

SEQ ID NO: 19224 - DNA, 50 bp, Aeromonas caviae
  source 1..50: mol_type = genomic DNA
aaaatgtctcattgtaattttggggtcccatggcaacaatgagtaacttt

SEQ ID NO: 19225 - DNA, 40 bp, Aeromonas caviae
  source 1..40: mol_type = genomic DNA
gccatggttttaatgtgacgtccctcaccccattcaccaa

SEQ ID NO: 19226 - protein, 550 aa, Blautia massiliensis
MNKKIKCDIYTRVSTTMQVDGYSLDAQKEKLERYAEFQNMEIVNEYSDEGKSGKSVEGRPEFQRMLDNIENGTDEVQFVLVFKLSRFGRNAADVLNSLQRMQDFGVNLICVEDGIDSSKDSGKLMISVLSAVAEIERENILVQTMEGRKQKAREGKWNGGFAPYGYELVNGELQIAEDEAEIIRLIYDKFIHTNMGISAIAAWLNQHGYKKKKRQNNTLDAFAASFIKGVLDNPVYCGKLAYGRRKNEKVSGTRNEYRIVKQENYMLHDGIHEGIVSETDWELAHQKREKTGVKYEKTHSFDHEHILSGILRCPLCGSGMYGNVNRKKKKDGTLYKDYFYYACKHRRLVDGHKCGYRKQWSEEKINNAVEEVIRKLVKNPKFEEAILNKIGSRIDTEEIEKEIERLEKQHRQLTGAKARLGQQMDSLDIMDKFYEKKYQDMETRLYRLYDEIEGVENSIEEVKNRLLNIRQQKISEENVYQFLLYFDKLYDKFTDLEKKEFLNSFVEQVDIYEQEQPDGRFLKHIKFRFPVYFGDREIQELCWDNESTVE

SEQ ID NO: 19227 - DNA, 50 bp, Blautia massiliensis
  source 1..50: mol_type = genomic DNA
tgttgggacaacgaaagtaccgttgagacggtagtactgctttcccacaa

SEQ ID NO: 19228 - DNA, 40 bp, Blautia massiliensis
  source 1..40: mol_type = genomic DNA
ctgccagggcgttcatgttgagaccgtgtgcctcttgagc

SEQ ID NO: 19229 - DNA, 50 bp, Blautia massiliensis
  source 1..50: mol_type = genomic DNA
tgttgggacaacgaaagtaccgttccgacggtagtactgctttcccacaa

SEQ ID NO: 19230 - DNA, 40 bp, Blautia massiliensis
  source 1..40: mol_type = genomic DNA
aggccagggctttcatgatccaactgtgtgcatcatgggc

SEQ ID NO: 19231 - protein, 564 aa, Lelliottia amnigena
MRSPKAYSYVRFSTPKQAQGDSYRRQLQHARDYCLTHNLVLDDKAIEDFGVSAFRGSNRTDGALGRFIDAVKCGEIERGSYLLVESVDRLSRQAIEEALTQFLEIVREGIVIVTLSDNQVFRSGEVDFTKLIVSIVYMARANDESEMKSRRSRAAWSNGRQQARDNNKVIANSRLPSWLTLEGDKIVPIPERVAIVNEMFQMARTGQGYQQIAKVFRDKNYKTFGQGKVWRPAGIQSVIKSRAVIGEFQPHIIYDGKRIPDGEPIIDYYPVIVSPAIFAEVQHIVDKRSNHSGSYRKGLYNNLFSGVIRCQCGELLRFHNKGSKGQVRNYLVCPMEGVTGCQLPYLLYNRLEPQLLQAVCRLSKVMHQRQPSTAKVLTLKDELAVLQGQLDIEIKKRKKAAQSMLDFDDDATFRALFEECKATCQALEGKVLQLEDDIMRLELSNRTIYRLLRPEDLSSTEHRQQFNSQLKSSIQIEFIHDNTQLVAVYRDLDDNLMLEQAFGPKLMSSTVHDYDGHICVKTIADAPYVDPNWLSEEWDDYAEDSPDSGSGIDEEFGAWRAEDE

SEQ ID NO: 19232 - DNA, 50 bp, Lelliottia amnigena
  source 1..50: mol_type = genomic DNA
tgtggttcttatgctaaaaatagctcgcagactttaggagaaaggccgta

SEQ ID NO: 19233 - DNA, 40 bp, Lelliottia amnigena
  source 1..40: mol_type = genomic DNA
gcgtgccttttttatggtgtcgcagtttttaattccatac

SEQ ID NO: 19234 - DNA, 50 bp, Lelliottia amnigena
  source 1..50: mol_type = genomic DNA
tgtggttcttatgctaaaaatagctggcagactttaggagaaaggccgta

SEQ ID NO: 19235 - DNA, 40 bp, Lelliottia amnigena
  source 1..40: mol_type = genomic DNA
gcattcatttttcctggtctgggagtttttaatttcattc

SEQ ID NO: 19236 - protein, 563 aa, Pseudomonas putida
MSKVFSYIRFSSAKQSAGDSYARQVKAAKAFCDENGLEMADPREYLFFDKGRSAFKGKHLDDTGELARFLSYVEDGTIPPGSYLVVESLDRLSREKVRDALPRFLDLLAKGINVYTSVDKRLYTKDYNELDLIISIISMSRAHEESAVKGGRVSSAWREKQKAARTTGKPLGKLRPLWLDVTPDGYVLNPDKAAVVRRIFDLSTKGHGSRIIAATLNQEGIPAFSAGRKNFSGLWGFSTVRHILDSRTTLGEYQPHIFTDGKRTPDGDPIKDYFPSVVTEDEFYLAQAARTSRKTHSVTKATTNFNVLAGILNCYKCGSAMHLQGQRGRKYYKCSKTTRGLCDAGIISAPRTEQVFKEILTKVDSLSLVQDSSGSLQKSLQIVEGRIASLKARQDDAEASHAEFPSRITAKLLHELEADIGALESERTAIAEQLASDKVMSKHDFFEKLDLVSFEGRVAANNLIKRLGLFIFASKNGRTDETYWVSKNNAIPLPFSAETPNLLFYLMHRGKEIQFEAMYDEYVDLQLTQGDLNEVEAAFAKTESWDSLPPHMLAMWKARHIIK

SEQ ID NO: 19237 - DNA, 50 bp, Pseudomonas putida
  source 1..50: mol_type = genomic DNA
agtagtgttttgttgcagaacatcaagaaatgctgcaacaattacctacc

SEQ ID NO: 19238 - DNA, 40 bp, Pseudomonas putida
  source 1..40: mol_type = genomic DNA
cgccagcggccagaagttcaagaaatgctgcgccagttac

SEQ ID NO: 19239 - DNA, 50 bp, Pseudomonas putida
  source 1..50: mol_type = genomic DNA
agtagtgttttgttgcagaacatcgggaaatgctgcaacaattacctacc

SEQ ID NO: 19240 - DNA, 40 bp, Pseudomonas putida; identical to SEQ ID NO: 3915
  source 1..40: mol_type = genomic DNA

SEQ ID NO: 19241 - protein, 564 aa, Pseudomonas monteilii
MSKVFSYIRFSSAKQSAGDSYARQVKAAKAFCDEHGLELADSREYLFFDKGRSAFKGRHLDDTGELARFLGYVEDGTIPAGSYLVVESLDRLSRERVRDALPRFLDLLAKGINVYTSVDKRLYTKDYNELDLIISIISMSRAHEESATKGGRVSSAWRAKQKEARTTGKPLGKNRPLWLDVTPDGYVLNPGKAAIVHRIFDLSTKGHGSRIIAATLNQEGIPAFSAGRKNFSGLWGFSTVRHILDSRTVLGEYQPHIFIDGKRTPDGEPIKDYFPSVVTENEFYLAQAARTSRKTHSVTKATTNFNVLAGILNCYKCGSAMHLQGQRGRKYYKCSKTTRGLCDAGIISAPRTEEVFKEILTKVDSLSLVQDSSGSLQKSLHIVEGRIASLKARQDDAEASHAEFPSRITAKLLHELEADIGALESERTAIAERLASDRVVSKHDFFEKLDLVSFEGRVAANNLIKRLGLFIFASKNGRTDETYWVSKNNAIPQMFSAEADNLIFYLMHRGKEIRFEAMYDEYVDLQVAQGELNEVEAIFAKTESWDELPPELLAMWKAHHGITD

SEQ ID NO: 19242 - DNA, 50 bp, Pseudomonas monteilii
  source 1..50: mol_type = genomic DNA
ggtagtgtattgttgcacaagatcaagaaatgctgcaacaattacctacc

SEQ ID NO: 19243 - DNA, 40 bp, Pseudomonas monteilii; identical to SEQ ID NO: 19238
  source 1..40: mol_type = genomic DNA

SEQ ID NO: 19244 - DNA, 50 bp, Pseudomonas monteilii
  source 1..50: mol_type = genomic DNA
ggtagtgtattgttgcacaagatcgggaaatgctgcaacaattacctacc

SEQ ID NO: 19245 - DNA, 40 bp, Pseudomonas monteilii; identical to SEQ ID NO: 3915
  source 1..40: mol_type = genomic DNA

SEQ ID NO: 19246 - protein, 461 aa, Anaerovibrio lipolyticus
MKKAALYIRVSTDEQAKHGFSLGEQRHDLEQYAAAHHYAVVDVYADEGNTARKAISKRKELQRLLDDVRAGHIDVILLKCLDRWFRNVRDYYKVQEVLDEYGVEWECTQEDYNTTTTNGRLMLNLKLSIAQNESDQTSDRIKYINEGKKRRKEECTGKHPFAYKSVNKKLVIIEEERPIVEFAFAQLLAGSSTHSIATKIWQEFHFAIDARRIWRIVRNPTYKGERYGIPDFCPAIIPPEEFDKVQKILSRNNQPSRTGLVYLFNGKIICPSCGSILVVNCGRSKKTGKYSRPIYLCGKKYTTGKPTIAGGCQFGGGVSERVIERWLIANIFPLLKDYEAHLRSSQPKSMDYRSKMKTINNKLARLKDLYLDELIDKDTYKADYRKLQDELAKLAIASKKQVRLPPAMDSILSDTDFEKTYSEMPREQQRELWQSVIKRIRIDRRPEDKGKRYTDFQVEFM

SEQ ID NO: 19247 - DNA, 50 bp, Anaerovibrio lipolyticus
  source 1..50: mol_type = genomic DNA
tatccctctgtctttccagtacgcccacgtactggaacaacagagggata

SEQ ID NO: 19248 - DNA, 40 bp, Anaerovibrio lipolyticus
  source 1..40: mol_type = genomic DNA
aaattattttcctgtcctgcctctcttggtcattggcaca

SEQ ID NO: 19249 - DNA, 50 bp, Anaerovibrio lipolyticus; identical to SEQ ID NO: 19247
  source 1..50: mol_type = genomic DNA

SEQ ID NO: 19250 - DNA, 40 bp, Anaerovibrio lipolyticus
  source 1..40: mol_type = genomic DNA
aaatcatcttcatgtcctgcccctctttgccactggggca

SEQ ID NO: 19251 - protein, 481 aa, Streptococcus agalactiae; identical to SEQ ID NO: 2986

SEQ ID NO: 19252 - DNA, 50 bp, Streptococcus agalactiae; identical to SEQ ID NO: 2997
  source 1..50: mol_type = genomic DNA

SEQ ID NO: 19253 - DNA, 40 bp, Streptococcus agalactiae
  source 1..40: mol_type = genomic DNA
tgattcttttgtgctaacttcaatggaactagtacttgtt

SEQ ID NO: 19254 - DNA, 50 bp, Streptococcus agalactiae; identical to SEQ ID NO: 14849
  source 1..50: mol_type = genomic DNA

SEQ ID NO: 19255 - DNA, 40 bp, Streptococcus agalactiae
  source 1..40: mol_type = genomic DNA
tgactcctatgtgctaactaccattgtacttgtaggtgtt

SEQ ID NO: 19256 - protein, 464 aa, Enterococcus faecalis
MKRAALYIRVSTMEQAKEGYSIPAQTDKLKAFAKAKDMAVTKVYTDPGFSGAKMERPALQEMISDIQNKKIDVVLVYKLDRLSRSQKNTLYLIEDVFLKNNVDFISMQESFDTSTPFGRATIGMLSVFAQLERDTITERMHMGRTERAKQGYYHGSGIVPLGYDYVDGELIINDYEAQIIQEIYDLYVNQGKGQQYITKRMVAKYPDKVKTLTIVKYALTNPLYIGKISWDGKVYDGHHTPIIDKSMYDKAQEIISRKAQKGGEQHGNQLGLLLGITYCGKCGAKVFRYVSGGKKYRYNYYMCRSVKKMLPSLVKDWNCKQPSLRQEVVEKKVIDSLKSLDFKKIERELKQVENKTKSKITTINNQISKKHNEKQKILDLYQYGTFDVTMLNERMKKIDNEINALTANISNLEGTKSESLINKLETLKTFNWETETTENKILIIKEFVERIELFDDEVIIKYKF

SEQ ID NO: 19257 - DNA, 50 bp, Enterococcus faecalis
  source 1..50: mol_type = genomic DNA
tttaggtacatagtgttagttacactaataagcaaaactatatacctaaa

SEQ ID NO: 19258 - DNA, 40 bp, Enterococcus faecalis; identical to SEQ ID NO: 1143
  source 1..40: mol_type = genomic DNA

SEQ ID NO: 19259 - DNA, 50 bp, Enterococcus faecalis
  source 1..50: mol_type = genomic DNA
tttaggtacatagtgttagttacataaataagcaaaactatatacctaaa

SEQ ID NO: 19260 - DNA, 40 bp, Enterococcus faecalis
  source 1..40: mol_type = genomic DNA
ttccagtgtatcaattatctattgattcagtgatcctgtg

SEQ ID NO: 19261 - protein, 512 aa, Chryseobacterium culicis
MKIMKVADLYIRVSTDEQADKGYSQRDQEDRLKKYCSSNNISIGQIIYEDHSAKSFNRPGWIRLLTTLKKKSCKTDLILFTKWDRFSRNAGDAYQMISTLAKLGIEPQAVDQPLDLSIPENKMMLAIYLAAPEVENDRRALNVFYGMRRAKKEGRVMGKAPFGYANKSRENGEKYIVLQEPEASAMNWAFNEIAKGVLASNQIRKRVNELTIKKVSRTSFHVAIRNPIYYGKVFLEKHKDEEAHFVEGQHEALISEELFNRVQEILDGKRRLQRPNTKILSGEHFPLRGFLVCPKCGKNITASASKGRNNRYYYYHCNAACGFRHRAELVNSVFEEGLKQLEMTEPAKKLIEKVFLDNYQKFITAPQDERKKISDEIDRLNSRISLVRNKLLSEVITDEEYLEIKKEYKDQIEKLETQLNDKPIENKVDIPKLLEKALETLTNIWKVYTEGDIAVKRQIIGSIFPEKLEFDENHYRTKRINAVAHYIFQINNGLSQNKNSRNDNNNHFYCYV

SEQ ID NO: 19262 - DNA, 50 bp, Chryseobacterium culicis
  source 1..50: mol_type = genomic DNA
taataatcatttctactgttatgtagtcttaaacgaacaaatatcgaatc

SEQ ID NO: 19263 - DNA, 40 bp, Chryseobacterium culicis
  source 1..40: mol_type = genomic DNA
ctttaaaaggatggtttgtagactcacagggattcgaacc

SEQ ID NO: 19264 - DNA, 50 bp, Chryseobacterium culicis
  source 1..50: mol_type = genomic DNA
taataatcatttctactgttatgttttcttaaacgaacaaatatcgaatc

SEQ ID NO: 19265 - DNA, 40 bp, Chryseobacterium culicis
  source 1..40: mol_type = genomic DNA
ctttaaagggatgttttggttactcacaaagattgaaaga

SEQ ID NO: 19266 - protein, 590 aa, Parvimonas micra
MKKDVKVIKGDTTLKRTASGCVERSIKRVAAYCRVSTDTEDQINSYNSQVEHYTEFIKKNKEWTLAGIYADEAITGTQVDRRIDFQRLINDCMNGDIDMIITKSISRFARNTLDTLKYVRKLKEFNVAVFFEEENINTLTMDGELLLTILSSVAQQEVENISANVKKGLRMKMERGEMVGFQGCLGYDYDPETKSISINEKEAEIVRYIFRRYIEGVGGMVISRELEEQGYLSPRGNKRWTETTVLGIIKNEKYKGDLMMGKTYTVDPISKRRLDNFGEQDKFYIENHHEPIISEEDFEKAQGIRLRRSKNRNTVANNGGKREKYSRKYAFSSMLECGFCGHNLSRRNWHSSSEYTKVIWQCVNATKNGKKYCPHSKGIEEEAIEKAFMESYRQVCHNNVEITNEFLKTVEEELKDNSLAKDLKKITNQLDKILKKEKDLVELRLNESISMDIYQDKYNEIAISKEKLLAEKRTLEVTLTDEKALKKRLEGFKKLLESNKYLEEFDRAVFESIVDKIIIGGTNDEGEIDPAMITIIYKTGKKDSQDGRLFKSRRKNAKEVNEETDNKLYPHSSDEVNNLCSYPMDNTSRP

SEQ ID NO: 19267 - DNA, 50 bp, Parvimonas micra
  source 1..50: mol_type = genomic DNA
accgtagtgtaacggagtggagagatctcataaagccctataattgttaa

SEQ ID NO: 19268 - DNA, 40 bp, Parvimonas micra
  source 1..40: mol_type = genomic DNA
agatacaattgcgctggaaatctcacactattatttgttt

SEQ ID NO: 19269 - DNA, 50 bp, Parvimonas micra
  source 1..50: mol_type = genomic DNA
accgtagtgtaacggagtggagagctctcataaagccctataattgttaa

SEQ ID NO: 19270 - DNA, 40 bp, Parvimonas micra
  source 1..40: mol_type = genomic DNA
agatacacttgagctctaactctcactctatattttatta

SEQ ID NO: 19271 - protein, 619 aa, Anaerostipes hadrus
MAGIRAKNMIYDVGNYCRLSKDDGTDNESASIATQKSILTDYVKKQGWNLVKTYVDDGYSGTNFQRPAFQEMLKDIENGLINCVITKDLSRLGRNYLDCGLYLEVFFPEHNVRYIAVNDGVDTLNKSAMDITPFRNILNEMYSADVSVKIKSAYRARFQQGKFMGTTAPYGYVKDPADHNHLLIDDKVAHVVREIFDLALAGNGISKIRKHINKQHILRPAAYAVTQGATGYERHFEDNEENRYIWSENSVRGILRSPIYAGNLAGYKRIAANMKSKKRPSKLPEEWEVIPDTHEGIVTQEEFDTVQQLITSRRLPENKGGFENIFAGVIKCADCGYAMRAMSANRRKRPDIIDCVQYSCNNYGRYGNIMCTAHSIEARDLFNAVLADINRFADMAVNDEKAVRAIEKRLTETDQSRAKALEKEQRKLNKRLAELDRLFSSLYEDKVMERITERNFEMMSGKYQKEQLEIEARLKEVTETLNDSYEKSQGVRDFLSLIRNYQGIKELDATIINALIDKILVSEREKLIDGTVRQEIKIYYKFIGFVGELHITPTKRWTALKPKNCTVCGIEYVPRSAISKYCPECRKRIRKVQGTETKRRSRERNRQACIELSAKNDRL

SEQ ID NO: 19272 - DNA, 50 bp, Anaerostipes hadrus; identical to SEQ ID NO: 11112
  source 1..50: mol_type = genomic DNA

SEQ ID NO: 19273 - DNA, 40 bp, Anaerostipes hadrus
  source 1..40: mol_type = genomic DNA
atttcttcaatgatcgaaagaccatgaccatgaagagcag

SEQ ID NO: 19274 - DNA, 50 bp, Anaerostipes hadrus
  source 1..50: mol_type = genomic DNA
actgtccgcaaaaaatgaccgactaatgtaggacggattttgcggacatt

SEQ ID NO: 19275 - DNA, 40 bp, Anaerostipes hadrus
  source 1..40: mol_type = genomic DNA
atctctacaatggggtaaaaacaatgaccttgaagggcag

SEQ ID NO: 19276 - protein, 506 aa, Streptomyces tendae
MTPLLRQTQDMKSTQTGDARTRAVIYCRISQDRTGAGLGVDRQREDCEALAERNGWEVIEVYVDNDVSAFSGKKRKDYERMLADLDDGKATVVIVWHTDRLHRSVLELEKYMNLCERRGVFTHTVQAGEIDLASPTGRMLARQLGIIARYESEHKGDRIARKRRQKAMAGEWAGGIRPFGWGVPTGETKRKLDRKTGDEIEVPELDMTKAVPEEAEALRFWTDEILSGASIRSLVQWCAHKGVLTTRGNAVSHTDMRDMLLRPRNAGIAVYKGEEVGRGKWEPIVDEAKYRAVVAILKDPGRRTTPGASPKWLGSLLYRCGRGDCTEYVFVTQSGGRRFPSYRCQTGHGGGRRAEVVDQYVEDTIVERLSRPDAHELLEPAPEGVNVAALQAEGEQIRARMRDLGGLFGAGQLELGPFTEGMEMARAQLDGVTRQLARAVTADPLAGLVGAPDVRAAWKALELDRKRSVLRALVEVTLKTPRPGRMPDGGYFDYDAVVFTWKRGQL

SEQ ID NO: 19277 - DNA, 50 bp, Streptomyces tendae
  source 1..50: mol_type = genomic DNA
aggcgtcatagcaccatattggggttcccgaacccgggacaatgacgccc

SEQ ID NO: 19278 - DNA, 40 bp, Streptomyces tendae
  source 1..40: mol_type = genomic DNA
ggcgctgagcagcgtcgtcttgccgctgccggtaccgccg

SEQ ID NO: 19279 - DNA, 50 bp, Streptomyces tendae
  source 1..50: mol_type = genomic DNA
aggcgtcatagcaccatattggggggcccgaacccgggacaatgacgccc

SEQ ID NO: 19280 - DNA, 40 bp, Streptomyces tendae
  source 1..40: mol_type = genomic DNA
ggcgccgagcccggtccccgggccgctgccgccgccgccg

SEQ ID NO: 19281 - protein, 493 aa, Paenibacillus thiaminolyticus
MKTAIYVRVSTDEQAEEGYSIEAQKRKLLAYIESQDWTLFDVFIDDGYSAKDLERPEMQRLLQSVTDNEIDVVLVYRLDRLTRSAADCDKLLKLFEKHNVKFQSSTESFETRTAAGRLFIRLIADLAQWERETIAERVRLGMEQKVREGKKPGGKFPYGYDKSGNRIDKEFAILRRLRYMYMHENLSFKKIADQFYIENIKRRDHPWTASNVKLTLENPFYAGIIRFGSKLPNGKYTQRKVDERVECVYGESQYEAVWTLEEFKEHTARMRARSSNGYSRKQEYWFTGLLRCGKCGAAMFGRMATQRSRKDGTQIRYPYYWCCRRKENNSCNMPMFRQKHVEHLVMKHVESIIFDSNLIMNQHENEKKRIKMKANEHKLKRKVSEINTRKKKWQYMFVEGLIDADDLKERLKEEEDGKLEILRELDLLQKDCERKFDIPKLTKFKEAWTLANDIEKQDLLRTIFKQIILTTECENVKGVKNKFFEADVTVEYN

SEQ ID NO: 19282 - DNA, 50 bp, Paenibacillus thiaminolyticus
  source 1..50: mol_type = genomic DNA
cttatgcactttgtattcattggtgaaccgaacaatacaaagtgtacata

SEQ ID NO: 19283 - DNA, 40 bp, Paenibacillus thiaminolyticus
  source 1..40: mol_type = genomic DNA
gctgtggccggtggacaaggagccgtcatgccctgtgttc

SEQ ID NO: 19284 - DNA, 50 bp, Paenibacillus thiaminolyticus; identical to SEQ ID NO: 19282
  source 1..50: mol_type = genomic DNA

SEQ ID NO: 19285 - DNA, 40 bp, Paenibacillus thiaminolyticus
  source 1..40: mol_type = genomic DNA
gcagtgcccgctggccaaggagccgtcatgacctaggggc

SEQ ID NO: 19286 - protein, 678 aa, Vibrio parahaemolyticus
MRTTPKIYNYARVSTTKQTKGVGLETQQQRSVLENLSQEHNLPIHDENFVDQGLSAYHGKHKDGAFGVVLSRIESGEIASGSILVVFSLDRLSRETVNVAMEQFLSIINRGVRVYTHIDCKMFDSESQNQTADLIGSLITMQRANEESETKSKRIIAAQKIALKRWKDTGKPQGALGRSPFWIDQPTNTLNINAEGVKKAVEMKLAGYGDLKIKQYLDANFEYKQTRTKGTVKQSNTWDYTAISQLWANRSLIGEKNFHIEGVSHVFENYYPPIIDEATFRKLKMCKSEKRGRNTSSGKIPLLKGIARCGICGGAMVFVDKGDNRVNYVCNLAMKGEHDREVYNVNMLDLLTLEICKDAYLAESDKANNTFVENEKIKIETELVEEREVLDELVARFKSKRSNTILDLIGDSENKIDELEARLDALNSADVILSADELASLPDIFTDDVRKDYLHPERLAIRNNLYRFISSITLNRMFEPCSDAKTKFANCVDVTWHFKNGQKRRLAMLPYELTKVEGGGKGLYLPFVYMYGSKNYINVEDGDPLLSNIMNKLHKLDLTKCLYPSKGRYQWSQRTLECGKTYWVPLDKAVFLEKGMEIVATSTNDTEKEGKDLKVEENYLSLMFNEPSTVDIVYDYPDSTFIELVCKFGFAETRDFAEFLRDNHFNRELYSSLDFLMS

SEQ ID NO: 19287 - DNA, 50 bp, Vibrio parahaemolyticus
  source 1..50: mol_type = genomic DNA
caaagaaagttgttttcttttggcttgccaataaaaaacagtttccttcg

SEQ ID NO: 19288 - DNA, 40 bp, Vibrio parahaemolyticus; identical to SEQ ID NO: 8108
  source 1..40: mol_type = genomic DNA

SEQ ID NO: 19289 - DNA, 50 bp, Vibrio parahaemolyticus
  source 1..50: mol_type = genomic DNA
caaagaaagttgttttcttttggcaggccaataaaaaacagtttccttcg

SEQ ID NO: 19290 - DNA, 40 bp, Vibrio parahaemolyticus
  source 1..40: mol_type = genomic DNA
gatgaataattgctaaggcagcacagaaagggctgggcga

SEQ ID NO: 19291 - protein, 674 aa, Vibrio parahaemolyticus
MLTTPKIYNYARVSTTKQLQGVGLETQQQKSVLEDLSLEYDLPIHDESFIDQGLSAYHGKHKEGALGVVLDRIRSGEIPSGSILVVFSLDRLSRETVNIAMEQLLSIINQGVRVYTHIDNKLFDVKSQYLAADLIISLITMQRANEESETKSKRTIGASKVALKRWKETSESQRNLGRTPLWIDQSTNTFNINAEGVKKAVEMKIAGYGDLKIKQYLDANFEYKPTRKKGRVKQSNTWDYTAIYQLWDRRSLFGEKTFTIEGVEYVMENYYPALIDEDTFLKLQASKKKRQGRETSSGKIPLLKSLARCGICGGAMVFVDKGGSRVNYVCNLAMKGEHVREVYNVNMLDLLTLEICKDAYLVESDKANNATQENNKLKLEAELVAEKENRVKLLEYCRRTPKESFFELLEESENKIDELEDKLDALNNVDVILSADELASLPDVFTDDVRKDYLHPERLAIRNNLYRFISSITLNRMFEPCSDAKTKFANCVDITWHFKNGQKRRLAMLPYEYTKTEGGGKGLYLPFVYMYGSKSFIKIEDGDQLLSDILMKLHKLDLTSCLYPSKGQYQWSQRTLECGKTYWVPLDEGVFLEPEALQFDFGGIHTEKSTPLNYISLMYSHLKAEGEYTHDYPLSKFSDLARGFNFVESYDFYDTLRDNIFDQELYLSRDLLMS

SEQ ID NO: 19292 - DNA, 50 bp, Vibrio parahaemolyticus; identical to SEQ ID NO: 19287
  source 1..50: mol_type = genomic DNA

SEQ ID NO: 19293 - DNA, 40 bp, Vibrio parahaemolyticus; identical to SEQ ID NO: 8108
  source 1..40: mol_type = genomic DNA

SEQ ID NO: 19294 - DNA, 50 bp, Vibrio parahaemolyticus; identical to SEQ ID NO: 19289
  source 1..50: mol_type = genomic DNA

SEQ ID NO: 19295 - DNA, 40 bp, Vibrio parahaemolyticus; identical to SEQ ID NO: 19290
  source 1..40: mol_type = genomic DNA

SEQ ID NO: 19296 - protein, 678 aa, Vibrio parahaemolyticus
MRTTPKIYNYARVSTTKQTKGVGLETQQQRSVLENLSQEHNLPIHDENFVDQGLSAYHGKHKDGAFGVVLSRIESGEIASGSILVVFSLDRLSRETVNVAMEQFLSIINRGVRVYTHIDCKMFDSESQNQTADLIGSLITMQRANEESETKSKRIIAAQKIALKRWKDTGKPQGALGRSPFWIDQPTNTLNINAEGVKKAVEMKLAGYGDLKIKQYLDANFEYKQTRTKGTVKQSNTWDYTAISQLWANRSLIGEKNFHIEGVSHVFENYYPPIIDEATFRKLKMCKSEKRGRNTSTGKIPLLKGIARCGICGGAMVFVDKGDNRVNYVCNLAMKGEHDREVYNVNMLDLLTLEICKDAYLAESDKTNNTFVENEKIKIETELVEEREVLDELVARFKAKKSNTILDLIGDSENQIDVLEAKLDAINNADVVLNADELVSLPEIFTDDVRTDYLHPERYTIRNNLYRFISSITLNRVVEHCSDAKIKSANCIDITWHFKNGQKRRLAMLPYQYLKADDGRKSLYLPFVYMYGSKSNIKVDDGGQFLPSIFEKLHAFDLTKCLYPSRGCYQWSKLSLECGKTYWAPLDKAMFMEKGMEVIADTVRDNGGTNKVDGVTTNYLSLMFNYPSSEEFSYDYPDSTFVELACKFGFVADRDFSLFLQDNNFNRELYSSLDFLMS

SEQ ID NO: 19297 - DNA, 50 bp, Vibrio parahaemolyticus
  source 1..50: mol_type = genomic DNA
cgaagaaagttgattctttttggtttgccaataaaaaacagtttccttcg

SEQ ID NO: 19298 - DNA, 40 bp, Vibrio parahaemolyticus; identical to SEQ ID NO: 8108
  source 1..40: mol_type = genomic DNA

SEQ ID NO: 19299 - DNA, 50 bp, Vibrio parahaemolyticus
  source 1..50: mol_type = genomic DNA
cgaagaaagttgattctttttggtaggccaataaaaaacagtttccttcg

SEQ ID NO: 19300 - DNA, 40 bp, Vibrio parahaemolyticus; identical to SEQ ID NO: 19290
  source 1..40: mol_type = genomic DNA

SEQ ID NO: 19301 - protein, 678 aa, Vibrio parahaemolyticus
MRNIPKIYNYARVSTTKQLKGVGLETQQQKSVLENLSQKFNLPVHDENFVDQGLSAYHGQHREGAFGVVLSRIESGEIASGSILVVFSLDRISREATNLAMAQLLNIINRGVRVYTHIDGKMYDTTNDTFSIDLMFSMFTMERANEESRTKSKRIIAAQKIALKRWRDTGKPQGALGRSPFWIDQPTNTFNINAEGVKKAVEMKLAGYGDLKIKQYLDANFEYKQTRTKGTVKQSNTWDYTAISQLWANRSLMGEKTFHIEGVSHVLENYYPPIIDEATFRKLKMCKSKKRGRSTSSGKIPLLKGIARCGICGGAMVFVDKGDNRVNYVCNLAMKGEHDREVYNVNMLDLLTLEICKDAYLAESDKANNTFVENEKIKIETELVEEREVLDKLVARFKAKKSNTILDLIGDSENQIDVLEAKLDAINNADVVLNADELASLPEIFTDDVRTDYLHPERYAIRNNLYRFIASITLDRVVAPCSDAKTKYANCVDITWHFKNGQKRRLAMLPYQYLKADDGSKVLYLPFVYMYGSKSNIKVDDGDQFLSSIFEKLHAFDLTKCLFPSRGCYQWSKLSLECGKTYWASLDKAMFMEKGMEVIADTIRDNGDTNKVDGVTTNYLSLMFNYPSSEEFSYDYPDSTFVELACKFGFVADRDFSLFLQDNNFNRELYSSLDFLMS

SEQ ID NO: 19302 - DNA, 50 bp, Vibrio parahaemolyticus
  source 1..50: mol_type = genomic DNA
cgaagaaagttgattttttttggtttgccaataaaaaacagtttccttca

SEQ ID NO: 19303 - DNA, 40 bp, Vibrio parahaemolyticus; identical to SEQ ID NO: 8108
  source 1..40: mol_type = genomic DNA

SEQ ID NO: 19304 - DNA, 50 bp, Vibrio parahaemolyticus
  source 1..50: mol_type = genomic DNA
cgaagaaagttgattttttttggtaggccaataaaaaacagtttccttca

SEQ ID NO: 19305 - DNA, 40 bp, Vibrio parahaemolyticus; identical to SEQ ID NO: 19290
  source 1..40: mol_type = genomic DNA

SEQ ID NO: 19306 - protein, 613 aa, Vibrio parahaemolyticus
MRTTPKIYNYARVSTTKQLKGVGLETQQQRSVLENLSQKYNLPIHDENFVDQGLSAYHGKHKDGAFGVVLSQIESGEIASGSILVVFSLDRISRETTNLAMAQLLSIINRGVRVYTHIDDKMYDTSNDNFSTDLMFSMFTMERANEESRTKSRRIIAAQKEALKKWHIDKKPQGALGRVPCWIDQPTNKLNQNATGIKVAIDLYLQGWSSIKIKKHLDKSYPYKRTRKTKVKTSSTWDLGVIDQLWKKRALIGEKHLRIEDKTHVLKDYYPKLVDLNTYLRLKALREPKKGRATTTGSIHLLKGLARCGVCGGAMVFIDKGASRQNYVCNLATKGEHQREVVSTRMLEFLTLEVCKDFYLVNKVGATSNTNIEAEIQERILEEKAELSDLIERYKKKARGSLAELIEDQEDKIELLEKELDTFNINTFDEVLERLTEDLYTEEVRNNISDPQRADLHEILCRILKAVNVYRRTEDTNFTKTKKVNCIEIEWVFKSGQVRKLVMNPFEYIITENKKSLYIPYEYKHDIPFEEYRRNKSVISNALKKLHDWNLLRGLYPTKGRYEWNEIDLELGYVHSITSPNFDAILDGSYMKKSTMYIQSDKNSLEDKDDIFC

SEQ ID NO: 19307 - DNA, 50 bp, Vibrio parahaemolyticus; identical to SEQ ID NO: 19297
  source 1..50: mol_type = genomic DNA

SEQ ID NO: 19308 - DNA, 40 bp, Vibrio parahaemolyticus; identical to SEQ ID NO: 8108
  source 1..40: mol_type = genomic DNA

SEQ ID NO: 19309 - DNA, 50 bp, Vibrio parahaemolyticus; identical to SEQ ID NO: 19299
  source 1..50: mol_type = genomic DNA

SEQ ID NO: 19310 - DNA, 40 bp, Vibrio parahaemolyticus; identical to SEQ ID NO: 19290
  source 1..40: mol_type = genomic DNA

SEQ ID NO: 19311 - protein, 646 aa, Vibrio parahaemolyticus
MQINEEVLKSLSAEYSLPIAEETYQDLGKSAYKGEHLKNELGLFLSSVKDRTVVEGSILVVYSLDRLSRLEIGYAKQTYYDLTNNGVSVYSIVDNHLYRAHNAADDIIATITFERAHNESKNKSRRVIDSSKEGYKRWKDTAQFQKALGRTPLWIDQSTNTFNINAEGVKKAVEMKIAGFGDLKIKQYLDANFEYKPTRKKGRVKQANTWDYTAIYQLWDRRSLFGEKTFTIEGVEHVMENYYPALIDEDTFLKLQASKKKRQGRETSSGKIPLLKSLARCGICGGAMVFVDKGGSRVNYVCNLAMKGEHDREVYNVNMLDLLTLEICKDAYLTESDNANNTFVENEKIKIEAELVEERKVLDELVARFKSKRSNTILDLIGDSENKIDELEAKLNALNNADVVLSADELANLPDIFTDDVRKDYLHPERLAIRNNLYRFISSITLNRMFEPCSDAKTKFANCVDITWHFKNGQKRRLAMLPYEYTKTEGGGKGLYLPFVYMYCSKNLLKVEDGDQLLSDILTKLHKLDLTKCLYPSKGQYQWSRRTLECGKTYWVPLDEGVFLEPEALQFDFGGIHTEKSTPQNYISLMYSHLWAEGEYTHDYPLSKFSDLARGFNFVESYDFYDTLQDNLFDQELFLARDLLMS

SEQ ID NO: 19312 - DNA, 50 bp, Vibrio parahaemolyticus
  source 1..50: mol_type = genomic DNA
agaagaaagttgttttcttttggtttgccaataaaaaacaatttccttcg

SEQ ID NO: 19313 - DNA, 40 bp, Vibrio parahaemolyticus; identical to SEQ ID NO: 8108
  source 1..40: mol_type = genomic DNA

SEQ ID NO: 19314 - DNA, 50 bp, Vibrio parahaemolyticus
  source 1..50: mol_type = genomic DNA
agaagaaagttgttttcttttggtaggccaataaaaaacaatttccttcg

SEQ ID NO: 19315 - DNA, 40 bp, Vibrio parahaemolyticus; identical to SEQ ID NO: 19290
  source 1..40: mol_type = genomic DNA

SEQ ID NO: 19316 - protein, 621 aa, Vibrio parahaemolyticus
MRTTPKIYNYARVSTTKQTKGVGLETQQQRSVLEELAHKYELPIHDENFVDEGLSAYHGKHKDGTLGRVLSLIESGKISSGSILVVFSLDRLSRETVNIAMEQLLSIINREVRVYTHIDDKMFDAASSNLTADLIVSLITMERANEESAVKSKRIIAAQKQALKGWKKDGKPRGALGRVPLWIDQTTNSFNEHAEGIKAAVDLFLEGRSTIKVKQHLDENYPFKRTRKTSIKKAQTWDYGVIDQLWRKTSLIGEKRLTIEGQEHVLSNYYPPLISLEKFNKLTRLKKPKLGRSTSTGSIHLLKGLARCGTCGSAMVFVDKAQHSKNYVCSLAVKGEPLHNREVFSAELLELLTLEVCRDQYLINSFNAQLDVEKKAKAEYELAEEKKQLEDLKSRYKQKSRASLLDLIEDTEDKIEVLEQQLASFKTFDLSDNLHLLNSDIFTEEVRTNFQHSSRAEIIDNLKSVLSDVTLNRVVEASEFTKTGTVNCVSITWRFKNDQTRSISVKPFRYIGTGSNKKLFVPVRYEYTVPVIEEENRRGEKFVPDMIKKLHEKKLLNKLYPSKGRYQWNKLEFLLGEFQTGLHNFLPNFVADPDPDAFWGDMVDKARAKGVRYTVLSKNVI

SEQ ID NO: 19317 - DNA, 50 bp, Vibrio parahaemolyticus
  source 1..50: mol_type = genomic DNA
cgaagaatttagttttataatggtttgccaataaaaaacagtttccttcg

SEQ ID NO: 19318 - DNA, 40 bp, Vibrio parahaemolyticus; identical to SEQ ID NO: 8108
  source 1..40: mol_type = genomic DNA

SEQ ID NO: 19319 - DNA, 50 bp, Vibrio parahaemolyticus
  source 1..50: mol_type = genomic DNA
cgaagaatttagttttataatggtaggccaataaaaaacagtttccttcg

SEQ ID NO: 19320 - DNA, 40 bp, Vibrio parahaemolyticus; identical to SEQ ID NO: 19290
  source 1..40: mol_type = genomic DNA

SEQ ID NO: 19321 - protein, 542 aa, Staphylococcus haemolyticus
MQQLKQKRVGIYVRVSTEIQSTEGYSIDGQINQIREYCDFNNFIVVDVYADRGISGKSMNRPELQRLLKDANEGQIDSVMVYKTNRLARNTSDLLKIVEDLHKQNVEFFSLSERMEVNTSSGKLMLQILASFSEFERNNIVENVFMGQTRRAQEGYYQGNLPLGYDKIPDSKHELMINQHEANIVKYIFESYAKGHGYRKMANALNHKGYVTKKGNPFSTSAIAYILSNPFYIGKIQFAKYKDWNEKRRKGLNDKPIIADGKHPPIISQELWDKVQSRKKQVSQKPQVHGKGTNLLTGIIHCPECGAPMAASNTTNTLKDGTKKRIRYYSCSNFRNKGSKVCSANSVRAEVIEKYVMDQILEIVKSDKVLKQVVERVNQDSQIDMAALNHDIAYKQQQFDEINTKLKNLIQTIEDNPDLTSALKPTIHQYETQLNDITNQMNQLKHQQNQEKPSYDTKQIAALLQRIFQNIESMDKSQLKALYLTVIDRIDIRKHENHKKQFYVTLKLNNEIIKQLFNNNNLDEVLLSTSSLFLPQTLYFQI

SEQ ID NO: 19322 - DNA, 50 bp, Staphylococcus haemolyticus
  source 1..50: mol_type = genomic DNA
atgctattgagaaacagctcaaaaaacaaagagatgtagaaactaaaact

SEQ ID NO: 19323 - DNA, 40 bp, Staphylococcus haemolyticus
  source 1..40: mol_type = genomic DNA
attcaacaacgactcaaaagacaaaggatgcatgatacta

SEQ ID NO: 19324 - DNA, 50 bp, Staphylococcus haemolyticus
  source 1..50: mol_type = genomic DNA
atgctattgagaaacagctcaaaagtcaaagagatgtagaaactaaaact

SEQ ID NO: 19325 - DNA, 40 bp, Staphylococcus haemolyticus
  source 1..40: mol_type = genomic DNA
aatcaaacacaactcacaagtcaagggatccatgacacaa

SEQ ID NO: 19326 - protein, 587 aa, Bacteroides caccae
MNHKKAIAYIRVSTTHQDVERQRIKFKEYCKNNNLQANEEIIDFGISGAKSDRPGYLRLQALTGKDADILVVSELSRLSRQEEILETINIIQNIVYNGLSLIFLDAPSKVYEAHSTLDITELIILLVGAFRAAQDRKEIKRKNQEGKQALLSQNPYAVVDAKIPYGYNAIYNPNGNRPKKILIENEEEVANVKKIFQLALEGYSLGKIAKYFNNRNILFRGNFVTRQLLSVLVRNILYKGIRRRIHSFDRKDNPNIIENRITPIISESDFERVNQMLKDNHKFCSTGNNYFNTLRGIIKCRCGRGMMVKDKGYTSGIKKMVYRCNDVSAKDNPIHCQYKDEISYQFTNEVIFNVFKYIHNTDEIFIFMAKTEQKIYEINEEIKGIERKIENKNIEIESLNKDNKRLIERYIHAKSQSIANAIQDEQLTIENKIHKLEDEISHCNKEKVKLITNKESLINYIDTEELSSLGNEERAELFKKHLEKVIYLPVTLMQGFYIITFKSKMQRIVAIRKTAKSPIAAILPDGYTVDMNTKLITEYYQGIQTGGCYYPISSSFKQLTIQEYFKKLPQIGNLGILKIDYSYRKGK

SEQ ID NO: 19327 - DNA, 50 bp, Bacteroides caccae
  source 1..50: mol_type = genomic DNA
atgggtatttttgactatttatattcgtttaacataacgaacttgcccat

SEQ ID NO: 19328 - DNA, 40 bp, Bacteroides caccae
  source 1..40: mol_type = genomic DNA
cagtatttgacacgaatactcaaaaaaagcaattgcccag

SEQ ID NO: 19329 - DNA, 50 bp, Bacteroides caccae
  source 1..50: mol_type = genomic DNA
atgggtatttttgactatttatattagtttaacataacgaacttgcccat

SEQ ID NO: 19330 - DNA, 40 bp, Bacteroides caccae
  source 1..40: mol_type = genomic DNA
caatattccacaataaaagtaaaaaaaagctattggccag

SEQ ID NO: 19331 - protein, 472 aa, Mycobacterium sp MOTT36Y
MRFLARTRLSVFTDESTSVERQREIITQWATVHGHTIVGWAEDIDVSGKLSPFDTPQFGDWLKNRYPEFDGVVAWKLDRLARNMFGLNDLFQWAKTNAKTVVSITESLDLSSTVGLMVAQILAGMAQMELEAIQARQSGSQAHLRQVGRWPGGNPPYGYRVVRNGKGCKLDADPDKAAVVNTIVGRILDGSTMASVCRELNSAGVPAPKGGKWQVSSMRHMLRSPALRGHRVHKGEVILGDDGQPVMFGPELLDAETFHRLQAALVPGNGAGSRRNASPLSGLARCAECGAAMGYESSRGRDKRRRYYYRAKCDHRPAMRADQLERLAEQALMLAKGDDEITRREWIPGEDHTTALQDAVARYDALSERLTTNLPEVAKQRLEKQLAAVEAELGRLSALPQVEGHWGQVGTGRTWAQAWDESSVDERRKMLTDAGIEFAVRRNEVTVGDRFRAIKTDDVEDPFVVIPPPVRT

SEQ ID NO: 19332 - DNA, 50 bp, Mycobacterium sp MOTT36Y
  source 1..50: mol_type = genomic DNA
gtatcggattaccgacgatccggtggaccacattgcgctaattccgacac

SEQ ID NO: 19333 - DNA, 40 bp, Mycobacterium sp MOTT36Y
  source 1..40: mol_type = genomic DNA
gtctcggatacggcccggtggacggccttgcaccgggcca

SEQ ID NO: 19334 - DNA, 50 bp, Mycobacterium sp MOTT36Y
  source 1..50: mol_type = genomic DNA
gtatcggattaccgacgatccggtccaccacattgcgctaattccgacac

SEQ ID NO: 19335 - DNA, 40 bp, Mycobacterium sp MOTT36Y
  source 1..40: mol_type = genomic DNA
gcctcggctccggcccagtccacggccatgaccctggccc

SEQ ID NO: 19336 - protein, 594 aa, Vibrio cincinnatiensis
MQINEEVLKRLSDEHNLPIAKETYQDLGKSAYKGEHLKYELGVFLEAVKSGTVVTGSILVVYSLDRLSRLEIGHAKQTYLDLTNNGVSVYAIVDNHLYRAHNAADDIIATITFERAHNESKNKSSRVRDAAKEGLKKWKATGEPQSSLGRVPFWIDQPTNKFNKNADGVRKAIELYLSGVGCLKIKQHLDEHYPYEAVRKKGRRTSRADQWDFTAINQVFTKPSLIGEKHITVDGVKHKLENYYPALIDVQTFQKLKQVKSLKAGRSPENPVNHLLKGLVKCGVCGGSMVLIDKGRGNAAINYVCSNAAKGNHQRKNYSAQMLELVTLHLCQDHYLQQANDKKNHSERIANLQKQKDDLTSELADLSKRYKEKRRSTYLDLIEDAEAKLELVENQLEELQTVNTKESFDILANDVYTDEVMNNFNHPDRKTIRKHLICVIDNVKVIRSEHESQYTKIKIVNCITLVVKFRNGQTRVLTVRPFKYLKNDDVFTPISIGSNNLESDMINIKGFHNNLITKLAKTDLLRKLYPTKGTFDWKNRGVFMGEIVAFTLPEIAQVVDKIDSLGGAGGEFKVPTDRTTKLRYWTNALPFSAE

SEQ ID NO: 19337 - DNA, 50 bp, Vibrio cincinnatiensis
  source 1..50: mol_type = genomic DNA
agaggaatttaagtattttatggtttgctagaaaaaatcattttccctct

SEQ ID NO: 19338 - DNA, 40 bp, Vibrio cincinnatiensis
  source 1..40: mol_type = genomic DNA
gaagagtacttattgtggtttgctaagaaggggttccctg

SEQ ID NO: 19339 - DNA, 50 bp, Vibrio cincinnatiensis
  source 1..50: mol_type = genomic DNA
agaggaatttaagtattttatggttggctagaaaaaatcattttccctct

SEQ ID NO: 19340 - DNA, 40 bp, Vibrio cincinnatiensis
  source 1..40: mol_type = genomic DNA
gtagagtacaaatattggttggcaaagaatggattcccag

SEQ ID NO: 19341 - protein, 540 aa, Blautia producta; identical to SEQ ID NO: 3871

SEQ ID NO: 19342 - DNA, 50 bp, Blautia producta; identical to SEQ ID NO: 297
  source 1..50: mol_type = genomic DNA

SEQ ID NO: 19343 - DNA, 40 bp, Blautia producta
  source 1..40: mol_type = genomic DNA
ggtgagtaagtgggagcgggggctgagtcttccggatatt

SEQ ID NO: 19344 - DNA, 50 bp, Blautia producta; identical to SEQ ID NO: 297
  source 1..50: mol_type = genomic DNA

SEQ ID NO: 19345 - DNA, 40 bp, Blautia producta
  source 1..40: mol_type = genomic DNA
ggtgagtgtgtgggaggtgggggcgagtattccggatcat

SEQ ID NO: 19346 - protein, 539 aa, Streptomyces qaidamensis
MRYGRSSSPDMTEGEHVGKREELVSKLRGTPEGLPSVEEVRAMLASDPELKCVVCYARISFDGRVKDAHGVEDQHRDMTETARRFGWLVVYRYTDNDRSASKENIVRDDFEQLLADLAAGTTPDGYPIHGVMAVNDDRLYRRPSDWERYLKAFTTQEGRVYHDSNGIQDLYAEGFEIKGLLGVAMSLSETRKKERRSRNSHRSRAIRGQSVAAWRPFGWEDDKVSLRLDEAEAIRQAVKDVIAGASISEITRRWKEAGFITSRGNAFQYQTVKQVLVNARLCGYREIKGELVRDGDDQPIVGEWEPIITPKEWFAVTAKIRERGRGTGMPRGGLVHKYLLTGILRCGHVLEDGTVCNNKMIGIKANDWLKYRHAYMCKKTVDGGCNKTYKRGDKTDMAIEELVIAKLERDAASKAQDVPDWDKADALERAVRSRNELERRWHDDEDTDIDDETFFRNLPVLERRIKELRADQRAHEALKAEAEEAKEDVRNSWGSKTLTQKREAIKKVLSAVIAVPGGKGNKTFDPELLKPVWRDFRMS

SEQ ID NO: 19347 - DNA, 50 bp, Streptomyces qaidamensis
  source 1..50: mol_type = genomic DNA
gtgatgctttgactaatcttcatgctgtagagcattactagaacctccac

SEQ ID NO: 19348 - DNA, 40 bp, Streptomyces qaidamensis
  source 1..40: mol_type = genomic DNA
gtcctgcgagatcttcatgctgcagaacttgggaccgcac

SEQ ID NO: 19349 - DNA, 50 bp, Streptomyces qaidamensis; identical to SEQ ID NO: 19347
  source 1..50: mol_type = genomic DNA

SEQ ID NO: 19350 - DNA, 40 bp, Streptomyces qaidamensis
  source 1..40: mol_type = genomic DNA
ctcctgggggatcttgatgctgctggtctggggaccacac

SEQ ID NO: 19351 - protein, 479 aa, Mycobacteroides abscessus; identical to SEQ ID NO: 3691

SEQ ID NO: 19352 - DNA, 50 bp, Mycobacteroides abscessus; identical to SEQ ID NO: 3692
  source 1..50: mol_type = genomic DNA

SEQ ID NO: 19353 - DNA, 40 bp, Mycobacteroides abscessus
  source 1..40: mol_type = genomic DNA
tggccccaccactggcgccaatctgaaggccctgtgccgc

SEQ ID NO: 19354 - DNA, 50 bp, Mycobacteroides abscessus
  source 1..50: mol_type = genomic DNA
agggtatattaggaacttgtcaccgggctgaaatatcgctaaactaccct

SEQ ID NO: 19355 - DNA, 40 bp, Mycobacteroides abscessus
  source 1..40: mol_type = genomic DNA
tggcttcccctcggccgccgggctggaggccctgtgtcgc

SEQ ID NO: 19356 - protein, 549 aa, Intestinimonas butyriciproducens
MKKKRTKCYLYTRVSTSMQVDGYSLDAQRDKLRKYAEYEDMAVVGEYSDEGFSGKNIQGRLEFQRMLNDIQEGKDGVDYVLVFKLSRFGRNAADVLNSLQLMQDFGVNLICVEDGIDSSKDSGKLMISVLSAVAEIERENIRTQTMAGREQKAREGKWNGGFAPYGYRLENGQLLIAEDEAEVIRVIYDRYIHTNDGVAGVAKYLNSHGYVKKLRQNNTIPGFSRDFVKDVLDNPVYTGKIAYGRRRTEKKLGTRNEMHVVEQSEFPVYEGQHEAIISEEDWNLAQEKRRANSYRREKVNDPDHAHILSGILKCPCCGKSLYGNIAKAHSKDRKTRYYYYCKNTVTPTGHECTFRINIEQTEMNQMVANIISAMVKDPRFSEAIKEKIGTAVDTADMEKRLEALQTQLRQALGTKSRLERQMDTLDVTDPYYDRKILDLQRRYDEQYGKIEDIEIQIEEVQSQIRSIRQEKISGDNIYQLLLAFDEVYNSATEAEQKEFMKAFIERIELFPEKRKDGCWIKNIVFNFPVPVNGEEVKELPLENETMLET

SEQ ID NO: 19357 - DNA, 50 bp, Intestinimonas butyriciproducens
  source 1..50: mol_type = genomic DNA
cccttggaaaatgaaacaatgctcgagacggttgtcttgctttccaaggg

SEQ ID NO: 19358 - DNA, 40 bp, Intestinimonas butyriciproducens
  source 1..40: mol_type = genomic DNA
tccccggaccgcccatgtggagacggtgctgctgctgcaa

SEQ ID NO: 19359 - DNA, 50 bp, Intestinimonas butyriciproducens
  source 1..50: mol_type = genomic DNA
cccttggaaaatgaaacaatgctcctgacggttgtcttgctttccaaggg

SEQ ID NO: 19360 - DNA, 40 bp, Intestinimonas butyriciproducens
  source 1..40: mol_type = genomic DNA
tgcccggacccccaaggagctaatgctgcagctgctgcaa

SEQ ID NO: 19361 - protein, 628 aa, Bacteroides uniformis
MKAAFLIRCSTKNQDLNRQTRDLTRLAKSMGYEYDLENLVYGEKITGKDDVTKKNRDSIDRLLRAAKEQRFDVVLVSEVSRMSRDPASGRIYVRLLINMNIPVYFKDIDLWTINPETGKKVRDAELVIGAAFDAAWKYLKSMKTQIASARRNELDNNRISIGQPYFGYKRYEGTDKSKKNQIVVNEEEAEVVQAVYNEYLKEGATLKSTALAITDKYGEQLNRKFSLGTIEHILTYESYATGIKKVNLKDPDTDEVEVFDVSTPIIIDKELYEAATNKRKKNRVKDEPYPNQQVYLLSKLIKCPDCGYTLTPRRKAGEFGQTYRLVNGKPAVSWFCMSGINNITNCTNRTSIANEKLEPIIWELVKKELIGYANMNDEKREEQIRECEEKIEYQNYSIQNFTKEIDKLKKRLSTAYQFSINAAEMAGDDEDMRTMAMEEFNRTAKGVRQEMKNFEKSIEQAKGELEKLRDLKTFYSQPTLPKDYLEQIEGNFTEKRNLVKQLITKIVPYRITTFKKKERESGVKTCNKMITVKNGAVLLEVYTIGGVYNVFYNANSKFQVKTAYYVHGEYATFQNGIRKYPAYNEGEYFVISNANMVMETDDIDEVVTVNEFVDIAIANNWVIEYQYI

SEQ ID NO: 19362 - DNA, 50 bp, Bacteroides uniformis
  source 1..50: mol_type = genomic DNA
atggttaaagtatttattctgttgttcaacataaagaaatcacttgcata

SEQ ID NO: 19363 - DNA, 40 bp, Bacteroides uniformis
  source 1..40: mol_type = genomic DNA
tacggctgtactctggcagttcatcaagatataaaattcc

SEQ ID NO: 19364 - DNA, 50 bp, Bacteroides uniformis
  source 1..50: mol_type = genomic DNA
atggttaaagtatttattctgttgctcaacataaagaaatcacttgcata

SEQ ID NO: 19365 - DNA, 40 bp, Bacteroides uniformis
  source 1..40: mol_type = genomic DNA
tgaggttaaactctggcagctcatgaagatggaagattcc

SEQ ID NO: 19366 - protein, 473 aa, Mycolicibacterium fortuitum
MSRDPVAAAIYVRISQDRTGAGLGVDRQEQDCRTLAESLGWQVVHVFCDNDISAYSGKRRPQYEALLQAIQSGAVKGVLAWHPDRLHRSPRELETYIDASERHGVLTHTVQAGVWDLSTPSGQLIARQLGAVSRYESQHKGERIRRARQQQAQAGAFHGGSRPYGFERDGLTLRPDEAAEVAKAVEQIVSGVSLRAIVRDLNARGIPTTTSKGRWTARALSDIIQRPRTAGLSMYRGEVVGKAQWPAIVPEETWRAACAILTDPTRRTNDGRGPGVRWLGSGLYRCGKCGEAELRVSSSTNKRRAYRCRNRDSGDTSGHVSREATALDSFVEAVMVERLSRPGLIHEAVVTEGTVNVAELRTESDALRVRQEQLAEAFAEGDITRAQLTAGSKRIETRAEQIAAQLAMMGGKSPLDALTHAETADMAAQWAELTLGQKRAIIDYLCTVTVLPMGRSRGHLGFDPASVRIDWKR

SEQ ID NO: 19367 - DNA, 50 bp, Mycolicibacterium fortuitum
  source 1..50: mol_type = genomic DNA
cagtgtctcaattgcagggtcgtctttacgggactatatttaagacatga

SEQ ID NO: 19368 - DNA, 40 bp, Mycolicibacterium fortuitum
  source 1..40: mol_type = genomic DNA
ggctgccaggagggtggtcttaccgcaacccgtgccgccc

SEQ ID NO: 19369 - DNA, 50 bp, Mycolicibacterium fortuitum
  source 1..50: mol_type = genomic DNA
cagtgtctcaattgcagggtcgtctgtacgggactatatttaagacatga

SEQ ID NO: 19370 - DNA, 40 bp, Mycolicibacterium fortuitum
  source 1..40: mol_type = genomic DNA
ggctgccaggaggctgatctgaagccccccagtgccgcac

SEQ ID NO: 19371 - protein, 500 aa, Oscillospiraceae bacterium
MNIVIYARYSSHSQTEQSIEGQLQTCYEFAKNNGHIVIGEYIDRAQSGTTDSRAEFQRMIADSDKHIFEGVLVYQLDRFARNRYDSAINKAKLKKNGVRVISARENISDDASGILVEGVLESMAEYYSAELSQKIRRGMDINAEKCLSNGSNPGLGYYVDEERRFHVDTEGAAVVREIFEMYASGKTVAEITKYLNAKQVKTSQGKEFNKNSLHRLLRNKRYIGYYIYKDTETPDGMPRIIEDELFQRVQHIIDRNKKAPARSRGREEYLLTTKLFCGYCREMMTGYGGTGKSGTAYRYYACKSAKKKTCRKKVVNKQKIEDRVVLECRKLLTDSNIEKISLAVAAACEADYDSSAIRRIKAAIQEADAAIENLWKALERRQAVDMITERIEKRKREKDELQGQLAIEMGKQVTFTAPQIKAFLYSLKRGDVNDENNRRGMVNIFLRAIYLYDDRMTLILNGGDRPITIDDILLDEIEEHFESAVSGFVGCSPLVAAAPP

SEQ ID NO: 19372 - DNA, 50 bp, Oscillospiraceae bacterium
  source 1..50: mol_type = genomic DNA
ggtgttcaccgttggttgcggccgctccaccagatggacattggacgaac

SEQ ID NO: 19373 - DNA, 40 bp, Oscillospiraceae bacterium
  source 1..40: mol_type = genomic DNA
cgggttcaactcccgccacctccaccacgaaaaagtctgt

SEQ ID NO: 19374 - DNA, 50 bp, Oscillospiraceae bacterium
  source 1..50: mol_type = genomic DNA
ggtgttcaccgttggttgcggccgatccaccagatggacattggacgaac

SEQ ID NO: 19375 - DNA, 40 bp, Oscillospiraceae bacterium
  source 1..40: mol_type = genomic DNA
cgggttcgattcccggcccatgcagcacgaaaatgtgttt

SEQ ID NO: 19376 - protein, 531 aa, Vibrio parahaemolyticus
MSIAYSYIRFSSAQQAQGDSLRRQTQLAQRYCEDNNLTLSDTNFQDLGVSAFHSANAQEDGGLGQFLTALSEGLIPEGSYLLVESLDRLSRAKVQTALEQMLGILRRGVKIVTLMDHCIYDGDSDSRDLIISLTIMERAHNESKTKSERLKAAWDNKRQNPNSTNRHGSTPFWLTLNSDKRTYTVKEEYAELIRKIYQLSIDGWGLVKIVRYLNECGIPAPKGRSWAITTVSKLLNSKAALGHYEPSQGRKSLNTVIEDYYPSIIDEKTYYTSLQRKKERSAPESAGRKTTYPNPLVHIAKCRLCGSSMFFENKQPSLNYLTCREFKKKNCTNKPIRMELIYRFIYEVFNSPMYHQQHAKLVDKSKQKDINYHAELKGRYEAERKAYEELLEASSSFSDPFILKELQKRSTLILELSKQLEEAKAKETVEKARTVHINFTEALQLTVNAFHLPLEEVKVEELSTDELFNTRVRLNRILKQAFNHLSIFHCNESKRITIETEVTEDYPIDLRYETNQKAIKEPMKNRIWSVY

SEQ ID NO: 19377 - DNA, 50 bp, Vibrio parahaemolyticus
  source 1..50: mol_type = genomic DNA
aaagggttaatattgtgtacgtacttagtagcatgtaatatttacctttt

SEQ ID NO: 19378 - DNA, 40 bp, Vibrio parahaemolyticus
  source 1..40: mol_type = genomic DNA
atgtggtttcttcgtgaagttgattaacggaaacccaagc

SEQ ID NO: 19379 - DNA, 50 bp, Vibrio parahaemolyticus
  source 1..50: mol_type = genomic DNA
aaagggttaatattgtgtacgtacacagtagcatgtaatatttacctttt

SEQ ID NO: 19380 - DNA, 40 bp, Vibrio parahaemolyticus
  source 1..40: mol_type = genomic DNA
atgaggtttcatcttaaagacgaataaagaaaactcaaga

SEQ ID NO: 19381 - protein, 531 aa, Vibrio parahaemolyticus
MSIAYSYIRFSSAQQAQGDSLRRQTQLAQRYCEENNLTLSDTNFQDLGVSAFHSANAQEDSGLGQFLTALSEGLIPEGSYLLVESLDRLSRAKVQTALEQMLGILRRGVKIVTLMDHCIYDGDSDSRDLIISLTIMERAHNESKIKSERLKAAWDNKRQNPNSTNRHGSTPFWLTLNSDKRTYTVKEEYAELIRKIYQLSIDGWGLVKIVRYLNESGIPAPKGRSWAVTTVSKLLSSKAVLGHYEPAQGGKSLNTVIENYYPSIIDEETYYISLQRKKERSAPEAAGRKTTYPNPLVHIAKCRLCGSSMFFENKQPSLNYLTCREFKKKNCTNKPIRMELIYRFIYEVFNSPMYHQQHAKLVDKSKLKDVNKLAELKGKYEAKRKAYEELLEASTSFSDPIILKELQKRSTSILELSKQIEEAKAKETVEQARTVHINFTEALQLAVNAFHLPLEGVKVEELSTDELFNTRVRLNRILKQAFNHLSILHCNKSKRITIETEVTEDYPIDLRYETNQKAIKESMKNRIWSVY

SEQ ID NO: 19382 - DNA, 50 bp, Vibrio parahaemolyticus
  source 1..50: mol_type = genomic DNA
aaaaggttaatattgcataagtacttaatggtgtgtagtatttacctttt

SEQ ID NO: 19383 - DNA, 40 bp, Vibrio parahaemolyticus; identical to SEQ ID NO: 19378
  source 1..40: mol_type = genomic DNA

SEQ ID NO: 19384 - DNA, 50 bp, Vibrio parahaemolyticus
  source 1..50: mol_type = genomic DNA
aaaaggttaatattgcataagtacacaatggtgtgtagtatttacctttt

SEQ ID NO: 19385 - DNA, 40 bp, Vibrio parahaemolyticus; identical to SEQ ID NO: 19380
  source 1..40: mol_type = genomic DNA

SEQ ID NO: 19386 - protein, 526 aa, Eggerthella lenta
MARKKKFAPNDNNLAIAYYRFSSHSQNDASIDQQRELAHEWADAHGFKIVQEYEDAAISGTTDARPGFQQMLSEVAKIRPHTLIMWKTDRLGRDKYVLAMAKKKIRDAGCEIHLLAEHIPTEGPEGVLVEGLMEAMAEYYSRQLSQNIQRGMDYNAQHALYNGHKLFGYDVDRSTKKYIPDPNTAPFVQWAFKEYASGKPLKAIAEEMNAQGLRTPRNAKFSVNMLNKMLKNRAYIGEYHHGDIVVAGGMPVLVDEATFDRAQRRFAENKRKGSQRAHGMDDAEAPRYWLTGKLYCGECGSTMQGVSGTSATGRTYYYYYCSAQRRKECHLHKARKRDLEDMVLFALHNIVDDEENVTALALDAAEYYEKNHNGTAYLEALEAKRREVEKSLANLVKVIEKGVVSDTVTQRLAQLEEQKSALNDAIGTENVRVSLCEDRHSIQAYFDKFLHADVNDPEIRDQVFEYFVDKVYLYDDKLVVSMWFSEDDKQEITWRDWFSLDEYWTDESPFVKGGGVEFDCFPLGST

SEQ ID NO: 19387 - DNA, 50 bp, Eggerthella lenta
  source 1..50: mol_type = genomic DNA
agttcgactgcttccccctcggctccaccaaaagaggaagcgtcgaactc

SEQ ID NO: 19388 - DNA, 40 bp, Eggerthella lenta
  source 1..40: mol_type = genomic DNA
agttcgattctccgcgcctccaccactgacaacaggagcc

SEQ ID NO: 19389 - DNA, 50 bp, Eggerthella lenta
  source 1..50: mol_type = genomic DNA
agttcgactgcttccccctcggctctaccaaaagaggaagcgtcgaactc

SEQ ID NO: 19390 - DNA, 40 bp, Eggerthella lenta
  source 1..40: mol_type = genomic DNA
agttcttttccccgcttctctaccaatcaaaacaggtgcc

SEQ ID NO: 19391 - protein, 606 aa, Citrobacter braakii
MVMIQSIDADSESVKPLVQVTIYCRVSSLMQTDGYGLQRQQDAIRAYLEDFDVPKELGYEIDRDNYVLLEDAGKSAYHGYHFSKGQLGQFRQKVLEGEITSGLFIIENVDRFCRMEEYLAIQEFTNLINNGIDILEVDTGEIFSRKVRKSLNKLTVSIERAYAESDRKSKISKRSWNNRKRKSLEEGIAINNNTPDWLSLSDDKQSYIVNKERVEILNEIFKMYAEGFGGTAIVNKLNKEKRYYNKTSWSTNKFYHLLRNRRLIGYLGDERHYPVVIDSVLYEQVQSLLNGNVRKGKKAGTMMRSIFNGIAKCGFCGNGMICQTMTSSASYLRCIAERSKTTKCTHAKLIRYKEAERIILEHLCNINWDELKKCNSIHRDDIDVLKTQLSIITNKLQKLDLLIQETEDDDDKISLINIKNKNRKELTAIDGKISSLTTNVEVPDLEVLTSLNEIQNLANVELRQKVYSLLSKTVSSIECTRADAPDPFYTFTINYIGASEKHLLIVELKNNCKVTRFVEKISDDTVTYYTPSFVVAYSNNWESCLPEIRELQDCNGITIKADLIDCMHLFSILDRTNRGEAKVIRDWLVIPKVQEFFFHTGTYEEE

SEQ ID NO: 19392 - DNA, 50 bp, Citrobacter braakii
  source 1..50: mol_type = genomic DNA
gtaaaaatgtactaaacttcttccagcgtggcataaaaatacatgttatt

SEQ ID NO: 19393 - DNA, 40 bp, Citrobacter braakii
  source 1..40: mol_type = genomic DNA
ggcatcaatggcttcttccagcgtggcatacatggtcatc

SEQ ID NO: 19394 - DNA, 50 bp, Citrobacter braakii
  source 1..50: mol_type = genomic DNA
gtaaaaatgtactaaacttcttcccacgtggcataaaaatacatgttatt

SEQ ID NO: 19395 - DNA, 40 bp, Citrobacter braakii
  source 1..40: mol_type = genomic DNA
tgcatcaatggctttttctcacgttgcatacaaagacaaa

SEQ ID NO: 19396 - protein, 547 aa, Citrobacter freundii
MKLLVTYIRWSTKEQDSGDSLRRQTNLIDAFYSKHKNDYYLLPAHRYVDKGKSGFHQQHKNQGSDFRRMFENVMSGGIPEGSLIVVENFDRFSRADIDTAIDDVRQILRKGVSILTLGDGELYDKSALTDPVKLIKHIIIAERAHQESLVKQKRIAQVWNHKTQLARELKKPMGKQAPGWLELSDDGSHYIVDEDKASLVNLIFDKRLSGMSMFAICKWLNEQGYPTINQRKVRISKTKKPDGNWSALSVKHILTSRSVLGYLPVKLSTEDRKTVLREEIEGFYPQIVTDSKFYAVQQLLEETGKGKTSGGEHWLYVNILKGIVRCKCGLVMTPTGIRKPVYQGTYRCNGNKESRCNYGTVSRKLLDTQLCSRLFSKLSQLHNEATDTARLDELQRRLTTVDSELEKLTETLIQLPNITQIQEALRVKQEEKDELIAKLSREKARVKSVSSLDLSGLDMESVEGRTEAQIIIKRLVKEIVVSGNEKLVDIYLHNGNMIRGFPLDGKDDHTLTLEEATDEMQSLDDMLIFGEPVTRVYPAGDMEEVDA

SEQ ID NO: 19397 - DNA, 50 bp, Citrobacter freundii; identical to SEQ ID NO: 16632
  source 1..50: mol_type = genomic DNA

SEQ ID NO: 19398 - DNA, 40 bp, Citrobacter freundii
  source 1..40: mol_type = genomic DNA
atacatggaataataaagcaccagaacttttgccatttta

SEQ ID NO: 19399 - DNA, 50 bp, Citrobacter freundii; identical to SEQ ID NO: 16632
  source 1..50: mol_type = genomic DNA

SEQ ID NO: 19400 - DNA, 40 bp, Citrobacter freundii
  source 1..40: mol_type = genomic DNA
ataaatggaatcaaacagcacaaaatcttttgccatttac

SEQ ID NO: 19401 - protein, 571 aa, Mesorhizobium amorphae
MSTDIQLKGDSLRRQTERSKQYADEHGLDLVEDFKLEDIGVSAFKGDNLSSGALGKFLDAVKAGRIPRGSYLLVESFDRLSRQKLNASVSLFFDITSNGINLVTLSDNQLYKAGEAEFAQLIMSIVVMARANEESEMKSQRLSAAWDAKRRAVGEKKLTGLCPAWLELSEDRKDFYVIEDRAQVVRRIFEDSASGQGSFVITRRLNDAGIPAFGRSTGWVQSYVTKILQARAVLGEFQPHTKQNGRRVPLGDSIPGYYPQIVDENLFLRAQFARGKRRIEGGGRKGEALRNLFTHLATCGYCGAPMHFLNKGTGPRGGTYLKCRHALRGMDCVPTAWRYQDFERSFFLFVKEIDLAEMLRASSQKSEVLILDERAVALAEKKSELELKRERTYALIDDGAISVEFLTTKLRECEAELASVEQQIADVDGQRQEIREQQSISPDELRLLIDQLQQMEGPEAFLQRSMLATRLREIVTELKLEVEGSLPRQSRAAAFLDAADIDPQERNQILDHIERSNREALRYNRSFSVVLADGVSRRVVLRNDDPTDFVAEVLVDKDGTISGSDRGMPIG

SEQ ID NO: 19402 - DNA, 50 bp, Mesorhizobium amorphae
  source 1..50: mol_type = genomic DNA
cgccgtttaataagccacaatgttagaatattgtgagatattaaattact

SEQ ID NO: 19403 - DNA, 40 bp, Mesorhizobium amorphae
  source 1..40: mol_type = genomic DNA
acctggaggcccgaccatcaggaggttgtgaccgcccgcg

SEQ ID NO: 19404 - DNA, 50 bp, Mesorhizobium amorphae
  source 1..50: mol_type = genomic DNA
cgccgtttaataagccacaatgttctaatattgtgagatattaaattact

SEQ ID NO: 19405 - DNA, 40 bp, Mesorhizobium amorphae
  source 1..40: mol_type = genomic DNA
tcctggaagccactccatcctgaggttgtggcatcccgca

SEQ ID NO: 19406 - protein, 523 aa, Ruminococcus flavefaciens
MPMVGIYCRLSVEDRNKTDSDPSASIQHQKAMLCDYCHERDWTIYDIYIDDGYSGIDRSRPEFNRLLRDCENGNIDIVLCKDQSRFSRDTVVIEQFINDKFLEWGIRFIGIADNADTDSESYSTMRLFTSAYNEMYVKDISAKIRRTLAYKREQGQFIGSFAPYGYMIDPNDKHRLIIDEETAPVVRLIFDMYVSGYGYRKIVQHLNNDGIISPTEYKRQKGSKYVNKNADSSNAKGLWTQCTISRILANEMYTGTLVQGKSHHISYKNKKRKKVEPEDWIRIPDAHEPIIDSDTWSRTQERLKSHTRVGRVSKELSPLSGKVRCACCGRPMKRNVYYNKAKTIKYYSLQCATYKTGAMNCPNKSNISGLVLEKRILDELNAIIEKYCQTDKIEFGEIYTEQLNQLEADLAKLNERHSSAEQRLVSMYKDKLDGIISNEDYILFRQSLNNEEHEISEHINSINQQIAECRERKKNTEDQKAVIDKYTHFNELDRTVADEFIDYIEIGTLNDNSERQIHIHWKL

SEQ ID NO: 19407 - DNA, 50 bp, Ruminococcus flavefaciens
  source 1..50: mol_type = genomic DNA
tatccactccataagcacatcggtgataatatcacagcaaaaagccggac

SEQ ID NO: 19408 - DNA, 40 bp, Ruminococcus flavefaciens
  source 1..40: mol_type = genomic DNA
cagcgattcagctatatataatgtattcctgttctgcctg

SEQ ID NO: 19409 - DNA, 50 bp, Ruminococcus flavefaciens
  source 1..50: mol_type = genomic DNA
tatccactccataagcacatcggtaataatatcacagcaaaaagccggac

SEQ ID NO: 19410 - DNA, 40 bp, Ruminococcus flavefaciens
  source 1..40: mol_type = genomic DNA
caccatttcagctctatgtaattaattcttgttctgcttg

SEQ ID NO: 19411 - protein, 507 aa, Salinispora arenicola
MRDNLATVPVMRADLYARKSRKDQGRSVDRQERQWRRDCVEIGAQPGRIFADPDLSASRYARKSRPDYAQLLEHISSNQCEMISLWEVTRGSRQVGEWVHFLDLCRDRGVLIRIFDDSEQTTYDPRRQRDREFLINEGIKAEAEVERLRSRVSVGIVDAAEQGRPPGPLLYGYTRIYGPPTGTSVSASGNRRREITQVVDEKEAAIVRQLARDTLAGLPLQTQANRLNAAGVPTGSGRGVWTGERINRLLRNPGYEGHRVHGGRVVAEGVWPAILDSETATQLRALLEAPGRRNHADSSLAHQLSGAVLCGVCRGALRVKWMHGRNRYQCKHRGCFKVSGPLPQMDEAVKRMAVARLRQPDAVPAFTAGVPSVQLAAVRQELRRLMDRQAELYTEAAKPGGPSMALVAAVERELVPQIDEAQARLRTLQTPPALRGYDPIDLADRWDEYTVGERRAVIMALAEVVLSPVGRGTRWSLWRLGESRWHGDDRTWGDIWRNAGNLVSAVP

SEQ ID NO: 19412 - DNA, 50 bp, Salinispora arenicola
  source 1..50: mol_type = genomic DNA
tgtcccctcaactacgccccagctttagcgcttgttgacatgagggataa

SEQ ID NO: 19413 - DNA, 40 bp, Salinispora arenicola
  source 1..40: mol_type = genomic DNA
gagggcgtcggtgccggctttgacggcggcgtagtggacg

SEQ ID NO: 19414 - DNA, 50 bp, Salinispora arenicola
  source 1..50: mol_type = genomic DNA
tgtcccctcaactacgccccagctgcagcgcttgttgacatgagggataa

SEQ ID NO: 19415 - DNA, 40 bp, Salinispora arenicola
  source 1..40: mol_type = genomic DNA
gggggcggcggcggcggcggcggcggcggcggcggggacg

SEQ ID NO: 19416 - protein, 507 aa, Salinispora arenicola
MRDNLATVPVMRADLYARKSRKDQGRSVDRQERQWRRDCVEIGAQPGRIFADPDLSASRYARKSRPDYAQLLEHISSNQCEMISLWEVTRGSRQVGEWVHFLDLCRDRGVLIRIFDDSEQTTYDPRRQRDREFLINEGIKAEAEVERLRSRVSVGIVDAAEQGRPPGPLLYGYTRIYGPPTGTSVSASGNRRREITQVVDEKEAAIVRQLARDTLAGLPLQTQANRLNAAGVPTGSGRGVWTGERINRLLRNPGYEGHRVHGGRVVAEGVWPAILDSETATQLRALLEAPGRRNHADSSLAHQLSGAVLCGVCRGALRVKWMHGRNRYQCKHRGCFKVSGPLPQMDEAVKRMAVARLRQPDAVPAFTAGVPSVQLAAVRQELRRLMDRQAELYTEAAKPGGPSMALVAAVERELVPQIDEAQARLRALQTPPALRGYDPIDLADRWDEYTVGERRAVIMALAEVVLSPVGRGTRWSLWRLGESRWHGDDRTWGDIWRNAGNLVSAVP

SEQ ID NO: 19417 - DNA, 50 bp, Salinispora arenicola
  source 1..50: mol_type = genomic DNA
tgtcccctcaactacgccccggctttagcgcttgttgacatgagggataa

SEQ ID NO: 19418 - DNA, 40 bp, Salinispora arenicola; identical to SEQ ID NO: 19413
  source 1..40: mol_type = genomic DNA

SEQ ID NO: 19419 - DNA, 50 bp, Salinispora arenicola
  source 1..50: mol_type = genomic DNA
tgtcccctcaactacgccccggctgcagcgcttgttgacatgagggataa

SEQ ID NO: 19420 - DNA, 40 bp, Salinispora arenicola; identical to SEQ ID NO: 19415
  source 1..40: mol_type = genomic DNA

SEQ ID NO: 19421 - protein, 515 aa, Cognatishimia activa
MKVHVEKDVGIGTKAVIYCRVSDPKQTTRGDGLNSQETRCREFAKYKGYEVVAVFKDDMSGKYSMRPGMKETLSFLRKRRKTPHVLIIDDITRLARGLEAHIKLRADISAAGGILESPSIEFGEDSDSILVENLLASVSQHQRQKNGEQTKNRMRARLQNGYWPFQAPIGYRYERSSAGHGKVLVRDEPNASILQEALEGYASGRFQTQVEVKRFLERQPAFPKDLNGKEIRNQRVYEMLTRCLYAGYVEHADWGISVRKGQHEGLISYETHLKIQERLTSTAKAPARKDISLDFPLRGFIQCDDCGAALTACWSTSKTGKKHPYYLCKTKGCESYRKSIKRDQLEGDFEELLQRLEPSEGLFKLAKAMFKDVWDARLAQAADTSKTLKRDIHKIEKQIEALLDRIVESGVGSVIAAYEKRIGKLESEKALLEERVAMGGKPKNTLEESFELALRFLSSPWNIWKIGRIEWQKTVLRLAFSEPVRYSRNQGVRTPIFSFPFKVLEGFSTAESEMA

SEQ ID NO: 19422 - DNA, 50 bp, Cognatishimia activa
  source 1..50: mol_type = genomic DNA
ggattttcaactgccgaaagtgaaatggcgcgctccgtaggagaatgttc

SEQ ID NO: 19423 - DNA, 40 bp, Cognatishimia activa
  source 1..40: mol_type = genomic DNA
actaatttttaggaaggaaatggcgcacctgagaggattc

SEQ ID NO: 19424 - DNA, 50 bp, Cognatishimia activa
  source 1..50: mol_type = genomic DNA
ggattttcaactgccgaaagtgaatgggcgcgctccgtaggagaatgttc

SEQ ID NO: 19425 - DNA, 40 bp, Cognatishimia activa
  source 1..40: mol_type = genomic DNA
aataaatttaaggaaggaatgttctcaccttagagcaatc

SEQ ID NO: 19426 - protein, 573 aa, Nocardia farcinica
MTNSTTARPQIAVSYLRVSTTRQMDTGADVDAEGNSIATQREANNTKAARMGALIEKEFVEPGASAQTIDKRPVFKQLLAYLGEHPEVSLVIIYMRSRAFRNLGDAVITKRRLEAMGVKLVSAKEDFGEGIMADAMEAVTDIINEVQVRMSGEDIKVKMRHKAQMGGTNGRAPIGYRNVRLDHDGRQVNGIAVDEERAPLVKQAFELYATGDYSIDRLQETMADLGLRARPQGRGGAKELSRSHLHRMLSDPYYIGIVRYKGETFPGRHEPIISADLFERVQKVIEDRSARGQRDRVLYHYLKGLLYCERCRANGRISRLVYTEAKGNGGNYAYYLCLARQRGECDLPHLPVPDVEWYVLDHYAKLGLPPKFLAYIREAIDRAMTDAHAHVRGLHVTYRNKLDKLAQQEERLLDLAADGDLAPERIRARLRRIQTERTRAQQGLDDTGEQLELGARKLQQYLDLLDDPQSLYLRAPEDGRRDLNTASFSKLWLDDAGVVTDELTPAISELHEAARAFTRHNSASAADCAADNQQASDQGGNQKLPGDSREFRSNHRFRLADMFRVGSSKNVLV

SEQ ID NO: 19427 - DNA, 50 bp, Nocardia farcinica
  source 1..50: mol_type = genomic DNA
cggttcgagtaagaacgttttggtgcacacactgggacggtactcaggca

SEQ ID NO: 19428 - DNA, 40 bp, Nocardia farcinica
  source 1..40: mol_type = genomic DNA
tcggctcatcccggtgcccgccccgccggtgattcccggc

SEQ ID NO: 19429 - DNA, 50 bp, Nocardia farcinica; identical to SEQ ID NO: 19427
  source 1..50: mol_type = genomic DNA

SEQ ID NO: 19430 - DNA, 40 bp, Nocardia farcinica
  source 1..40: mol_type = genomic DNA
gctgctcatcccggtggccgccgcgcaggagcctcccgga

SEQ ID NO: 19431 - protein, 481 aa, Rhodococcus erythropolis
MRVAAYLRQSMDRDGNEYGIERQRKDVETLVAQRGWTIVETFIDNDVSATSRKPRPAFDRMMQLVDEGGVDVIVSRHVDRLLRKLAELESVMERCRAHGVVIVTASDGVDTSTDGGRLVARILASVGQGEVERKSARQKSATAQAAAQGRWIGGRRAFGYEADGVTIRPGEAEAIREGYAMILAGEPVTAVMRAWNDRGLKSTQNKRDGSPNTWARGGTRDVLLNPRNAGLRRHRPENSHEAFRQNPEAFIVGRAEWPGIVDEDTWRAAVRILVSPDRRRPAINAQALLTGVGRCGRCAAEGIDSTMHTGGARRHYRTYRCKTNPSHLARQAEPIEEYVEAVMVERLSRPDALSVFAPTVEAATRDLGAEAHNLRTLLDGLAIDYADGKITRQQLHTATERMRSRLSEVEAEMATAGAADLVAPLVTNGDVATAWADLTTPRKRTVIDALAVVTMLPLGRGRHRFTPESFAATIEINWRAT

SEQ ID NO: 19432 - DNA, 50 bp, Rhodococcus erythropolis
  source 1..50: mol_type = genomic DNA
aactgctatctagttgctcttggcgtccctaaggctgtagcttcgcagtt

SEQ ID NO: 19433 - DNA, 40 bp, Rhodococcus erythropolis
  source 1..40: mol_type = genomic DNA
ggcggaccgagcgttgcgggttgcctggagtgtcgccgat

SEQ ID NO: 19434 - DNA, 50 bp, Rhodococcus erythropolis
  source 1..50: mol_type = genomic DNA
aactgctatctagttgctcttggcggccctaaggctgtagcttcgcagtt

SEQ ID NO: 19435 - DNA, 40 bp, Rhodococcus erythropolis
  source 1..40: mol_type = genomic DNA
gccggacggagcggggcggggtggccggagtcccgcccat

SEQ ID NO: 19436 - protein, 481 aa, Rhodococcus erythropolis
MKPKATRELPRVAVYLRQSQDREGNEYGISRQRDEVMRLVAARGWTVVGEFVDNDVSATNRKPRPQFDAMMKAVDDGQIDVIVSRHVDRLLRKLAELESVIARCEPHGTTIVTAADGVDTSTDGGRLVARLLASVGQGESERRSARQLSAITQAAEQGRWIGGRRAFGYEADGKTIRPDEAAAVLAGYQAILAGEPVTAVVSAWNAAGFTGTQSGEPWQRSGVRDVLLNARNAGLRRHRPEGSNESYRKDPLAFVIAQAEWPAIVPEETWRAVVAMLTDSSRRTGTPGARALLTGVALCGVCDDGTSVNTGGARRTTRSYRCAAHAHLQRVAQPIEDYVEKLIVGRLSMPDALTAFAPTVVVNVAPLRAESDVLRRRLDDFAVDYSDGAMTRQQFRTATEKVRARLAKLEDEITAAGATDLIAPLVSSGDVAAAWSALSTARKRAVIDVLADVVIYSPGRGTRTFRPDTVEVDFHKRRSTG

SEQ ID NO: 19437 - DNA, 50 bp, Rhodococcus erythropolis
  source 1..50: mol_type = genomic DNA
ttacgccttacgcacgcgttaggtgtacctagggttgtagaatagcgtat

SEQ ID NO: 19438 - DNA, 40 bp, Rhodococcus erythropolis; identical to SEQ ID NO: 19433
  source 1..40: mol_type = genomic DNA

SEQ ID NO: 19439 - DNA, 50 bp, Rhodococcus erythropolis
  source 1..50: mol_type = genomic DNA
ttacgccttacgcacgcgttaggtggacctagggttgtagaatagcgtat

SEQ ID NO: 19440 - DNA, 40 bp, Rhodococcus erythropolis; identical to SEQ ID NO: 19435
  source 1..40: mol_type = genomic DNA

SEQ ID NO: 19441 - protein, 481 aa, Rhodococcus qingshengii
MKPKATRELPRVAVYLRQSQDREGNEYGISRQRDEVMRLVAARGWTVVGEFVDNDVSATNRKPRPQFDAMMKAVDDGQIDVIVSRHVDRLLRKLAELESVIARCEPHGTTIVTAADGVDTSTDGGRLVARLLASVGQGESERRSARQLSAITQAAEQGRWIGGRRAFGYEADGKTIRPDEAAAVLAGYHAILAGEPVTAVVSAWNAAGFTGTQSGEPWGRSGVRDVLLNARNAGLRRHRPEGSNESYRKDPLAFVIAQAEWPAIVPEETWRAVVAMLTDSSRRTGTPGARALLTGVALCGVCDDGTSVNTGGARRTTRSYRCAAHAHLQRVAQPIEDYVEKLIVGRLSMPDALTAFAPTVVVNVAPLRAESDVLRRRLDDFAVDYSDGAMTRQQFRTATEKVRARLAKLEDEITAAGATDLIAPLVSSGDVAAAWSALSTARKRAVIDVLADVVIYSPGRGTRTFRPDTVEVDFHKRRSTG

SEQ ID NO: 19442 - DNA, 50 bp, Rhodococcus qingshengii; identical to SEQ ID NO: 19437
  source 1..50: mol_type = genomic DNA

SEQ ID NO: 19443 - DNA, 40 bp, Rhodococcus qingshengii; identical to SEQ ID NO: 19433
  source 1..40: mol_type = genomic DNA

SEQ ID NO: 19444 - DNA, 50 bp, Rhodococcus qingshengii; identical to SEQ ID NO: 19439
  source 1..50: mol_type = genomic DNA

SEQ ID NO: 19445 - DNA, 40 bp, Rhodococcus qingshengii; identical to SEQ ID NO: 19435
  source 1..40: mol_type = genomic DNA

SEQ ID NO: 19446 - protein, 481 aa, Rhodococcus qingshengii
MRVAAYLRQSMDRDGNEYGIERQRKDVETLVAQRGWTIVETFIDNDVSATSRKPRPAFDRMMQLVDEGGVDVIVSRHVDRLLRKLAELESVMERCRAHGVVIVTASDGVDTSTDGGRLVARILASVGQGEVERKSARQKSATAQAAAQGRWIGGRRAFGYEADGVTIRPGEAEAIREGYAMILAGEPVTAVMRAWNDRGLKSTQNKRDGSPNTWARGGTRDVLLNPRNAGLRRHRPENSHEAFRQNPEAFIVGRAEWPGIVDEDTWRAAVRMLVSPDRRRPAINAQALLTGVGRCGRCAAEGIDSTMHTGGARRHYRTYRCKTNPSHLARQAEPIEEYVEAVMVERLSRPDALSVFAPTVEAATRDLGAEAHNLRTLLDGLAIDYADGKITRQQLHTATERMRSRLSEVEAEMATAGAADLVAPLVTNGDVATAWADLTTPRKRTVIDALAVVTMLPLGRGRHRFTPESFAATIEINWRAT

SEQ ID NO: 19447 - DNA, 50 bp, Rhodococcus qingshengii; identical to SEQ ID NO: 19432
  source 1..50: mol_type = genomic DNA

SEQ ID NO: 19448 - DNA, 40 bp, Rhodococcus qingshengii; identical to SEQ ID NO: 19433
  source 1..40: mol_type = genomic DNA

SEQ ID NO: 19449 - DNA, 50 bp, Rhodococcus qingshengii; identical to SEQ ID NO: 19434
  source 1..50: mol_type = genomic DNA

SEQ ID NO: 19450 - DNA, 40 bp, Rhodococcus qingshengii; identical to SEQ ID NO: 19435
  source 1..40: mol_type = genomic DNA

SEQ ID NO: 19451 - protein, 483 aa, Nesterenkonia jeotgali
MTRPNTGKPRAVLYLRQSVAREESISLELQETAGRDYAAKQGYRVVGVESDPGISGRTWKRPAVQRVMHMVEAGEADVIILWKWSRLSRSRMDWAVAADRVDQAGGRIESATEPLDVSTSTGRLARGMLTEFAAFESERIGDVWKESHERRVRAGKPANGKPRFGYTYDAVTKAFRPDPVSGPVLAEMYRRYLAGESVYSLVGWLNDGPTRPVQGYGVSVDGMWSARTVRRMLDSGFAAGYFTHRGELIEGIHEPLITADEWTEYQARRATRRVRRSSERSPYLLSGLIRCWCGATMNAGLFGSQRTAKYRCKAAGEKRLHTGGYVTTTVVEAAVLGWLQAVATDLEAAAKDQAPPPLQTKGPSEAQARRKLVKLQARLETLTTRYADDEIPREMYDRVRIKTQAEIAETETVFRDAQVEQIRPMRVVIPDLLREWDSLPIEARRDMLSRLIHPVVVRPMRPRSEVAVAGLWEAAPSVGEFRT

SEQ ID NO: 19452 - DNA, 50 bp, Nesterenkonia jeotgali
  source 1..50: mol_type = genomic DNA
gttcaggacctagtcatgagggtgactgttcctatgctcaccgcgtctgc

SEQ ID NO: 19453 - DNA, 40 bp, Nesterenkonia jeotgali
  source 1..40: mol_type = genomic DNA
caccgcgctcatcagggtgatcatcacccagccgggcacg

SEQ ID NO: 19454 - DNA, 50 bp, Nesterenkonia jeotgali
  source 1..50: mol_type = genomic DNA
gttcaggacctagtcatgagggtgggtgttcctatgctcaccgcgtctgc

SEQ ID NO: 19455 - DNA, 40 bp, Nesterenkonia jeotgali
  source 1..40: mol_type = genomic DNA
cacagtgcccatcagggtgggcaccgcccacccccccacg

SEQ ID NO: 19456 - protein, 514 aa, Pseudomonas fluorescens
MSQAISYIRFSSAKQGTGSSVERQEAMLGAWLKRHPEYVLSSIKYADYGKSGFKGEHLENGFGKLQAAIDFGVIPKGSVVLVEAIDRAGRLAPLKMIEVLSRILTAGVHIVTLDDEVMYTEESVNGPHLFLLAAKIQQANTYSENLSRRVTASYKSREVKAKAGKTIKRSVPMWLNSDGTLNPDVAPYMKQAFEDAAVGIGERRILRRLCEASSVFSGMTSTTLKRWMRNKTAIGYWPAMVDKDGNLVRDSEGNAVRDDIPNVYPPVVDADLFYRVQSVFNARKKFAAPTSNFLTGLVRCSECGSNYNKQISSRNPGIMDTMKCGQQNRENGKKCENVASIPIVVLEWIVKSTCLHAVRTALKSQHLSENGKRLIAIDVELQEVEKGLGNLASAIASVGAVPEIVAKLEMFRSQREELQNEKALLSGEAVELDITPESVEEALASGDILRLNAMLQSVSYVLTGADRNVSVGLQTFRYSGVDRKTGSFKIHHKGQVVLLERKLEGKAVQEDTSH

SEQ ID NO: 19457 - DNA, 50 bp, Pseudomonas fluorescens
  source 1..50: mol_type = genomic DNA
gggtgtctttttgcaactatttacaggcaggacgttgcaacaagacgccg

SEQ ID NO: 19458 - DNA, 40 bp, Pseudomonas fluorescens
  source 1..40: mol_type = genomic DNA
cggcgtggtcacaaacagcaggcaggtggacagggtgccc

SEQ ID NO: 19459 - DNA, 50 bp, Pseudomonas fluorescens
  source 1..50: mol_type = genomic DNA
gggtgtctttttgcaactatttacaagcaggacgttgcaacaagacgccg

SEQ ID NO: 19460 - DNA, 40 bp, Pseudomonas fluorescens
  source 1..40: mol_type = genomic DNA
cggcctgggcccgaacaggaaggaggggcacagagtgccc

SEQ ID NO: 19461 - protein, 500 aa, Corynebacterium belfantii
MWVWGTIGRMTATTAQRAAIYARISLDKQEEAGVKRQIHLATKHAEADEAKVVATYVDNNISAFSGDPRPDYNKLIHAIENREIDVVYVYTLDRLTRRTKDTLALFELCEKHNVTVKVNRGYNIDPSDPASRLTIVILGLIAEQESIDRAARIRAAYEDRARTGRPKTGGRRMFGYEADAETIIDEEAKAILDAVAMVIAGKTLRETVREVFHARSLTATSGRPMSAPTLRDILLNPRVRGLSTFNPTDPDTGKRLVKDRKIIGKGNWSAIIDEVTGEKLDAILRDPSRRLSHSGNAPRYFLASVLTCTCGEPMYSRSRRNKDGKPRRFYTCKRSEPGGTHVSIGAEVDDLIEAVILKRMEQPDAVDALRKALAPENNTLTERLLELSGRRNALLAKREQIENSAIDEEIDMPTFVRMSKKIEAQIAGLDGKMRELTTSHAADPLAVELVDVPDFAKWWGGASVEDKRRLTRLLMEIRILPGKPGAKKFDPHRVKITWLQ

SEQ ID NO: 19462 - DNA, 50 bp, Corynebacterium belfantii
  source 1..50: mol_type = genomic DNA
ttttcaacatctcggagagtaatactttgccccttaagccccatcggccc

SEQ ID NO: 19463 - DNA, 40 bp, Corynebacterium belfantii
  source 1..40: mol_type = genomic DNA
agattccgtccgcatccccctatgtctcgtttgtccactc

SEQ ID NO: 19464 - DNA, 50 bp, Corynebacterium belfantii
  source 1..50: mol_type = genomic DNA
ttttcaacatctcggagagtaataagttgccccttaagccccatcggccc

SEQ ID NO: 19465 - DNA, 40 bp, Corynebacterium belfantii
  source 1..40: mol_type = genomic DNA
ggtttctgtccccatcctcagatctctcttgtgtccacac

SEQ ID NO: 19466 - protein, 516 aa, Streptomyces violaceusniger
MRQPTCVIYDRLSRLFAEEAPDHRIAACKAYAEQRGWKVVHIATDTNVSGASRLEDRPGMREVLSWLPRADYVLASKLDRYARSVLEFQRLLDAAKSTRTTVVTADGVVSPENASIIINVLAAFAEYERDMITARITDSKKHFRARGNHLGGLAPYGYQVTGPVNDKRWVIDETSAAVVRDCADKLINHGASITGLTRELNERGIPSPADHARQRDGRKMRGTKWSSTTLRDVLYTPTLRGWLVQATPGDKRSALTNQPVLDVEGKPVSAGPEILSAAVWSAVRAVLDSKAKGRGVDRSGKSLLLHVARCSECDGPMYRQRREVNGKDQSTYVCRNGVGKRGIHKPNVITAHYLDELVSADYLKRFGTFALMRWAELDGSAVLQLSEVTAQIERLAGNLSALDPKGAAARVVISQLTALEQRQAELQAEAAHSEGRWVSSGGTVADAWKARDDEGRRALLTDLGARVVVRPATPGAPKRFDPQRVMPTYEGPAWWRELDPAAAHLEAIALEEELAV

SEQ ID NO: 19467 - DNA, 50 bp, Streptomyces violaceusniger
  source 1..50: mol_type = genomic DNA
gtgtatggttagggcaggcactcacccgggtgcctcgcctagcactgcat

SEQ ID NO: 19468 - DNA, 40 bp, Streptomyces violaceusniger
  source 1..40: mol_type = genomic DNA
gtgcacggtgccgcagccgccctcatggccggtgttcaag

SEQ ID NO: 19469 - DNA, 50 bp, Streptomyces violaceusniger
  source 1..50: mol_type = genomic DNA
gtgtatggttagggcaggcactcatccgggtgcctcgcctagcactgcat

SEQ ID NO: 19470 - DNA, 40 bp, Streptomyces violaceusniger
  source 1..40: mol_type = genomic DNA
gggcacggggcagctgccgtcctcatggcccggggtaacg

SEQ ID NO: 19471 - protein, 508 aa, Flavonifractor plautii
MQKYVIALYIRLSIEDYKYDSLSIENQSLVLHEYAASMPEALNAEIMEFIDNGYSGTNFERPQVQKLIELVRANQIDCIIVKDFSRFGRNSIETGYFIERVFPLFHTRFISISDDFDSSKFKGDTGGMDVAFKYLISEYYSRDMSIKTKSAKYAKMQRGEYQSKICPYGYRKSADGRMEPDPEAAAVVQLIFQLAAEGINATAITRELFRRSIPTPGQYKAAHGNHTHDISRCHGIWSTSTILRILEDERYTGVYVIGKRAVLEVGGTRSRLKDRESWYIIPDHHPAIIEKTVFDTVQASQLRFSQPNKKKRDYPLKGKAFCGCCGHALSRTMQKTSYYHCRHSEADEESRCHKMRLNAAELEQTVFLTLKKQMEAAAPLAPDGTLRVDASVPERAEYEQQIEALQDGKRALYERYLMGEIDLNTYKAEKTACDELLLKTKNAYAAVLAQAKQKQDEQARQDSRMEASKAIFDADTLTTELAELLIDRVLVYPDKRIEIAYKIQDIFD

SEQ ID NO: 19472 - DNA, 50 bp, Flavonifractor plautii
  source 1..50: mol_type = genomic DNA
tttgtcgtgtgcttgacatacgggtgcccttacggtataattacgacaaa

SEQ ID NO: 19473 - DNA, 40 bp, Flavonifractor plautii
  source 1..40: mol_type = genomic DNA
ggcgtgggtggcgaaggtatgccttaaatcatggaacctg

SEQ ID NO: 19474 - DNA, 50 bp, Flavonifractor plautii
  source 1..50: mol_type = genomic DNA
tttgtcgtgtgcttgacatacgggggcccttacggtataattacgacaaa

SEQ ID NO: 19475 - DNA, 40 bp, Flavonifractor plautii
  source 1..40: mol_type = genomic DNA
ggtgtgagtggcagaggcaggatttaaaccagggaacctg

SEQ ID NO: 19476 - protein, 461 aa, Eubacterium limosum
MVNRSRFEHIAGLRTGAYIRVSHEEQVKHGYSLDAQRENLEQFIKENRLKLVDFYMDEGISARKNPQKRKEFKRMITDVEAGNLDLIIFIKLDRWFRNIQEYYIAQQILEKNNVQWVATMEDYDTTTASGRLNLNIRLSIAQDEADRTSERIKFVFENKLKNKEVITGACPLGYKIENKHYVIDEETAPIARAVFDEYNDRQSKRKTLDAIYARFGMKLCARTVDRIIKNRLYIGEYKGIPDFAPALIDKNFFDEVNALFEKRSIRLNRTGRIFIFSGLIVCKECGRRLQASSTKYFNQQGQQCILIYRCAKHFVDNSCNNNRTVNEKKLEAYLLENVRPLLEQHVKYLVSKTKEAPAVNDGAKIKRRMEKLKELYVADLINIDDYRKDYEECQEALDHIEAQKNKAMAPDKIKAAEKFLSMDFETIYASLTREEQQQFWRKVIDKIIFDPETRDFSIIFL

SEQ ID NO: 19477 - DNA, 50 bp, Eubacterium limosum
  source 1..50: mol_type = genomic DNA
acttgtagtaaattgacatcaccagttggttatgtcaatttactacaata

SEQ ID NO: 19478 - DNA, 40 bp, Eubacterium limosum
  source 1..40: mol_type = genomic DNA
tttcgtcttcccagagcccgtgggcgcctctaaatagtac

SEQ ID NO: 19479 - DNA, 50 bp, Eubacterium limosum
  source 1..50: mol_type = genomic DNA
acttgtagtaaattgacatcaccacatggttatgtcaatttactacaata

SEQ ID NO: 19480 - DNA, 40 bp, Eubacterium limosum
  source 1..40: mol_type = genomic DNA
cattgtgttcccagagccccagggtccctcaaaatagcat

SEQ ID NO: 19481 - protein, 544 aa, Ochrobactrum anthropi
MNAQSPTVAVRAALYLRVSTARQAEHDVSIPDQRKQGEAYCAARGYQLVEIFVEPGNTATNDRRPEFQRMIEEGTSKPAPFDVVLVHSFSRFFRDAFDMEYYYRKLAKNGVRLVSITQELGDDPIHDMMRRIMALFDEYQSKENGKHVMRALKENARQGFWNGSLPPIGYRVVAAEQRGAKVKKKLEIDPLHAETIRLIYRLALEGEGSSGQMGVKAIVKYLNGKGIFTRDGGRWGIGQVHRVLTRRTYIGEHQFNKRSKSKELKPEEEVITVPVPPLIERETFDAVQKLLQARNPKTELPARVLIGPTLLTGICYCGNCGGAMTIRTGKSGRYRYYACSIKARQGETGCKGRAIPMDKLDNMIVSHIEERLLDPDRLEKLLGSVLGRREDQAERRREHIAELERRATESELRLKRLYDAIEAGVADLNDPALKERIAGLKVIRDQARADADRAQALLDSPGHSAISPAMIEGFARRARERIRGGEGGYRRDHLRALAQRVEVADDAIRIMGSKTELLRTLIAGQGRQSAAIGVPGGGLKWRRE

SEQ ID NO: 19482 - DNA, 50 bp, Ochrobactrum anthropi
  source 1..50: mol_type = genomic DNA
attggcgtgcccggaggcggtctgaaatggcggagagagagtccgctggt

SEQ ID NO: 19483 - DNA, 40 bp, Ochrobactrum anthropi
  source 1..40: mol_type = genomic DNA
gtctgttgtggggaaaatcaaatggcggagagagagggat

SEQ ID NO: 19484 - DNA, 50 bp, Ochrobactrum anthropi
  source 1..50: mol_type = genomic DNA
attggcgtgcccggaggcggtctggcatggcggagagagagtccgctggt

SEQ ID NO: 19485 - DNA, 40 bp, Ochrobactrum anthropi
  source 1..40: mol_type = genomic DNA
gtctgatgtggtgaggatagcatggctcagagaggggaat

SEQ ID NO: 19486 - protein, 592 aa, Mesorhizobium ciceri
MNRSSSKPLAYSYVRMSTDIQLKGDSLRRQEQASKLYAEQNDLQLVEDFKLEDIGVSAFKGANVVSGALGKFLTLIKNGGVPKGSYLLVESLDRISRQQVMDSLTVFFDIIRNGVSVVTLADSHVYRAGEAEITDILYSLIILSRAYEESATKSLRVGEAWRNKRDNASRKKLTKMAPAWVVLREDRSTFDLIPERAEVVRQIFQMADAGHGSFAIARRLNHTKVPTFTKSNGWHESYVTKILRSRAALGEFQPHRYDDKGNRIPYGDPVPDYFPRIVDEDQFLRIQSSRRRRLVDGAGRKGPEYRNLFTKIAKCHYCGEPMRFVHKGRPPKGSQALKCTNAVRNLGCDSTSWKYSDFETSFLFFVKEIDLTATLRAASDSSERATIEQKIAANDEKLHQLRAKQEATFDLVSMPGPSSGFLKSKLDQIADEIIETEQQLAQLKADLAETQFLPSISASELRSQIDSLQDMSAADIFDRRAVVANRLRSIVTSLRIAAKGSKPRLKKIADALEDEDVNEDYRRKLLAHIDDANSLTQSHNRTFTVTLADGVQRLVVVKGDDPTDFVSEVLIDADGKTSGSILGNAFNFLPTA

SEQ ID NO: 19487 - DNA, 50 bp, Mesorhizobium ciceri
  source 1..50: mol_type = genomic DNA
tgggaattataccgctacaggatccacatcgtgtgatggattaatttcaa

SEQ ID NO: 19488 - DNA, 40 bp, Mesorhizobium ciceri
  source 1..40: mol_type = genomic DNA
gccgggcaaggtcggcatgcagatcgtcggcctgccggac

SEQ ID NO: 19489 - DNA, 50 bp, Mesorhizobium ciceri
  source 1..50: mol_type = genomic DNA
tgggaattataccgctacaggatccccatcgtgtgatggattaatttcaa

SEQ ID NO: 19490 - DNA, 40 bp, Mesorhizobium ciceri
  source 1..40: mol_type = genomic DNA
gcagggcgaggcgggcacgcccagcggcggcctgcaggac

SEQ ID NO: 19491 - protein, 611 aa, Mesorhizobium amorphae
MNSAAPKPLAYSYIRMSTDIQLKGDSLRRQEQASKRYAEQNDLQLVEDFKLEDIGVSAFKGANVASGALGKFLALVKSGGIAQGSYLLVESLDRISRQQILDSVPVFFDIIKNGINVVTLADNHVYRAGDTNLNDVIYSVIVLGRAYEESKTKSMRVGEAWKNKRNNAGHRKLTKVAPAWLVLREDRSSFDVVPERVDVVRQIFQLADAGHGSFVIARRLNQSSVPTFTKSNGWHESYVTKILNNRAVLGEFQPHRYNEHGDRVPSGDPVPGYFPDIIDEDQFLRIQASRRRRLVEGAGRKGPEYRNLFTKIAKCHYCGAPMRFVHKGRPPKGSQGLKCTNAVRNLGCDSSSWKYSDFETSFLFFVKEIDLSATLQAAAENSERSSIEQQIIAAEEKLLQLKEKQDAIFELVATPGSSATFVKAKLDQCADEIAAADRLIGELRERLVAIQPLPSISPSELRSQIDALQDMSAPDIFERRAVVANRLRSIVSSLRVAVSGNQPNLRKLAQALQEQGLDPEYQERLLAHMESTELASQGYNRTFNVMLADGVRRLVVVKSDDPSDFVAEVVIDKTGMVSGSDHSGRSLDFFNEWRRDSAAWDAVFDEPSGTQ

SEQ ID NO: 19492 - DNA, 50 bp, Mesorhizobium amorphae
  source 1..50: mol_type = genomic DNA
gtgtaattattccacttcatgatccagatggtaaggcggattaatttcta

SEQ ID NO: 19493 - DNA, 40 bp, Mesorhizobium amorphae; identical to SEQ ID NO: 19488
  source 1..40: mol_type = genomic DNA

SEQ ID NO: 19494 - DNA, 50 bp, Mesorhizobium amorphae
  source 1..50: mol_type = genomic DNA
gtgtaattattccacttcatgatcccgatggtaaggcggattaatttcta

SEQ ID NO: 19495 - DNA, 40 bp, Mesorhizobium amorphae; identical to SEQ ID NO: 19490
  source 1..40: mol_type = genomic DNA

SEQ ID NO: 19496 - protein, 540 aa, Blautia obeum
MKQPYNTTIYNTALYLRLSRDDELQGESGSIQTQRMMLRQYAAEHGLTVVDEYIDDGWSGTNFERPSFQRMIDDIEDGKINCVVTKDLSRLGRNYILTGQYTEIYFPSKGVRYIAINDNVDTINGESELAPFLNILNEMHARQTSKKVKAAMRTRFANGAHYGAYAPLGYVKDPDKKGHLLIDPETRWIVEKIFDLAVHGRGAASITRILVEEKVPTPGWLNYERYGTFANIYAGVPAEKAYAWTIAQVKSILKEETYIGHSVHNKQSNISFKNKKKVRKPQEEWYRVENTHEAIISEEVFQKVQELIASRRRKRRNGTTQIFAGLIKCADCGWSLAYGENKQNKNPYGYYHCSKNGQGLRQCSMHYIRYDVLYAYVLARLQYWSMLAQKDEDKLLKRLLNASDRERNSAKKKQAAELKKAEKRKAEVDGLFAKMYEDWSAGRITEYNFNMLSEKYQNEQKELETKIRQLHETMEAAVQTAADAEKWIALMKRYVNPVELTAELLNTLIEKITVHEAVKGEDGSREQEVEIYYRFIGKID

SEQ ID NO: 19497 - DNA, 50 bp, Blautia obeum; identical to SEQ ID NO: 3657
  source 1..50: mol_type = genomic DNA

SEQ ID NO: 19498 - DNA, 40 bp, Blautia obeum
  source 1..40: mol_type = genomic DNA
tatatcaaagtgggagtctgggaaagcagttccggaaacc

SEQ ID NO: 19499 - DNA, 50 bp, Blautia obeum; identical to SEQ ID NO: 18389
  source 1..50: mol_type = genomic DNA

SEQ ID NO: 19500 - DNA, 40 bp, Blautia obeum
  source 1..40: mol_type = genomic DNA
catataacagtgggagcctctgaaagcagtgctggaggct

SEQ ID NO: 19501 - protein, 450 aa, Metabacillus idriensis
MVKAALYIRVSTQEQIENYSIESQRERLEAYCKAKNWEVHNVYIDGGFSGSTLDRPDLKRMLQELKNIDAVVVYRLDRLSRSQKDTLELIEEYFLKNDVDFVSITETLDTSTPFGKAMIGILSVFAQLERETIAERMRMGHIKRAENGLRGMGGDYDPAGYTRKEGFLVPLDHEVKHIQRAFDLYEQYHSISKVQEILKEEGYTVWRFRRYRDILSNELYSGFVKFAGKAYKGQHEAIITQTQFERVQALLKRHKGKNTHKAKTSLLTGLLVCQCCGEPYVSYSTGISKNNPKKYYYYICKAKRFPSEYVEKCMNKTWNKKKLESIVLEELKNISTKKVTEQKEKSSVNYEKLIKDVDRKMERLIELYTNEKINNDLLEKQLNKLNSEKEKIIVKQQISNEDSQLITDDMLSNIQSNLDNLEFKDKQAIVQSYIREININGDNVLIEWRF

SEQ ID NO: 19502 - DNA, 50 bp, Metabacillus idriensis
  source 1..50: mol_type = genomic DNA
tttatgttttcattacgggctatgcaactagcaggtattgaatactaaaa

SEQ ID NO: 19503 - DNA, 40 bp, Metabacillus idriensis
  source 1..40: mol_type = genomic DNA
ttctgtttttcctgcaccgcatacagcccagattagcaga

SEQ ID NO: 19504 - DNA, 50 bp, Metabacillus idriensis
  source 1..50: mol_type = genomic DNA
tttatgttttcattacgggctatggcactagcaggtattgaatactaaaa

SEQ ID NO: 19505 - DNA, 40 bp, Metabacillus idriensis
  source 1..40: mol_type = genomic DNA
ttctgtttttcctccagcagctacagaacagaatactaca

SEQ ID NO: 19506 - protein, 479 aa, Mycolicibacter terrae
MVKAKPAAQRTAVRSAAIYARISADVEGTGLGVARQLEDCRRLAADRDWPVGDEYVDNDVSAFSGKRRRDYERMLADLQSGARDAVIVYNLDRLHRQPAELEDFVALCERVGVSQVATVTADIDLGNDDGLFMARIFAAFAAKESGRKSARIRRKMLQNAEAGLPHGSVRPFGYEADKITVRESEAVVVREMADRYLAGQSLRSLTLWLNDSGIAPAVAKSWQTSAVRQILCSGRIAGLREHRGEVIGPAKWPPIITPAERDRVLARMASRSVTKTRAARTYLLSGLLRCGRCGNRLYSQARHSNPDNRVRRYVCLKGPDHGGCGRLTVVAAPVEDLLTDAVLARLDSPHLAKVLAGKSSPDRDVAALAAQVETDQARLDELATLYADGAVTAREWIAARDPITSRIQHARRDIATATDTTAVYELAGTGGALREQWSDLDLGRQQAIVKSILDHAVIAPGTPGVRSLDINRVQPHWRI

SEQ ID NO: 19507 - DNA, 50 bp, Mycolicibacter terrae
  source 1..50: mol_type = genomic DNA
ggggtagtttaagaacttgtgagcaaggttaaatgtcgctaaactaccct

SEQ ID NO: 19508 - DNA, 40 bp, Mycolicibacter terrae
  source 1..40: mol_type = genomic DNA
cgggccgacggcagcctggaacctcaagtgcatgtgccgg

SEQ ID NO: 19509 - DNA, 50 bp, Mycolicibacter terrae
  source 1..50: mol_type = genomic DNA
ggggtagtttaagaacttgtgagcccggttaaatgtcgctaaactaccct

SEQ ID NO: 19510 - DNA, 40 bp, Mycolicibacter terrae
  source 1..40: mol_type = genomic DNA
gggactgacgggagcgtggcccctcaggggcaggtgcctg

SEQ ID NO: 19511 - protein, 454 aa, Bacillus wiedmannii
MIILTKAAIYIRVSTQDQIENYSIEVQRERIRAFCKAKNWDIYDEYIDGGYSGSNLERPGIKKLITDLKNIDAVVVLKLDRLSRSQRDTLELIEEHFLKNNVDFVSITETLDTSTPFGKAMIGILSVFAQLERETIAERMRMGHIKRAENGLRGNGGDYDPAGYTRQDGHLIIKKDEAEHIKRVFDLYEQYYSITKVQEILKEEDYPIWRFRRYRDILSNTLYIGQVTFSGKEYKGQHEPIISSEQFKRVQALLKRHKGHNAHKAKQSLLSGLITCSCCGENYVSYSTGKSKDVESKRYYYYICRAKRFPAEYEEKCMNKTWSRKKLEEVIISELKNLTEEKKQTNKKEKKTNYEKLIKDIDKKMERLLDLFMNTTNISKSLLEQQMEKLNVEKEKLLLKQQRSEEESISHEVTLAAIDDAFETLDFKEKQVMINNFIEQIYINQNNVKIIWRF

SEQ ID NO: 19512 - DNA, 50 bp, Bacillus wiedmannii
  source 1..50: mol_type = genomic DNA
tttatgtattcatttccggctattcaagtagctagtcttgaataccgaaa

SEQ ID NO: 19513 - DNA, 40 bp, Bacillus wiedmannii
  source 1..40: mol_type = genomic DNA
ttcagtttttccagccccgcacacagcccaaataaaaaac

SEQ ID NO: 19514 - DNA, 50 bp, Bacillus wiedmannii
  source 1..50: mol_type = genomic DNA
tttatgtattcatttccggctattggagtagctagtcttgaataccgaaa

SEQ ID NO: 19515 - DNA, 40 bp, Bacillus wiedmannii
  source 1..40: mol_type = genomic DNA
tgcagtccctccagccccgggcccagcccagattgacaac

SEQ ID NO: 19516 - protein, 494 aa, Aeromonas dhakensis
MLYHIYSRISSTKQTQGVGLDRQEQLALDYAKRNNFEVANISSDVASAYHSKHMEGKLGAFMESIATKEIVVPCGLIVESLDRLGREHELTALSRFIDIVQSGVEIHEVSTGIIYNQKDTHLLHVALSIMTRAYNESLMKAKRSNDAIQRKLGEAQNGKIIRTNVPAWIDVQGDKLVLNEHQTTVKSIFDMYLSGMSFRPIARTLNTGNVPYMAPKIAKKGPNNGSYNWTSSRILTVLASSAVYGVYTPKTGEPIENYYPACVDEATWLKAKEIRESRKVHAAKVNDLLSVLSSCCVCSLCGLSYIANLRSWETKEGKQTSVGMRCNSRQMGSTCKGKLVPNEHLEKYILPLVPNLDITKLNRTKMKTLDNLKARHQQLTEQQSTLLDLVVMGSAAAKEKFIQLEEKIEILKEKIEKAQARIVVDATEDVSLLALDTQNLEIRRKVNTALQLMELKVHVECTQTGTAKIKMQLKNVTVHEGTLKWSRKKRIDSK

SEQ ID NO: 19517 - DNA, 50 bp, Aeromonas dhakensis; identical to SEQ ID NO: 19197
  source 1..50: mol_type = genomic DNA

SEQ ID NO: 19518 - DNA, 40 bp, Aeromonas dhakensis
  source 1..40: mol_type = genomic DNA
tgcggcggggtgccgaccgacgtgcgcatcaccacccgct

SEQ ID NO: 19519 - DNA, 50 bp, Aeromonas dhakensis
  source 1..50: mol_type = genomic DNA
cgtgtagtatcgttgtacgctgcgggctaagcacggcagtatgccacaaa

SEQ ID NO: 19520 - DNA, 40 bp, Aeromonas dhakensis
  source 1..40: mol_type = genomic DNA
tgcggccgggtgcggcccgggtcccgcgtcacctcccgca

SEQ ID NO: 19521 - protein, 656 aa, Vibrio parahaemolyticus
MSIQGDDTLIEALAKKYNTHVGPRVYQDEGKSAYKGMNLDSELGEFLQDIESGAVKAGDILVCRALDRISRLGLTKALNVYGRIMESGVMIHTTMDDRLYKPNDQLSQILATLAFNTANEESEKKSYLTNKYALTRIEQFQTGKRSADGYSFDIGVGKHPWYIKLDNKIVKPHPEKFQLARELVDLALGGKGVASCRSYAKEQGLELSHSGMARFFKTPALYGKLVVQLEDKEATRKHPNREKQYLTRELDGYYPAVCSKTEFLRIQKIKQLHVDTNVPRKNVISMLAGAKRLYCPNGYSMIASVKNSLPFYRCGFMDCKCSTYVPQYSLNRMILETLQHHVFIPQVEDNHLLLDLEIELEQKTNEFKKRQRMVLENPDLFDSEAMMKLAEDKADIEAISTKLDAERENQASVLSYAGGLTLKHHQEWLQQTSEYLEATDEETIKSVRERLKTVVRRIELDNGLVRVHLADGSCTVLYMPRWKDARKRSYLKLQVVNDLEKQGAVSLNPAMAFVCFTKQELKAGLHVFPAEDYPAGLLKPCSKPIEKIDHKEVFLSKIREIEAVQWKRKPVMDAGVKDYQWQEFKDLNMAAEGFFVYDVEWKTKSYTKRSGQVVSVNELQEVDLKELLASPKIDSFKLVRFAYDIMIQSAELALDV

SEQ ID NO: 19522 - DNA, 50 bp, Vibrio parahaemolyticus
  source 1..50: mol_type = genomic DNA
tccaagattctcatgcacgaatctttagcgtcagccaacaaataatacat

SEQ ID NO: 19523 - DNA, 40 bp, Vibrio parahaemolyticus
  source 1..40: mol_type = genomic DNA
aatcgcctctacgctttctttcgcatcgccaaacagcatc

SEQ ID NO: 19524 - DNA, 50 bp, Vibrio parahaemolyticus
  source 1..50: mol_type = genomic DNA
tccaagattctcatgcacgaatctaaagcgtcagccaacaaataatacat

SEQ ID NO: 19525 - DNA, 40 bp, Vibrio parahaemolyticus
  source 1..40: mol_type = genomic DNA
tatcgctccttctctttcaaacggattgccaaacagcatt

SEQ ID NO: 19526 - protein, 498 aa, Clostridium perfringens
MKRIAIYSRKSVYVENSESIETQINMCKAYFTRQFKDCEFEIFEDEGFSGKNTDRPAFKRLMKLCSIKSFDAVAVYKIDRLARNIVDFMNIYNELEKLEIKLISITEGFDPTTPIGKMMMVMLAGFADMERMNIAQRVKDNMISLAKKGCWTGGIIKRGYTVEEKEDGKKYLKLENEDFIKFTFENFLKGYSMHKLSKMQKENYGSYGLGSAIAVRNMLRSPVYVKSSKDVSDYLEKKGFEVVGKEDNLHGYLTYGVSSKEPCAIVSKHKAIIDPIEWLKVNTKLDNIKSKALTKTSKCYWLTGVLKCPYCKANYVLANVRGNSYYTCSTRLKRGANNPKTCENRKYVNAIELENLIEDLIIKLYSKDYFDSFFCNSEKVYEDNTLELEAKLKRNEKSIMNLVEKLALIDNSNPATKFITDKIEKLSREISEIKINIEENKFNKLEQKLNQSTPDIIYNNISNFAECKTLEEKRLRLKLIFESIYYEPNTKSIEVEFI

SEQ ID NO: 19527 - DNA, 50 bp, Clostridium perfringens
  source 1..50: mol_type = genomic DNA
gttatcagatttgtaaattaagcagtttcttaatttacaaatctgataat

SEQ ID NO: 19528 - DNA, 40 bp, Clostridium perfringens
  source 1..40: mol_type = genomic DNA
atttgaaataaatgaagctgttccgttaaatacatctaca

SEQ ID NO: 19529 - DNA, 50 bp, Clostridium perfringens
  source 1..50: mol_type = genomic DNA
gttatcagatttgtaaattaagcaaattcttaatttacaaatctgataat

SEQ ID NO: 19530 - DNA, 40 bp, Clostridium perfringens
  source 1..40: mol_type = genomic DNA
atttgaaataaattcacttaatcagatatatacatatata

SEQ ID NO: 19531 - protein, 545 aa, Brucella pseudogrignonensis
MNKHSPTTTARAALYLRVSTARQAEHDISIPDQKRQGEAYCEQRGLQLVETFIEAGATATNDKRPEFQRMIEAGTTKPAPFDIVVVHSFSRFFRDHFEMEFYVRKLAKNGVKLVSITQEMGDDPMHQMMRQIMALFDEYQSKENAKHVLRAMNENARQGFWNGARPPIGYRIVAAEQRGSKIKKKLEIDPLHADTVRLIYRLFLEGDGTSGAMGVKAIATYLNERRFFTRDGGRWGLAQIHAILTRTTYIGEHRFNTRSHKDREKKPESEVAIMAVPPLIERETFDAVQARLKSRNPMVTPARVSSGPTLLTGICFCAKCGGAMTLRTGQGSTGATYRYYTCSTKARQGKTGCKGRTIPMDKLDHTVADYIGDRLLLPKRLETVLASVIDRRQERTERRREHLAELQRRITEADQRLGRLFDAIEAGMVDKDDAMAKERMVSLKALRDQAAADAERTQLALDSSGNQGVTPDMLKGFARKARERIKLNDGGYRRDHLRALAQRVEVADDEVRIMGSKSELLRTLVAASSVETAAFGVHSSVLKWR

SEQ ID NO: 19532 - DNA, 50 bp, Brucella pseudogrignonensis
  source 1..50: mol_type = genomic DNA
ttcatagttctgttctgaaatggcgcgccccgccgggtgatgatgagaac

SEQ ID NO: 19533 - DNA, 40 bp, Brucella pseudogrignonensis
  source 1..40: mol_type = genomic DNA
ttctttgaagaagaatggcgcacccgaaaggattcgaacc

SEQ ID NO: 19534 - DNA, 50 bp, Brucella pseudogrignonensis
  source 1..50: mol_type = genomic DNA
ttcatagttctgttctgaaatggcgggccccgccgggtgatgatgagaac

SEQ ID NO: 19535 - DNA, 40 bp, Brucella pseudogrignonensis
  source 1..40: mol_type = genomic DNA
ttctttggagaagactggtggatagaaaaggattccaact

SEQ ID NO: 19536 - protein, 532 aa, Faecalibacterium prausnitzii; identical to SEQ ID NO: 21

SEQ ID NO: 19537 - DNA, 50 bp, Faecalibacterium prausnitzii
  source 1..50: mol_type = genomic DNA
gagctgctgcccgccggaagtctgaccaagacaatgggcatccgcacaac

SEQ ID NO: 19538 - DNA, 40 bp, Faecalibacterium prausnitzii
  source 1..40: mol_type = genomic DNA
ttgtcgctcgctcaagctactcaaaacaatgaggccgttc

SEQ ID NO: 19539 - DNA, 50 bp, Faecalibacterium prausnitzii
  source 1..50: mol_type = genomic DNA
gagctgctgcccgccggaagtctgatcaagacaatgggcatccgcacaac

SEQ ID NO: 19540 - DNA, 40 bp, Faecalibacterium prausnitzii
  source 1..40: mol_type = genomic DNA
ttgtcgttggcacaaggaaatcaaaacaatggggtgattc

SEQ ID NO: 19541 - protein, 481 aa, Streptococcus agalactiae; identical to SEQ ID NO: 2986

SEQ ID NO: 19542 - DNA, 50 bp, Streptococcus agalactiae; identical to SEQ ID NO: 2997
  source 1..50: mol_type = genomic DNA

SEQ ID NO: 19543 - DNA, 40 bp, Streptococcus agalactiae
  source 1..40: mol_type = genomic DNA
tgataatacaataaggctctccaaaacagtaaatgcttta

SEQ ID NO: 19544 - DNA, 50 bp, Streptococcus agalactiae
  source 1..50: mol_type = genomic DNA
taaagaaatttactatccttggttggaatcaaggttactaaaattattga

SEQ ID NO: 19545 - DNA, 40 bp, Streptococcus agalactiae
  source 1..40: mol_type = genomic DNA
tgataggccaaaaaagctaggcacaagagtaaatgctgta

SEQ ID NO: 19546 - protein, 481 aa, Streptococcus agalactiae; identical to SEQ ID NO: 391

SEQ ID NO: 19547 - DNA, 50 bp, Streptococcus agalactiae; identical to SEQ ID NO: 1812
  source 1..50: mol_type = genomic DNA

SEQ ID NO: 19548 - DNA, 40 bp, Streptococcus agalactiae; identical to SEQ ID NO: 19543
  source 1..40: mol_type = genomic DNA

SEQ ID NO: 19549 - DNA, 50 bp, Streptococcus agalactiae
  source 1..50: mol_type = genomic DNA
taaagaaatttactatccttgattggaatcaaggttactaaaattattga

SEQ ID NO: 19550 - DNA, 40 bp, Streptococcus agalactiae; identical to SEQ ID NO: 19545
  source 1..40: mol_type = genomic DNA

SEQ ID NO: 19551 - protein, 481 aa, Streptococcus agalactiae; identical to SEQ ID NO: 2986

SEQ ID NO: 19552 - DNA, 50 bp, Streptococcus agalactiae; identical to SEQ ID NO: 1812
  source 1..50: mol_type = genomic DNA

SEQ ID NO: 19553 - DNA, 40 bp, Streptococcus agalactiae; identical to SEQ ID NO: 19543
  source 1..40: mol_type = genomic DNA

SEQ ID NO: 19554 - DNA, 50 bp, Streptococcus agalactiae; identical to SEQ ID NO: 19549
  source 1..50: mol_type = genomic DNA

SEQ ID NO: 19555 - DNA, 40 bp, Streptococcus agalactiae; identical to SEQ ID NO: 19545
  source 1..40: mol_type = genomic DNA

SEQ ID NO: 19556 - protein, 478 aa, Streptococcus agalactiae
MNKVAIYVRVSTTNQADEGYSIDEQIDKLKAYCEIKDWVVYKVFTDAGFTGSNIDRPAMTNLISAAKKRQFDTILVYKLDRLSRSQKDTLYLIEEIFIKNGIDFLSLSENFDTSSAFGKAMIGILSVFAQLEREQIKERMMLGKVGRAKSGKTMMWAHPAYGYTYNKETSSLDIVPAEAALIKKIYELYIKGKSISKLRDYLNDNKIFVNKSVPWSHRTISYALTNPVYCGMIRYEGKLYDGLHEPIITKELFNKTQEVLAERRMEASKKNPRPFQSKYMLSGIIRCGCCNAPMKSLLGMPRKDGTRTRRYQCINRFPRKTKPVTVYNDNKKCDSGYYYMEDVEHAVLHRISTLYSDEIEASEFFEDEITFDIQKVKDEITKIESKINKLNDLYINDFISLDSLKKQSANLINEKKIIENEIEKENSKQVNNLKEDALKILATNNIHDLDYEMQSYVVKSLIDKVFVTKEDMEILFKK

SEQ ID NO: 19557 - DNA, 50 bp, Streptococcus agalactiae
  source 1..50: mol_type = genomic DNA
tagagtgtttaacttacacttatttcaataaatgtacataaaacacttat

SEQ ID NO: 19558 - DNA, 40 bp, Streptococcus agalactiae; identical to SEQ ID NO: 19543
  source 1..40: mol_type = genomic DNA

SEQ ID NO: 19559 - DNA, 50 bp, Streptococcus agalactiae
  source 1..50: mol_type = genomic DNA
tagagtgtttaacttacacttattggaataaatgtacataaaacacttat

SEQ ID NO: 19560 - DNA, 40 bp, Streptococcus agalactiae; identical to SEQ ID NO: 19545
  source 1..40: mol_type = genomic DNA

SEQ ID NO: 19561 - protein, 521 aa, Pseudomonas guariconensis
MPTAFSYARFSASVQRKGSSLERQEKMIADWLMQHPEYQRSELSFRDLAKSGWKGEHIKDGGGFAKLLAAVEAGAIQSGDVVLVEAIDRAGRLHTGDMLGKVILPIVKAGVSIITLDDGAVYDWASINTPQSHLLLAKIQAAQQYSDNLSRRLKGSYDSRRRLAKEEKKTPKRHTPVWLTSKGEVIEEIAAQVKLAFELYTSGLGKAVIAKRIRDSGVAALAKTSGPGVEGWLRNEAAIGRWNGVQVYESIVDLSLYQLAQIEGEKRKTAPRVKTATHFLVGLVKCGDCGHNFIMRTIQGVQVSMRCRRRQELKGCSNKKVIPKEIIDTIYRLSSATAALDVVNREHSGVNEKAIIDAETRLLEISKQMQDLSAAIVAVGFIPEVQAQLKQKQEEREAVECELTLLKTTIVPAANGWVEQGKVWELERNDPQRLAAMLRSVGYSITIYPDARIVPSHQNITYRYAGVDRRENKYKLMQDDKLTLVLKGANQDYPYWEPFEEVAGEVTWSDEDYENLRQQYE

SEQ ID NO: 19562 - DNA, 50 bp, Pseudomonas guariconensis
  source 1..50: mol_type = genomic DNA
tttgtgtacatatgaatttgttgcttgtaggaattccatatgtttacaat

SEQ ID NO: 19563 - DNA, 40 bp, Pseudomonas guariconensis
  source 1..40: mol_type = genomic DNA
tttttgcatcaagcgcttcttgtaggtgctgacggttttg

SEQ ID NO: 19564 - DNA, 50 bp, Pseudomonas guariconensis
  source 1..50: mol_type = genomic DNA
tttgtgtacatatgaatttgttgctagtaggaattccatatgtttacaat

SEQ ID NO: 19565 - DNA, 40 bp, Pseudomonas guariconensis
  source 1..40: mol_type = genomic DNA
ttttggcatcaagtttttctagtagttccagacatttttg

SEQ ID NO: 19566 - protein, 581 aa, Escherichia coli
MPQLYSYIRWSSDRQDKGTTKSRQVAAAKAYAEEAGLELVEIIDPGVSAFRGKNRAGKLGDFIDAVKNNAIPSDSWLYCENLDRLSRDQVDEALRLFLELIGLGLTIVTGMDRKVYNRESIRQNPTDLMISILMFIRGNEESETKSHRTIGNVVALVERHKNGLPVNIKSVGRHPFWIDDSGSQYEAVKKHPVYWSIAREALDMFISGHGVYSVKRALDKKYPNGLRGKEWDYQVLKKMRDNRALIGERTIKVDGQSYKLCNYYPALCKDETEFLILAEKKKQNKFISKKCATDKIRLLSGFSILRCSKCGGTMHSFMNKNVHRYICTNGTHKQKNCSGWSVIGSLVEHCTMIALLIGYINQSRKNGCDTTSIDEDIINKQSVIEGLNSKITNLTLAISIAKDVNELATLLQSLNTQREKLLVEIEKLKERSVSLKAKGSFEIEITDFLILIQYATFKNLEDENRNKIRKVIHSIIEFIVIDKTDSCITIYIKCYGIDEVFIFGGVQRKPYWRFDIGIINDSKLQMISNYDKNIGRTKERKNKEYLDGLRESYQGLYESAVLMLNEMGYPDINGALFWPNR

SEQ ID NO: 19567 - DNA, 50 bp, Escherichia coli
  source 1..50: mol_type = genomic DNA
aagcaatgtatttcttgattttttggacagcctaatgatataaatccaat

SEQ ID NO: 19568 - DNA, 40 bp, Escherichia coli
  source 1..40: mol_type = genomic DNA
tgaatcgacaaggtttttcgggcagccaagggaaacaaag

SEQ ID NO: 19569 - DNA, 50 bp, Escherichia coli
  source 1..50: mol_type = genomic DNA
aagcaatgtatttcttgatttttttgacagcctaatgatataaatccaat

SEQ ID NO: 19570 - DNA, 40 bp, Escherichia coli
  source 1..40: mol_type = genomic DNA
tgaatctcaagggttgttgtgaaagccaaggaaaacaaag

SEQ ID NO: 19571 - protein, 494 aa, Cognaticolwellia aestuarii
MAKAISYIRFSSSKQETGDSLKRQQAMINDWFSNNPNTEPSDMSFKDLGLSGYHGTNLKHDFGRLLDAIEANKIKAGDYILVEAIDRIGRLDTLTALSIITNICMNGVKIITLEDNQEYSKEVVSKNAGIIYYLIGKIDMAHQHSKNLSRRISSRWRSKKEDAAKGKMIKRKSFWWITRNDKSDMFDTVTPEDKELIHLVVKMFLSGSSYSDLVKHVQSVDQQRFLKCSHTAVKQWLLSRTLMGFWEDAEIYPPVISKAEYYLVQDEIKKRKDNKVQGKSSGHIMAGLVKCGVCGGNYSVRQHKHSGAVMYCTKSKRAGKLCSNTKSMPMPIIEEFRRLNQLGYIYNIINDDLQLEIEDSIIKIDANIKDLTERSNRIRTSIELNHDQLLSIRLKDIKEEINQLEVDKRNTTINIKTKFKKVKQASQVFNENMSNLMSEPNKLNGLLKSVDFAIIGNGATISIDNSSLEYLSFNQVKMEYTCLNESYEEIVISK

SEQ ID NO: 19572 - DNA, 50 bp, Cognaticolwellia aestuarii
  source 1..50: mol_type = genomic DNA
tgtatgctcagttgcaataatattacccaacaatttcaagtgagcccata

SEQ ID NO: 19573 - DNA, 40 bp, Cognaticolwellia aestuarii
  source 1..40: mol_type = genomic DNA
gttagctgcaaacaatattacccaacaattcggtgctaag

SEQ ID NO: 19574 - DNA, 50 bp, Cognaticolwellia aestuarii
  source 1..50: mol_type = genomic DNA
tgtatgctcagttgcaataatattgaccaacaatttcaagtgagcccata

SEQ ID NO: 19575 - DNA, 40 bp, Cognaticolwellia aestuarii
  source 1..40: mol_type = genomic DNA
tctgacagcaaacaatattgagcacctattcggtgccaag

SEQ ID NO: 19576 - protein, 500 aa, Pseudomonas proteolytica
MALDATLTLKDEGLSAYHQRHVKQGALGVFLRAIEDGRIASGSVLVVEGLDRLSRAEPIQAQAQLAQIINAGITVVTASDGREYNRAGLKAQPMDLVYSLLVMIRAHEESDTKSKRVKAAIRRQCEGWVSGSFRGLIRNGKDPQWVRLTTDGWELIPERVAAVKRALELYGQGLGAGRAANVMHEEGFQLTEGGISGLQIYRTIKLPALRGVKRLNVEGEDYELEDYYPRILSDAEWSDLQHLAGQRLRRRGAGEIPGIITGVGLAYCGYCGTALVAQNIMKRRRSDGSIADGNRRLQCTSYSKNGGCTAGGSCSVVPIEQALITFCSDQLNLQRLMQPSDDGQSVHRQLVAARAAVAKITGQLSKITDALLADESGAAPLAFVRKARELELQLKDAEQSVSTLEHEVVVMSAGAAQPVQAERWVELSEQVGVGDYSAREKVRQLVMDTFSRIVIFMRGVGASDRTGKFIDVQLFSRTGQHRLLRINRKNGEWVASEDWA

SEQ ID NO: 19577 - DNA, 50 bp, Pseudomonas proteolytica
  source 1..50: mol_type = genomic DNA
ggtatagattaataatcgttagggcaccctagcgatacaaaccctacacg

SEQ ID NO: 19578 - DNA, 40 bp, Pseudomonas proteolytica
  source 1..40: mol_type = genomic DNA
gtcgacgagcgccttcgggcaacccagggaaacaaagcca

SEQ ID NO: 19579 - DNA, 50 bp, Pseudomonas proteolytica
  source 1..50: mol_type = genomic DNA
ggtatagattaataatcgttagggggccctagcgatacaaaccctacacg

SEQ ID NO: 19580 - DNA, 40 bp, Pseudomonas proteolytica
  source 1..40: mol_type = genomic DNA
gtggaggagagccttcaggggagcgagggaagcaaagcag

SEQ ID NO: 19581 - protein, 531 aa, Vibrio parahaemolyticus
MSIAYSYIRFSSAQQAQGDSLRRQTQLAQRYCEENNLTLSDTNFQDLGVSAFHSDNVKEDSGLGQFLEALEQGAIPEGSYLLVESLDRLSRAKVQTALIQMLRITQLGVKIVTLMDNRLYGRDLDTTDLIISLTIMERAHNESKTKSERIKAAWTNKRQNPNTTNRHSSTPFWLTLNSDKRTYTVNEEYAELVRKIYQLSIDGWGVIKIVRYLNENGITAPKGASWATTTVNRILNSKATLGHYEPTQNRKSLNTLIEDYYPPIIDEKTYYLSQQRKFERSKPEAAGRKTEYPNPLNQIAKCKKCGSSMYYENKSQSLKYLTCREFKKKNCTNKPIRMELIYRFIYEVFNSPMYHQQHAKLVDKSKQKDVSKLAELEGRYEAERKAYEELLEASSSFSDPIMLKELQKRSTSILELSKQMEEAKAKETVEKARTVHINFTEALQLTVNAFHLPLEGIKVEELNTNELFNTRVRLNRILKQAFNHLSIFHCNESKRITIETEATEDCPIDLRYETNQKAIKEPMKNRIWSVY

SEQ ID NO: 19582 - DNA, 50 bp, Vibrio parahaemolyticus
  source 1..50: mol_type = genomic DNA
ataaggttaatattgccgtcaattacaggtgttggtattatttaccttaa

SEQ ID NO: 19583 - DNA, 40 bp, Vibrio parahaemolyticus; identical to SEQ ID NO: 4248
  source 1..40: mol_type = genomic DNA

SEQ ID NO: 19584 - DNA, 50 bp, Vibrio parahaemolyticus
  source 1..50: mol_type = genomic DNA
ataaggttaatattgccgtcaattttaggtgttggtattatttaccttaa

SEQ ID NO: 19585 - DNA, 40 bp, Vibrio parahaemolyticus
  source 1..40: mol_type = genomic DNA
taatgggattacttgcttttttcctgttgagttgctggag

SEQ ID NO: 19586 - protein, 531 aa, Vibrio parahaemolyticus
MSIAYSYIRFSSAQQAQGDSLRRQTQLAQRYCEENNLTLSDTNFQDLGVSAFHSDNVKEDSGLGQFLEALEQGAIPEGSYLLVESLDRLSRAKVQTALIQMLRITQLGVKIVTLMDNRLYGRDLDTTDLIISLTIMERAHNESKTKSERIKAAWTNKRQNPNTTNRHSSTPFWLTLNSDKRTYTVNEEYAELVRKIYQLSIDGWGVIKIVRYLNENGITAPKGASWATTTVNRILNSKATLGHYEPTQNRKSLNTLIEDYYPPIIDEKTYYLSQQRKFERSKPEAAGRKTEYPNPLNQIAKCKKCGSSMYYENKSQSLKYLTCREFKKKNCTNKPIRMELIYRFIYEVFNSPMYHQQHAKLVDKSKQKDVSKLAELEGRYEAERKAYEELLEASSSFSDPIMLKELQKRSTSILELSKQMEEAKAKETVEKARTVHINFTEALQLTVNAFHLPLEGIKVEELNTDELFNTRVRLNRILKQAFNHLSIFHCNESKRITIETEATEDCPIDLRYETNQKAIKEPMKNRIWSVY

SEQ ID NO: 19587 - DNA, 50 bp, Vibrio parahaemolyticus; identical to SEQ ID NO: 19582
  source 1..50: mol_type = genomic DNA

SEQ ID NO: 19588 - DNA, 40 bp, Vibrio parahaemolyticus; identical to SEQ ID NO: 4248
  source 1..40: mol_type = genomic DNA

SEQ ID NO: 19589 - DNA, 50 bp, Vibrio parahaemolyticus; identical to SEQ ID NO: 19584
  source 1..50: mol_type = genomic DNA

SEQ ID NO: 19590 - DNA, 40 bp, Vibrio parahaemolyticus; identical to SEQ ID NO: 19585
  source 1..40: mol_type = genomic DNA

SEQ ID NO: 19591 - protein, 534 aa, Vibrio parahaemolyticus
MNTIRPLISLRSPTAYSYIRFSSAIQAQGDSLRRQTKLAQEYCQKHSLTLSEQSFTDLGISAFNSANSQEDSGLGQFLKALEQGVIPSGSFLLVESLDRLSRAKVQTALRQLLNIIEYGITVVTLIDNRTYSSESETTDLIISLAVMERAHNESKTKSERIKAAWANKRANPTTTNRTSLAPFWLKLNKDKRTYTVIEKNAETVRRIFQMSINGHGIIGIARKLNEEKIPSPKGGSWSNTSICRILNSKAVIGEYTPNIGRTSTNTPISDYYPSIIDESTFYLSQSRKAERSKPKSAGRKTTFPNVFNQVAKCGVCGATMYYDNKSPTLKYLTCREFKKKNCTNRPIRIEFMHKFIIEQYLLPKNFQHHINMTTETSKQGDSISSIEEKIKEEEQALNQLMKIAKNLTSHIAIQHMENRDRKIMQLKEELEETKAQQAEVTLTPRIGFKQAQQLVANALQMEVNDKKPNCTDPELIREYRVTLNRSLKDVFNSLRIHNLKSASEITVECNQLTYAIDRKSLKLIHENLYWKSKV

SEQ ID NO: 19592 - DNA, 50 bp, Vibrio parahaemolyticus
  source 1..50: mol_type = genomic DNA
ataaggtaaatattgccaacaatagtaatagtcggtagcatttacctttc

SEQ ID NO: 19593 - DNA, 40 bp, Vibrio parahaemolyticus
  source 1..40: mol_type = genomic DNA
ctccggcaacccaacgagagtaaagccgggcatgccatta

SEQ ID NO: 19594 - DNA, 50 bp, Vibrio parahaemolyticus
  source 1..50: mol_type = genomic DNA
ataaggtaaatattgccaacaataaaaatagtcggtagcatttacctttc

SEQ ID NO: 19595 - DNA, 40 bp, Vibrio parahaemolyticus
  source 1..40: mol_type = genomic DNA
ctccagcaactcaacaggaaaaaagcaagtaatcccatta

SEQ ID NO: 19596 - protein, 534 aa, Vibrio parahaemolyticus
MNTIRPLISLRSPTAYSYIRFSSAIQAQGDSLRRQTKLAQEYCQKHSLTLSEQSFTDLGISAFNSANSQEDSGLGQFLKALEQGVIPSGSFLLVESLDRLSRAKVQTALRQLLNIIEYGITVVTLIDNRTYSSESETTDLIISLAVMERAHNESKTKSERIKAAWANKRANPTTTNRTSLAPFWLKLNKDKRTYTVIEKNAETVRRIFQMSINGHGIIGIARRLNEEKIPSPKGGSWSNTSICRILNSKAVIGEYTPNIGRTSTNTPISDYYPSIIDESTFYLSQSRKAERSKPKSAGRKTTFPNVFNQVAKCGVCGATMYYDNKSPTLKYLTCREFKKKNCTNRPIRIEFMHKFIIEQYLLPKNFQHHINMTTETSKQGDSISSIEEKIKEEEQALNQLMKIAKNLTSHIAIQHMENRDRKIMQLKEELEETKAQQAEVTLTPRIGFKQAQQLVANALQMEVNDKKPNCTDPELIREYRVTLNRSLKDVFNSLRIHNLKSASEITVECNQLTYAIDRKSLKLIHENLYWKSKV

SEQ ID NO: 19597 - DNA, 50 bp, Vibrio parahaemolyticus; identical to SEQ ID NO: 19592
  source 1..50: mol_type = genomic DNA

SEQ ID NO: 19598 - DNA, 40 bp, Vibrio parahaemolyticus; identical to SEQ ID NO: 19593
  source 1..40: mol_type = genomic DNA

SEQ ID NO: 19599 - DNA, 50 bp, Vibrio parahaemolyticus; identical to SEQ ID NO: 19594
  source 1..50: mol_type = genomic DNA

SEQ ID NO: 19600 - DNA, 40 bp, Vibrio parahaemolyticus; identical to SEQ ID NO: 19595
  source 1..40: mol_type = genomic DNA

SEQ ID NO: 19601 - protein, 529 aa, Vibrio parahaemolyticus
MTIAYSYIRFSSSQQSQGDSLRRQTQLVERYCNEHNLTLSDTTFQDLGVSAFNSANSNEDSGLGQFLSALNQGLIDTGSYLIVESLDRLSRAKVQTALRQMLNIIELGVKIVTLMDNRIYDQESDTTDLIISLTIMERAHNESKTKSERIRAAWENKRQNPHTTNRHGITPFWLTLNSDKRSYTIVNKHADIVRKIYQLSIDGWGVVKIVRFLNESEIPAPKGGSWSSTTVCRVLNTKAVLGHYEPTQNRQSLNTVIENYYPAVIDEQTYYLSQKRKSERSTPESAGRKTEYPNPLHQIAKCKLCGSSMYYDNKSKTLKYLTCREFKKKNCTNKPIRIELIHRFILEVFNSPMYIKQHVELNDKSSQEKTDEILILESDLEQDKKELKDLLSLSNDFTNALIRDEIKTRSNRIQEKEKRLESAKAEEAVQSDTDAHVSFKEARELTINAFRLPLEGKTELSTEELFNTRVRLNRVLKQTFNALSILHDKESKRITIETEVTDNNKFSYNFETNKKAISEPLSNNIWSMY

SEQ ID NO: 19602 - DNA, 50 bp, Vibrio parahaemolyticus
  source 1..50: mol_type = genomic DNA
taaaggtaaatattgccaacaactgtactagttggtaacattaacctttt

SEQ ID NO: 19603 - DNA, 40 bp, Vibrio parahaemolyticus; identical to SEQ ID NO: 19593
  source 1..40: mol_type = genomic DNA

SEQ ID NO: 19604 - DNA, 50 bp, Vibrio parahaemolyticus
  source 1..50: mol_type = genomic DNA
taaaggtaaatattgccaacaactaaactagttggtaacattaacctttt

SEQ ID NO: 19605 - DNA, 40 bp, Vibrio parahaemolyticus; identical to SEQ ID NO: 19595
  source 1..40: mol_type = genomic DNA

SEQ ID NO: 19606 - protein, 529 aa, Vibrio parahaemolyticus
MTIAYSYIRFSSSQQSQGDSLRRQTQLVERYCNEHNLTLSDTTFQDLGVSAFNSANSNEDSGLGQFLSALNQGLIDTGSYLIVESLDRLSRAKVQTALRQMLNIIELGVKIVTLMDNRIYDQESDTTDLIISLTIMERAHNESKTKSERIRAAWENKRQNPHTTNRHGITPFWLTLNSDKRSYTIVNKHADIVRKIYQLSIDGWGVVKIVRFLNESEIPAPKGGSWSSTTVCRVLNTKAVLGHYEPTQNRQSLNTVIENYYPAVIDEQTYYLSQKRKSERSTPESAGRKTEYPNPLHQIAKCKLCGSSMYYDNKSKTLKYLTCREFKKKNCTNKPIRIELIHRFILEVFNSPMYIKQHVELNDKSSQEKTDEILILESDLEQDKKELKDLLSLSNDFTNALIRDEIKTRSNRIQEKEKRLESAKAEEAVQSDTDAHVSFKEARELTINAFRLPLEGKTELSTEELFNTRVRLNRVLKQTFNALSILHDKESKRITIETEVTDNNKFSYNFETNKKAISEPLSNKIWSMY

SEQ ID NO: 19607 - DNA, 50 bp, Vibrio parahaemolyticus
  source 1..50: mol_type = genomic DNA
taaaggtaaatattgccaacaactgtactagttggtagcattaacctttt

SEQ ID NO: 19608 - DNA, 40 bp, Vibrio parahaemolyticus; identical to SEQ ID NO: 19593
  source 1..40: mol_type = genomic DNA

SEQ ID NO: 19609 - DNA, 50 bp, Vibrio parahaemolyticus
  source 1..50: mol_type = genomic DNA
taaaggtaaatattgccaacaactaaactagttggtagcattaacctttt

SEQ ID NO: 19610 - DNA, 40 bp, Vibrio parahaemolyticus; identical to SEQ ID NO: 19595
  source 1..40: mol_type = genomic DNA

SEQ ID NO: 19611 - protein, 531 aa, Vibrio parahaemolyticus
MAIAYSYIRFSSSQQSQGDSLRRQIQLAEKYCIENNLTLSDTNFRDLGVSAFHSTNSQEDSGLGKFLSALSQGRINEGSYLLVESLDRLSRAKVQTALRQMLNIIDLGVKIVTLMDNRIYDQESDTTDLIISLTIMERAHNESKTKSERIKAAWAHKRQNPKTTNRHSSTPFWLSLNPDKKTYSLKEKYVEIVRKIYQLSIDGWGVVKIVRHLNESNIKAPKGGSWATTTVSRVLTSKAVLGHYEPKQNRKSLNFVIEDYYPPIIQEDTYYLSKQRQNERSKPEAAGRKTDYPNPLNQIAKCKLCGSSMYYENKSKSLKYLTCREFKKGNCTNKPIRIELIYRFIYEAFNSPMFHQYQAKLVEKSNQKGSNRLEELTAKQTEEENALRGLLSLSNDFSNTIIQEEIKVRSERIESFKKQIENVKAEQAVEHTRSVHINFTEALQLAVSAFRFPLGEVEVEELSREELFNTRVRLNRTLKRAFNSLSIYHSGESKRITIETEVMEGFTEGLKYETTRQSIKDPVSSRIWSVC

SEQ ID NO: 19612 - DNA, 50 bp, Vibrio parahaemolyticus
  source 1..50: mol_type = genomic DNA
aaagggttaatattgccagcaatagtgcttgttggtattatttacctttt

SEQ ID NO: 19613 - DNA, 40 bp, Vibrio parahaemolyticus; identical to SEQ ID NO: 19593
  source 1..40: mol_type = genomic DNA

SEQ ID NO: 19614 - DNA, 50 bp, Vibrio parahaemolyticus
  source 1..50: mol_type = genomic DNA
aaagggttaatattgccagcaataaagcttgttggtattatttacctttt

SEQ ID NO: 19615 - DNA, 40 bp, Vibrio parahaemolyticus; identical to SEQ ID NO: 19595
  source 1..40: mol_type = genomic DNA

SEQ ID NO: 19616 - protein, 532 aa, Vibrio parahaemolyticus
MAIAYSYIRFSSSQQSQGDSLRRQIQLAEKYCIENNLTLSDTNFRDLGVSAFHSTNSQEDSGLGKFLSALSQGRINEGSYLLVESLDRLSRAKVQTALRQMLNIIDLGVKIVTLMDNRIYDQESDTTDLIISLTIMERAHNESKTKSERIKAAWAHKRQNPKTTNRHSSTPFWLSLNPDKKTYSLKEKYVEIVRKIYQLSIDGWGVVKIVRHLNESNIKAPKGGSWATTTVSRVLTSKAVLGHYEPKQNRKSLNFVIEDYYPPIIQEDTYYLSKQRQNERSKPEAAGRKTDYPNPLNQIAKCKICGSSMYYENKSKSLKYLTCREFKKKNCTNKPIRIEMIYRFIYEIFNSPINYQYQAKLIEKSKQRDTNKLKGLEAKKTEEENALRGLLSLSNDFSNTIIQEEIKARSERIESFKKQIENAKAEQAVEHTRDVHINFTEALQLAVNAFHFPLEKVKVEELPPEELFNTRVRLNRILKQAFNTLSIYHCNESKRITIEAEVMEGFPDGLKYETNQQSIREPIGNRIWSVYQ

SEQ ID NO: 19617 - DNA, 50 bp, Vibrio parahaemolyticus; identical to SEQ ID NO: 19612
  source 1..50: mol_type = genomic DNA

SEQ ID NO: 19618 - DNA, 40 bp, Vibrio parahaemolyticus; identical to SEQ ID NO: 19593
  source 1..40: mol_type = genomic DNA

SEQ ID NO: 19619 - DNA, 50 bp, Vibrio parahaemolyticus; identical to SEQ ID NO: 19614
  source 1..50: mol_type = genomic DNA

SEQ ID NO: 19620 - DNA, 40 bp, Vibrio parahaemolyticus; identical to SEQ ID NO: 19595
  source 1..40: mol_type = genomic DNA

SEQ ID NO: 19621 - protein, 529 aa, Vibrio parahaemolyticus
MTIAYSYIRFSSSQQSQGDSLRRQTQLAERYCSEHNLTLSDTTFQDLGVSAFNSANSNEDSGLGQFLSALNQGLIDRGSYLLVESLDRLSRARVQTALRQMLNIIELGVKIVTLMDNRIYDQESDTTDLIISLTIMERAHNESKTKSERIRAAWENKRQNPHTTNRHSITPFWLTLNSDKRSYTVEKKHADIVRKIYQLSIDGWGVVKIVRFLNDSEIPAPKGGSWSGTTVCRILNTKAVLGHYEPTQNRQSLNTVIENYYPAVIDEQTYYLSQKRKSERSTPESAGRKTEYPNPLHQIAKCKLCGSSMYYDNKSKTLKYLTCREFKKKNCTNKPIRIELIHRFILEVFNSPMYIKQHVELADKSHQRDTNKLLELEGNINEKKKALKGLLSFTNDFTNALIRDEVKTRSEHIQELEKQLESAKAEQAVERDTDTQVSFKEALKLTINAFQLPLEGKTELSAEELFNTRVRLNRVLKQTFNTLSILHDKESKRITIETEVTDNNKFSYKFETNKKAISEPLSNNIWSMY

SEQ ID NO: 19622 - DNA, 50 bp, Vibrio parahaemolyticus
  source 1..50: mol_type = genomic DNA
aaaaggtaaatattgacaacaacagtgcttgttggttatattaacctttc

SEQ ID NO: 19623 - DNA, 40 bp, Vibrio parahaemolyticus; identical to SEQ ID NO: 19593
  source 1..40: mol_type = genomic DNA

SEQ ID NO: 19624 - DNA, 50 bp, Vibrio parahaemolyticus
  source 1..50: mol_type = genomic DNA
aaaaggtaaatattgacaacaacaaagcttgttggttatattaacctttc

SEQ ID NO: 19625 - DNA, 40 bp, Vibrio parahaemolyticus; identical to SEQ ID NO: 19595
  source 1..40: mol_type = genomic DNA

SEQ ID NO: 19626 - protein, 531 aa, Vibrio parahaemolyticus
MTIAYSYIRFSSSQQSQGDSLRRQIQLAEKYCIENNLTLSDTTFRDLGVSAFHSTNSQEDSGLGQFLSALNQGRISEGSYLLVESLDRLSRAKVQTALRQMLNIIELGVKIVTLMDNRIYDQESDTTDLIISLTIMERAHNESKTKSERIKAAWVHKRQNPTTTNRHSSTPFWLSLNADKKTYKLKEKYVEIVRKIYQLSIDGWGVIKIVRHLNESNIKAPKGGSWATTTVSRVLTSKAVLGHYEPMQNRKSLNLTIEDYYPSIIDEATYYLSRQRQNERSKPEAAGRKTNYPNPLSQIAKCKLCGSSMYYENKSKSLKYLTCREFKKGNCTNKPIRIELIYRFVYEVFNSPMYHQYQAKLVEKSNKKDTSKLEELEVKKTEQEKALRGLLSMSNDFSNTIIQEEIKVRSERIESFKKHIENVKAEQAVEHTRSTHINFTEALQLAVNAFRFPLEKVQVEELSREELFNTRVKLNRILKHAFNSLSIYHCGESKRITIETEVMEGFSEGLKYETTRQSIKKPLSSRVWSVR

SEQ ID NO: 19627 - DNA, 50 bp, Vibrio parahaemolyticus
  source 1..50: mol_type = genomic DNA
ataaggttaatattgccaacggttactcttgttggtattatttacctttt

SEQ ID NO: 19628 - DNA, 40 bp, Vibrio parahaemolyticus; identical to SEQ ID NO: 4248
  source 1..40: mol_type = genomic DNA

SEQ ID NO: 19629 - DNA, 50 bp, Vibrio parahaemolyticus
  source 1..50: mol_type = genomic DNA
ataaggttaatattgccaacggtttttcttgttggtattatttacctttt

SEQ ID NO: 19630 - DNA, 40 bp, Vibrio parahaemolyticus; identical to SEQ ID NO: 19585
  source 1..40: mol_type = genomic DNA

SEQ ID NO: 19631 - protein, 531 aa, Vibrio parahaemolyticus
MTIAYSYIRFSSSQQSQGDSLRRQTQLAEKYCIENNLTLSDTTFRDLGVSAFHSTNSQEDSGLGQFLSALNQGRISEGSYLLVESLDRLSRAKVQTALRQMLNIIELGVKIVTLMDNRIYDQESDTTDLIISLTIMERAHNESKTKSERIKAAWVHKRQNPTTTNRHSSTPFWLSLNADKKTYKLKEKYVEIVRKIYQLSIDGWGVIKIVRHLNESNIKAPKGGSWATTTVSRVLTSKAVLGHYEPMQNRKSLNLTIEDYYPSIIDEATYYLSRQRQNERSKPEAAGRKTDYPNPLNQIAKCKLCGSSMYYENKSKSLKYLTCREFKKGNCTNKPIRIELIYRFIYEVFNSPMFHQCQAKLVEKSNQKGSNRLEELTAKQTEEENALRGLLSLSNDFSNTIIQEEIKVRSERIESFKKQIENVKAEQAVEHTRSVHINFTEALQLAVSAFRFPLGEVEVEELSREELFNTRVRLNRILKRAFNSLSIYHSGESKRITIETEVMEGFTEGLKYETTRQSIKEPVSSRIWSMC

SEQ ID NO: 19632 - DNA, 50 bp, Vibrio parahaemolyticus
  source 1..50: mol_type = genomic DNA
aaaaggttaatattgccttcaattactcttgttggtattatttacctttt

SEQ ID NO: 19633 - DNA, 40 bp, Vibrio parahaemolyticus; identical to SEQ ID NO: 4248
  source 1..40: mol_type = genomic DNA

SEQ ID NO: 19634 - DNA, 50 bp, Vibrio parahaemolyticus
  source 1..50: mol_type = genomic DNA
aaaaggttaatattgccttcaatttttcttgttggtattatttacctttt

SEQ ID NO: 19635 - DNA, 40 bp, Vibrio parahaemolyticus; identical to SEQ ID NO: 19585
  source 1..40: mol_type = genomic DNA

SEQ ID NO: 19636 - protein, 531 aa, Vibrio parahaemolyticus
MTIAYSYIRFSSSQQSQGDSLRRQTQLAEKYCIENNLTLSDTTFRDLGVSAFHSTNSQEDSGLGQFLSALNQGRISEGSYLLVESLDRLSRAKVQTALRQMLNIIELGVKIVTLMDNRIYDQESDTTDLIISLTIMERAHNESKTKSERIKAAWVHKRQNPTTTNRHSSTPFWLSLNADKKTYKLKEKYVEIVRKIYQLSIDGWGVIKIVRHLNESNIKAPKGGSWATTTVSRVLTSKAVLGHYEPMQNRKSLNLTIEDYYPSIIDEATYYLSRQRQNERSKPEAAGRKTDYPNPLNQIAKCKLCGSSMYYENKSKSLKYLTCREFKKGNCTNKPIRIELIYRFIYEVFNSPMFHQCQAKLVEKSNQKGSNRLEELTAKQTEEENALRGLLSLSNDFSNTIIQEEIKVRSERIESFKKQIENVKAEQAVEHTRSVHINFTEALQLAVSAFRFPLGEVEVEELSREELFNTRVRLNRILKRAFNSLSIYHSGESKRITIETEVMEGFTEGLKYETTRQSIKEPVSSRIWSVC

SEQ ID NO: 19637 - DNA, 50 bp, Vibrio parahaemolyticus; identical to SEQ ID NO: 19632
  source 1..50: mol_type = genomic DNA

SEQ ID NO: 19638 - DNA, 40 bp, Vibrio parahaemolyticus
  source 1..40: mol_type = genomic DNA
taatggtatgcccggctttactctcgttgggttgccggag

SEQ ID NO: 19639 - DNA, 50 bp, Vibrio parahaemolyticus; identical to SEQ ID NO: 19634
  source 1..50: mol_type = genomic DNA

SEQ ID NO: 19640 - DNA, 40 bp, Vibrio parahaemolyticus; identical to SEQ ID NO: 19585
  source 1..40: mol_type = genomic DNA

SEQ ID NO: 19641 - protein, 531 aa, Vibrio parahaemolyticus; identical to SEQ ID NO: 19636

SEQ ID NO: 19642 - DNA, 50 bp, Vibrio parahaemolyticus; identical to SEQ ID NO: 19632
  source 1..50: mol_type = genomic DNA

SEQ ID NO: 19643 - DNA, 40 bp, Vibrio parahaemolyticus; identical to SEQ ID NO: 4248
  source 1..40: mol_type = genomic DNA

SEQ ID NO: 19644 - DNA, 50 bp, Vibrio parahaemolyticus; identical to SEQ ID NO: 19634
  source 1..50: mol_type = genomic DNA

SEQ ID NO: 19645 - DNA, 40 bp, Vibrio parahaemolyticus; identical to SEQ ID NO: 19585
  source 1..40: mol_type = genomic DNA

SEQ ID NO: 19646 - protein, 531 aa, Vibrio parahaemolyticus
MAIAYSYIRFSSSQQSQGDSLRRQIQLAEKYCIENNLTLSDTNFRDLGVSAFHSTNSQEDSGLGKFLSALSQGRINEGSYLLVESLDRLSRAKVQTALRQMLNIIDLGVKIVTLMDNRIYDQESDTTDLIISLTIMERAHNESKTKSERIKAAWAHKRQNPKTTNRHSSTPFWLSLNPDKKTYSLKEKYVEIVRKIYQLSIDGWGVVKIVRHLNESNIKAPKGGSWATTTVSRVLTSKAVLGHYEPKQNRKSLNFVIEDYYPPIIQEDTYYLSKQRQNERSKPEAAGRKTDYPNPLNQIAKCKLCGSSMYYENKSKSLKYLTCREFKKGNCTNKPIRIELIYRFIYEVFNSPIFHQCQAKLVEKSNQKGSNRLEELTAKQTEEENALRGLLSLSNDFSNTIIQEEIKVRSERIESFKKQIENVKAEQAVEHTRSVHINFTEALQLAVSAFRFPLGEVEVEELSREELFNTRVRLNRTLKRAFNSLSIYHSGESKRITIETEVMEGFTEGLKYETTRQSIKDPVSSRIWSVC

SEQ ID NO: 19647 - DNA, 50 bp, Vibrio parahaemolyticus; identical to SEQ ID NO: 19612
  source 1..50: mol_type = genomic DNA

SEQ ID NO: 19648 - DNA, 40 bp, Vibrio parahaemolyticus; identical to SEQ ID NO: 19593
  source 1..40: mol_type = genomic DNA

SEQ ID NO: 19649 - DNA, 50 bp, Vibrio parahaemolyticus; identical to SEQ ID NO: 19614
  source 1..50: mol_type = genomic DNA

SEQ ID NO: 19650 - DNA, 40 bp, Vibrio parahaemolyticus; identical to SEQ ID NO: 19595
  source 1..40: mol_type = genomic DNA

SEQ ID NO: 19651 - protein, 534 aa, Vibrio parahaemolyticus
MNTIRPLISLRSPTAYSYIRFSSAIQAQGDSLRRQTKLAQEYCQKHSLTLSEQSFTDLGISAFNSANSQEDSGLGQFLKALEQGVIPSGSFLLVESLDRLSRAKVQTALRQLLNIIEYGITVVTLIDNRTYSSESETTDLIISLAVMERAHNESKTKSERIKAAWANKRANPTTTNRTSLAPFWLKLNKDKRTYTVIEKNAETVRRIFQMSINGHGIIGIARRLNEEKIPSPKGGSWSNTSICRILNSKAVIGEYTPNIGRTSTNTPISDYYPSIIDESTFYLSQSRKAERSKPKSAGRKTTFPNVFNQVAKCGVCGATMYYDNKSPTLKYLTCREFKKKNCTNRPIRIEFMHKFIIEQYLLPKNFQHHINMTTETSKQGDSISSIEEKIKEEEQALNQLMKIAKNLTSHIAIQHMESRDRKIMQLKEELEETKAQQAEVTLTPRIGFKQAQQLVANALQMEVNDKKPNCTDPELIREYRVTLNRSLKDVFNSLRIHNLKSASEITVECNQLTYAIDRKSLKLIHENLYWKSKV

SEQ ID NO: 19652 - DNA, 50 bp, Vibrio parahaemolyticus; identical to SEQ ID NO: 19592
  source 1..50: mol_type = genomic DNA

SEQ ID NO: 19653 - DNA, 40 bp, Vibrio parahaemolyticus; identical to SEQ ID NO: 19593
  source 1..40: mol_type = genomic DNA

SEQ ID NO: 19654 - DNA, 50 bp, Vibrio parahaemolyticus; identical to SEQ ID NO: 19594
  source 1..50: mol_type = genomic DNA

SEQ ID NO: 19655 - DNA, 40 bp, Vibrio parahaemolyticus; identical to SEQ ID NO: 19595
  source 1..40: mol_type = genomic DNA

SEQ ID NO: 19656 - protein, 531 aa, Vibrio parahaemolyticus
MSIAYSYIRFSSAQQAQGDSLRRQTQLAQRYCEENNLTLSDTNFQDLGVSAFHSDNVKEDSGLGQFLEALEQGAIPEGSYLLVESLDRLSRAKVQTALIQMLRITQLGVKIVTLMDNRLYDKDLDTTDLIISLTIMERAHNESKTKSERIKAAWTNKRQNPNTTNRHSSAPFWLTLNSDKRTYTINEEYAELVRKIYQLSIDGWGVIKIVRYLNQNGITAPKGASWATTTVNRILNSKAALGHYEPTQNRKSLNTLIEDYYPPIIDEKTYYLSQQRKFERSKPEAAGRKTEYPNPLNQIAKCKKCGSSMYYENKSQSLKYLTCREFKKKNCTNKPIRMELIYRFIYEVFNSPMYHQQHAKLVDKSKQKDVNKLTELEGRYEVERKAYEGLLEAFSSFSDPIALKELQRRSTLITGLYKQIEEAKAKKTVEQARTAHINFTEALKLTTKALYSPLVEERGEELSPDELFTTRVRLNRILKQAFNHLSIFHCNESKRITIETEITEDYPIDLRYETNQKAIKEPMKNRIWSVY

SEQ ID NO: 19657 - DNA, 50 bp, Vibrio parahaemolyticus
  source 1..50: mol_type = genomic DNA
aaaaggttaatattgccatcgacagtaaatgttggcactattccccttaa

SEQ ID NO: 19658 - DNA, 40 bp, Vibrio parahaemolyticus; identical to SEQ ID NO: 19593
  source 1..40: mol_type = genomic DNA

SEQ ID NO: 19659 - DNA, 50 bp, Vibrio parahaemolyticus
  source 1..50: mol_type = genomic DNA
aaaaggttaatattgccatcgacaaaaaatgttggcactattccccttaa

SEQ ID NO: 19660 - DNA, 40 bp, Vibrio parahaemolyticus; identical to SEQ ID NO: 19595
  source 1..40: mol_type = genomic DNA

SEQ ID NO: 19661 - protein, 531 aa, Vibrio parahaemolyticus
MSIAYSYIRFSSTQQAQGDSLRRQTQLAQRYCEENNLTLSDTNFQDLGVSAFHSDNVKEDSGLGQFLEALEQGAIPEGSYLLVESLDRLSRAKVQTALMQMLRITQLGVKIVTLMDNRLYDRDLDTTDLIISLTIMERAHNESKTKSERIKAAWTNKRQNPSTTNRHSSTPFWLTLNPDKRTYTVNEEYAELVRKIYQLSIDGWGVIKIVRYLNENGITAPKGASWATTTVNRILNSKAALGHYEPTQNRKSLNTLIEDYYPPIIDEKTYYLSQQRKFERSKPEAAGRKTEYPNPLNQIAKCKKCGSSMYYENKSQSLKYLTCREFKKKNCTNKPIRMELIYRFIYEVFNSPMYHQQHAKLVDKSKQKNVNNHAELKGRYEAKRKAYEELLEASSSFSDPIILKELQKRSTSILELSKQIEEAKAKETVEQARTVHINFTEALQLAVNAFHLPLEGVKVEELSTDELFNTRVRLNRILKQAFNHLSIFHCNESKRITIETEVTEDYPIDLRYETNQKAIKEPMKNRIWSVY

SEQ ID NO: 19662 - DNA, 50 bp, Vibrio parahaemolyticus
  source 1..50: mol_type = genomic DNA
aaaaggttaatatttccattaatagtaaatgttggcactattcaccttaa

SEQ ID NO: 19663 - DNA, 40 bp, Vibrio parahaemolyticus; identical to SEQ ID NO: 19593
  source 1..40: mol_type = genomic DNA

SEQ ID NO: 19664 - DNA, 50 bp, Vibrio parahaemolyticus
  source 1..50: mol_type = genomic DNA
aaaaggttaatatttccattaataaaaaatgttggcactattcaccttaa

SEQ ID NO: 19665 - DNA, 40 bp, Vibrio parahaemolyticus; identical to SEQ ID NO: 19595
  source 1..40: mol_type = genomic DNA

SEQ ID NO: 19666 - protein, 531 aa, Vibrio parahaemolyticus
MSIAYSYIRFSSAQQAQGDSLRRQTQLAQRYCEENNLTLSDTNFQDLGVSAFHSDNVKEDSGLGQFLEALEQGAIPEGSYLLVESLDRLSRAKVQTALIQMLRITQLGVKIVTLMDNRLYDKDLDTTDLIISLTIMERAHNESKTKSERIKAAWTNKRQNPNTTNRHSSAPFWLTLNSDKRTYTINEEYAELVRKIYQLSIDGWGVIKIVRYLNQNGITAPKGASWATTTVNRILNSKAALGHYEPTQNRKSLNTLIEDYYPPIIDEKTYYLSQQRKFERSKPEAAGRKTEYPNPLNQIAKCKKCGSSMYYENKSQNLKYLTCREFKKKNCTNKPIRMELIYRFIYEVFNSPMYHQQHAKLVDKSKQKDVNKLTELEGRYEVERKAYEELLEAFSSFSDPIALKELQRRSALITGLYKQIEEAKAKKTVEQARTAHINFTEALKLTTKALYSPLVEERGEELSPDELFTTRVRLNRILKQAFNHLSIFHCNESKRITIETEITEDYPIDLRYETNQKAIKEPMKNRIWSVY

SEQ ID NO: 19667 - DNA, 50 bp, Vibrio parahaemolyticus
  source 1..50: mol_type = genomic DNA
aaaaggttaatattgccatcgatagtaaatgttggcatcattccccttaa

SEQ ID NO: 19668 - DNA, 40 bp, Vibrio parahaemolyticus; identical to SEQ ID NO: 19593
  source 1..40: mol_type = genomic DNA

SEQ ID NO: 19669 - DNA, 50 bp, Vibrio parahaemolyticus
  source 1..50: mol_type = genomic DNA
aaaaggttaatattgccatcgataaaaaatgttggcatcattccccttaa

SEQ ID NO: 19670 - DNA, 40 bp, Vibrio parahaemolyticus; identical to SEQ ID NO: 19595
  source 1..40: mol_type = genomic DNA

SEQ ID NO: 19671 - protein, 531 aa, Vibrio parahaemolyticus
MSIAYSYIRFSSAQQAQGDSLRRQTQLAQRYCEENNLTLSDTNFQDLGVSAFHSDNVKEDSGLGQFLEALEQGAIPEGSYLLVESLDRLSRAKVQTALIQMLRITQLGVKIVTLMDNRLYDKDLDTTDLIISLTIMERAHNESKTKSERIKAAWTNKRQNPNTTNRHSSAPFWLTLNSDKRTYTINEEYAELVRKIYQLSIDGWGVIKIVRYLNQNGITAPKGASWATTTVNRILNSKAALGHYEPTQNRKSLNTLIEDYYPPIIDEKTYYLSQQRKFERSKPEAAGRKTEYPNPLNQIAKCKKCGSSMYYENKSQSLKYLTCREFKKKNCTNKPIRMELIYRFIYEVFNSPMYHQQHAKLVDKSKQKDVNKLTELEGRYEVERKAYEELLEASSSFSDPIILKELQKRSTSILELSKQVEEAKAKETVEKARTVHINFTEALQLTVNAFHLPLEEVKVEELSTDELFNTRVRLNRILKQAFNHLSIFHCNESKRITIETEVTEDYPIDLRYETNQKAIKEPMKNRIWSVY

SEQ ID NO: 19672 - DNA, 50 bp, Vibrio parahaemolyticus
  source 1..50: mol_type = genomic DNA
aaaaggttaatattgccatcgacagtaaatgttggcattattccccttaa

SEQ ID NO: 19673 - DNA, 40 bp, Vibrio parahaemolyticus; identical to SEQ ID NO: 19593
  source 1..40: mol_type = genomic DNA

SEQ ID NO: 19674 - DNA, 50 bp, Vibrio parahaemolyticus
  source 1..50: mol_type = genomic DNA
aaaaggttaatattgccatcgacaaaaaatgttggcattattccccttaa

SEQ ID NO: 19675 - DNA, 40 bp, Vibrio parahaemolyticus; identical to SEQ ID NO: 19595
  source 1..40: mol_type = genomic DNA

SEQ ID NO: 19676 - protein, 529 aa, Vibrio parahaemolyticus
MTIAYSYIRFSSSQQSQGDSLRRQTQLVERYCNEHNLTLSDTTFQDLGVSAFNSANSNEDSGLGQFLSALNQGLIDTGSYLIVESLDRLSRAKVQTALRQMLNIIELGVKIVTLMDNRIYDQESDTTDLIISLTIMERAHNESKTKSERIRAAWENKRQNPHTTNRHGITPFWLTLNSDKRSYTIVNKHADIVRKIYQLSIDGWGVVKIVRFLNESEIPAPKGGSWSSTTVCRVLNTKAVLGHYEPTQNRQSLNTVIENYYPAVIDEQTYYLSQKRKSERSTPESAGRKTEYPNPLHQIAKCKLCGSSMYYDNKSKTLKYLTCREFKKKNCTNKPIRIELIHRFILEVFNSPMYIKQHVELADKSHQRDTNKLLELEGNINEKKKALKGLLSFTNDFTNALIRDEVKTRSEHIQELEKQLESAKAEQAVERDTDTQVSFKEALKLTINAFQLPLEGKTELSTEELFNTRVRLNRVLKQTFNTLSILHDKESKRITIDTEATDNNKLSFSVETNQKAISEPLSNRVWLMY

SEQ ID NO: 19677 - DNA, 50 bp, Vibrio parahaemolyticus; identical to SEQ ID NO: 19607
  source 1..50: mol_type = genomic DNA

SEQ ID NO: 19678 - DNA, 40 bp, Vibrio parahaemolyticus; identical to SEQ ID NO: 19593
  source 1..40: mol_type = genomic DNA

SEQ ID NO: 19679 - DNA, 50 bp, Vibrio parahaemolyticus; identical to SEQ ID NO: 19609
  source 1..50: mol_type = genomic DNA

SEQ ID NO: 19680 - DNA, 40 bp, Vibrio parahaemolyticus; identical to SEQ ID NO: 19595
  source 1..40: mol_type = genomic DNA

SEQ ID NO: 19681 - protein, 463 aa, Coprococcus comes
MPSKIERCAIYIRVSTAEQMMHGKSLEAQKQYLTNYAKEHNMTVAGVYADEGKTARKELKKRKAIHSLLEDVKAGKIDVIIFWRIDRWFRNLSDFYKVQEVLDDNNVRWISTSEPGINMETRDGRLQLNVVLSIGQNEVDTTSERIKFVNEASIRQGKLIFGDVNMGYGYKSGIIDGVKRMVKDPDREDTVNAFYRFFFKHHAKGLSMRYIQENYDPDFTWANMRTLLSSEFYKGTYRGIPYCPAYLTESEWNNLQEIQNANVKRAPSGRIYLFSGMINCPICGRRLSARGGSSIINRKTGAKKVYCYYRCNKAFIDHKCSYRHMVSQNLIERYLIDHLEYEYNKFKIKCEKIEKEQEKKKKIQTPEKLQKELERLNLLFQKGRIEWDYYSKEYDRIENELNELLNAAPELEPDYAYLEELLNTDFRTMYYNLTQENRRAFWHSIIREIHLNTDHTIDSVDFL

SEQ ID NO: 19682 - DNA, 50 bp, Coprococcus comes
  source 1..50: mol_type = genomic DNA
tcttgtactaactggttgactccgtttggggtagattagttagtacaaga

SEQ ID NO: 19683 - DNA, 40 bp, Coprococcus comes
  source 1..40: mol_type = genomic DNA
tttgactcttgttactggttttggagcggataaagttatg

SEQ ID NO: 19684 - DNA, 50 bp, Coprococcus comes
  source 1..50: mol_type = genomic DNA
tcttgtactaactggttgactccgtatggggtagattagttagtacaaga

SEQ ID NO: 19685 - DNA, 40 bp, Coprococcus comes
  source 1..40: mol_type = genomic DNA
cttcactcttgttacttgttattgatctgttcaagttttg

SEQ ID NO: 19686 - protein, 592 aa, Blautia obeum
MRNEKITPLYERLSRDDELQGESNSISNQKQMLEDFARRNGLPNPTHFTDDGISGTRFDRPGFLAMMEEVEAGRVEAIVIKDMSRLGRDYLKVGQVMEVLRQRGVRLIAINDGVDSLKGDDDFTPFRNIMNEFYARDTSRKIRSVFKSKGMSGKHLTGTVIYGYLWDEKREHWLIDEEAAEVVRRIFSLTLKGYGPYQIACKLSTDRIEIPVVHLARFNEGVNRSKPVKDPYGWGASTIVNILKKREYLGHTINFKTRKHFKDKKSHYVSEDEWTIFENTHEAIIDQQTFDLVQKIRSNVRRYPNGWGEAAPLTGLLYCADCGGKMYVHRTNNGKRISQYTCSNYTKVPCGTLCPTQHRINESAVLTLVSDTLRAIAEYSRNDRTEFIHTVQETQVAQQNADITKKRRRLAAAQKRAGELEKLICKIYEDNALGKLPDARYRALDAQYAKEQDALEIEIVELEKAVTGYEQSQKSAEKFIALIDKYENFDTLTNTMLNEFVEKILVHERARKGSQDTTQEIEIYFNFLGRYIPPSLQPVPLTPEEQEELRKKEERKDRLHQNYLKRKASGAQKRYEDKIKAKKKVEMDAKKA

SEQ ID NO: 19687 - DNA, 50 bp, Blautia obeum; identical to SEQ ID NO: 2337
  source 1..50: mol_type = genomic DNA

SEQ ID NO: 19688 - DNA, 40 bp, Blautia obeum; identical to SEQ ID NO: 4598
  source 1..40: mol_type = genomic DNA

SEQ ID NO: 19689 - DNA, 50 bp, Blautia obeum
  source 1..50: mol_type = genomic DNA
aaaagtccttgacaatttgtctctaatgatatatgctctaagtgacttct

SEQ ID NO: 19690 - DNA, 40 bp, Blautia obeum
  source 1..40: mol_type = genomic DNA
aaaacccaaactggatgccaataagagagagaaaactatc

SEQ ID NO: 19691 - protein, 587 aa, Streptococcus dysgalactiae
MKRDVKVIKGDTTLKRTASGCVERSIKRVAAYCRVSTDTEDQINSYNSQVEHYTEFIQKNKEWTLAGIYADEAITGTQVDRRIDFQRLINDCMNGDIDMIITKSISRFARNTLDTLKYVRKLKEFNVAVFFEEENINTLTMDGELLLTILSSVAQQEVENISANVKKGLRMKMERGEMVGFQGCLGYDYDPETKSISINEKEAEIVRYIFRRYIEGVGGMVISRELEEQGYLSPRGNKRWTETTVLGIIKNEKYKGDLMMGKTYTVDPISKRRLDNFGEQDKFYIENHHEPIISEEDFEKAQGIRLRRSKNRNTVANNGGKREKYSRKYAFSSMLECGFCGHNLSRRNWHSSSEYTKVIWQCVNATKNGKKYCPHSKGIEEEAIEKAFMESYRQVCHNNVEITNEFLKTVEEELKDNSLAKDLKKITNQLDKILKKEKDLVELRLNESISMDIYQDKYNEIAISKEKLLEEKRTLEVTLTDEKALKKRLEGFKKLLESNKYLEEFDRAVFESIVDKIIIGGTNDEGEIDPAMITIIYKTGKKDSQDGRLFKSRRKNAKEVNEETDNKLYPHSSDEVNNLYSYPIDNT

SEQ ID NO: 19692 - DNA, 50 bp, Streptococcus dysgalactiae
  source 1..50: mol_type = genomic DNA
gtattcctatcctattgacaacacatgtagagtgcatagcgttgatacaa

SEQ ID NO: 19693 - DNA, 40 bp, Streptococcus dysgalactiae
  source 1..40: mol_type = genomic DNA
ttgtttccacagacgcatcacgtggagtgcgtagtgttgc

SEQ ID NO: 19694 - DNA, 50 bp, Streptococcus dysgalactiae
  source 1..50: mol_type = genomic DNA
gtattcctatcctattgacaacacaggtagagtgcatagcgttgatacaa

SEQ ID NO: 19695 - DNA, 40 bp, Streptococcus dysgalactiae
  source 1..40: mol_type = genomic DNA
ttggtttctcagaagcatcaggtgcagttactagtgttga

SEQ ID NO: 19696 - protein, 608 aa, Streptococcus dysgalactiae
MSWKCGIIKLHRKIQKKEAGAVKRDVKVIKGDTTLKRTASGCVERSIKRVAAYCRVSTDTEDQINSYNSQVEHYTDFIKQNNEWTLAGIYADEAITGTQVDRRIDFQRLINDCMNGDIDMVITKSISRFARNTLDTLKYVRKLKEFNVAVFFEEENINTLTMDGELLLTILSSVAQQEVENISANVKKGLRMKMERGEMVGFQGCLGYDYDPETKSISINEKEAEIVRYIFRRYIEGVGGMVISRELEEQGYLSPRGNKRWTETTVLGIIKNEKYKGDLMMGKTYTVDPISKRRLDNFGEQDKFYIENHHEPIISEEDFEKAQGIRLRRSKNRNTVANNGGKREKYSRKYAFSSMLECGFCGHNLSRRNWHSSSEYTKVIWQCVNATKNGKKYCPHSKGIEEEAIEKVFMESYRQVCHNNVEITNEFLKTVEEELKDNSLAKDLKKITNQLDKILKKEKDLVELRLNESISMDIYQDKYNEIAISKEKLLAEKRTLEVTLTDEKALKKRLEGFKKLLESNKYLEEFDRAVFESIVDKIIIGGTNDEGEIDPAMITIIYKTGKKDSQDGRLFKSRRKNAKEVNEETDNKLYPHSSDEVNNLYSYPMDNT

SEQ ID NO: 19697 - DNA, 50 bp, Streptococcus dysgalactiae
  source 1..50: mol_type = genomic DNA
gtattcctatcctatggacaacacatgtagagtgcatagcgttgatacaa

SEQ ID NO: 19698 - DNA, 40 bp, Streptococcus dysgalactiae; identical to SEQ ID NO: 19693
  source 1..40: mol_type = genomic DNA

SEQ ID NO: 19699 - DNA, 50 bp, Streptococcus dysgalactiae
  source 1..50: mol_type = genomic DNA
gtattcctatcctatggacaacacaggtagagtgcatagcgttgatacaa

SEQ ID NO: 19700 - DNA, 40 bp, Streptococcus dysgalactiae; identical to SEQ ID NO: 19695
  source 1..40: mol_type = genomic DNA

SEQ ID NO: 19701 - protein, 585 aa, Streptococcus dysgalactiae
MNTKVKLIKASNTGARNRNALHLDLKRVAAYCRVSTDSKDQLESYKSQVDYYTNLIRNNKNWTLAGIYADEATTGTTAAKRADFMRLISDCQNGDIDMIITKSISRFARNTLDTLKYVRLLKENNVGVVFEEENIDTLTMDGELLLTILSSVAQQEVENTSAHVKKGLKMKMEKGELIGFQGCLGYDYDPITKSISINEEEAKIVRYIFKRYLEGNGGSVIGRELEEQGYLTPRGKTKWSDTTVLGIIKNEKYIGDILMGKTFTVDPITKRRLANFGESDKYHIENHHEPIISKEDFEKAQEIRLRRAQNRNTIANKDRKREKLSRQYAFSSMLECGFCGEILSRRTWHTSSIYKKINWQCVKSTKKGKKYCPHSKGIQEAAIEKAFVESYRQLCHADSTVIDDFLKIVEEEINDNTLVKDLKKLENQLNRIISQERKLVDLHLEDSIDEEVYAKKYKKLTKQKEELLDEEKTLELTIKDEDSIKERLKQFKKVLENKEIIEEFNRTIFESIVDKVVVGRIDKDGTVHPYDLTFYFKTGVKDSQDSNNFKDKRKNAKDNDINKLCSYKNDEDKKLCSQSKDNARG

SEQ ID NO: 19702 - DNA, 50 bp, Streptococcus dysgalactiae; identical to SEQ ID NO: 10557
  source 1..50: mol_type = genomic DNA

SEQ ID NO: 19703 - DNA, 40 bp, Streptococcus dysgalactiae; identical to SEQ ID NO: 19693
  source 1..40: mol_type = genomic DNA

SEQ ID NO: 19704 - DNA, 50 bp, Streptococcus dysgalactiae
  source 1..50: mol_type = genomic DNA
atgttcccaatcaaaagacaacgcaggtggagactatagcgttgatacaa

SEQ ID NO: 19705 - DNA, 40 bp, Streptococcus dysgalactiae; identical to SEQ ID NO: 19695
  source 1..40: mol_type = genomic DNA

SEQ ID NO: 19706 - protein, 585 aa, Streptococcus dysgalactiae
MNTKVKVIKASNTGARNRNSIHLDLKRVAAYCRVSTDSKDQLESYKSQVDYYTNLIKNNKSWTLAGIYADEATTGTTATKRADFIRLISDCQNGDIDMIITKSISRFARNTLDTLKYVRLLKENNVGVVFEEENIDTLTMDGELLLTILSSVAQQEVENTSAHVKKGLKMKMEKGELIGFQGCLGYDYDPTTKSISINEEEAKIVRYIFKRYLEGNGGSVIGRELEEQGYLTPRGKTKWSDTTVLGIIKNEKYIGDILMGKTFTVDPITKRRLANFGESDKYHIENHHEPIISREDFEKAQEIRLRRAQNRNTIANKDRKREKLSRQYAFSSMLECGFCGEILSRRTWHTSSIYKKINWQCVKSTKKGKKYCPHSKGIQEAAIEKAFVESYRQLCHADSTVIDDFLKIVEEEINDNTLVKDLKKLENQLNRIISQERKLVDLHLEDSIDEEVYAKKYKKLTKQKEELLDEKKTLELTIKDEDSIKERLKQFKKVLENKEIIEEFNRTVFESIVDKVVVGRIDKDGTVHPYDLTFYFKTGVKDSQDSNNFKDKRKNAKDNDINKLCSYKNDEDKKLCSQSKDNARG

SEQ ID NO: 19707 - DNA, 50 bp, Streptococcus dysgalactiae; identical to SEQ ID NO: 10557
  source 1..50: mol_type = genomic DNA

SEQ ID NO: 19708 - DNA, 40 bp, Streptococcus dysgalactiae; identical to SEQ ID NO: 19693
  source 1..40: mol_type = genomic DNA

SEQ ID NO: 19709 - DNA, 50 bp, Streptococcus dysgalactiae; identical to SEQ ID NO: 19704
  source 1..50: mol_type = genomic DNA

SEQ ID NO: 19710 - DNA, 40 bp, Streptococcus dysgalactiae; identical to SEQ ID NO: 19695
  source 1..40: mol_type = genomic DNA

SEQ ID NO: 19711 - protein, 589 aa, Streptococcus dysgalactiae
MKKEVKVIKGDTTLKRTASGCVERSIKRVAAYCRVSTDTEDQINSYNSQVEHYTEFIQKNNEWTLAGIYADEAITGTQVDRRIDFQRLINDCMNGDIDMIITKSISRFARNTLDTLKYVRKLKEFNVAVFFEEENINTLTMDGELLLTILSSVAQQEVENISANVKKGLRMKMERGEMVGFQGCLGYDYDPETKSISINEKEAEIVRYIFRRYIEGVGGMVISRELEEQGYLSPRGNKRWTETTVLGIIKNEKYKGDLMMGKTYTVDPISKRRLDNFGEQDKFYIENHHEPIISEEDFEKAQGIRLRRSKNRNTVANNGGKREKYSRKYAFSSMLECGFCGYNLSRRNWHSSSEYTKVIWQCVNATKNGKKYCPHSKGIEEEAIEKAFMESYRQVCHNNVEITNEFLKTVEEELKDNSLSKDLKKISNQLDKILKKEKDLVELRLNESISMDIYQDKYNEIAISKEKLLAEKRTLEVTLTDEKALKKRLEGFKKLLESNKYLEEFDRAVFESIVDKIIIGGTNDEGEIDPAMITIIYKTGKKDSQDGRLFKSRRKNAKEVNEKADSKLYPQSSDEVNNLYSYPIDNTRG

SEQ ID NO: 19712 - DNA, 50 bp, Streptococcus dysgalactiae
  source 1..50: mol_type = genomic DNA
gtattcctatcctattgacaacacatgtggagacggtggcgttattgtcc

SEQ ID NO: 19713 - DNA, 40 bp, Streptococcus dysgalactiae; identical to SEQ ID NO: 19693
  source 1..40: mol_type = genomic DNA

SEQ ID NO: 19714 - DNA, 50 bp, Streptococcus dysgalactiae
  source 1..50: mol_type = genomic DNA
gtattcctatcctattgacaacacaggtggagacggtggcgttattgtcc

SEQ ID NO: 19715 - DNA, 40 bp, Streptococcus dysgalactiae; identical to SEQ ID NO: 19695
  source 1..40: mol_type = genomic DNA

SEQ ID NO: 19716 - protein, 610 aa, Streptococcus dysgalactiae
MFCKCGIIELHRKIQKGGGAVKKDVKVIKGDTTLKRTASGCVQRSIKRVAAYCRVSTDTEDQINSYNSQVEHYTEFIQKNKEWTLAGIYADEAITGTQVDRRIDFQRLINDCMNGDIDMIITKSISRFARNTLDTLKYVRKLKEFNVAVFFEEENINTLTMDGELLLTILSSVAQQEVENISANVKKGLRMKMERGEMVGFQGCLGYDYDPETKSISINEKEAEIVRYIFRRYIEGVGGMVISRELEEQGYLSPRGNKRWTETTVLGIIKNEKYKGDLMMGKTYTVDPISKRRLDNFGEQDKFYIENHHEPIISEEDFEKAQGIRLRRSKNRNTVANNGGKREKYSRKYAFSSMLECGFCGHNLSRRNWHSSSEYTKVIWQCVNATKNGKKYCPHSKGIEEEAIEKAFMESYRQVCHNNVEITNEFLKTVEEELKDNSLAKDLKKITNQLDKILKKEKDLVELRLNESISMDIYQDKYNEIAISKEKLLAEKRTLEVTLTDEKALKKRLEGFKKLLESNKYLEEFDRSVFESIVDKIIIGGTNDEGEIDPAMITIIYKTGKKDSQDGRLFKSRRKNAKEVNEETDNKLYPHSSDEVNNLYSYPIDNTRGV

SEQ ID NO: 19717 - DNA, 50 bp, Streptococcus dysgalactiae; identical to SEQ ID NO: 1792
  source 1..50: mol_type = genomic DNA

SEQ ID NO: 19718 - DNA, 40 bp, Streptococcus dysgalactiae; identical to SEQ ID NO: 19693
  source 1..40: mol_type = genomic DNA

SEQ ID NO: 19719 - DNA, 50 bp, Streptococcus dysgalactiae
  source 1..50: mol_type = genomic DNA
gtattcctatcctattgacaacacaggtggagtgcatagcgttgatacaa

SEQ ID NO: 19720 - DNA, 40 bp, Streptococcus dysgalactiae; identical to SEQ ID NO: 19695
  source 1..40: mol_type = genomic DNA

SEQ ID NO: 19721 - protein, 590 aa, Streptococcus dysgalactiae
MKKEVKVIKGDTTLKRTASGCVERSIKRVAAYCRVSTDTEDQINSYNSQVEHYTEFIQKNNEWTLAGIYADEAITGTQVDRRIDFQRLINDCMNGDIDMIITKSISRFARNTLDTLKYVRKLKEFNVAVFFEEENINTLTMDGELLLTILSSVAQQEVENISANVKKGLRMKMERGEMVGFQGCLGYDYDPETKSISINEKEAEIVRYIFRRYIEGVGGMVISRELEEQGYLSPRGNKRWTETTVLGIIKNEKYKGDLMMGKTYTVDPISKRRLDNFGEQDKFYIENHHEPIISEEDFEKAQGIRLRRSKNRNTVANNGGKREKYSRKYAFSSMLECGFCGYNLSRRNWHSSSEYTKVIWQCVNATKNGKKYCPHSKGIEEEAIEKAFMESYRQVCHNNVEITNEFLKTVEEELKDNSLSKDLKKISNQLDKILKKEKDLVELRLNESISMDIYQDKYNEIAISKEKLLAEKRTLEVTLTDEKALKKRLEGFKKLLESNKYLEEFDRAVFESIVDKIIIGGTNDEGEIDPAMITIIYKTGKKDSQDGRLFKSRRKNAKEVNEKADSKLYPQSSDEVNNLYSYPIDNTRGV

SEQ ID NO: 19722 - DNA, 50 bp, Streptococcus dysgalactiae; identical to SEQ ID NO: 1792
  source 1..50: mol_type = genomic DNA

SEQ ID NO: 19723 - DNA, 40 bp, Streptococcus dysgalactiae; identical to SEQ ID NO: 19693
  source 1..40: mol_type = genomic DNA

SEQ ID NO: 19724 - DNA, 50 bp, Streptococcus dysgalactiae; identical to SEQ ID NO: 19719
  source 1..50: mol_type = genomic DNA

SEQ ID NO: 19725 - DNA, 40 bp, Streptococcus dysgalactiae; identical to SEQ ID NO: 19695
  source 1..40: mol_type = genomic DNA

SEQ ID NO: 19726 - protein, 590 aa, Streptococcus dysgalactiae
MKRDVKVIKGDTTLKRTASGCVERSIKRVAAYCRVSTDTEDQINSYNSQVEHYTDFIKQNNEWTLAGIYADEAITGTQVDRRIDFQRLINDCMNGDIDMVITKSISRFARNTLDTLKYVRKLKEYNVAVFFEEENINTLTMDGELLLTILSSVAQQEVENISANVKKGLRMKMERGEMVGFQGCLGYDYDPETKSISVNEKEAEIVRYIFRRYLEGVGGMVISRELEEQGYLSPRGHKRWTETTVLGIIKNEKYKGDLLMGKTFTVDPISKRRLDNFGEQDKFYIENHHEPIISEEDFEKAQGIRLRRAKNRNTVANNGGKREKYSRKYAFSSMLECGFCGHMLSRRNWHSSSEYTKVIWQCVNATKNGKKYCPHSKGIEEEAIEKAFMESYRQVCHNNVEITNEFLKTVEEELKDNSLAKDLKKISNQLDKILKKEKDLVELRLNEAISMEIYQEKYNEIAISKEKLLEEKRTLEVTLTDEKALKKRLEGFKKLLESNKYLEEFDRTVFESIVDKIVIGGTNDDGDIDPAMITIIYKTGKKDSQNGRLFKSRRKNAKVVEENDGDKLYSQSSNEVNKLCSYSTDNTRGV

SEQ ID NO: 19727 - DNA, 50 bp, Streptococcus dysgalactiae
  source 1..50: mol_type = genomic DNA
gtgttcctattcaacagacaacacatgtggagtgcatagcgttgatacaa

SEQ ID NO: 19728 - DNA, 40 bp, Streptococcus dysgalactiae; identical to SEQ ID NO: 19693
  source 1..40: mol_type = genomic DNA

SEQ ID NO: 19729 - DNA, 50 bp, Streptococcus dysgalactiae
  source 1..50: mol_type = genomic DNA
gtgttcctattcaacagacaacacaggtggagtgcatagcgttgatacaa

SEQ ID NO: 19730 - DNA, 40 bp, Streptococcus dysgalactiae; identical to SEQ ID NO: 19695
  source 1..40: mol_type = genomic DNA

SEQ ID NO: 19731 - protein, 590 aa, Streptococcus dysgalactiae
MKKEVKVIKGDTTLKRTASGCVERSIKRVAAYCRVSTDTEDQINSYNSQVEHYTEFIQKNNEWTLAGIYADEAITGTQVDRRIDFQRLINDCMNGDIDMIITKSISRFARNTLDTLKYVRKLKEFNVAVFFEEENINTLTMDGELLLTILSSVAQQEVENISANVKKGLRMKMERGEMVGFQGCLGYDYDPETKSISINEKEAEIVRYIFRRYLEGVGGMVISRELEEQGYLSPRGHKRWTETTVLGIIKNEKYKGDLLMGKTFTVDPISKRRLDNFGEQDKFYIENHHEPIISEEDFEKAQGIRLRRAKNRNTVANNGGKREKYSRKYAFSSMLECGFCGHMLSRRNWHSSSEYTKVIWQCVNATKNGKKYCPHSKGIEEEAIEKAFMESYRQVCHNNVEITNEFLKTVEEELKDNSLAKDLKKITNQLDKILKKEKDLVELRLNESISMDIYQDKYNEIAISKEKLLAEKRTLEVTLTDEKALKKRLEGFKKLLESNKYLEEFDRAVFESIVDKIIIGGTNDEGEIDPAMITIIYKTGKKDSQDGRLFKSRRKNAKEVNEETDNKLYPHSSDEVNNLYSYPIDNTRGV

SEQ ID NO: 19732 - DNA, 50 bp, Streptococcus dysgalactiae; identical to SEQ ID NO: 1792
  source 1..50: mol_type = genomic DNA

SEQ ID NO: 19733 - DNA, 40 bp, Streptococcus dysgalactiae; identical to SEQ ID NO: 19693
  source 1..40: mol_type = genomic DNA

SEQ ID NO: 19734 - DNA, 50 bp, Streptococcus dysgalactiae; identical to SEQ ID NO: 19719
  source 1..50: mol_type = genomic DNA

SEQ ID NO: 19735 - DNA, 40 bp, Streptococcus dysgalactiae; identical to SEQ ID NO: 19695
  source 1..40: mol_type = genomic DNA

SEQ ID NO: 19736 - protein, 516 aa, Clostridium saudiense
MNNVACYIRVSTDKIDQQNSLEKQRILLQEQYKDCNISMYSDTGTGTSFKRKGFKQLLFDCGLNEKILKDGRLTFEVDAIREPLFNEIVVINTSRFARNIAIIDILRVLWDYKKVNVKFLDVQKNSNNPSDMILLQMFFAMAENEVAETSKRTKRGNKTTIMQNKIRNNSIFGWDFDRETNSLIANEKEKKVVEFIFETALTNGLKNTAKLVNEKGYRTKKGNLWTDSTIKTLITNPKYKGYNVRNKYESINLFTESRSKYVKKENWVVMKNNRIEPLVSEELWEKVQQALKQRCIAGNKGQNARIYDTRGKVKCKCGANYVRCVTTKVTNEPKDKHYLICGNKKKYGKDYCKAENITVGILDRFIEEQRKSYYKNIQLQTRVKIMQLQKEVDNIAKDEVFSIKEKEQELDVLREKLDKLLDTFLSSSETMQKLVEKKIGELEVHIKRIELEISNIKSIYADKEKHLRQLNNRIIKLKQDLINSIDKELTRKEWLDKVDKIIIESKISFNVVYNLD

SEQ ID NO: 19737 - DNA, 50 bp, Clostridium saudiense
  source 1..50: mol_type = genomic DNA
attgtcataaaggtattatggagggacacttaagataacttaatgacaac

SEQ ID NO: 19738 - DNA, 40 bp, Clostridium saudiense
  source 1..40: mol_type = genomic DNA
tctggaattgcgaggagtggactactaaagttgtatagta

SEQ ID NO: 19739 - DNA, 50 bp, Clostridium saudiense
  source 1..50: mol_type = genomic DNA
attgtcataaaggtattatggaggtacacttaagataacttaatgacaac

SEQ ID NO: 19740 - DNA, 40 bp, Clostridium saudiense
  source 1..40: mol_type = genomic DNA
attggaaatggcaggattgtactgctaaagctggatagta

SEQ ID NO: 19741 - protein, 568 aa, Streptococcus cristatus
MNRTLTISDYRQVDTSKLSDITVVYCRLSQDDGLDGDSNSIINQKKILLDVVTKENLPNPILFVDDGFSGTNFDRPAILEALRLVENRQVSNFIVKDLSRLGRSYIKVGQLTEITFPSFDVRFIALNDGVDSNKPNETNSIFLPIKSLMDEMYAADTSKKIRAVVQAKAKAGERVTTNPPYGYLKDSNNPKNWIIDPVASEVVKRIFQEAKSGKSLSEISKGLENDKIFKPDRHRIEIGLKSISSSPNVETLPYFWTRETLSAILGREEYLGHTVNLRTRTKSYKDKRKVDNLKEDWLVFKNTHEAIIDQETFDIVQKMRSHKRSNQRYKNRAGHENLFAGLVFCGTCGRKHYFCPFQSKTGLNHDHYKCSGYRKPIDGCENPHYIQKSALIEIVSDKLRQTIHECQLDQETFLKKLEQQSQAQFSKDNKRQRQQLQKDEHRSKEIDGIIQKLYEDNLLGKISDERFVKLSQSYEEEQKQLQTSISDLTEKLAKQQEDSLNISKFMVRISKYTELPELTVEIVNELIDKIVIHKPTGTKRNRIIQIDIYYNFIGKLNNEKSEPNNLAR

SEQ ID NO: 19742 - DNA, 50 bp, Streptococcus cristatus
  source 1..50: mol_type = genomic DNA
ggaagaaatggggttataggtgccaaaaaatataaaagatgatataatga

SEQ ID NO: 19743 - DNA, 40 bp, Streptococcus cristatus
  source 1..40: mol_type = genomic DNA
ctttgaagctgtaggtgctaaaaagcctattttatgctat

SEQ ID NO: 19744 - DNA, 50 bp, Streptococcus cristatus
  source 1..50: mol_type = genomic DNA
ggaagaaatggggttataggtgccttaaaatataaaagatgatataatga

SEQ ID NO: 19745 - DNA, 40 bp, Streptococcus cristatus
  source 1..40: mol_type = genomic DNA
ttttttaactgttgttgctttaaagtctattctatgatat

SEQ ID NO: 19746 - protein, 467 aa, Mammaliicoccus sciuri
MKVAIYCRVSTLEQSREGHSIDEQRKRLKAFCEVQDWEIYDEYIDPGFSGGNTSRPGLDKLMNDLDKIDLILVYKLDRLTRSVKDLMNLLEIFEKNDVSFRSATEVFDTTNAFGKLFITLVGAMAEWERSTIAERTKMGRQAATQKGIYTTGPPFYYDKVDGKLVPNEKREIADYIVKRSLDGISIRGITEELTLSKYSPPKGKIWDRTTVSYVLTSPVSRGHTKIGDVLVKNTHEPIMNEETYQLIMEKTRSRTRTKKRSHTTIFRNKLVCHQCGKKLTLNTWRRKKKDGSYRYNASYICEKCQKNKEVSSFSLQKELVEKAFISYLSKADFKEDELDINKKTEHIDIIDGDKILKQREKYQQAFSLDLITLEEFTRRMNETQKAYKLYEEQLEELNKRKSKDIKIEEVIELRDTIISSWQLLSETDKESLVRSSIKNIYYTFIEGSGYGKNRIPNDLIVNHIDFY

SEQ ID NO: 19747 - DNA, 50 bp, Mammaliicoccus sciuri
  source 1..50: mol_type = genomic DNA
agtgtgggtaacggtggaacgtttgggaaagtaccacctttattcccact

SEQ ID NO: 19748 - DNA, 40 bp, Mammaliicoccus sciuri
  source 1..40: mol_type = genomic DNA
tatgggaggaggaacgtttggaaattggacacctactgct

SEQ ID NO: 19749 - DNA, 50 bp, Mammaliicoccus sciuri
  source 1..50: mol_type = genomic DNA
agtgtgggtaacggtggaacgtttgagaaagtaccacctttattcccact

SEQ ID NO: 19750 - DNA, 40 bp, Mammaliicoccus sciuri
  source 1..40: mol_type = genomic DNA
tatgggagtaggaacttttgaagtttcactacttactgct

SEQ ID NO: 19751 - protein, 539 aa, Aerococcus urinae
MSRTKKYVAGLYCRLSKDDGNSVESMSIWSQKVMLKQYAESNSITIYDYYVDDGYSGTNFERPSFKKMITDIENGKINCVITKDLSRLGRNYLQSGAYIEMYFPQKNIRYIAITDGIDTLNSNQNDIMPFKNILNEMYAKDTSKKVKSAIQSRMREGTYIGSKAPFGYLKDPNNKRRLIIDEKTKPIIELIYKLCLEGKGTQLISQELMKRKIPRPSAFVENAEKLYGLTEENKYQWSHRMVLNVLRDPVYCGNMARNKRPTLSFKNSKRMYIPKSDYIYAKDTHEGIVSEEIWEQVQTMIDKRKCNNKKGLYYDNIFQGLVRCRKCGYALTPKTDYRLKKKELIDFVHFSCSTYKKYGVNACSSHRIEARDLYNIVLEDIQYHGSMALSAKEDFVEKIIEKIEVEKIDEGKELSNKLELKKNQLAELDRSYEQLYEDRLEGNITERNFNLMNVSISKKQDKLIEEIKVLEGDIEVSFETEDNYKKFMNNISKYAKIKTLNRYILNQIIDKIYVYDKEEIDGQISQKVEIHYKFIGKLN

SEQ ID NO: 19752 - DNA, 50 bp, Aerococcus urinae; identical to SEQ ID NO: 4037
  source 1..50: mol_type = genomic DNA

SEQ ID NO: 19753 - DNA, 40 bp, Aerococcus urinae
  source 1..40: mol_type = genomic DNA
cgtcccttggagaccgtctgacctagagcaaagaagtggt

SEQ ID NO: 19754 - DNA, 50 bp, Aerococcus urinae; identical to SEQ ID NO: 4039
  source 1..50: mol_type = genomic DNA

SEQ ID NO: 19755 - DNA, 40 bp, Aerococcus urinae; identical to SEQ ID NO: 4040
  source 1..40: mol_type = genomic DNA

SEQ ID NO: 19756 - protein, 506 aa, Streptococcus agalactiae; identical to SEQ ID NO: 12241

SEQ ID NO: 19757 - DNA, 50 bp, Streptococcus agalactiae; identical to SEQ ID NO: 12242
  source 1..50: mol_type = genomic DNA

SEQ ID NO: 19758 - DNA, 40 bp, Streptococcus agalactiae
  source 1..40: mol_type = genomic DNA
agtaggtgcttcaggtgcaggaaaatcaacctttcttcgt

SEQ ID NO: 19759 - DNA, 50 bp, Streptococcus agalactiae; identical to SEQ ID NO: 12242
  source 1..50: mol_type = genomic DNA

SEQ ID NO: 19760 - DNA, 40 bp, Streptococcus agalactiae
  source 1..40: mol_type = genomic DNA
agttgttgcctcaagtgcaggaaaatcaattttcctttga

SEQ ID NO: 19761 - protein, 513 aa, Clostridium argentinense
MRRAVLYGRVSSDEQKKRETIGNQVEIFESYIDFKADFKVCNMYLDDGISGAIPLYDRPFGKKLIEDAKKGLFDIIIVWKVDRFGRDTLTGLQAVEVLREYGIEIISITEPFDLNTPTGRYQFINYLNMAELERNNILDRTFMGATRAAKKGKWLGGIVPYGYIVNNDGYLEINEEEAKVIRDIFNLYINEKMSNLDIAVYLNNLNIPSSCGEGKGKRTKKITGKWRSSSIQRILSSTTYKGVHLYGKRSTRRKEPILRKVPIIISEEIWEKVQKQKKENIIVSKRNIKIRDYLLRGLIKCKHCGKSFYGISYKDKNCVYSCSGKRSENKKVMNIKCNSININTQDIEEEVWKDCLLILKNYDNYIKKVKNKSNVTSENIEGDLEKLRKSLNNKKLEKNNILTLFRKNLITEEELEEQLKDIRKEEESALKLINAIEIKLDSHNYEDELINNMCSKLKMYHDKVDNLSFEDKYKIVRLLVKEIQAETIVKDGKRIPKAHVVYNLVKHEDYMGM

SEQ ID NO: 19762 - DNA, 50 bp, Clostridium argentinense
  source 1..50: mol_type = genomic DNA
ggtcaaacatgaggactacatgggcatgggtgcagatagtaagtttgacc

SEQ ID NO: 19763 - DNA, 40 bp, Clostridium argentinense
  source 1..40: mol_type = genomic DNA
gccaaaaaatccacaaggacatggatttaaagctgctata

SEQ ID NO: 19764 - DNA, 50 bp, Clostridium argentinense
  source 1..50: mol_type = genomic DNA
ggtcaaacatgaggactacatggggatgggtgcagatagtaagtttgacc

SEQ ID NO: 19765 - DNA, 40 bp, Clostridium argentinense
  source 1..40: mol_type = genomic DNA
accaaaaaagccagaagcagatggatttacagctgaattc

SEQ ID NO: 19766 - protein, 451 aa, Leptotrichia trevisanii
MKAVIYARVSTEMQEEGRSLEFQIRKCEDFCKMSGYKLKEVIQDVESGGNDNREGFLKLQQEIKKKSFDVLVVYESSRISRITLTMLNFVLELQKSNIKFVSISQSEINTTTPTGMLFFQIFAVLADYERKQISMRVKSNKWARAKAGIWQGGIIPIGYKKDEHNNIVIDPETSEDVISIFNTYLNTKSISETANIFHRNISSVKWILQNEFYIGNLMYGRKENNINTGEVKINKEITIFKGNHQALISEDLFREVQRQMLFKQRVIRKDGKFLFTGILECTCGGKMFKNGVNYRCDKCKKAISMKKAEKFIIHKLLNLKELEFLNEKPDLEKYKKDRENIDKQIKKIDRERTKYLELFTKELINEFELNDKLEELKNRKRVFEDSLNDIDRIIKDKTISEEKLDNIKILKEVLENMDETDRYNLFLMFRMLIKRVKIKKYQPLEVLILLN

SEQ ID NO: 19767 - DNA, 50 bp, Leptotrichia trevisanii
  source 1..50: mol_type = genomic DNA
ttgtgtgggcttttatggtgcgaaagtacgcactaatcttaaccacacat

SEQ ID NO: 19768 - DNA, 40 bp, Leptotrichia trevisanii
  source 1..40: mol_type = genomic DNA
aattttcaaatggtgcgaaaggtgggactcgaacccacat

SEQ ID NO: 19769 - DNA, 50 bp, Leptotrichia trevisanii
  source 1..50: mol_type = genomic DNA
ttgtgtgggcttttatggtgcgaaattacgcactaatcttaaccacacat

SEQ ID NO: 19770 - DNA, 40 bp, Leptotrichia trevisanii; identical to SEQ ID NO: 4060
  source 1..40: mol_type = genomic DNA

SEQ ID NO: 19771 - protein, 501 aa, Faecalibacterium prausnitzii; identical to SEQ ID NO: 11481

SEQ ID NO: 19772 - DNA, 50 bp, Faecalibacterium prausnitzii; identical to SEQ ID NO: 10927
  source 1..50: mol_type = genomic DNA

SEQ ID NO: 19773 - DNA, 40 bp, Faecalibacterium prausnitzii
  source 1..40: mol_type = genomic DNA
tccttgtaatgctccatgtaatcaatatccaaaaccacag

SEQ ID NO: 19774 - DNA, 50 bp, Faecalibacterium prausnitzii
  source 1..50: mol_type = genomic DNA
ctgtgtgcccttgtcaagcgatgtttacatcgcttgacaagggcacacag

SEQ ID NO: 19775 - DNA, 40 bp, Faecalibacterium prausnitzii
  source 1..40: mol_type = genomic DNA
tccttcttatgctcaatgttttcaatattttaatacagag

SEQ ID NO: 19776 - protein, 585 aa, Enterocloster aldenensis
MSKRRVVFYGRVSTQSDAQLSAFDNQMLWYKQLLAMHPEWTVVGEYEDAGVTGTSVRKRKGFQQMLDDGIKYHKYDLIVTRETKRFARNTVDTLSYVRLLKKHEIEVYFVNDGIWTISDNDGELRLSIMATIAQEESRKTSENVRAGQRISRQKGVLRGTGNILGYRRVGKNQFEVDTDQAVIVKHIYKWYLNGDGIRTIKRKLEEHGYKTATGKSHWQFQVIDDILSNPFYTGRQRQMEKVSDGYLTQNRVRNSPDQIEYIQGNYEPIISEEAFKEVERIRKQRYNKMNSKGKRESKSVWCGKYLCGCGCGTVRRVASGNEYIFICHSQHTQGIRKKSEDNECTASGLSDSCSLRTILEWKLDLIAWHVINDVWGSSKTDMSQALKMIEECYREETTMSQMEINGIKDKIEKLENRKRGLLDMRADGEITKEEYAAKRNEYDIQINQLNISIAEAETNQIVSSDFNKKISGIKQALEKILDLSQPKLNRDIVDGFVWKLIHISDNEFDIYLSMGNENFGDVGSEEKVIKYKVFESSNPRREERVKCTKLKSIRLTYDDAVSYRAMSGKRVLKNKWGDLVVNIYI

SEQ ID NO: 19777 - DNA, 50 bp, Enterocloster aldenensis
  source 1..50: mol_type = genomic DNA
tagtggtgtttgttcagccccatttggatgggattgaacgaaggatacta

SEQ ID NO: 19778 - DNA, 40 bp, Enterocloster aldenensis
  source 1..40: mol_type = genomic DNA
gacgtagtccatgcctttctggatggcattcgtgaacttc

SEQ ID NO: 19779 - DNA, 50 bp, Enterocloster aldenensis; identical to SEQ ID NO: 19777
  source 1..50: mol_type = genomic DNA

SEQ ID NO: 19780 - DNA, 40 bp, Enterocloster aldenensis
  source 1..40: mol_type = genomic DNA
caagttgtccctgcctttctggatggaatcattgtacttc

SEQ ID NO: 19781 - protein, 509 aa, Tritonibacter mobilis
MKETQQDKQAIIYCRVSSRAQEADGHGLQSQETRCREYAVSKGYHVAAVFPDTFTGGGDFMKRPGMVALLSFLDAQPDTRFVVIFDDLKRFARDTRFHLDLREAFRKRKAEIECLNFKFEDTPEGEFIETIMAAQGALERKQNGRQVSQKMKARMQSGYWVHNAPTGYRYKTVKGHGKLLIPDEPLASLVKEGLEGFASGRFQTQVEVRRFFETCPDFPRNKHGQIIQQRISDMLTQPLYAGYICSETYGLSFLKGQHEPLISLKTFDKIQKARRETAYAPARKDIGEDFALRGFVTCGDCCVPLRSSWATGKYKRYPYYLCQTKGCPSYGKSIPRDRLEADFGTVVKTLQPSASLFALAKVMFQHAWQARLSQAEEAVASAKRQITQIETQIESLLGRIMATSNDTVIGAYEAKIAGLEKDKLRLMENAQNGVPAAGRLEDMLELSLKFLSSPWKLWESGDMTLRRTLLRLAFTDRIAYHRNAGARTPSIALPFKALGVFQQGQLKNG

SEQ ID NO: 19782 - DNA, 50 bp, Tritonibacter mobilis
  source 1..50: mol_type = genomic DNA
tgtttcaacagggtcagttgaaaaatggtgcacctgcgcgttttgatcta

SEQ ID NO: 19783 - DNA, 40 bp, Tritonibacter mobilis
  source 1..40: mol_type = genomic DNA
ttggcatgcaactgattttatggtgctgctggagagaatt

SEQ ID NO: 19784 - DNA, 50 bp, Tritonibacter mobilis
  source 1..50: mol_type = genomic DNA
tgtttcaacagggtcagttgaaaaagggtgcacctgcgcgttttgatcta

SEQ ID NO: 19785 - DNA, 40 bp, Tritonibacter mobilis
  source 1..40: mol_type = genomic DNA
ttggcaagcaactgagtgtagggtggggcaggggagagtg

SEQ ID NO: 19786 - protein, 480 aa, Streptococcus gordonii
MQTINKVAIYVRVSTTNQAEEGYSIDEQKDKLKSYCQIKDWNVYKVYTDGGFSGSNTERPALEKLIKDAKNKKFDTVLVYKLDRLSRSQKDTLYLIEEIFIKNGIEFLSLQENFDTSTPFGKAMIGLLAVFAQLEREQIKERMQLGKLGRAKSGKSMMWARTSYGYDYHRDTGAMTINELEAIAIRDIFESYLNGMSVTKIRDMLNDKYPKTPNWHYRIVRGILANPVYCGYNQYKGHVFPGNHEPIITEEAFNKTQEELKIRQQTALEKFNPRPFRAKYMLSGIAQCGYCGAPLSITLGTIRKDGTRNIRYQCKNRFPRATKGVTVYNGNKKCDSGFYEKSDIEQYVIEQICKLQHDKKYVEELFADHGPSVDRVACQKQIDLLTNKISRLNDLYIDDRITLEELQTKSSEFSSQRSILEEELENDPALKRKKREAEMKKILKTDDILDMDYERQKTIVRSLINKVRVTVDKIVIKWKI

SEQ ID NO: 19787 - DNA, 50 bp, Streptococcus gordonii
  source 1..50: mol_type = genomic DNA
ataagagttttactatccttgatttcaatgctggtttctaaaattgttta

SEQ ID NO: 19788 - DNA, 40 bp, Streptococcus gordonii
  source 1..40: mol_type = genomic DNA
cagaaggacgactaacatttccactaaagtaaaggctttt

SEQ ID NO: 19789 - DNA, 50 bp, Streptococcus gordonii
  source 1..50: mol_type = genomic DNA
ataagagttttactatccttgatttaaatgctggtttctaaaattgttta

SEQ ID NO: 19790 - DNA, 40 bp, Streptococcus gordonii
  source 1..40: mol_type = genomic DNA
tacaaggatgactaacatttacactaatgaaaaacctgtc

SEQ ID NO: 19791 - protein, 480 aa, Streptococcus gordonii
MQTINKVAIYVRVSTTNQAEEGYSIDEQKDKLKSYCQIKDWNVYKVYTDGGFSGSNTERPALEKLIKDAKNKKFDTVLVYKLDRLSRSQKDTLYLIEEIFIKNGIEFLSLQENFDTSTPFGKAMIGLLAVFAQLEREQIKERMQLGKLGRAKSGKSMMWARTSYGYDYHRETGAMTINELEAIAIRDIFESYLNGMSVTKIRDMLNDKYPKTPNWHYRIVRGILANPVYCGYNQYKGHVFLGNHEPIITEEAFNKTQEELKIRQQTALEKFNPRPFRAKYMLSGIAQCGYCGAPLSITLGTIRKDGTRNIRYQCKNRFPRATKGVTVYNDNKKCDSGFYEKSDIEQYVIEQICKLQHDKKYVEELFADHGPSVDRVACQKQIDLLTNKISRLNDLYIDDRITLEELQTKSSEFSSQRAILEEELENDPALKRKKREAEMKKILRTGDILGMDYERQKTIVRSLINKVRVTVDKIVIKWKI

SEQ ID NO: 19792 - DNA, 50 bp, Streptococcus gordonii
  source 1..50: mol_type = genomic DNA
ataagagttttactatccttgatttcaatgctggtttctaaaattgttga

SEQ ID NO: 19793 - DNA, 40 bp, Streptococcus gordonii; identical to SEQ ID NO: 19788
  source 1..40: mol_type = genomic DNA

SEQ ID NO: 19794 - DNA, 50 bp, Streptococcus gordonii
  source 1..50: mol_type = genomic DNA
ataagagttttactatccttgatttaaatgctggtttctaaaattgttga

SEQ ID NO: 19795 - DNA, 40 bp, Streptococcus gordonii; identical to SEQ ID NO: 19790
  source 1..40: mol_type = genomic DNA

SEQ ID NO: 19796 - protein, 580 aa, Pectobacterium brasiliense
MRKCYLYVRVSSDQQIQGDGLDRQESMLIDYFNDNAAIQGFDPQYEIIIDEGRSAFKAEHLQENAGLGKFFKQVKGGLIQPGSVLIVESLDRFSRENPFKCVEYISHLDKKQIELHDVDKRLIISRRHSNSLTFATMIAERAYEESRLKSHRIRKGWDKRRRMAKEEGQYMIKNCPPWISIVNNKYELNDNAKIIRDVFELYLSGIRSFNISKIMNDSGRLINEKLWTGTKICRVLRNVRCKGDYITNIIDRDFDNDTVNVTSDILKIYPAIVSDDEFREVQRRLEGHNYSGRIRNDLKKTLFSYVVKCSYCGSALSMSTTGEYTYLKCSNAREKNGCTASMFPYMPFEKAMLKHIKGIDIAAVLNNMDGKFNEIDKIKSEIVELEKNIDEYVQGIAKRKKKGQLIPFAMLDEQSQVEDKLKALKESLSSKSESASITHVEFSDDVHDVKNIEERARLEVELKKVIKRIDVSSEPKSKFIIADIQYYNDDNIKHVLLLNKKNGTINAVGEISHKYGWRTYSFSENSRLIFRVESNGDVWTVQARNDQSIEDIRIYMTMMVGREPDGFDYHLNESFIEWIE

SEQ ID NO: 19797 - DNA, 50 bp, Pectobacterium brasiliense
  source 1..50: mol_type = genomic DNA
tttttgtctaacgttcaatgtattttgataccatagagcttaaacaaact

SEQ ID NO: 19798 - DNA, 40 bp, Pectobacterium brasiliense
  source 1..40: mol_type = genomic DNA
ctttatagtgtcacagtttttgatgccatacatggtcaac

SEQ ID NO: 19799 - DNA, 50 bp, Pectobacterium brasiliense
  source 1..50: mol_type = genomic DNA
tttttgtctaacgttcaatgtattgtgataccatagagcttaaacaaact

SEQ ID NO: 19800 - DNA, 40 bp, Pectobacterium brasiliense
  source 1..40: mol_type = genomic DNA
ctttaaggtgacacaatttgtgatggctaatattgtcaac

SEQ ID NO: 19801 - protein, 580 aa, Pectobacterium brasiliense
MRKCYLYVRVSSDQQIQGDGLDRQESMLIDYFNDNAAIQGFDPQYEIIIDEGRSAFKAEHLQENAGLGKFFKQVKGGLIQPGSVLIVESLDRFSRENPFKCVEYISHLDKKQIELHDVDKRLIISRRHSNSLTFATMIAERAYEESRLKSHRIRKGWDKRRRMAKEEGQYMIKNCPPWISIVNNKYELNDNAKIIRDVFELYLSGIRSFNISKMMNDSGRLINEKLWTGTKVCRVLRNVRCKGDYITNIIDRDFDNDTVNVTSDILKIYPAIVSDDEFREVQRRLEGHNYSGRIRNDLKKTLFSYVVKCSYCGSALSMSTTGEYTYLKCSNAREKNGCTASMLPYMPFEKAMLKHIKGIDIAVVLNNMDGKLNEIDKTKSEIVELERNIDEYVQGIAKRKKQGQLIPFAMLDEQSQAEDRLKLLKEFLSSKLESTSVTYIEFSDDIHDVKNIEERARLEVELKKVIKRVDILSESKSKFLIADIQYYNDDYIKHVLLLNKKNGTINAVGEISNKNGWRIYSFSENSRLIFRVESNGDVWTVQARSDQSIEDIKKYMSMMVGREPDDFDYYINEDCIEWIE

SEQ ID NO: 19802 - DNA, 50 bp, Pectobacterium brasiliense
  source 1..50: mol_type = genomic DNA
attttgtctaacgttcaatgtattttgataccatagagcttatacaaact

SEQ ID NO: 19803 - DNA, 40 bp, Pectobacterium brasiliense; identical to SEQ ID NO: 19798
  source 1..40: mol_type = genomic DNA

SEQ ID NO: 19804 - DNA, 50 bp, Pectobacterium brasiliense
  source 1..50: mol_type = genomic DNA
attttgtctaacgttcaatgtattgtgataccatagagcttatacaaact

SEQ ID NO: 19805 - DNA, 40 bp, Pectobacterium brasiliense; identical to SEQ ID NO: 19800
  source 1..40: mol_type = genomic DNA

SEQ ID NO: 19806 - protein, 568 aa, Serratia fonticola
MRKCYLYLRISTEKQASGDGLDRQEAMLLDYVKDNAVKLGLDPDNYEFIVDRGKSAFKGQHMENTSGLGKFFTRLVEGKIKPHSVLIVESLDRFSRQNPFLCMKYLSVLDEHKVELHDVDKKLIISRKVPNSLTFATMIAQRAYDESCLKSDRVKKGWNRRRTKAKDDGDYMIKNTPAWISVSDKKYVLNDNHKIVREIFDLYLTGIGSFTIAQMLNKQGKFISEFKWDTAKICRILRNVRCRGDYISNIIERDLDNDEVSISEITIPNLYPAIVSVHEFSEVQRRLDKHNFMGRIRGDSKKTVFNSLLKCSLCGAALVLSTSGKYRYLKCFSAREKLGCIGTMMSYEAVEKAILTHIKNVDFEKIAKKQDITELDAIKGQVADLERYVKSFSDGFARLRDSGRTPTFEMMDQKAVAEEQLQQLRQVLLEKESAVSISNINISSDIFDVKNIKERGALEIELCKVIEKIRIMNADGNLLAITISYFSNVLLHMLIINKKTGELLNQSSLEDIEGVTWLKSSFCDINLDTKQPVYYREPTEIDTLVMGLWGELMMKVASEMKSVQTNTD

SEQ ID NO: 19807 - DNA, 50 bp, Serratia fonticola
  source 1..50: mol_type = genomic DNA
aattagtgtaatgcacatggaatgttgataccatagagcttaaacaaact

SEQ ID NO: 19808 - DNA, 40 bp, Serratia fonticola
  source 1..40: mol_type = genomic DNA
tttgatggtgtcacaatttttgatgccgaacatggtcagc

SEQ ID NO: 19809 - DNA, 50 bp, Serratia fonticola
  source 1..50: mol_type = genomic DNA
aattagtgtaatgcacatggaatggtgataccatagagcttaaacaaact

SEQ ID NO: 19810 - DNA, 40 bp, Serratia fonticola; identical to SEQ ID NO: 19800
  source 1..40: mol_type = genomic DNA

SEQ ID NO: 19811 - protein, 536 aa, Acidaminococcus intestini; identical to SEQ ID NO: 13136

SEQ ID NO: 19812 - DNA, 50 bp, Acidaminococcus intestini; identical to SEQ ID NO: 3602
  source 1..50: mol_type = genomic DNA

SEQ ID NO: 19813 - DNA, 40 bp, Acidaminococcus intestini
  source 1..40: mol_type = genomic DNA
ttgttacagaagccagtccaaggcttctggcataaagcgg

SEQ ID NO: 19814 - DNA, 50 bp, Acidaminococcus intestini; identical to SEQ ID NO: 13139
  source 1..50: mol_type = genomic DNA

SEQ ID NO: 19815 - DNA, 40 bp, Acidaminococcus intestini
  source 1..40: mol_type = genomic DNA
ttgttgtccaagctagtctcaggcttctggcatcaagcaa

SEQ ID NO: 19816 - protein, 601 aa, Vibrio kanaloae
MVFFGEDMEVIDAYIYSRVSKESQAREGEGLRRQIERAEKFIETENKINTNYRYQLVDEIVDAGLSAYYGKNTSKNGGLGAFLEAAKQGEIKEKSLLIVEAVDRLSRLHVDRSRHLFAKLKKYKIDVAITKFSLIIRHDEQLDMGVDLLLTAAFHLAHMESEQKSQRIKATFDRKRRDEILGGEKRTSVCPTWMELSSCKTDFELIPERVEVLRAMIDMKLDGYGCHRITKYLNERNITNFSGKPWRNEMVNKYLKMIQLKGELQRVEHQIIDGKTKKVPVGAPIENYYPPVIDNSTFIALQSTFPVSVKGRVGSAFPNLFRGLLRCPSCGNILSYSKTLRGYPKLRCRSRLDNQGCTQKYTRYDPIEQHLVQSLVGLDYSRLLNTSYKKLQKEISIIDGKMESLRKSILVLSDELSELEHIETIKVYGSLIDQKHNELDILSAKRDELTKVSSSYDYNAIKELDLTTVEGRQKYHEYVAKFIDYIVVQDPDSRSSATVVKFKSQKIGILFFPFDKSSWDLSHEKILIDYYTKGEDIAGVIQRPISLSYALNRRDLLKKVSTVKPPHEPEYLADIRYLFEIKQEFKKEPDKWRSLKRMLRL

SEQ ID NO: 19817 - DNA, 50 bp, Vibrio kanaloae
  source 1..50: mol_type = genomic DNA
ggcaatactaatagattgccaactaatgaagagtatgttatagtacaaca

SEQ ID NO: 19818 - DNA, 40 bp, Vibrio kanaloae
  source 1..40: mol_type = genomic DNA
agcaatggttatcccaaccaatgaagagtttgtgattgct

SEQ ID NO: 19819 - DNA, 50 bp, Vibrio kanaloae
  source 1..50: mol_type = genomic DNA
ggcaatactaatagattgccaacttatgaagagtatgttatagtacaaca

SEQ ID NO: 19820 - DNA, 40 bp, Vibrio kanaloae
  source 1..40: mol_type = genomic DNA
agcacttgatatcctcatctatggagattttctgattgct

SEQ ID NO: 19821 - protein, 472 aa, Streptococcus lutetiensis; identical to SEQ ID NO: 14401

SEQ ID NO: 19822 - DNA, 50 bp, Streptococcus lutetiensis
  source 1..50: mol_type = genomic DNA
atttaggagcaccgactaatatagctgtgcatgaatcagaactttttacc

SEQ ID NO: 19823 - DNA, 40 bp, Streptococcus lutetiensis
  source 1..40: mol_type = genomic DNA
tttttacctactaatatagttgtacatgccataatatgct

SEQ ID NO: 19824 - DNA, 50 bp, Streptococcus lutetiensis
  source 1..50: mol_type = genomic DNA
atttaggagcaccgactaatatagaggtgcatgaatcagaactttttacc

SEQ ID NO: 19825 - DNA, 40 bp, Streptococcus lutetiensis
  source 1..40: mol_type = genomic DNA
ttttaacatactaatatagaggcacatatattattatgtt

SEQ ID NO: 19826 - protein, 490 aa, Priestia megaterium
MIGDNFIMNVGIYLRKSRGEDEVQDLAKHRDYLLKIAEDKGWKVKLYEEIASSQHYLERPALQQMLKDIEHREIDTILVYAPDRLSRKDVHFLTILDHLLQYGINKIYIKDTEYDLTSPHIRTQLSIMAVLAQAEYMLIAQRMSEGKMRSAEKGRWNGGTIKFGYTTNEENQLVINESDYPLAREIVDRLLQGFSYHSIAKNFAERGIRTKRGKVWTTASLGDWFNSPTLRGHTSYKIKGKEIFTPNTHEAIVSEAEYQAIKKLQENRENNFKKKKNNVSHWLSGVLTCSVCGWSKKVQIDTKKGNKFYIRKCKSIVEDDFGNLIPCPSIGCKSDIVEDTIREYVLRYRDSLKEDLQHLLETDVTLLKAKKSENVKQLQKELDKLELRNEHLLEDLQDRIITREEFQTAKKKNTEKKENIQAKLRDAKLQLQEIDVSVSYSQLQYAETLINRWDDLSHEDKNRLIKMLFQRIEYTRLDRGAKPELDIIPM

SEQ ID NO: 19827 - DNA, 50 bp, Priestia megaterium
  source 1..50: mol_type = genomic DNA
tactgtattcttttgggtattgtacagtcaaaacctaaaagagtacagca

SEQ ID NO: 19828 - DNA, 40 bp, Priestia megaterium; identical to SEQ ID NO: 8973
  source 1..40: mol_type = genomic DNA

SEQ ID NO: 19829 - DNA, 50 bp, Priestia megaterium
  source 1..50: mol_type = genomic DNA
tactgtattcttttgggtattgtagagtcaaaacctaaaagagtacagca

SEQ ID NO: 19830 - DNA, 40 bp, Priestia megaterium
  source 1..40: mol_type = genomic DNA
agctccagtagcttttgtagattccatcacattttctaca

SEQ ID NO: 19831 - protein, 452 aa, Listeria goaensis
MKAAIYIRVSTQEQTENYSISAQTEKLKALCLSKGWDIYDIFIDGGFTGSNINRPALQDMLSKLDKIDAVVVYRLDRLSRSQRDTLLLIEEYFLKNDVEFVSLSETLDTSSPFGRAMIGILSVFAQLERETIRDRLVMGKIKRIEDGLPLVTARGRTFGYDVIDTKLFINKEEAEHLQLIYNLFEETQSILQVQKRMKELGYEVFNRRRYKNLLTNDIYIGYVSYADKVHKKGIHEAIIKEEQFNRVQQIFKRVADLPNVNQESQSLLSGLVVCGKCGMPYSHTSKSTSYKGKKMKYRYYQCKSKRRLYQYDDCENIIIRADKLEEIVLNRITKYSSSSKIKQEENKLIKLQNKLNDLQNKKARLLELYLNSNYKKEELDSMTLKIDTQISTILSEKKVQQEKMQREDFKSILEATKFKDIKKLDFKDKQKLLRAIIDMVIINKEDIEIKWL

SEQ ID NO: 19832 - DNA, 50 bp, Listeria goaensis
  source 1..50: mol_type = genomic DNA
tttagttcatggagaactcttaatggtaggagacaacatgatacactaaa

SEQ ID NO: 19833 - DNA, 40 bp, Listeria goaensis
  source 1..40: mol_type = genomic DNA
tttcggtgcgaattatgatggtaggagggaaggaactaag

SEQ ID NO: 19834 - DNA, 50 bp, Listeria goaensis; identical to SEQ ID NO: 19832
  source 1..50: mol_type = genomic DNA

SEQ ID NO: 19835 - DNA, 40 bp, Listeria goaensis
  source 1..40: mol_type = genomic DNA
ttttggagaggagtattagggtaggagggaagggaccaag

SEQ ID NO: 19836 - protein, 609 aa, Photobacterium profundum
MKKIAYSYLRFSTPRQAKGDSYRRQMEAARKYAEEKDLSLQEDAFNDFGISAFKGRNVQNGALGDFLTLVQDGQIPKGAYLLVENHDRLSRTEPEEALHQLQSLVRAGIVVVTLHDGEMYKRGEMDVMRLMKSIIYMERAHNESMIKSQRGKSIWEKRRQDSLQTGKVCRASRLPSWLKWEGEQVVIDEDKAEAVRLMFKWCAGGAGYQTIARRLNDTRVPTFRTGVEWRAAVIAAILKNRAAIGEFQYHQKNSEDKRIPIGEPINNYYPSIVSVSSFQAVQSTIRKRDNHSGQFSKGRAHNLFTSLIKCGNCGSPMTVATKGRKTHGSPASTHFVCTRASSGGGECLNLQWDSSVIERHFKQAFPLFMDHYTRGDTDLDLTRKVNEHVSELQRDIELKQEALEYIVSAIEQGQGVQVFVSRAAALEAEIIGIREQIEDVRTQALPKTEDRAVRLERVIKLEKVLSTLDMGDVRTIAAKRLDFNAELRNIFSSIHLFWCYSHAQGVMVFVDHYGQEVLELQFQEGLEHGVALTLVEKVHDELELGCTVSDEPELLFEFEPRHKELKTYVERSQQARGAAKRRLKEKTERAEELTRLGLLEGVIAGYMNE

SEQ ID NO: 19837 - DNA, 50 bp, Photobacterium profundum
  source 1..50: mol_type = genomic DNA
agctcatgtatctaaactgtctcgcacacgcggggtgataaaccgtaaac

SEQ ID NO: 19838 - DNA, 40 bp, Photobacterium profundum
  source 1..40: mol_type = genomic DNA
catttttttaatggtgtcgcagtttttaatgccgtaggcg

SEQ ID NO: 19839 - DNA, 50 bp, Photobacterium profundum
  source 1..50: mol_type = genomic DNA
agctcatgtatctaaactgtctcgttcacgcggggtgataaaccgtaaac

SEQ ID NO: 19840 - DNA, 40 bp, Photobacterium profundum
  source 1..40: mol_type = genomic DNA
cttctttttaattgtgtacttgtttttagtgccttatgtg

SEQ ID NO: 19841 - protein, 563 aa, Streptomyces tendae
MERDDLPTLRALGFEDEELRALGLWDVPTGEPFDLAEAYIRRSKRSDDLASLRAHVRDICRTALSEGKRIRHVWFEQKSASKAYVKREEFDNAVSAVKAGLSKTLYIWKTDRLSRRGMGHVGLLLDEFDKRGARIVSVTEGLDSSKGSRMVFAILSERARDEAKDIALRTKNGVDAHKAEGKWLGGVTPFGLECPKETGKLRHKASEYPTARAIAVALLDGKTPAEIANDLNTRNVPTRKGKRWRAQTIIHLAHSPSWAGLIPNRERATDEFGQPLGKWHRGGEPLLNAKGHPIKCGKGVVSYAEWVRINALISGRSKPGSAIGDKTRGIRKAATIMTGTLRCPHCKGPMGNGGRNYRCQARINQGPSVCKGVASDRKRIDDAMGALWIGHVLRLSPESPTIHNIARRFLNYQDPEKEARKRAVSAALDSAVSRELRLNKEFFVGGMDETQYDALRNDLGAQIESLKTELAELGKDADLTPLMSTEALAALWESEGMEGKRALLSAALKSVTLLPAKCKGDRTPITERLVPEWRDTDGMPDDVREGAQKTIERRRARKLAGAA

SEQ ID NO: 19842 - DNA, 50 bp, Streptomyces tendae
  source 1..50: mol_type = genomic DNA
ggtgttgttgcgttggttcacgggcaccagtgaaccaacggtccaacacc

SEQ ID NO: 19843 - DNA, 40 bp, Streptomyces tendae
  source 1..40: mol_type = genomic DNA
ggtgaagttcatccacgcccaccagatggcgaagaagacc

SEQ ID NO: 19844 - DNA, 50 bp, Streptomyces tendae
  source 1..50: mol_type = genomic DNA
ggtgttgttgcgttggttcacgggttccagtgaaccaacggtccaacacc

SEQ ID NO: 19845 - DNA, 40 bp, Streptomyces tendae
  source 1..40: mol_type = genomic DNA
ggggaagttcattcatgcattccagatggcgtgaatgaac

SEQ ID NO: 19846 - protein, 558 aa, Clostridioides difficile
MLQTDKITALYCRLSQEDMQAGESESIQNQKLILQKYADEHHFFNTRFFVDDGFSGVSFEREGLQAMLHEVEAGNVATVITKDLSRLGRNYLKTGELIEIVFPEYEVRYIAINDGVDTAREDNEFTPLRNWFNEFYARDTSKKIRAVKQAKAQKGERVNGQVPYGYIADPNDRNHLLPDPETAHIVKQIFAMYVRGDRICEIQNWLREHEVLTVAELQYRRTGSHRHPRPHPNCIYNWPDKTLYDILARKEYLGHTITGKSYKVSYKSKKTKKNPEEKRYFFPNTHEPLIDEETFELAQKRIATKHRPTKVDEIDIFSGLLFCGDCGYKMYLQQGAGTLERKHAYTCGKYRNRVRTGELCTTHYIRKSVLKELVLADLQRVLSYVKEHEQEFIETANECSAKAVQKTLTQQRKELDKAQSRISELNILFRKLYEDNALGKLSDEQFAFLTSGYDEEKKTLTRRIAELSQEIDNATERSADVKRFVALVRKYTAITELTYENVHEFIDRILIHELDKETNTRKIEIFYSFVGRVDTGDKPTESISYFRQIGADVKSYAI

SEQ ID NO: 19847 - DNA, 50 bp, Clostridioides difficile; identical to SEQ ID NO: 77
  source 1..50: mol_type = genomic DNA

SEQ ID NO: 19848 - DNA, 40 bp, Clostridioides difficile
  source 1..40: mol_type = genomic DNA
tggtaagggtggtggtataaatataatagcagggttttca

SEQ ID NO: 19849 - DNA, 50 bp, Clostridioides difficile
  source 1..50: mol_type = genomic DNA
aggttacgttatcttacctcaacagtagctgacgttagataacgatactt

SEQ ID NO: 19850 - DNA, 40 bp, Clostridioides difficile
  source 1..40: mol_type = genomic DNA
tgagaaaagtggtgagatagttatattagcagggttctcc

SEQ ID NO: 19851 - protein, 499 aa, Mycolicibacter kumamotonensis
MKYPTRVNSATQQIRAGCYLRISSDPQDKRAGVSRQREDTAALCEIKGWRVAGHYVDNDRSASNGKQRPEWDRLLSDIKAGKVDAIAAWDQDRGWRMMRELEELRRFFAGVGRPVLFATTGQGDIDLNSPTGVLTVHIKTAVSEHEIAMMRVRQLRAARQRAESGKPKWRRAFGYLPFVGDKRDDDGTREPDPVTAPLVAEAYRAILAGASLKDVAALFNDAGHYGLTGKPWTPSTVSLFMRAPRNAALRDYQGEILGPGTWTPLVDPDLWRAVQNKMNAPGRKPGPKAVSKHLLTGMLICGGCGHHLSGHWVMQRTGGQPGRLKAGEARRPGTIAHTITYACKGCYGCSIRAEHIEPMIHAWIVGTLEAPDAVDLLKSRQHDTADAEALRVERATLLARLDEIAAERADGLIDGRGYAAMTERVNAKLADIEQRQNDAERVRIFDDLPLGTPEVAAKVAELSPDRLRAVMDVLMEVTVMPVGKGGKEFKPERVQVKWR

SEQ ID NO: 19852 - DNA, 50 bp, Mycolicibacter kumamotonensis
  source 1..50: mol_type = genomic DNA
agtgtgttcttgaacagtcgaagacattatcgactgcatgaagtacccta

SEQ ID NO: 19853 - DNA, 40 bp, Mycolicibacter kumamotonensis
  source 1..40: mol_type = genomic DNA
caagctgctgtgccgcctgcaccacctgctgaagacgttc

SEQ ID NO: 19854 - DNA, 50 bp, Mycolicibacter kumamotonensis
  source 1..50: mol_type = genomic DNA
agtgtgttcttgaacagtcgaagaagttatcgactgcatgaagtacccta

SEQ ID NO: 19855 - DNA, 40 bp, Mycolicibacter kumamotonensis
  source 1..40: mol_type = genomic DNA
caagctgctatgccacctgagccacatgatccagcagatc

SEQ ID NO: 19856 - protein, 475 aa, Lysinibacillus fusiformis
MKCVIYVRVSTYEQAKHGFSIPAQIERLEAFCVSQGWEIVEEPFIDDGESAKDLNRPEFKNMMNRIKEGGIDVLLVYRLDRLTRSVLDLYQILKDLDEYSCKFKSATEVYDTTNAMGRLFITLVAAIAQWERENTAERVFMAVEKKTKLGQWKGGTPPYGYKVVEGELQVFEEEAKVVREIFQMSRTVGFLTIAKELTNKKHPTRRGGEWHVDTVRDIANNATYAGYLSFNEKSKDSKKPPRERNLFEGIHERIIERNDFWALQDILDKRRTFGGKRETSDYYFSTLLRCARCGHSLAGHRGSNRQKTYRCSGKKVGKSCTSHIFLEESLTKSIFAHLENFGSFTNIQREADQNFERYDSLKNEIKEIQKLLQKKKQMFENDIISINELIVATGELRKKEKSIQQEIDAIEANIKNSSNEEIKEIIQNIDSLWSYADDYERKQLMQTIFTQIVVDTKDDYRGSKYPREVVIVSAR

SEQ ID NO: 19857 - DNA, 50 bp, Lysinibacillus fusiformis
  source 1..50: mol_type = genomic DNA
aagatgtcttgtatgggtggagtaacatttctacctatgtaagacatata

SEQ ID NO: 19858 - DNA, 40 bp, Lysinibacillus fusiformis
  source 1..40: mol_type = genomic DNA
tatttgggttggcggaggaacattgattccttgggcatta

SEQ ID NO: 19859 - DNA, 50 bp, Lysinibacillus fusiformis
  source 1..50: mol_type = genomic DNA
aagatgtcttgtatgggtggagtatgatttctacctatgtaagacatata

SEQ ID NO: 19860 - DNA, 40 bp, Lysinibacillus fusiformis; identical to SEQ ID NO: 4085
  source 1..40: mol_type = genomic DNA

SEQ ID NO: 19861 - protein, 507 aa, Mesorhizobium sp
MLQPRDLKGRKAISYARWSSGKQAQGDSLARQTKNAEAFCAAFGLTLDKQLLDDGVSAFKGGNLDLEASLGKFIADVKVGLIPSDTVLLLENLDRFSRIHPMDAQPVLSELLKTGLTLVTLQDQRVHTYKDYRANFASLMMSLMSMQAAYEYSAKLSHRVGEAWSRKAEKARAAVASGGARIKVAKVPFWIDRETNELNARAEDARLLFELAKEGHGQQSITQVLNTRGIPSPSGKTWAQAVVGEVLRNPAAYGCLVLKGEEVPGYFPALIGETEWLATRQRTKARRHSRQVGRTSNLFSRMVHCGHCGSPMVLTSSKKGGMSWGYFTCTGKTFKRTECTAPNWRYDQFERELIDRIGFLAVPISQDQTAPDLSRELEETIGALEAKRENALAGALDAETAETRKAFSGKADELTRQIEAKRREIVAIRENDARYRESAAAVVDFDKDQEEIRRLALEDRKGAQGLISNLVQRIDLESDSKTLRRAVVTMRSGYSQALIFDSTGEPG

SEQ ID NO: 19862 - DNA, 50 bp, Mesorhizobium sp
  source 1..50: mol_type = genomic DNA
attccgtaaaataaaaggcaaatctggcatagactttaactctgcataat

SEQ ID NO: 19863 - DNA, 40 bp, Mesorhizobium sp
  source 1..40: mol_type = genomic DNA
gatttgcaagagccagacttggcacaagctctgatcgttt

SEQ ID NO: 19864 - DNA, 50 bp, Mesorhizobium sp
  source 1..50: mol_type = genomic DNA
attccgtaaaataaaaggcaaatcttgcatagactttaactctgcataat

SEQ ID NO: 19865 - DNA, 40 bp, Mesorhizobium sp
  source 1..40: mol_type = genomic DNA
gatttgaaagacactgactttgtagaagctctggtggttg

SEQ ID NO: 19866 - protein, 553 aa, Paenibacillus illinoisensis
MAGNLRVATFYRVSTKGQLDGNDIPMQRRACTDFIDSKGWTLVKEYVEKGVSGYKTSNDDRDEIQRAKYDAENGHYDILLCFMFDRLGRRTYETPMLIKWFTTQGVEVWSVKEGQQEFKDESHDITNFLRFWQSNNESRKTSLRVDEKHAQMAEDGVFRGGTAPFGYKLVKSGLLNKKGKELMKLEIDDAQAVVVKQIFNLVKDEGYGSNRISQYLNERGIKTSTGSKWNTGALNFILRNPTYKGYPAYGKRKSKEGVFVTKDKSEWTLPEKCQTHLVIIPEDDFDYVQTFRSSRSVDNIKNHSYSRVNSTKSPLLFVGMIRCGYCGSPLTTTYNSKKYTLANGDVQKWKRAVYRCSGKALKKVECAGQTMYAQSKIEDTVLEEVENYLSYLRKLDYREYAKDYNQEEFDYIKQAVNMKNKELESCYEEINALKSEISKSILGKSAFKPEMLNELIEQKQNELALIDSEVRKLEIDLQTKKSELNDIKELSESIGMWGDIFKEASDEKKKTMLRSIIDVITVMRDGIDIKFRLDIVQFLSNAGNGSVSELRGR

SEQ ID NO: 19867 - DNA, 50 bp, Paenibacillus illinoisensis
  source 1..50: mol_type = genomic DNA
ggtagtgtttctgaactacgtgggagaccacgtttgcttgaaacactacc

SEQ ID NO: 19868 - DNA, 40 bp, Paenibacillus illinoisensis
  source 1..40: mol_type = genomic DNA
gggccttagctcagctgggagagcgcatcgctggcagcga

SEQ ID NO: 19869 - DNA, 50 bp, Paenibacillus illinoisensis
  source 1..50: mol_type = genomic DNA
ggtagtgtttctgaactacgtggggaaccacgtttgcttgaaacactacc

SEQ ID NO: 19870 - DNA, 40 bp, Paenibacillus illinoisensis
  source 1..40: mol_type = genomic DNA
gggccttatctgagctggggaagggcattgctcctaccta

SEQ ID NO: 19871 - protein, 526 aa, Vibrio vulnificus
MTTAYSYIRFSSAIQAKGDSLRRQTQLAQDYCLKHSLTLSDQSFTDLGVSAFRSANTNEDNGLGQFIKALEQGVIPRGSLLLVESLDRLSRASVMTAMRQLFNIIEYGITVVTLIDNRTYNSESETTDLIISLTVMERAHNESKTKSERLRAVWANKRANPHTTTRHSNTPFWLSLNDDKRTYSIIEPKADIVRRIFQMSIDGHGVISTCRILNEEGLKAPKGGTWATTSIKKILDSKAAIGHHTHIINNKVQLSTVPDFYPPIISEETYYLSQAKKKERHKPDSAGRKSAFPNVLSQVAVCGSCGSHMLYDPKSPQWIYLTCREFKKNACTNKPLRIELINRFIIEQYLHPQHIEKHVDLVKKGSTSTDQINVIEGKIESAKEALKQLLTLSSDFSNSVIQDEIKTRSESIQSLEQQLEEAKALSVESITSIRMDFREACQLVADALQVQVFDKKPATLSKKELFKVRVKLNRSLKKTFSEVMVSHCPDTKKASITANDFVFEAHQSAMKTGFSNHTWWAQKKEA

SEQ ID NO: 19872 - DNA, 50 bp, Vibrio vulnificus
  source 1..50: mol_type = genomic DNA
gctaggtaaatattgcaaagcagcaacgttctatgtaccatttccccagc

SEQ ID NO: 19873 - DNA, 40 bp, Vibrio vulnificus
  source 1..40: mol_type = genomic DNA
cccaggaggccctaaaaacaataaattgtgattgcccgca

SEQ ID NO: 19874 - DNA, 50 bp, Vibrio vulnificus
  source 1..50: mol_type = genomic DNA
gctaggtaaatattgcaaagcagcatcgttctatgtaccatttccccagc

SEQ ID NO: 19875 - DNA, 40 bp, Vibrio vulnificus
  source 1..40: mol_type = genomic DNA
cccaggaggccctgacggaatcaagttctgattgcccaca

SEQ ID NO: 19876 - protein, 559 aa, Paenibacillus sp RUD330
MARVANRQNIVKAASKKRIWYVGFYIRLSREDKRGKDESESITNQRLILTDFFEQQDDDDEYVFVGEYVDDGVSGTTDEEREDFQRLLTDIRKGKINCVIVKNLARSFRNNGDQSYYLGDWFPRNNVRFISLYQQPVDTYKDPQNAQNIAVPVQGVLNEEHARGTSESVRRTFDKKREKGLHIGSFAAYGYQKDPEDKNALILDEEAAENVKSIFAWFLEGMSKNAIVRKLNESGILCPSAYKKSKGMKYKHPHAEGGNPLWCAMTVTNMLKNRIYVGDMVQGRYRIKSYKIHVQETVPEEEWFIVENTHEPIISREDFAKVQELLKKDTRTAPKQKTLYLFSGFLRCADCGKAMTRSTVRGNVYYYCRTYKDQSKAACTKHTMKHNHLEQAVLYAIKQQVYIAVSLSEMVSRINKAPLQKSQSIRLNELMVAKEKELSKISRYKQSIYQDWKDGEISHKDYRQMKEDYERQIEAINEVISNLQEEKAELENGIDVENPFLTTFRKYENINKLTRDILIELVDTIKVYENGNISVKLKFANEYRRVAEYIEVNTSEDAV

SEQ ID NO: 19877 - DNA, 50 bp, Paenibacillus sp RUD330
  source 1..50: mol_type = genomic DNA
tgttttcctaatataaatgttccggtggagccatttataataggaaactg

SEQ ID NO: 19878 - DNA, 40 bp, Paenibacillus sp RUD330
  source 1..40: mol_type = genomic DNA
cgtcgcacctgttgctcctgtggcacctgttgctcctatg

SEQ ID NO: 19879 - DNA, 50 bp, Paenibacillus sp RUD330
  source 1..50: mol_type = genomic DNA
tgttttcctaatataaatgttccggcggagccatttataataggaaactg

SEQ ID NO: 19880 - DNA, 40 bp, Paenibacillus sp RUD330
  source 1..40: mol_type = genomic DNA
tgcctcacctgctgctcctgcctcacctgttgctcctgcc

SEQ ID NO: 19881 - protein, 569 aa, Shewanella amazonensis
MTSPKPPKHSTSSTPLAHSYIRFSSIAQEKGDSINRQIASATSWSEKRGIPLSDVVYRDLGISAFKKVDRPGLRQLTESIRAGIIRQGDYILLERLDRLSRKDLDIAQEEIKSILRMNVNVVAIEDNLELTPASVNDAQALIRIIILAENAHRQSREKSERIKAAYASARQRARDGKAVKRRLPCWIEVKEDVYTFHPVYLPIVQRIVELRRQGRGYSSIAKTLNAEGLPGRIGKSGTASKGWTGGSVREIVTSRALYGFYQPHITVEKERDDGTTKRVLQPDGDPIVDHYPPVIGYRKWLAIQPDTTATAKNRIPAGGYNKTDRLSGVARCGVCGGRVALRIYRRPSKKAQGGMKEYRHWVCVAGYASGTCSVTRAFPDLDLMIIKSIGHLEVVSTPAPSTCSNSAVDTVRAKLDANKERAEQLKSLLVDPEGGSVSFVYNALSTLQNRIKELEQELEQLEKIEVSGADGNTTQADIDRLKSLVDDVELFNHELRKIVSAIRVQHFGAKGFSGVIEQVNGRRVGFVSTAPANPRRGHAKERIEFFARGLGIPEPGDVELFPWETEQDD

SEQ ID NO: 19882 - DNA, 50 bp, Shewanella amazonensis
  source 1..50: mol_type = genomic DNA
ttttcccatttcaaccgaatcacaaagctgtttccaccaaaatgggaaca

SEQ ID NO: 19883 - DNA, 40 bp, Shewanella amazonensis
  source 1..40: mol_type = genomic DNA
tttgcgagttttgaacacaaagctgatcagtagcaggaaa

SEQ ID NO: 19884 - DNA, 50 bp, Shewanella amazonensis; identical to SEQ ID NO: 19882
  source 1..50: mol_type = genomic DNA

SEQ ID NO: 19885 - DNA, 40 bp, Shewanella amazonensis
  source 1..40: mol_type = genomic DNA
tttgcaagttttcattaaaaagcagatcagtggtaagaaa

SEQ ID NO: 19886 - protein, 574 aa, Shewanella algae
MTPTNQTTKQPNPTKQQQPLAHSYIRFSSSAQEKGDSINRQIASAQSWAERNGIPLSDVVYRDLGISAFKKVERPGLRQLTESIRSGHIKKGDYVLLERLDRLSRKDLDIAQEEIKSILRMGVNIVAIEDGLALTPNSVNDLNALVNIIFLAESAHRQSREKSERIKAAYASARQRARDGKAVKRRLPCWLEVKGDVYTFHPVYLPIVQRIIDLRRQGRGYSSIAKTLNAEGLPGRIGKSGSGTSKGWTGGSVREIVTSRALYGFYQPNITVEQERDDGTTKRVLQPDGDPIVDHYPPVIRYREWLAIQPDTATATAKNRVPAGGYNKTDRLSGVARCGVCGGRVALRIYRRPSKKAQGGMKDYRHWVCVAGYSSGTCPVTRAFPDLDLMIIKSIGHLEVVSTPVPSTCSTSAVDTIRATIDANKERAEQLQALLVDPEGGSVSFVYNALSTLQARIKELEQELEQLEKVEVDSGATTQEDIDRLAGYVDDVELFNHELRKIISAIRVQHFGKKGFRGVIEQVNGRRVGFVSTAPANPRRGHAKERIEFFARGLGIPEPGDVEQDLYPWEQDQD

SEQ ID NO: 19887 - DNA, 50 bp, Shewanella algae; identical to SEQ ID NO: 19882
  source 1..50: mol_type = genomic DNA

SEQ ID NO: 19888 - DNA, 40 bp, Shewanella algae; identical to SEQ ID NO: 19883
  source 1..40: mol_type = genomic DNA

SEQ ID NO: 19889 - DNA, 50 bp, Shewanella algae; identical to SEQ ID NO: 19882
  source 1..50: mol_type = genomic DNA

SEQ ID NO: 19890 - DNA, 40 bp, Shewanella algae; identical to SEQ ID NO: 19885
  source 1..40: mol_type = genomic DNA

SEQ ID NO: 19891 - protein, 575 aa, Shewanella algae
MTSPQTPTKQRPNPSTTRQTPLAHSYIRFSSIAQEKGDSISRQIASATSWSEKRGIPLSDVVYRDLGISAFKKVDRPGLRQLTESIRAGIIRQGDYILLERLDRLSRKDLDIAQEEIKSILRMNVNVVAIEDNLELTPESVNDAQALIRIIILAENAHRQSREKSERIKAAYASARQRARDGKAVKRRLPCWLEVAPDGNTYTFHPVYLPIVQRIIELRHAGRGYSSIAKTLNAEGLPGRIGKSGTTSKGWTGGSVREIVTSRALYGFYQPHITVEKERDDGTTKRVLQPDGDPIVDHYPPVLGYREWLAIQPDTTVTAKNRVPAGGYNKTDRLSGVARCGVCGGRVALRIYRRPSKKAQGGMKDYRHWVCVAGYSSGTCPVTRAFPDLDLMIIKSIGHLEVVSTPVPSTCSTSAVDSIRATIDANKERAEQLKSLLVDPEGGDVGFVYNALSTLQARIKELEAELEQLEKVEVDGCGNTTQEDIDRLAGYVDDVELFNHELRKIISAIRVQHFGKKGFRGVIEQVNGRRVGFVLTAPENPKRGHAKERIEFFARGLGIPEPDVELFPWETEQDD

SEQ ID NO: 19892 - DNA, 50 bp, Shewanella algae; identical to SEQ ID NO: 19882
  source 1..50: mol_type = genomic DNA

SEQ ID NO: 19893 - DNA, 40 bp, Shewanella algae; identical to SEQ ID NO: 19883
  source 1..40: mol_type = genomic DNA

SEQ ID NO: 19894 - DNA, 50 bp, Shewanella algae; identical to SEQ ID NO: 19882
  source 1..50: mol_type = genomic DNA

SEQ ID NO: 19895 - DNA, 40 bp, Shewanella algae; identical to SEQ ID NO: 19885
  source 1..40: mol_type = genomic DNA

SEQ ID NO: 19896 - protein, 570 aa, Shewanella algae
MTSTKTPTKHSTSTPLAHSYIRFSSIAQEKGDSINRQIASATAWSERNGILLSDVVYRDLGISAFKKVDRPGLRQLTESIRAGHIRKGDYILLERLDRLSRKDLDIAQEEIKSILRMGVNIVAIEDNLELTPESVNDAQALIRIIILAENAHRQSREKSERIKAAYASARQKARQGKAVRRRLPCWLEVKEDTYTFHPVYLPIVQRIVELRRQGRGYSSIAKTLNAEGLPGRIGKSGTASKGWTGGSVREIVTSRALYGFYQPHITVEKERDDGTTKRVLQPDGDPIVDHYPPVIGYRKWLAIQPDTTTTTAKNRVPAGGYNKTDRLSGVARCAVCGGRVALRIYRRPSKKAQGGMKDYRHWVCVAGYSSGTCSVTRAFPDLDRMVIKAIGHLEVDVATPDPSTCSTSAVDSIRATIDANKERAEQLKSLLVDPEGGDVGFVYNALSTLQNRIKDLEAELEQLEKVEVSGGNTTQEDIDRLKSLVDDVELFNHELRKIVGAIRVQHFGKKGFSGVIEQVNGRRVGFVSTAPANPRRGHAKERIEFFARGLGIPEPGDVELFPWETEGQDD

SEQ ID NO: 19897 - DNA, 50 bp, Shewanella algae; identical to SEQ ID NO: 19882
  source 1..50: mol_type = genomic DNA

SEQ ID NO: 19898 - DNA, 40 bp, Shewanella algae; identical to SEQ ID NO: 19883
  source 1..40: mol_type = genomic DNA

SEQ ID NO: 19899 - DNA, 50 bp, Shewanella algae; identical to SEQ ID NO: 19882
  source 1..50: mol_type = genomic DNA

SEQ ID NO: 19900 - DNA, 40 bp, Shewanella algae; identical to SEQ ID NO: 19885
  source 1..40: mol_type = genomic DNA

SEQ ID NO: 19901 - protein, 585 aa, Shewanella algae
MGTNDVACGILCQTPSRRIRHATMTSPKQPTTSPQTLAHSYIRFSSVAQMGGDSIQRQIASATAWSERNGIPLSDVVYRDLGISAFKKVDRPGLRQLTESIRAGIIRQGDYILLERLDRLSRKDLDIAQEEIKSILRMGVNVVAIEDNLELTPESVNDAQALIRIIILAENAHRQSREKSERIKAAYASARQRARDGKAVKRRLPCWLEVKEDTYTFHPVYLPIVQRIIELRHAGRGYSSIAKTLNAEGLPGRIGKSGSGTSKGWTGGSVREIVTSRALYGFYQPHITVEKERDDGTTKRVLQPDGDPIVDHYPPVIGYREWLAIQPTVTAKNRVPAGGYNKTDRLSGVARCAVCGGRVALRIYRRPSKKEGVKEYRHWVCVAGYSSGTCPVTRAFPDLDLMIIKSIGHLEVVSTPVPSTCSTSAVDSIRATIDANKERAEQLKSLLVDPEGGDVGFVYNALSTLQARIKELEAELEQLEKVEVDGCGNTTQEDIDRLAGYVDDVELFNHELRKIISAIRVQHFGKKGFRGVIEQVNGRRVGFVLTAPENPKRGHAKERIEFFARGLGIPEPDVELFPWETEQDD

SEQ ID NO: 19902 - DNA, 50 bp, Shewanella algae
  source 1..50: mol_type = genomic DNA
ttttcccatttcaactgaatcacaaagctgtttccaccaaaatgggaaca

SEQ ID NO: 19903 - DNA, 40 bp, Shewanella algae; identical to SEQ ID NO: 19883
  source 1..40: mol_type = genomic DNA

SEQ ID NO: 19904 - DNA, 50 bp, Shewanella algae; identical to SEQ ID NO: 19902
  source 1..50: mol_type = genomic DNA

SEQ ID NO: 19905 - DNA, 40 bp, Shewanella algae; identical to SEQ ID NO: 19885
  source 1..40: mol_type = genomic DNA

SEQ ID NO: 19906 - protein, 603 aa, Vibrio cholerae
MQPSIYVYRRVSTERQAKADKHGLDIQVRESTLIDLQKQFPNYPVVELANDAGLSAFKAEHIKVKTALKDFIDKCVNGEIVRGSILVVYSLDRLSRLKLGDAYQKVFIPIVENGVQIYSETEARFYSNHDVDYILATVLFSRAHNESKTKSQRNKDAILNGVKRWQQEKKFTPNLTTSPFWIDNKTGEFNHLADAARYMVESLINGVGYKTIADELERRYPTPPQRKTSKAPSFWTLETIFKTRNNRSLIGEKVVKVKNEKAEDTYTLDGYYPSLISMDTWHKLQKTKANKRRTYSDNIYLLTDLRSLAVCGECGYSLAGTANKGGSDERAKYFCTGASSKRSVHTLWKADVETMDRVVLLLLNAGIEEGVKLITSPEYKSMIEDLKNTILSEQHTLSELKTRFQRTQSHTMLDLMLISEDKIKQAEKRLEELTASPTNATGDNISDYEIEFYRLYRETNFKDLTDITRKDIKLGIAKLIQRVEIAPCGNGWHISLKMNTGVCVEYVTTQAITTDTINMGNKYIRQELAYNGLYHYMIRVKNSRTMENHRIIEKWLRKTAQLDNIPSKPNFIHDIIHEIETVNPLRDSTKYDLTYADLLVFKR

SEQ ID NO: 19907 - DNA, 50 bp, Vibrio cholerae
  source 1..50: mol_type = genomic DNA
caaaagttacatatgacttgcattagtggataggtcattttatacttctg

SEQ ID NO: 19908 - DNA, 40 bp, Vibrio cholerae
  source 1..40: mol_type = genomic DNA
ggaagtggtcgtgtttgagagtgaccaagttaacgcgttt

SEQ ID NO: 19909 - DNA, 50 bp, Vibrio cholerae
  source 1..50: mol_type = genomic DNA
caaaagttacatatgacttgcatttgtggataggtcattttatacttctg

SEQ ID NO: 19910 - DNA, 40 bp, Vibrio cholerae
  source 1..40: mol_type = genomic DNA
agaacctgtggtgttttagtgtcacctagttaacgtgttt

SEQ ID NO: 19911 - protein, 630 aa, Vibrio cholerae
MQPSIYVYRRVSTERQAKADKHGLDIQVRESTLIDLQKQFPNYPVVELANDAGLSAFKAEHIKVKTALKDFIDKCVNGEIVRGSILVVYSLDRLSRLKLGDAYQKVFIPIVENGVQIYSETEARFYSNHDVDYILATVLFSRAHNESKTKSQRNKDAILNGVKRWQQEKKFTPNLTTSPFWIDNKTGEFNHLADAALYMVESLINGVGYKTIADELERCYPTPPQRKTSKAPSFWTLETIFKTRNNRSLIGEKTIKVQKDLEISLEKPEKVKPKKNGEKVVKDKKEKAEDTYTLDGYYPSLISMDTWHKLQKTKANKRRTYSDNIYLLTDLRSLAVCGECGYSLAGTANKGGSDERAKYFCTGASSKRSVHTLWKADVETMDRVVLLLLNAGIEEGVKLITSPEYKSMIEDLKNTILSEQHTLSELKTRFERTQSHTMLDLMLTAEDKIKQAEKRLEELTASPTNATGDNITDYEIEFYRLYRETNFKDLTDITRKDIKLEIAKLLQRVEISPCGCGWRISLKMNTGVCVEYVTTQAITTDTINMGNKYIRQELAYNGLYHYMIRVKNSRTMENHRIIEKWLRKTAQLDNIPSKPNFINDIIHEIEPVNPLRDSTKYDLTYADLELMFKR

SEQ ID NO: 19912 - DNA, 50 bp, Vibrio cholerae; identical to SEQ ID NO: 19907
  source 1..50: mol_type = genomic DNA

SEQ ID NO: 19913 - DNA, 40 bp, Vibrio cholerae; identical to SEQ ID NO: 19908
  source 1..40: mol_type = genomic DNA

SEQ ID NO: 19914 - DNA, 50 bp, Vibrio cholerae; identical to SEQ ID NO: 19909
  source 1..50: mol_type = genomic DNA

SEQ ID NO: 19915 - DNA, 40 bp, Vibrio cholerae; identical to SEQ ID NO: 19910
  source 1..40: mol_type = genomic DNA

SEQ ID NO: 19916 - protein, 630 aa, Vibrio cholerae
MQPSIYVYRRVSTERQAKADKHGLDIQVRESTLIDLQKQFPNYPVVELANDAGLSAFKAEHIKVKTALKDFIDKCVNGEIVRGSILVVYSLDRLSRLKLGDAYQKVFIPIVENGVQIYSETEARFYSNHDVDYILATVLFSRAHNESKTKSQRNKDAILNGVKRWQQEKKFTPNLTTSPFWIDNKTGEFNPLADAALYMVESLINGVGYKTIADELERRYPTPPQRKTSKAPSFWTLETIFKTRNNRSLIGEKTIKVQKDLEISLEEPEKVKPKKNGEKVVKDKKEKAEDTYTLDGYYPSLISMDTWHKLQKTKANKRRTYSDNTYLLTDLRSLTICGECGYSLAGTANKGGSDERAKYFCTGASSKRSSHTLWKADVETIDRVVLLLLNAGIEEGVKLITSPEYQGMIEDLKNTILSEQHTLSELKTRFERTQSPTMLDLMLTAEDKIKQAEKRLEELTASPTNATGDNIADYEIEFYRLYRETNFKDLTDITRKDIKLEITKLLQRVEISPCGFGWRISLKMNTGVCVEYVTTQAITTDTINMGNKYIRQELAYNGLYHYMIRVKNSRTMENHRIIEKWLRKTAQLDNIPSKPNFIQDIINEIETVNPLRDSTKYDLTYADLELMFKR

SEQ ID NO: 19917 - DNA, 50 bp, Vibrio cholerae
  source 1..50: mol_type = genomic DNA
caaaagtaatatatgacttgcattagtggataggtcattttatacttctg

SEQ ID NO: 19918 - DNA, 40 bp, Vibrio cholerae; identical to SEQ ID NO: 19908
  source 1..40: mol_type = genomic DNA

SEQ ID NO: 19919 - DNA, 50 bp, Vibrio cholerae
  source 1..50: mol_type = genomic DNA
caaaagtaatatatgacttgcatttgtggataggtcattttatacttctg

SEQ ID NO: 19920 - DNA, 40 bp, Vibrio cholerae; identical to SEQ ID NO: 19910
  source 1..40: mol_type = genomic DNA

SEQ ID NO: 19921 - protein, 630 aa, Vibrio cholerae
MQPSIYVYRRVSTERQAKADKHGLDIQVRELTLIDLQKQFHNYPVVELANDAGLSAFKAEHIKVKTALKDFIDKCVNGEIVRGSILVVYSLDRLSRLKLGDAYQKVFIPIVENGVQIYSETEARFYSNHDVDYILATVLFSRAHNESKTKSQRNKDAILNGVKRWQQEKKFTPNLTTSPFWIDNKTGEFNPLADAALYMVESLINGVGYKTIADELERRYPTPPQRKTSKAPSFWTLETIFKTRNNRSLIGEKTIKVQKDLEISLEEPEKVKPKKNGEKVVKDKKEKAEDTYTLDGYYPSLISMDTWHKLQKTKANKRRTYSDNTYLLTDLRSLTICGECGYSLAGTANKGGSDERAKYFCTGASSKRSSHTLWKADVETIDRVVLLLLNAGIEEGVKLITSPEYKSMIEDLKNTILSEQHTLSELKTRFQRTQSHTMLDLMLTAEERIKQAEERLQELTASPTNATGDNIADYEIEFYRLYRETNFKDLTDITRKDVKLEIAKLLQRVEISPCGFGWRISLKMNTGVCVEYVTTQAITTDTINMGNKYIRQELAYNGLYHYMIRVKNSRTMENHRIIEKWLRKTAQLDNIPSKPNFINDIIHEIEPVNPLRDSTKYDLTYADLELMFKR

SEQ ID NO: 19922 - DNA, 50 bp, Vibrio cholerae; identical to SEQ ID NO: 19907
  source 1..50: mol_type = genomic DNA

SEQ ID NO: 19923 - DNA, 40 bp, Vibrio cholerae; identical to SEQ ID NO: 19908
  source 1..40: mol_type = genomic DNA

SEQ ID NO: 19924 - DNA, 50 bp, Vibrio cholerae; identical to SEQ ID NO: 19909
  source 1..50: mol_type = genomic DNA

SEQ ID NO: 19925 - DNA, 40 bp, Vibrio cholerae; identical to SEQ ID NO: 19910
  source 1..40: mol_type = genomic DNA

SEQ ID NO: 19926 - protein, 604 aa, Vibrio cholerae
MQPSIYVYRRVSTERQAKADKHGLDIQVRETTLMDLQKQFPNYPVVELANDAGLSAFKAEHIKVKTALKDFIDKCVNGEIVRGSILVVYSLDRLSRLKLGDAYQKVFIPIVENGVQIYSETEARFYSNHDVDYILATVLFSRAHNESKTKSQRNKDAILNGVKRWQQEKKFTPNLTTSPFWIDNKTGEFNHLADAALYMVESLINGVGYKTIADELERCYPTPPQRKTSKAPSFWTLETIFKTRNNRSLIGEKVVKVKNEKAEDTYTLDGYYPSLISMDTWHKLQKTKANKRRTYSDNIYLLTDLRSLTVCGECGYSLAGTANKGGSDERAKYFCTGASSKRSVHTLWKADVETMDRVVLLLLNAGIEEGVKLITSPEYKSMIEDLKNTILSEQHTLSELKTRFQRTQSHTMLDLMLTAEDKIKQAEKRLEELTASPTNATGDNISDYEIEFYRLYRETNFKDLTDITRKDIKLEIAKLIQRVEIAPCGNGWHISLKMNTGVCVEYVTTQAITTDTINMGNKYIRQELAYNGLYHYMIRVKNSRTMENHRIIEKWLRKTAQLDNIPSKPNFINDIIHEIETVNPLRDSTKYDLTYADLELMFKR

SEQ ID NO: 19927 - DNA, 50 bp, Vibrio cholerae; identical to SEQ ID NO: 19907
  source 1..50: mol_type = genomic DNA

SEQ ID NO: 19928 - DNA, 40 bp, Vibrio cholerae
  source 1..40: mol_type = genomic DNA
ggaagtggttgtgtttgagagtgaccaagttaacgcgttt

SEQ ID NO: 19929 - DNA, 50 bp, Vibrio cholerae; identical to SEQ ID NO: 19909
  source 1..50: mol_type = genomic DNA

SEQ ID NO: 19930 - DNA, 40 bp, Vibrio cholerae; identical to SEQ ID NO: 19910
  source 1..40: mol_type = genomic DNA

SEQ ID NO: 19931 - protein, 630 aa, Vibrio cholerae
MQPSIYVYRRVSTERQAKADKHGLDIQVRESTLIDLQKQFPNYPVVELANDAGLSAFKAEHIKVKTALKDFIDKCVNGEIVRGSILVVYSLDRLSRLKLGDAYQKVFIPIVENGVQIYSETEARFYSNHDVDYILATVLFSRAHNESKTKSQRNKDAILNGVKRWQQEKKFTPNLTTSPFWIDNKTGEFNPLADAALYMVESLINGVGYKTIADELERRYPTPPQRKTSKAPSFWTLETIFKTRNNRSLIGEKTIKVQKDLEISLEEPEKVKPKKNGEKVVKDKKEKAEDTYTLDGYYPSLISMDTWHKLQKTKANKRRTYSDNTYLLTDLRSLTICGECGYSLAGTANKGGSDERAKYFCTGASSKRSSHTLWKADVETIDRVVLLLLNAGIEEGVKLITSPEYQGMIEDLKNTILSEQHTLSELKTRFERTQSPTMLDLMLTAEERIKQAEERLQELTASPTNATGDNIADYEIEFYRLYRETNFKDLTDITRKDIKLEIAKLLQRVEISPCGFGWRISLKMNTGVCVEHVTTQAITTDTINMGNKYIRQELAYNGLYHYMIRVKNSRTMENHRIIEKWLRKTAQLDNIPSKPNFINDIIHEIEPVNPLRDSTKYDLTYADLELMFKR

SEQ ID NO: 19932 - DNA, 50 bp, Vibrio cholerae
  source 1..50: mol_type = genomic DNA
caaaagtaatatatgacttgcataagcggataagtcattttatacttctg

SEQ ID NO: 19933 - DNA, 40 bp, Vibrio cholerae; identical to SEQ ID NO: 19908
  source 1..40: mol_type = genomic DNA

SEQ ID NO: 19934 - DNA, 50 bp, Vibrio cholerae
  source 1..50: mol_type = genomic DNA
caaaagtaatatatgacttgcatatgcggataagtcattttatacttctg

SEQ ID NO: 19935 - DNA, 40 bp, Vibrio cholerae; identical to SEQ ID NO: 19910
  source 1..40: mol_type = genomic DNA

SEQ ID NO: 19936 - protein, 502 aa, Bacillus velezensis
MELQNRIQRVAIYLRKSRNKEGEETEETLGKHRKRLIDIAIKNKWDYELFQEVGNSMNENRPEYQKLLSKLSEGIFDAVLSVNLARVTRDDAETPKFMSLLRQEDILFITDSERIYDLEVQEDWQALKFTGFVNNWEYENIKAQLRKGKKDSAKMGRWSNGIPNYGLVYNRFDRSLEIDQQKADAVKLAFQLVIDGLGVDKVAKELNRLGYKTNRGRYFSGNAITRMIRAEIYKSVIISNRVKGRNLHEGKLRPKDQWIIAENAAPPIIDEETWNMANEALDQRKLLSPRGKQKKHPLSNLIKCGLCGRTQTVSRRRDRNDALAIQPCNKTDPLGGNKCNNRGIKHDTMISLVIEAIHEKHHEISSELIKFEEETEANDIKSIKINKIQEQINKSKKALNILQIQLEEELINISSFKERRKIRQVELNKLEKELTDLLEETKKDALKSKKSFANKLDFFLENWHTIDGADLNHELMSFINKIIWYAPRDSELPPQLKFEWRM

SEQ ID NO: 19937 - DNA, 50 bp, Bacillus velezensis
  source 1..50: mol_type = genomic DNA
cgggtagcttagcgaacttgccactggtgccatgtccactaaactaacca

SEQ ID NO: 19938 - DNA, 40 bp, Bacillus velezensis
  source 1..40: mol_type = genomic DNA
cggctattcgacttgtcattggtgccatgtaatggctcac

SEQ ID NO: 19939 - DNA, 50 bp, Bacillus velezensis
  source 1..50: mol_type = genomic DNA
cgggtagcttagcgaacttgccacctgtgccatgtccactaaactaacca

SEQ ID NO: 19940 - DNA, 40 bp, Bacillus velezensis
  source 1..40: mol_type = genomic DNA
aggccatttgtcttctcatctgtgccatggaaatgctgac

SEQ ID NO: 19941 - protein, 556 aa, Corynebacterium pseudogenitalium
MMDNKLKALVVVRISRLMEASSSPERQEQECRELCQRMGWEVVGVASDLNVSAGATTPFERPELGSWLGSGKDNDPGRSHEFDVIVFWRLDRLVRSMNQLSTLMSWCEQRDVYLKSATESHIDTTTDMGRIMAMLVGSFAEVELAAIRERTGADQHHRIISGKYRGAVPSWGYRPVQDSSGGWKVEPDPVQVKQVHKAAGLVLQGVSMNEIARQFNAAGELTPRALNDVRQGREPRKSQWRGNRLKSMITSKAMLGYAMIREPVLDKNGKPKRNKSGQKIYEPEAKVVVKDGAPVKRAEAILDRDTWDRVCKELASREVDVSARSHSLLLNVLFCGICGNPAYKMSPNNGRRPAYRCSTAQLGKHGKCSTKTLQVDEEFIEDTVTRSFLGLLGDSVRAVKVWDEGVDHSEELAELEAGIRELANELPRYRAGTTAFDAITSNIETMQERLDQLEAEGVRPAGWVWEPTGQTIRDWWEASSVVERNAYLRECGVKVTFEHRENRKRGEAPDVQISYENIPGVVSELDPGEGASRAVQVLEKVPEGQKLVVKAETEEK

SEQ ID NO: 19942 - DNA, 50 bp, Corynebacterium pseudogenitalium
  source 1..50: mol_type = genomic DNA
gggtataaaagtttgacaatcgagtactctgtagtctaagatttatacca

SEQ ID NO: 19943 - DNA, 40 bp, Corynebacterium pseudogenitalium
  source 1..40: mol_type = genomic DNA
ggggatgagcaccatcgaatatgccatgggatctctggcg

SEQ ID NO: 19944 - DNA, 50 bp, Corynebacterium pseudogenitalium
  source 1..50: mol_type = genomic DNA
gggtataaaagtttgacaatcgaggcctctgtagtctaagatttatacca

SEQ ID NO: 19945 - DNA, 40 bp, Corynebacterium pseudogenitalium
  source 1..40: mol_type = genomic DNA
ggggattaccaccatcgtagctaccattagattactggtg

SEQ ID NO: 19946 - protein, 623 aa, Clostridium symbiosum
MRRNEKITALYERLSRDDDQQGESNSISNQKKLLEEYADHQGFSNTVHFTDDGISGTCFDRPGFLAMMKEVEAGNVEYLCIKDMSRLGRDYLKVGQIMEILRQRGVRLIAINDGVDSARGDDDFTPFRNIMNEYYARDTSRKIRSTFQSKGKSGKHLTGTVIYGYLWNENRTQWLVDPEAAEVVKRIFAMTIDGFGPYQIAKKLSEEKILIPSAYLAQFGEGVNKNKTFKDVYGWGASSVVEILKKREYLGHTVNFKTRKHFKDKKSHYVPEDEWTIFENTHEPIIDQPTFDLVQKIRGNVRRYPNGWGEAAPLTGLLYCADCGGKMYVHRTNNGKRISQYTCSQYSKVPVGKLCTTQHRINEDVVLSLISDMLKAIAEYAKHDRAEFVRVVQKAQSSQQTTEVRKQRTRLATAKQRVSELEVLLCKIYEDNALGRLPDSRYEMLDAQYAKEQSELTAEISTLEKAVKGYEKHEKDADRFIALIDKYENFDTLTVTMLNEFVEKILVHERDRKGSRDTTQEVEIYFNFVGRFVPPAFGEVELTSEELEEIRKKEERKDRLHQNYLKRKANGKQKEYEERTKAKKKAEIEARKDAIRTEDIAKGVFIPVSSLPQREPQKGAKTT

SEQ ID NO: 19947 - DNA, 50 bp, Clostridium symbiosum; identical to SEQ ID NO: 57
  source 1..50: mol_type = genomic DNA

SEQ ID NO: 19948 - DNA, 40 bp, Clostridium symbiosum
  source 1..40: mol_type = genomic DNA
aaaatacaaacttgcggcgggcaagaccgcaaaaagcata

SEQ ID NO: 19949 - DNA, 40 bp, Clostridium symbiosum
  source 1..40: mol_type = genomic DNA
aaaatacaaacttgcggcgtccaagaccgcaaaaagcata

SEQ ID NO: 19950 - DNA, 50 bp, Clostridium symbiosum
  source 1..50: mol_type = genomic DNA
aaaagtgcttggagtttagcctcctctgttgtgtgcgctgcatgattgtt

SEQ ID NO: 19951 - protein, 628 aa, Clostridium symbiosum
MRKNEKITALYERLSRDDFGKDDDQQRESNSISNQKAMLEEFAARQGFTNIVHFTDDGISGTCFDRPGFLAMMKEVEAGNVEYLCIKDMSRMGRDYLKVGQIMEILRQRGVRLIAINDGVDSARGDDDFTPFRNIMNEYYARDTSRKIRSTFQSKGKSGKHLTGTVIYGYLWNEARDQWLVDPEAADVVKRIFAMTIDGYGPYQIASKLKSEKVLIPSAYLAQHGEGVNKNKTFKDMYGWGSSTICNILEKREYLGHTINFKTRKHFKDKKSHYVPEDEWTIFENTHEPIIDQQTFDLVQKIRGNVRRYPDGWGEAAPLTGLLYCADCGGKMYVHRTNNGKRISQYTCSQYSKVPVGKLCKTQHRINEDVVLSLVSEMLKAIAEYAKHDRAEFVRVVQEAQSSQQTAEVKKQRIRLATAKQRVSELEVLLCKIYEDNILGKLSDSRYATLDAQYEKEQTELTAEISALEKAVKSYEKHEKDADRFIALIDKYENFDKLTIAMLNEFIEKILVHERDRKGSIQTTQEVEIYFNFVGRFVPPAFGEAELTPEELEEIRKREERKDRLHQNYLKRKASGAQKRYEDKIKERKKAEIEAKKAAIRAEDIAKGVFVPVSSLPQREPMKGVQTA

SEQ ID NO: 19952 - DNA, 50 bp, Clostridium symbiosum; identical to SEQ ID NO: 57
  source 1..50: mol_type = genomic DNA

SEQ ID NO: 19953 - DNA, 40 bp, Clostridium symbiosum
  source 1..40: mol_type = genomic DNA
gaaatataagctggccgctggaaaaacagccaagtcgatc

SEQ ID NO: 19954 - DNA, 40 bp, Clostridium symbiosum
  source 1..40: mol_type = genomic DNA
gaaatataagctggccgcttcaaaaacagccaagtcgatc

SEQ ID NO: 19955 - DNA, 50 bp, Clostridium symbiosum; identical to SEQ ID NO: 19950
  source 1..50: mol_type = genomic DNA

SEQ ID NO: 19956 - protein, 625 aa, Faecalibacterium sp
MRKNEKITALYERLSRDDFGKDDDQQRESNSISNQKAMLEEFAARQGFTNIVHFTDDGISGTCFDRPGFLAMMKEVEAGNVEYLCIKDMSRMGRDYLKVGQIMEILRQRGVRLIAINDGVDSARGDDDFTPFRNIMNEYYARDTSRKIRSTFQSKGKSGKHLTGTVIYGYLWNEARDQWLVDPEAADVVKRIFAMTIDGYGPYQIASKLKEEKILIPSAYLAQHGEGVNKNKTFKDVYGWGSSTICNILEKREYLGHTINFKTRKHFKDKKSHYVPEDEWTIFENTHEPIIDQQTFDLVQKIRGNVRRYPDGWGEAAPLTGLLYCADCGGKMYVHRTNNGKRISQYTCSQYSKVPVGKLCTTQHRINEDVVLSLVSEMLKAIAEYAKHDRAEFVRVVQEAQSSQQTTEVRKQRTRLATAKQRVSELEVLLCKIYEDNILGKLSDSRYATLDAQYEKEQTELTAEISVLEKAIKSYEKHEKDADRFIALIDKYENFDKLTIAMLNEFIEKILVHERDRKGSIQTTQEVEIYFNFVGRFVPPAFGEVELTPEELEEIRKREERKDRLHQNYLKRKANGKQKEYEERTKAKKKAEIEARKQAIRTEDIARGVFIPVSSLPQLGPRKGA

SEQ ID NO: 19957 - DNA, 50 bp, Faecalibacterium sp; identical to SEQ ID NO: 57
  source 1..50: mol_type = genomic DNA

SEQ ID NO: 19958 - DNA, 40 bp, Faecalibacterium sp
  source 1..40: mol_type = genomic DNA
gctctataaattggctgccggcaagaccgcaaaatccatc

SEQ ID NO: 19959 - DNA, 40 bp, Faecalibacterium sp
  source 1..40: mol_type = genomic DNA
gctctataaattggctgcctccaagaccgcaaaatccatc

SEQ ID NO: 19960 - DNA, 50 bp, Faecalibacterium sp; identical to SEQ ID NO: 19950
  source 1..50: mol_type = genomic DNA

SEQ ID NO: 19961 - protein, 628 aa, Akkermansia muciniphila
MRKNEKITALYERLSRDDFGKDDDQQRESNSISNQKAMLEEFAARQGFTNIVHFTDDGISGTCFDRPGFLAMMKEVEAGNVEYLCIKDMSRMGRDYLKVGQIMEILRQRGVRLIAINDGVDSARGDDDFTPFRNIMNEYYARDTSRKIRSTFQSKGKSGKHLTGTVIYGYLWNEARDQWLVDPEATEVVKRIFAMTIDGYGPYQIASRLKEEKVLIPSAYLAQHGEGVNKNKTFKDVYGWGSSTICNILEKREYLGHTINFKTRKHFKDKKSHYVPEDEWTIFENTHEPIIDQQTFDLVQKIRGNVRRYPDGWGEAAPLTGLLYCADCGGKMYVHRTNNGKRISQYTCSQYTKVPCGTLCKTQHRINEDVVLSLVSEILKAIAEYAKHDRAEFVRVVQEAQSSQQTAEVRKQRTRLATAKQRVSELEVLLCKIYEDNILGKLSDSRYATLDAQYEKEQSELTAEISVLEKAVKSYEKHEKDADRFIALIDKYENFDKLTIAMLNEFIEKILVHERDRKGSIQTTQEVEIYFNFVGRFVPPAFGEVELTPEELEEIRKREERKDRLHQNYLKRKASGAQKRYEDKIKERKKEEIEAKKAAIRAEDIAKGVFVPVSSLPQREPMKGVQSA

SEQ ID NO: 19962 - DNA, 50 bp, Akkermansia muciniphila; identical to SEQ ID NO: 57
  source 1..50: mol_type = genomic DNA

SEQ ID NO: 19963 - DNA, 40 bp, Akkermansia muciniphila
  source 1..40: mol_type = genomic DNA
tgaattccctccagttaccgggcttggaaaactgtatttg

SEQ ID NO: 19964 - DNA, 40 bp, Akkermansia muciniphila
  source 1..40: mol_type = genomic DNA
tgaattccctccagttacctcgcttggaaaactgtatttg

SEQ ID NO: 19965 - DNA, 50 bp, Akkermansia muciniphila; identical to SEQ ID NO: 19950
  source 1..50: mol_type = genomic DNA

SEQ ID NO: 19966 - protein, 550 aa, Klebsiella aerogenes
MGIKTAFCYCRVSSGRQRTEKGGFGMSRQQALLTAYVEEYEDRDCLGYDLSVDNMVFLKAEGVSGFSGKNIEKGSVLHSFITDYKSGKIKNAVLIIENIDRFSRANPNEAAELFLGLINKGCDVHEIDTETVHHRCSDLNQISSGLTRSHKESLRKQKLSIKNWDERFEKTVKKHVPLTGRCPGWLKVENNRYKEIPERVAPIRLIFEWYNNGYGQAYIRDRLNSEGYKYNGKTWSNWSVHRVLKDERVTGKHRTQSTLRNNFDGIMMYPTVVTELEFKRAEQRLTKPGRDKKINRRANTLFSGVLICGLCKAGHILINNENGKRFGRCSHAIAGNKRCVANGFKYNVVENTLLKFLRHLDFGGLSNSSHAAEVENLSSELIHYSNYLANVQRIVDSVDIPSETDYKVLKNLEAKVRDLQGKIDALKALENVSVSYEDIVKKINYELLDVSNIEVRQDFNIKIRKIIREINILKIQKNIVLVSVSFYVSNDVQWLTISLKEGLLLSNTYVENKTLVVTLGNDVMTYNIETEKYYLNSKEISNEVAYALFG

SEQ ID NO: 19967 - DNA, 50 bp, Klebsiella aerogenes
  source 1..50: mol_type = genomic DNA
tactatgaaataactcagctaaccaccattatatgtgttattatatagtg

SEQ ID NO: 19968 - DNA, 40 bp, Klebsiella aerogenes
  source 1..40: mol_type = genomic DNA
ggcgataatgccgataaccaccattaattcgatcagggta

SEQ ID NO: 19969 - DNA, 40 bp, Klebsiella aerogenes
  source 1..40: mol_type = genomic DNA
ggcgataatgccgataacctccattaattcgatcagggta

SEQ ID NO: 19970 - DNA, 50 bp, Klebsiella aerogenes
  source 1..50: mol_type = genomic DNA
taaaatgatactcttcagcaaacctccatgacatgtttatctatgtaaag

SEQ ID NO: 19971 - protein, 537 aa, Blautia sp N6H1-15; identical to SEQ ID NO: 641

SEQ ID NO: 19972 - DNA, 50 bp, Blautia sp N6H1-15; identical to SEQ ID NO: 402
  source 1..50: mol_type = genomic DNA

SEQ ID NO: 19973 - DNA, 40 bp, Blautia sp N6H1-15
  source 1..40: mol_type = genomic DNA
tgtaagtaaatgggaaacaggaaaaagtcttcctgacatc

SEQ ID NO: 19974 - DNA, 40 bp, Blautia sp N6H1-15
  source 1..40: mol_type = genomic DNA
tgtaagtaaatgggaaacatgaaaaagtcttcctgacatc

SEQ ID NO: 19975 - DNA, 50 bp, Blautia sp N6H1-15
  source 1..50: mol_type = genomic DNA
taatattttggtgaaaggaattcttgtgtttctcaaagaactagagctga

SEQ ID NO: 19976 - protein, 537 aa, Enterococcus gilvus; identical to SEQ ID NO: 641

SEQ ID NO: 19977 - DNA, 50 bp, Enterococcus gilvus; identical to SEQ ID NO: 402
  source 1..50: mol_type = genomic DNA

SEQ ID NO: 19978 - DNA, 40 bp, Enterococcus gilvus
  source 1..40: mol_type = genomic DNA
cactgcaggctgtgatggaggcgactcaatccaataaatt

SEQ ID NO: 19979 - DNA, 40 bp, Enterococcus gilvus
  source 1..40: mol_type = genomic DNA
cactgcaggctgtgatggatgcgactcaatccaataaatt

SEQ ID NO: 19980 - DNA, 50 bp, Enterococcus gilvus; identical to SEQ ID NO: 19975
  source 1..50: mol_type = genomic DNA

SEQ ID NO: 19981 - protein, 537 aa, Enterococcus faecium; identical to SEQ ID NO: 641

SEQ ID NO: 19982 - DNA, 50 bp, Enterococcus faecium; identical to SEQ ID NO: 402
  source 1..50: mol_type = genomic DNA

SEQ ID NO: 19983 - DNA, 40 bp, Enterococcus faecium; identical to SEQ ID NO: 6568
  source 1..40: mol_type = genomic DNA

SEQ ID NO: 19984 - DNA, 40 bp, Enterococcus faecium
  source 1..40: mol_type = genomic DNA
tgtcccatgatgggatagctgctgtggagttcaagagatt

SEQ ID NO: 19985 - DNA, 50 bp, Enterococcus faecium; identical to SEQ ID NO: 19975
  source 1..50: mol_type = genomic DNA

SEQ ID NO: 19986 - protein, 537 aa, Enterococcus faecium; identical to SEQ ID NO: 641

SEQ ID NO: 19987 - DNA, 50 bp, Enterococcus faecium; identical to SEQ ID NO: 402
  source 1..50: mol_type = genomic DNA

SEQ ID NO: 19988 - DNA, 40 bp, Enterococcus faecium
  source 1..40: mol_type = genomic DNA
catatcaaaatcgaacgtcggatcatgtaaagcaggggta

SEQ ID NO: 19989 - DNA, 40 bp, Enterococcus faecium
  source 1..40: mol_type = genomic DNA
catatcaaaatcgaacgtctgatcatgtaaagcaggggta

SEQ ID NO: 19990 - DNA, 50 bp, Enterococcus faecium; identical to SEQ ID NO: 19975
  source 1..50: mol_type = genomic DNA

SEQ ID NO: 19991 - protein, 537 aa, Enterococcus faecium; identical to SEQ ID NO: 641

SEQ ID NO: 19992 - DNA, 50 bp, Enterococcus faecium; identical to SEQ ID NO: 402
  source 1..50: mol_type = genomic DNA

SEQ ID NO: 19993 - DNA, 40 bp, Enterococcus faecium
  source 1..40: mol_type = genomic DNA
tatgaattgaagggaatcgggattggctcattcggcccga

SEQ ID NO: 19994 - DNA, 40 bp, Enterococcus faecium
  source 1..40: mol_type = genomic DNA
tatgaattgaagggaatcgtgattggctcattcggcccga

SEQ ID NO: 19995 - DNA, 50 bp, Enterococcus faecium; identical to SEQ ID NO: 19975
  source 1..50: mol_type = genomic DNA

SEQ ID NO: 19996 - protein, 537 aa, Enterococcus faecalis; identical to SEQ ID NO: 406

SEQ ID NO: 19997 - DNA, 50 bp, Enterococcus faecalis; identical to SEQ ID NO: 402
  source 1..50: mol_type = genomic DNA

SEQ ID NO: 19998 - DNA, 40 bp, Enterococcus faecalis
  source 1..40: mol_type = genomic DNA
ggtttcaagcaagccaagggggacgtgattgccatttatg

SEQ ID NO: 19999 - DNA, 40 bp, Enterococcus faecalis
  source 1..40: mol_type = genomic DNA
ggtttcaagcaagccaaggtggacgtgattgccatttatg

SEQ ID NO: 20000 - DNA, 50 bp, Enterococcus faecalis; identical to SEQ ID NO: 19975
  source 1..50: mol_type = genomic DNA

SEQ ID NO: 20001 - protein, 537 aa, Dielma fastidiosa; identical to SEQ ID NO: 641

SEQ ID NO: 20002 - DNA, 50 bp, Dielma fastidiosa; identical to SEQ ID NO: 402
  source 1..50: mol_type = genomic DNA

SEQ ID NO: 20003 - DNA, 40 bp, Dielma fastidiosa
  source 1..40: mol_type = genomic DNA
aatcagtcaatgggaaactggcagaacattgccggatatt

SEQ ID NO: 20004 - DNA, 40 bp, Dielma fastidiosa
  source 1..40: mol_type = genomic DNA
aatcagtcaatgggaaacttgcagaacattgccggatatt

SEQ ID NO: 20005 - DNA, 50 bp, Dielma fastidiosa; identical to SEQ ID NO: 19975
  source 1..50: mol_type = genomic DNA

SEQ ID NO: 20006 - protein, 537 aa, Enterococcus gallinarum; identical to SEQ ID NO: 641

SEQ ID NO: 20007 - DNA, 50 bp, Enterococcus gallinarum; identical to SEQ ID NO: 402
  source 1..50: mol_type = genomic DNA

SEQ ID NO: 20008 - DNA, 40 bp, Enterococcus gallinarum
  source 1..40: mol_type = genomic DNA
gatctctaagtgggagaatgggcgtggctatccagatatt

SEQ ID NO: 20009 - DNA, 40 bp, Enterococcus gallinarum
  source 1..40: mol_type = genomic DNA
gatctctaagtgggagaattggcgtggctatccagatatt

SEQ ID NO: 20010 - DNA, 50 bp, Enterococcus gallinarum; identical to SEQ ID NO: 19975
  source 1..50: mol_type = genomic DNA

SEQ ID NO: 20011 - protein, 537 aa, Ligilactobacillus ruminis; identical to SEQ ID NO: 641

SEQ ID NO: 20012 - DNA, 50 bp, Ligilactobacillus ruminis; identical to SEQ ID NO: 402
  source 1..50: mol_type = genomic DNA

SEQ ID NO: 20013 - DNA, 40 bp, Ligilactobacillus ruminis
  source 1..40: mol_type = genomic DNA
gatctcaagctgggaaaacggcagaacgtttcctgatatc

SEQ ID NO: 20014 - DNA, 40 bp, Ligilactobacillus ruminis
  source 1..40: mol_type = genomic DNA
gatctcaagctgggaaaactgcagaacgtttcctgatatc

SEQ ID NO: 20015 - DNA, 50 bp, Ligilactobacillus ruminis; identical to SEQ ID NO: 19975
  source 1..50: mol_type = genomic DNA

SEQ ID NO: 20016 - protein, 537 aa, Hungatella hathewayi; identical to SEQ ID NO: 10201

SEQ ID NO: 20017 - DNA, 50 bp, Hungatella hathewayi; identical to SEQ ID NO: 402
  source 1..50: mol_type = genomic DNA

SEQ ID NO: 20018 - DNA, 40 bp, Hungatella hathewayi
  source 1..40: mol_type = genomic DNA
tgtctccagctgggagacaggtaagaatcagccggatatt

SEQ ID NO: 20019 - DNA, 40 bp, Hungatella hathewayi
  source 1..40: mol_type = genomic DNA
tgtctccagctgggagacatgtaagaatcagccggatatt

SEQ ID NO: 20020 - DNA, 50 bp, Hungatella hathewayi; identical to SEQ ID NO: 19975
  source 1..50: mol_type = genomic DNA

SEQ ID NO: 20021 - protein, 537 aa, Ruminococcus torques; identical to SEQ ID NO: 10201

SEQ ID NO: 20022 - DNA, 50 bp, Ruminococcus torques; identical to SEQ ID NO: 402
  source 1..50: mol_type = genomic DNA

SEQ ID NO: 20023 - DNA, 40 bp, Ruminococcus torques
  source 1..40: mol_type = genomic DNA
tgtcaataaatgggagaaaggaacgtcgtgtcccgacata

SEQ ID NO: 20024 - DNA, 40 bp, Ruminococcus torques
  source 1..40: mol_type = genomic DNA
tgtcaataaatgggagaaatgaacgtcgtgtcccgacata

SEQ ID NO: 20025 - DNA, 50 bp, Ruminococcus torques; identical to SEQ ID NO: 19975
  source 1..50: mol_type = genomic DNA

SEQ ID NO: 20026 - protein, 537 aa, Ruminococcus lactaris; identical to SEQ ID NO: 641

SEQ ID NO: 20027 - DNA, 50 bp, Ruminococcus lactaris; identical to SEQ ID NO: 402
  source 1..50: mol_type = genomic DNA

SEQ ID NO: 20028 - DNA, 40 bp, Ruminococcus lactaris
  source 1..40: mol_type = genomic DNA
ggtatcaaaatgggaaagagggatatcagttcctgattcg

SEQ ID NO: 20029 - DNA, 40 bp, Ruminococcus lactaris
  source 1..40: mol_type = genomic DNA
ggtatcaaaatgggaaagatggatatcagttcctgattcg

SEQ ID NO: 20030 - DNA, 50 bp, Ruminococcus lactaris; identical to SEQ ID NO: 19975
  source 1..50: mol_type = genomic DNA

SEQ ID NO: 20031 - protein, 537 aa, Blautia obeum; identical to SEQ ID NO: 10201

SEQ ID NO: 20032 - DNA, 50 bp, Blautia obeum; identical to SEQ ID NO: 402
  source 1..50: mol_type = genomic DNA

SEQ ID NO: 20033 - DNA, 40 bp, Blautia obeum
  source 1..40: mol_type = genomic DNA
cgtatccagatgggaaaccggaaacaatatgccggatatc

SEQ ID NO: 20034 - DNA, 40 bp, Blautia obeum
  source 1..40: mol_type = genomic DNA
cgtatccagatgggaaacctgaaacaatatgccggatatc

SEQ ID NO: 20035 - DNA, 50 bp, Blautia obeum; identical to SEQ ID NO: 19975
  source 1..50: mol_type = genomic DNA

SEQ ID NO: 20036 - protein, 506 aa, Escherichia coli
MRHVITYLRYSSATQGAEGADSTRRQNELFKQWLRKNSDAQVVASFNDEGLSGYKGKHLSGQFGDMLSRIESGEFSKGTILLVEAIDRIGRLEHLETEALMNRIIAHGIEIHTLQDGLIYTRDALSDDLGISIIQRVKSYLAHQESKQKSFRVSEKWKQRAKLALAGEQHLTRNVPGWIDPDTFKCNEHAETVRLIFKLLLDGESLHNIARHLQSNDIKSFSRRKDANGFSVHSVRTVLRSESVIGTLPASQRNDRPAIPNYYEAAIDAATFNKAQEILDKNRKGRTPASDNPLTINIFKGLFRCQCGASVHPTGTKNKYAGVYRCNNHLDGRCDVQPLKRKPFDRWMIDNFLGMIDVVSDGETERRLAELQHEVEIVTARIKKATALLLEMDDIDELKIQLKELNQKRTELQTTIDNMRRKASLTDKELPQLKDIDLTTKAGRVECQLILSKHLKGLTLGKDSVIVTLQNDTEITIPTNPLPLNDGTSIFEIADKELLDIDAFRL

SEQ ID NO: 20037 - DNA, 50 bp, Escherichia coli
  source 1..50: mol_type = genomic DNA
aaaccgaatagacttcattcaaaggtcattgtattgtagctattcggcat

SEQ ID NO: 20038 - DNA, 40 bp, Escherichia coli
  source 1..40: mol_type = genomic DNA
gcggcgaggtaaatcaaaggtcattgaagtcataatcatt

SEQ ID NO: 20039 - DNA, 40 bp, Escherichia coli
  source 1..40: mol_type = genomic DNA
gcggcgaggtaaatcaaagtccattgaagtcataatcatt

SEQ ID NO: 20040 - DNA, 50 bp, Escherichia coli
  source 1..50: mol_type = genomic DNA
aaccagaattgttttctttataaatccattgtattggttttattccccaa

SEQ ID NO: 20041 - protein, 506 aa, Escherichia coli
MRHVITYLRYSSATQGAEGADSTRRQNELFKQWLRKNSDAQVVASFNDEGLSGYKGKHLSGQFGDMLSRIESGEFSKGTILLVEAIDRIGRLEHLETEALMNRIIAHGIEIHTLQDGLIYTRDALSDDLGISIIQRVKSYLAHQESKQKSFRVSEKWKQRAKLALAGKQRLTKMVPGWIDPDTLKLNEHAETVRLIFKLLLSGESLHNIARHLQANNISSFSRRKDANGFSVHSVRTILRSETTIGTLPASQRNDRPAIPNYYEAAIDAATFNKAQEILDKNRKGRTPASDNPLTINIFKGLFRCQCGASVHPTGTKNKYAGVYRCNNHLDGRCDVPPLKRKPFDKWMIDNFLGMIDVGNDGEAEGKIASLQHEVEIVTTRIKKATALLLEMDDITELKTQVKELNQKRTELQTTIDSMRRKTSLSDKGLPQLKDIDLMTKEGRVECQLILSKHLKGLTLGKDSVTVTLQNDTEITIPTNPLPLNDGTSIFEIADKELLDIDAFRL

SEQ ID NO: 20042 - DNA, 50 bp, Escherichia coli; identical to SEQ ID NO: 20037
  source 1..50: mol_type = genomic DNA

SEQ ID NO: 20043 - DNA, 40 bp, Escherichia coli
  source 1..40: mol_type = genomic DNA
gcggcgaggtaaatcaagggtcattgaagtcataatcatt

SEQ ID NO: 20044 - DNA, 40 bp, Escherichia coli
  source 1..40: mol_type = genomic DNA
gcggcgaggtaaatcaaggtccattgaagtcataatcatt

SEQ ID NO: 20045 - DNA, 50 bp, Escherichia coli; identical to SEQ ID NO: 20040
  source 1..50: mol_type = genomic DNA

SEQ ID NO: 20046 - protein, 506 aa, Escherichia coli
MRHVITYLRYSSAIQGAEGADSTRRQNDLFKQWLKKNSDAQVVASFNDEGLSGYKGKHLSGQFGDMLSRIESGEFSEGTILLVEAIDRIGRLEHLETEALMNRIIAHGIEIHTLQDGLIYTRDALSDDLGISIIQRVKSYVAHQESKQKSFRVSQKWKQRAKLALAGEQRLTKMVPGWIDPDTFKCNEHAETVRLIFKLLLDGESLHNIARHLQANNISSFSRRKDANGFSVHSVRTILRSETTIGTLPASQRNDRPAIPNYYEAAIDAATFNKAQEILDKNRKGRTPASDNPLTINIFKGLFRCQCGASVHPTGTKNKYAGVYRCNNHLDGRCDVQPLKRKPFDRWMIDNFLGMIDVGNDGESERKIAALQHEVEIVTARIKKATALLLEMDDIDELKIQLKELNQKRTELQTTIDNMRRKASLTDKELPQLKDIDLTTKAGRVECQLILSKHLKGLTLGKDTVTVTLQNDTEITIPTDPLPLNDGTSIFEIAEKNLLNIDTFQL

SEQ ID NO: 20047 - DNA, 50 bp, Escherichia coli; identical to SEQ ID NO: 20037
  source 1..50: mol_type = genomic DNA

SEQ ID NO: 20048 - DNA, 40 bp, Escherichia coli; identical to SEQ ID NO: 20043
  source 1..40: mol_type = genomic DNA

SEQ ID NO: 20049 - DNA, 40 bp, Escherichia coli; identical to SEQ ID NO: 20044
  source 1..40: mol_type = genomic DNA

SEQ ID NO: 20050 - DNA, 50 bp, Escherichia coli; identical to SEQ ID NO: 20040
  source 1..50: mol_type = genomic DNA

SEQ ID NO: 20051 - protein, 506 aa, Escherichia coli
MRHVITYLRYSSATQGAEGADSTRRQNELFKQWLRKNSDAQVVASFNDEGLSGYKGKHLSGQFGDMLSRIESGEFSKGTILLVEAIDRIGRLEHLETEALMNRIIAHGIEIHTLQDGLIYTRDALSDDLGISIIQRVKSYLAHQESKQKSFRVSEKWKQRAKLALAGKQRLTKMVPGWIDPDTLKLNEHAETVRLIFKLLLSGESLHNIARHLQANNISSFSRRKDANGFSVHSVRTVLRSESVIGTLPASQRNDRPAIPNYYEAAIDASTFNKAQEILDKNRKGRTPASDNPLTINIFKGLFRCQCGASVHPTGTKNKYAGVYRCNNHLDGRCDVQPLKRKPFDRWMIDNFLGMIDVGNDGEAEGKIASLQHEVEIVTTRIKKATALLLEMDDITELKTQVKELNQKRTELQTTIDSMRRKTSLSDKGLPQLKDIDLMTKEGRVECQLILSKHLKGLTLGKDSVTVTLQNDTEITIPTNPLPLNDGTSIFEIADKELLDIDAFRL

SEQ ID NO: 20052 - DNA, 50 bp, Escherichia coli; identical to SEQ ID NO: 20037
  source 1..50: mol_type = genomic DNA

SEQ ID NO: 20053 - DNA, 40 bp, Escherichia coli; identical to SEQ ID NO: 20043
  source 1..40: mol_type = genomic DNA

SEQ ID NO: 20054 - DNA, 40 bp, Escherichia coli; identical to SEQ ID NO: 20044
  source 1..40: mol_type = genomic DNA

SEQ ID NO: 20055 - DNA, 50 bp, Escherichia coli; identical to SEQ ID NO: 20040
  source 1..50: mol_type = genomic DNA

SEQ ID NO: 20056 - protein, 506 aa, Escherichia coli
MRSVITYLRFSSATQGAEGADSTRRQNELFKQWLRKNSDAQVVASFNDEGLSGYKGKHLSGQFGDMLSRIESGEFPEGTILLVEAIDRIGRLEHLETEALMNRIIAHGIEIHTLQDGLIYTRDALSDDLGISIIQRVKSYIAHQESKQKSFRVSQKWEQRAKLALAGEQRLTKMVPGWIDPETFKLNEHAETVRLIFKLLLDGESLHNIARHLQANNISSFSRRKDANGFSVHSVRTILRSETTIGTLPASQRNDRPAIPNYYEAAIDAATFNKAQEILDKNRKGRTPASDNPLTINIFKGLFRCQCGASVHPTGTKNKYAGVYRCNNHLDGRCDVQPLKRKPFDRWMIDNFLGMIDVGNDGESERKIAALQHEVEIVTARIKKATALLLEMDDITELKTQVKGLNQKRTELQTTIDNMRRKASLTDKELPQLKDIDLTTKAGRVECQLILSKHLKGLTLGKDSVIVTLQNDTEITIPTNPLPLNDGTSIFEIAEKELLEIDAYQL

SEQ ID NO: 20057 - DNA, 50 bp, Escherichia coli
  source 1..50: mol_type = genomic DNA
aaaccgaatagacttcattcaagagtcattgtattgtagctattcggcat

SEQ ID NO: 20058 - DNA, 40 bp, Escherichia coli; identical to SEQ ID NO: 20043
  source 1..40: mol_type = genomic DNA

SEQ ID NO: 20059 - DNA, 40 bp, Escherichia coli; identical to SEQ ID NO: 20044
  source 1..40: mol_type = genomic DNA

SEQ ID NO: 20060 - DNA, 50 bp, Escherichia coli; identical to SEQ ID NO: 20040
  source 1..50: mol_type = genomic DNA

SEQ ID NO: 20061 - protein, 497 aa, Aeromonas rivipollensis
MIMSQKQAILYSRFSSTQQADGNSMERQLKTALSYCERNGLELSPTRFSDLGISGWSGVEREGLETLLRAVREGYIPNDSYILVEDADRLSRQGFMHVLQLVTELVETGCIFVTLSNGQQYTKTNVKNLSTALPLIISADLAQIESQKKSDRLRAVKTQKRLDRVIQGNQPFWIDVVDGVPKLNDKADLARRIVELTIKGYRPLYITRQFNSEGIPSPRGKSWNVAVIRRILTNTILYGAKTYHESRDGNYETVETVKGLYPAICTHAEFQQIRVEKSTKRGVQEWGPFSTILRCECGSSLVVKQKRGDDTYRVCSAFIQGVKNCSRSGYYKNLDQSLMKIYQMVPVVSKVTHSVQGDPDTERLVELRDTLAELEESREQFKGKPKMLMRIYEDIDGVESEIDSLELKLQTKVQETPETVDITTLPTIEQNSILKRYLKSIVCKKLNPNEIECTISTRSGKFSTIYIVHGKGVINPLVVSTFLENDLDNYHKFGLYK

SEQ ID NO: 20062 - DNA, 50 bp, Aeromonas rivipollensis
  source 1..50: mol_type = genomic DNA
tgtcttcttaatggaacttgcatcaccttgttagttcttttatgatgaca

SEQ ID NO: 20063 - DNA, 40 bp, Aeromonas rivipollensis
  source 1..40: mol_type = genomic DNA
gatgggggcaatcagcatcaccttgttgatcatccagacg

SEQ ID NO: 20064 - DNA, 40 bp, Aeromonas rivipollensis
  source 1..40: mol_type = genomic DNA
gatgggggcaatcagcatcgtcttgttgatcatccagacg

SEQ ID NO: 20065 - DNA, 50 bp, Aeromonas rivipollensis
  source 1..50: mol_type = genomic DNA
ttttttcttaaactaagttgcaacgtcttgttggatactagaaaatgact

SEQ ID NO: 20066 - protein, 550 aa, Klebsiella quasipneumoniae
MGIKTAFCYCRVSSGRQKTEKGGFGMSRQQALLTTYVEEYEDKDGLGYELNVDNIVFLKAEGVSGFSGKNIEKGSVLHSFIADYKSGKIKNAVLIIENIDRFSRANPNEAAELFLGLINKGCDVHEIDTETVHHRCSDLNQISAGLTRSHKESLRKQKLSIKNWDERFEKTVKKHVPLTGRCPGWLKVENDLYQEIPERVAPIRLIFEWYNNGYGQAYIRDRLNSEGYKYNGKTWSNWSVHRVLKDERVTGKHRTKSILRNNFDGIMMYPAIITELQFKRAEQRLTKPGRDKKINRRANTLFSGVLICGLCKAGHILINNENGNRFGRCSHAIAGNKRCVANGFKYNVVENILIKYLRHLDFGRLNNSSHAVELENLSSELIHYSNYLANVQRTVDSVDIPSETDYKVLKNLEAKVRELQGKIDDIKALENVSVGYEEIVKKINNELMDVSNIEVRQDFNIKIRKIIREIQILKIQKNIVLVSVSFYVSNDVQWITISLKEGLLLSNTYVENKILVVTLGNEIMTYDIESKQYYLNSKPISNEDAYALFD

SEQ ID NO: 20067 - DNA, 50 bp, Klebsiella quasipneumoniae
  source 1..50: mol_type = genomic DNA
tactatataataactgcactaatcaccattatgcgtgttattatatagta

SEQ ID NO: 20068 - DNA, 40 bp, Klebsiella quasipneumoniae
  source 1..40: mol_type = genomic DNA
ggcgatgatgccgatgaccaccatcagttcaatcagggta

SEQ ID NO: 20069 - DNA, 40 bp, Klebsiella quasipneumoniae
  source 1..40: mol_type = genomic DNA
ggcgatgatgccgatgacctacatcagttcaatcagggta

SEQ ID NO: 20070 - DNA, 50 bp, Klebsiella quasipneumoniae
  source 1..50: mol_type = genomic DNA
taatatatatattttgcaattatatatattatatatatatttatatatta

SEQ ID NO: 20071 - protein, 550 aa, Klebsiella pneumoniae
MGIKTAFCYCRVSSGRQKTEKGGFGMSRQQALLTTYVEEYEDKDGLGYELNVDNIVFLKAEGVSGFSGKNIEKGSVLHSFIADYKSGKIKNAVLIIENIDRFSRANPNEAAELFLGLINKGCDVHEIDTETVHHRCSDLNQISAGLTRSHKESLRKQKLSIKNWDERFEKTVKKHVPLTGRCPGWLKVENDLYQEIPERVAPIRLIFEWYNNGYGQAYIRDRLNSEGYKYNGKTWSNWSVHRVLKDERVTGKHRTQSILRNNFDGIMMYPAIITELQFKRAEQRLTKPGRDKKINRRANTLFSGLLICGLCKAGHILINNENGNRFGRCSHAIAGNKRCVANGFKYNVVENTLIKYLRHLDFGSLNNSSHAVELENLSSELIHYSNYLANVQRTVDSVDIPSETDYKVLKNLEAKVRELQGKIDDIKALENVSVSYEEIVKKINNELMDVSNIEVRQGFNIKIRKIIREIQILKIQKNIVLVSVSFYVSNDVQWITINLKEGLLLSNTYVENKILVVTLGNEIMTYDIESKQYYLNSKPISNEDAYALFD

SEQ ID NO: 20072 - DNA, 50 bp, Klebsiella pneumoniae; identical to SEQ ID NO: 20067
  source 1..50: mol_type = genomic DNA

SEQ ID NO: 20073 - DNA, 40 bp, Klebsiella pneumoniae
  source 1..40: mol_type = genomic DNA
ggcgatgattccgataaccaccatcagttcaatcagggta

SEQ ID NO: 20074 - DNA, 40 bp, Klebsiella pneumoniae
  source 1..40: mol_type = genomic DNA
ggcgatgattccgataacctacatcagttcaatcagggta

SEQ ID NO: 20075 - DNA, 50 bp, Klebsiella pneumoniae; identical to SEQ ID NO: 20070
  source 1..50: mol_type = genomic DNA

SEQ ID NO: 20076 - protein, 550 aa, Klebsiella pneumoniae
MGIKTAFCYCRVSSGRQKTEKGGFGMSRQQALLTTYVEEYEDKDGLGYELNVDNIVFLKAEGVSGFSGKNIEKGSVLHSFIADYKSGKIKNAVLIIENIDRFSRANPNEAAELFLGLINKGCDVHEIDTETVHHRCSDLNQISAGLTRSHKESLRKQKLSIKNWDERFEKTVKKHVPLTGRCPGWLKVENDLYQEIPERVAPIRLIFEWYNNGYGQAYIRDRLNSEGYKYNGKTWSNWSVHRVLKDERVTGKHRTQSILRNNFDGIMMYPAIITELQFKRAEQRLTKPGRDKKINRRANTLFSGLLICGLCKAGHILINNENGNRFGRCSHAIAGNKRCVANGFKYNVVENTLIKYLRHLDFGSLNNSSHAVELENLSSELIHYSNYLANVQRTVDSVDIPSETDYKVLKNLEAKVRELQGKIDDIKALENVSVSYEEIVKKINNELMDVSNIEVRQDFNIKIRKIIREIQILKIQRNIVLVSVSFYVSNDVQWITISLKEGLLLSNTYVENKILVVTLGNEIMTYDIESKQYYLNSKPISNEDAYALFD

SEQ ID NO: 20077 - DNA, 50 bp, Klebsiella pneumoniae; identical to SEQ ID NO: 20067
  source 1..50: mol_type = genomic DNA

SEQ ID NO: 20078 - DNA, 40 bp, Klebsiella pneumoniae; identical to SEQ ID NO: 20073
  source 1..40: mol_type = genomic DNA

SEQ ID NO: 20079 - DNA, 40 bp, Klebsiella pneumoniae; identical to SEQ ID NO: 20074
  source 1..40: mol_type = genomic DNA

SEQ ID NO: 20080 - DNA, 50 bp, Klebsiella pneumoniae; identical to SEQ ID NO: 20070
  source 1..50: mol_type = genomic DNA

SEQ ID NO: 20081 - protein, 620 aa, Aliivibrio wodanis
MKFNSSKPQVYSYRRFSSPLQEKGTSLVRQSKLIKEVAEKFNLEVNDSLVMTDRGLSAFHAEHKSRGELGLFLSAIKEGLVKPGSVLIVESLDRLSREDAMTASSDLNNLINHGITIHTAMDGRTYSSETMANDPMNILWATIVMIKANEESMKKFERSVGFIQEQVSNFYENGLGDVAGAIPFWIKRKARENVKIKTGFEFNENEETIRLIVDMYLNQGRGLRPISRYLYEKRIKSPKGHDVWGVSTLSSVLENEALCGRKVFKLKVKKKYIDEYDNFELKDYYPAIMSEDDFDKMQAIKKRKAGGGKGDKSNRGGLVYLLTDYGKKSVCAKCGSGIGSQPQQQKNRIRRRLHCYKHKETANCCKSIIQDYLEDAFLVSVSRHIDYSLINKDIDATNVVLIEERLEAIDGELENAMDLIITVKDPKMKIILNKKYERLECEKMELEKQKNELKEFKVSEDDIKTFITTVGKARDYKDNESRKIIKNILSQCIKKLSVHLDKKRLSYYGYPNICNNALVNVIDVEFYSEKNLSIFVCSETNILLFTRIDNEFSNDAMGSYTEDELMIWNNEGKEALDNVIKNNIVDNHNTSSPENLWFGSDVASMIFEAMLDELDELDEE

SEQ ID NO: 20082 - DNA, 50 bp, Aliivibrio wodanis
  source 1..50: mol_type = genomic DNA
ttagttatcagtattcgcttgacatctgtccagagaacactgatacttaa

SEQ ID NO: 20083 - DNA, 40 bp, Aliivibrio wodanis
  source 1..40: mol_type = genomic DNA
gaagtaaccaaagctgccgtctgtccagtgaatgtcttgc

SEQ ID NO: 20084 - DNA, 40 bp, Aliivibrio wodanis
  source 1..40: mol_type = genomic DNA
gaagtaaccaaagctgccgaatgtccagtgaatgtcttgc

SEQ ID NO: 20085 - DNA, 50 bp, Aliivibrio wodanis
  source 1..50: mol_type = genomic DNA
ttagttatctacggctgcataacaaatgaccccacaacttagatgcttaa

SEQ ID NO: 20086 - protein, 554 aa, Bradyrhizobium vignae
MDAPVRTEGQTKAYSYVRFSTAQQEAGASLQRQTEKAAKYAADHGLLLDTELNMTDPGVSAFRGKNARTGALGGFLAAVNKGYVPKGSYLLIENIDRLSRSDIVSAQTLFNQIILSEINIVTLTTGETYSLERLQEEPEAMFYVVLELIRANRESTRKAQLIGDAKARKKKRLIEHGLEGKPYTRQTPAWIAWSDEEKKYKLIPERADIVREMFERMDKGDGLGGIARDLNQLGVPTWGRSGRQRTADHWRTSYIRKVLTSSAPIGTFTPHTTTHDETTRARRDEPMTPVENLFPAAVDADLYWRVHRKLSTTAARGRNAKQPAKSIVSGIMFCANCGHAVTRVAKGDYVYLVCSRANMRAGACKYLAVRYDAVEQALRKDAHRLVKEAPRGKSTIALDKQIEQLQSEADGMEALSFELTELIVEERGSPEATAASRQVREVEQRLKRLQRELRELRAQRDTKTTTSVKDRLKAVERALSGNDDVAEINMALRDAIRRIVLDPEQGHLWVRWHHSEEVQDIGFITRHMDWTEFRETTAPMHALFPETTNDNQAK

SEQ ID NO: 20087 - DNA, 50 bp, Bradyrhizobium vignae
  source 1..50: mol_type = genomic DNA
aattgtcattgacaacccacattcgccattgcagggtgtgaatgccaacg

SEQ ID NO: 20088 - DNA, 40 bp, Bradyrhizobium vignae
  source 1..40: mol_type = genomic DNA
gtccggaaggccgacgatggcgaaggccggcaggcccggc

SEQ ID NO: 20089 - DNA, 40 bp, Bradyrhizobium vignae
  source 1..40: mol_type = genomic DNA
gtccggaaggccgacgatgttgaaggccggcaggcccggc

SEQ ID NO: 20090 - DNA, 50 bp, Bradyrhizobium vignae
  source 1..50: mol_type = genomic DNA
actggctattgtccaccaagataattcattgcaggggaacgatgccaacc

SEQ ID NO: 20091 - protein, 500 aa, Pectobacterium aroidearum
MPQDNNGIAYSYVRFSSKKQASGDSLRRQMEMAEEYASRHMLRLSSKNFQDLGISAFREGKRPSLADMLTAIDEGQITAGSTIIIEALDRLSRRGIDATLETVKEILRKDVQIVSLSDGLVLTKSSPNELESVIRIALAADLAYKESERKAQRLRETKGQQRQDALNGIPINKILPFWLKRTETGYAFSDKVETARQIVTLKQEGKGSNMIAKFLNKQGIAGIRTAQWNHASITKMLKNPALYGAYQTGETNKEREMIQLEIVEGYYPALINKDEWLLLQSDQSKSTRGRRSTDNPYSGLLRCGCGGALIKRKSTVRGKLYVYHGCLNAKDGRCSQNLSIKGLDGALATMLGRLEFKKAVTVDQSIYLEKQQIENRIANLNKTLQEVDHVPASVIQTIITMEARIKEITQQIETGEREQRGIDAVNNAKLSSITDSLELNLLLKRVLKSITVTRSGLGWAVRIFHLSGHSQSFLLVNGQLRLVSDSIALKNLLNEYLKDD

SEQ ID NO: 20092 - DNA, 50 bp, Pectobacterium aroidearum
  source 1..50: mol_type = genomic DNA
aaaagaaattattatatatgaaactgcatggtgatattgttacttaatag

SEQ ID NO: 20093 - DNA, 40 bp, Pectobacterium aroidearum
  source 1..40: mol_type = genomic DNA
caacggcttgctgccgaactgcatggtgatattgttggta

SEQ ID NO: 20094 - DNA, 40 bp, Pectobacterium aroidearum
  source 1..40: mol_type = genomic DNA
caacggcttgctgccgaacatcatggtgatattgttggta

SEQ ID NO: 20095 - DNA, 50 bp, Pectobacterium aroidearum
  source 1..50: mol_type = genomic DNA
caaagaaatataactatatgaaaaataaatttcataatcacacttaaggg

SEQ ID NO: 20096 - protein, 500 aa, Pectobacterium carotovorum
MPQDNNGIAYSYVRFSSKKQASGDSLRRQMEMAEEYASRHMLRLSSKNFQDLGISAFREGKRPSLADMLTAIDEGQITAGSTIIIEALDRLSRRGIDVTLETVKEILRKDVQIVSLSDGLVLTKSSPNELESVIRIALAADIAYKESERKAQRLRETKGQQRQDALNGIPINKILPFWLKRTETGYAFSDKVETARQIVTLKQEGKGSNMIAKFLNKQGIAGIRTAQWNHASITKMLKNPALYGAYQTGETNKEREMIQLEIVEGYYPALINKDEWLLLQSDQSKSTRGRRSTDNPYSGLLRCGCGGALIKRKSTVRGKLYVYHGCLNAKDGRCSQNLSIKGLDGALATMLGRLEFKKAVTVDQSIYLEKQQIENRIANLNKTLQAVDHVPASVIQTIITMEARIKEITQQIETGEREQRGIDAVNNAKLSSITDSLELNLLLKRVLKSITVTRSGLGWAVRIFHLSGHSQSFLLVNGQLRLVSDSIALKNLLNEYLKDD

SEQ ID NO: 20097 - DNA, 50 bp, Pectobacterium carotovorum; identical to SEQ ID NO: 20092
  source 1..50: mol_type = genomic DNA

SEQ ID NO: 20098 - DNA, 40 bp, Pectobacterium carotovorum; identical to SEQ ID NO: 20093
  source 1..40: mol_type = genomic DNA

SEQ ID NO: 20099 - DNA, 40 bp, Pectobacterium carotovorum; identical to SEQ ID NO: 20094
  source 1..40: mol_type = genomic DNA

SEQ ID NO: 20100 - DNA, 50 bp, Pectobacterium carotovorum; identical to SEQ ID NO: 20095
  source 1..50: mol_type = genomic DNA

SEQ ID NO: 20101 - protein, 517 aa, Mediterraneibacter faecis
MNIAAYCRVSTDKADQLNSLEAQKEFFSEYTKRTGDTLVKLYADEGISGTKIKNRKEFLRMMSDAEQGLFDMVVVKDISRFARNTVDLLQNVRKLKSLGIETQFLTANMTSMGNSEFVLTIFGALAQEESANTSKRVKFGKKMNAEKGRVPNIVYGYDKTIGDYFNLAINKEESKVVQQIYKWYTEEGYGAAKIANMLNEKGYKTKRNCKWSQNATCRILTNEIYTGKIINGKQEVSDFLTGQRRDKDETEWMVVERPELRIIEDETFEKAQEILRGRHDAFNLSHERQSNKHLFSTLIKCKECGWSFRRTVRTYKNTYVRWVCSGRNGKGADSCPNKTVVDEEELIEVLQEYFTNVLKQKKKVIAHVVNEFQRVYKAKDENVEYEKELNTELAKLQKTRQKYMDMYTDDLISREELNEKIGGSRQEMERIENELKMVSYHLTKGEQLENILNNTFKEIEDITDVHQMTNQQLKRLIQKIEVDKEENVDIYLRLLGDLGLDESVLIEENETILNCDD

SEQ ID NO: 20102 - DNA, 50 bp, Mediterraneibacter faecis
  source 1..50: mol_type = genomic DNA
ccattctaaattgtgacgactaaacatatggttgtaacaaaatagaacga

SEQ ID NO: 20103 - DNA, 40 bp, Mediterraneibacter faecis
  source 1..40: mol_type = genomic DNA
gattagtaagagtacggtgcataaggatgttacagaacgt

SEQ ID NO: 20104 - DNA, 40 bp, Mediterraneibacter faecis
  source 1..40: mol_type = genomic DNA
gattagtaagagtacggtgattaaggatgttacagaacgt

SEQ ID NO: 20105 - DNA, 50 bp, Mediterraneibacter faecis
  source 1..50: mol_type = genomic DNA
caattctaaatgaagactactaaaattatatttctatataaaaaaatgga

SEQ ID NO: 20106 - protein, 488 aa, Lactococcus lactis
MSKKVAIYCRVSTTNQAEDGYSIGEQEDKLKKYCEIMGWQVSEIYTDAGFSGSNIERPAIQNMIYDAKSHNFDTVLVYKLDRLSRSTRDNLFLIQDVFKNNNVEFISLNENIDTSSAMGGFFLTILAAFAELERETIKERMQLGKLGRIKSGKSSAVNNAALGYKYDKSTDSRVIVPTEAKLVQEIFERYASGDSISRIVRDFLARGITGKNGGHITPTRIRNILSNEVYIGKQRYQDKIYDATHEPIITEEMFYSVQKELEIKQNDAYKKGNSRPFQAKYMLSGLLKCGYCGSRFDTYVGKPNKAGEKTVRYVCRNRKTARAKFSRKDIYDGLGYSSCPYDGFYYKQDLEDIVINEILELQYDKDKIKNLISEKKVKAVDEKQVKSDIQAIQKKISRLNDLYLVDAIDLDELKVKVKDLKQKEKNLEQLLTSNSNKQQELKMKEAKEKILLSTDISSSDYEVQKSIVRTLISSINVKENELDIVWNL

SEQ ID NO: 20107 - DNA, 50 bp, Lactococcus lactis
  source 1..50: mol_type = genomic DNA
tcgcttgttttaatcctaactatttcaaacgcaaagacataaacaagtag

SEQ ID NO: 20108 - DNA, 40 bp, Lactococcus lactis
  source 1..40: mol_type = genomic DNA
gaaaatatctcttccttcttccagagcgcgctcacaagta

SEQ ID NO: 20109 - DNA, 40 bp, Lactococcus lactis
  source 1..40: mol_type = genomic DNA
gaaaatatctcttccttcttgcagagcgcgctcacaagta

SEQ ID NO: 20110 - DNA, 50 bp, Lactococcus lactis
  source 1..50: mol_type = genomic DNA
ttccttattggtcccttaactatttgaaattcaatgtaaacaatgagtag

SEQ ID NO: 20111 - protein, 558 aa, Bacteroides uniformis
MKRVIGYIRVSTDNQDLERQRVLIRKYCENKGYSLLRIEEDYAISGTVSNRNGLNSILNITNSVADMVVVSELSRLSRQDDIFETLTQIHTIIRNVDLVILDEPDKVYEAGKTIILSDFLMLAIKAYGAADERKKIVSRMTTGKDSKVQAFPLMLTDSNIPTGFKAVPNPNYIKGATPKMLLVEDEERMQLVRDIFNYVANGLSLGKTAEKLNMLGYRTARNKPFYEQSIRTIINDSIYNGVRYWKGIKLELPVKFISDEIWNLAHKKVQENKNYSGEAQKHYNPLKGIIKCPCGQTSMYGRTSSCITYRCLDRIKMGIKSPCTNVGIKAETLIYAVWKDVRLRTLDETYQAKSNEKIAEIEAENIKLTQSIKEKDSEIAKLQSDLKTVIDNVMASTNITIVKALNGKADSIDSQIKSIEAEKTAIDEEIASNNRRIADEIKSQSRKELDSLSLEGKGEMFRELLSKVVYYSVSLNSGFIVITYKNDLETIIAYHNRNKPFLWALPITFRFNKVKRTVIVPTLPEQPKMTSFVLERIKEKEYTFKQLQESFNLEEYKI

SEQ ID NO: 20112 - DNA, 50 bp, Bacteroides uniformis
  source 1..50: mol_type = genomic DNA
aggtgtaactttgaaaagtcaaataatgttaagttgttaaagttatacct

SEQ ID NO: 20113 - DNA, 40 bp, Bacteroides uniformis; identical to SEQ ID NO: 4123
  source 1..40: mol_type = genomic DNA

SEQ ID NO: 20114 - DNA, 40 bp, Bacteroides uniformis; identical to SEQ ID NO: 4124
  source 1..40: mol_type = genomic DNA

SEQ ID NO: 20115 - DNA, 50 bp, Bacteroides uniformis; identical to SEQ ID NO: 4120
  source 1..50: mol_type = genomic DNA

SEQ ID NO: 20116 - protein, 558 aa, Phocaeicola vulgatus; identical to SEQ ID NO: 4121

SEQ ID NO: 20117 - DNA, 50 bp, Phocaeicola vulgatus
  source 1..50: mol_type = genomic DNA
aggtataactttgaaaagtcaaataatgttaagttgttaaaattatacct

SEQ ID NO: 20118 - DNA, 40 bp, Phocaeicola vulgatus
  source 1..40: mol_type = genomic DNA
aggcatcaaaatcttgcaaaaagaagacttgcgcttcccc

SEQ ID NO: 20119 - DNA, 40 bp, Phocaeicola vulgatus
  source 1..40: mol_type = genomic DNA
aggcatcaaaatcttgcaattagaagacttgcgcttcccc

SEQ ID NO: 20120 - DNA, 50 bp, Phocaeicola vulgatus; identical to SEQ ID NO: 4120
  source 1..50: mol_type = genomic DNA

SEQ ID NO: 20121 - protein, 558 aa, Phocaeicola vulgatus; identical to SEQ ID NO: 4171

SEQ ID NO: 20122 - DNA, 50 bp, Phocaeicola vulgatus; identical to SEQ ID NO: 20112
  source 1..50: mol_type = genomic DNA

SEQ ID NO: 20123 - DNA, 40 bp, Phocaeicola vulgatus; identical to SEQ ID NO: 4148
  source 1..40: mol_type = genomic DNA

SEQ ID NO: 20124 - DNA, 40 bp, Phocaeicola vulgatus; identical to SEQ ID NO: 4149
  source 1..40: mol_type = genomic DNA

SEQ ID NO: 20125 - DNA, 50 bp, Phocaeicola vulgatus; identical to SEQ ID NO: 4120
  source 1..50: mol_type = genomic DNA

SEQ ID NO: 20126 - protein, 558 aa, Phocaeicola vulgatus; identical to SEQ ID NO: 20111

SEQ ID NO: 20127 - DNA, 50 bp, Phocaeicola vulgatus; identical to SEQ ID NO: 20112
  source 1..50: mol_type = genomic DNA

SEQ ID NO: 20128 - DNA, 40 bp, Phocaeicola vulgatus; identical to SEQ ID NO: 4148
  source 1..40: mol_type = genomic DNA

SEQ ID NO: 20129 - DNA, 40 bp, Phocaeicola vulgatus; identical to SEQ ID NO: 4149
  source 1..40: mol_type = genomic DNA

SEQ ID NO: 20130 - DNA, 50 bp, Phocaeicola vulgatus; identical to SEQ ID NO: 4120
  source 1..50: mol_type = genomic DNA

SEQ ID NO: 20131 - protein, 558 aa, Phocaeicola vulgatus
MKRVIGYIRVSTDNQDLERQRVLIRKYCENKGYSLLRIEEDYAISGTVSNRNGLNSILNITNSVADMVVVSELSRLSRQDDIFETLTQIHTIIRNVDLVILDEPDKVYEAGKTIILSDFLMLAIKAYGAADERKKIVSRMTTGKDSKVQAFPLMLTDSNIPTGFKAVPNPNYIKGATPKMLLVEDEERMQLVRDIFNYVANGLSLGKTAEKLNMLGYRTARNKPFYEQSVRTIINDSIYNGVRYWKGIKLELPVKFISDEIWNLAHKKVQENKNYSGEAQKHYNPLKGIIKCPCGQTSMYGRTSSCITYRCLDRIKMGIKSPCTNVGIKAETLIYAVWKDVRLRTLDETYQAKSNEKIAEIEAENIKLTQSIKEKDSEIAKLQSDLKTVIDNVMASTNITIVKALNGKADSIDSQIKSIEAEKTAIDEEIASNNRRIADEIKSQSRKELDSLSLEGKGEMFRELLSKVVYYSVSLNSGFIVITYKNDLETIIAYHNRNKPFLWALPITFRFNKVKRTVIVPTLPEQPKMTSFVLERIKEKEYTFKQLQESFNLEEYKI

SEQ ID NO: 20132 - DNA, 50 bp, Phocaeicola vulgatus; identical to SEQ ID NO: 20112
  source 1..50: mol_type = genomic DNA

SEQ ID NO: 20133 - DNA, 40 bp, Phocaeicola vulgatus; identical to SEQ ID NO: 4148
  source 1..40: mol_type = genomic DNA

SEQ ID NO: 20134 - DNA, 40 bp, Phocaeicola vulgatus; identical to SEQ ID NO: 4149
  source 1..40: mol_type = genomic DNA

SEQ ID NO: 20135 - DNA, 50 bp, Phocaeicola vulgatus; identical to SEQ ID NO: 4120
  source 1..50: mol_type = genomic DNA

SEQ ID NO: 20136 - protein, 558 aa, Phocaeicola vulgatus
MKRVIGYIRVSTDNQDLERQRVLIRKHCENKGYSLLRIEEDYAISGTVSNRNGLNSILNITNSVADMVVVSELSRLSRQDDIFETLTQIHTIIRNVDLVILDEPDKVYEAGKTIILSDFLMLAIKAYGAADERKKIVSRMTTGKDSKVQAFPLMLTDSNIPTGFKAVPNPNYIKGATPKMLLVEDEERMQLVRDIFNYVANGLSLGKTAEKLNMLGYRTARNKPFYEQSIRTIINDSIYNGVRYWKGMKLELPVKFISDEIWNLAHKKVQENKNYSGEAQKHYNPLKGIIKCPCGQTSMYGRTSSCITYRCLDRIKMGIKSPCTNVGIKAETLIYAVWKDVRLRTLDETYQAKSNEKIAKIEAENIKLTQSIKEKDSEIAKLQSDLKTVIDNVMASTNITIVKALNGKADSIDSQIKSIEAEKTAIDEEIASNNRRIADEIKSQSRKELDSLSLEGKGEMFRELLSKVVYYSVSLNSGFIVITYKNDLETIIAYHNRNKPFLWALPITFRFNKVKRTVIVPTLPEQPKMTSFVLERIKEKEYTFKQLQESFNLEEYKI

SEQ ID NO: 20137 - DNA, 50 bp, Phocaeicola vulgatus
  source 1..50: mol_type = genomic DNA
aggtacaactttgaaaagtcaaataatgttaagttgttaaagttatacct

SEQ ID NO: 20138 - DNA, 40 bp, Phocaeicola vulgatus; identical to SEQ ID NO: 4148
  source 1..40: mol_type = genomic DNA

SEQ ID NO: 20139 - DNA, 40 bp, Phocaeicola vulgatus; identical to SEQ ID NO: 4149
  source 1..40: mol_type = genomic DNA

SEQ ID NO: 20140 - DNA, 50 bp, Phocaeicola vulgatus; identical to SEQ ID NO: 4120
  source 1..50: mol_type = genomic DNA

SEQ ID NO: 20141 - protein, 514 aa, Mycobacteroides chelonae
MGARVSVLSGPQKVSHEAQIDSATRWAEANGCRVVGSFEDVGVSASVPPEQRPDLGPWLTPEREHEWDVIVWSKMDRAFRSTRHCVDFARWAEENQKVVVFADDGLKLDYRPDAAKGIDAMMAELFVYLGSFFAQLELNRFKSRATDSQRAIRPTTRWASGLPPLGYKVVDHPSGKGKGLAIDPDAANLVREMADKLVDGWSFVRITEWLNESGQLTSQGRSRQARGLGPKGAWTTTNVIEILTGYRALGIKTHKDQPVLDGNGEPIRLAPPLFTPERWDEIQRAAQQRKGKPRTPSDTSNPMLGVGYCGAPCPHKRAGSECPDDCQGICGSSLAQQFSKTRPRKSDGHVTFYRYYRCSRTPINCKTVFVVADILDELLSEQFLLERGDRKVTERLFIAGEDNSYELDFINQRIELLREDRASGLFPSGEDELVYHNQMKRLLARRDELASVPVRQSRYENVELEKTYREVWPNATPEEKRKMLIDAEISIRLGESPGKSIRAEMVVGSPYRKM

SEQ ID NO: 20142 - DNA, 50 bp, Mycobacteroides chelonae
  source 1..50: mol_type = genomic DNA
cttctcataggtgtactcctcgatcaacagtagcatacactcttgaaaca

SEQ ID NO: 20143 - DNA, 40 bp, Mycobacteroides chelonae
  source 1..40: mol_type = genomic DNA
gatcgccatgctcctcgatcaacagatcccgatggaagtg

SEQ ID NO: 20144 - DNA, 40 bp, Mycobacteroides chelonae
  source 1..40: mol_type = genomic DNA
gatcgccatgctcctcgataaacagatcccgatggaagtg

SEQ ID NO: 20145 - DNA, 50 bp, Mycobacteroides chelonae
  source 1..50: mol_type = genomic DNA
tatcccaaagtctgattccttgataaacagcagcttctgtactttaaaca

SEQ ID NO: 20146 - protein, 514 aa, Mycobacteroides abscessus; identical to SEQ ID NO: 20141

SEQ ID NO: 20147 - DNA, 50 bp, Mycobacteroides abscessus; identical to SEQ ID NO: 20142
  source 1..50: mol_type = genomic DNA

SEQ ID NO: 20148 - DNA, 40 bp, Mycobacteroides abscessus
  source 1..40: mol_type = genomic DNA
ggtaggcatctgataccagcagtagtgggccatggaggtc

SEQ ID NO: 20149 - DNA, 40 bp, Mycobacteroides abscessus
  source 1..40: mol_type = genomic DNA
ggtaggcatctgataccagaagtagtgggccatggaggtc

SEQ ID NO: 20150 - DNA, 50 bp, Mycobacteroides abscessus; identical to SEQ ID NO: 20145
  source 1..50: mol_type = genomic DNA

SEQ ID NO: 20151 - protein, 540 aa, Blautia sp YL58
MKQPYNTTIYNTALYMRLSRDDENYGDSVSIETQRTILQQYAKEQGLHVVGEYVDDGWSGTNFERPDFQRMMDDVEAGKVNCIVTKDLSRFGREHVMMDYYLEFLFPEKRVRYIAVAENEDTEKGLSDFVPFKNLFNEWFAKDTSRKVKAAFKAKFATGQRIGAYAPIGYRKHPEIKNKLIIDEETRWIVEKIFDLAIHGKGAASITRILIAEKVPTPGFINFQRNGTFGNIYAGAPEEKSYAWTIAQVKSIMKDETYIGHTIHYRETNISFKNKRRIRKPQSEWVRVENTQEPIISEQVFRQVQEQIASRRRERKNGTTQIFAGLIKCADCGWSLAYGENRQNSKPYGYYHCSKNGQGTRQCSMHYIRYDVLYAYVLFRLQYWSGLVQHDEERLLKRLLNANDKGQAAARKKQAAELKKAEKRKAEVDTLFARMYEDWAAGRITEYNFSMLSGKYQSEQAELDAKIEQLQSAITTESQNAADAEKWIALMKECVNPTELTAELLNTLIEKIVVHEAVKGEDGSREQEVEIFYRFIGKID

SEQ ID NO: 20152 - DNA, 50 bp, Blautia sp YL58
  source 1..50: mol_type = genomic DNA
caatatctttaactatgtgaaaccggggtttcacttagataaagatacta

SEQ ID NO: 20153 - DNA, 40 bp, Blautia sp YL58
  source 1..40: mol_type = genomic DNA
ggtcagcaagtgggagcggggactgagtcttccggacatt

SEQ ID NO: 20154 - DNA, 40 bp, Blautia sp YL58
  source 1..40: mol_type = genomic DNA
ggtcagcaagtgggagcggagactgagtcttccggacatt

SEQ ID NO: 20155 - DNA, 50 bp, Blautia sp YL58
  source 1..50: mol_type = genomic DNA
aaatattttgacaaaagtcagaaaaggctttcacttgtttcaaaatacta

SEQ ID NO: 20156 - protein, 482 aa, Streptococcus pyogenes; identical to SEQ ID NO: 2446

SEQ ID NO: 20157 - DNA, 50 bp, Streptococcus pyogenes
  source 1..50: mol_type = genomic DNA
ctaagaattttactatcctacatctcaatgaaagatactaaaatccctag

SEQ ID NO: 20158 - DNA, 40 bp, Streptococcus pyogenes
  source 1..40: mol_type = genomic DNA
tacatcactcacttgtatctcgtttaaagacatcacctgg

SEQ ID NO: 20159 - DNA, 40 bp, Streptococcus pyogenes
  source 1..40: mol_type = genomic DNA
tacatcactcacttgtatcacgtttaaagacatcacctgg

SEQ ID NO: 20160 - DNA, 50 bp, Streptococcus pyogenes
  source 1..50: mol_type = genomic DNA
tcaagcattttctgatccttcatcacacggaaagaagtctgaatcccttt

SEQ ID NO: 20161 - protein, 554 aa, Pseudomonas aeruginosa
MSKAYAYVRYSRITQESGDSEARQYNALERFTASTGVEIHEVIYDRGKSAFRGDNARSGYFKEILERINNRKIKKDDFLVVESIDRITRQRVIDGVELLQSILKKGIKIYTTTDEKIYSYSDPSRDFETLMMIALIAQRANEESETKSKRLNSAWRKRREKAQSGEIIIKSGKSVPYGLRVEKGQFVIVEDEQKEIEALFNLILEYGINTSITKINETSIKRWNNGTLNKIIKSKTVIGCMAMHRIEYDENGKSKKILTGYIEDYYPKIIEPALFYKAVDTMKNRKAKNWSGNRTEQDFNIFKHQIFCKACGGKMYYDHRGSRYKGKIYPFFKCDNARVQKHLCTADNVRFEYVLGSFLDSVKNIKKAGISSSLQKTNLGKRADGFNNAISSVLKIERDINSDISIKAKELNECRLKIENLNTQIEELDFNAPKIYVKKLSELEAQYDEIKKEIEILESQSTEQIEIQDELTVIELFRNESGRLKLNRFFKENNIVFNVSHDKQERTTQFEIRRKNGVTDERISLNLKTFPLKDILQEFGLVDLQTMFDLTVKS

SEQ ID NO: 20162 - DNA, 50 bp, Pseudomonas aeruginosa
  source 1..50: mol_type = genomic DNA
ctcggagaattggtttaccggatgatgatctggtgatatgattctccgag

SEQ ID NO: 20163 - DNA, 40 bp, Pseudomonas aeruginosa
  source 1..40: mol_type = genomic DNA
tccccggcgcaaccgcatcatcagcggactctcgctgggt

SEQ ID NO: 20164 - DNA, 40 bp, Pseudomonas aeruginosa
  source 1..40: mol_type = genomic DNA
tccccggcgcaaccgcatccacagcggactctcgctgggt

SEQ ID NO: 20165 - DNA, 50 bp, Pseudomonas aeruginosa
  source 1..50: mol_type = genomic DNA
ctcggagaaaatatttgccaaatacatatctggtaaagatatgcccagag

SEQ ID NO: 20166 - protein, 452 aa, Listeria monocytogenes
MKAAIYIRVSTQEQVENYSIQAQTEKLTALCRSKDWDVYDTFIDGGYSGSNMNRPALNEMLSKLHEIDAVVVYRLDRLSRSQKDTITLIEEYFLKNNVEFVSLSETLDTSSPFGRAMIGILSVFAQLERETIRDRMVMGKIKRIEAGLPLTTAKGRTFGYDVIDTKLYINEEEAKQLRLIYDIFEEEQSITFLQKRLKKLGFKVRTYNRYNNWLTNDLYCGYVSYKDKVHVKGIHEPIISEEQFYRVQEIFSRMGKNPNMNKESASLLNNLVVCSKCGLGFVHRRKDTVSRGKKYHYRYYSCKTYKHTHELEKCGNKIWRADKLEELIIDRVNNYSFASRNIDKEDELDSLNEKLKIEHAKKKRLFDLYINGSYEVSELDSMMNDIDAQINYYEAQIEANEELKKNKKIQENLADLATVDFNSLEFREKQLYLKSLINKIYIDGEQVTIEWL

SEQ ID NO: 20167 - DNA, 50 bp, Listeria monocytogenes
  source 1..50: mol_type = genomic DNA
tttagtgcctcatttcctctcgttggagggagaggaaatgggatacaaaa

SEQ ID NO: 20168 - DNA, 40 bp, Listeria monocytogenes; identical to SEQ ID NO: 7733
  source 1..40: mol_type = genomic DNA

SEQ ID NO: 20169 - DNA, 40 bp, Listeria monocytogenes
  source 1..40: mol_type = genomic DNA
tttcggttcaagctatgagacacgcaaagagggaactaaa

SEQ ID NO: 20170 - DNA, 50 bp, Listeria monocytogenes
  source 1..50: mol_type = genomic DNA
tttagtgcctaatctcccctcattacagagtgaagccctcaaaaacaaga

SEQ ID NO: 20171 - protein, 452 aa, Listeria monocytogenes
MKAAIYIRVSTQEQVENYSIQAQTEKLTALCRSKDWDVYDIFIDGGYSGSNMNRPALNEMLSKLHEIDAVVVYRLDRLSRSQRDTITLIEEYFLKNNVEFVSLSETLDTSSPFGRAMIGILSVFAQLERETIRDRMVMGKIKRIEAGLPLTTAKGRTFGYDVIDTKLYINEEEAKQLRLIYDIFEEEQSITFLQKRLKKLGFKVRTYNRYNNWLTNDLYCGYVSYKDKVHVKGIHEPIISEEQFYRVQEIFSRMGKNPNMNRDSASLLNNLVVCGKCGLGYVHRRKDTVSRGKKYHYRYYSCKTYKHTHELEKCGNKIWRADKLEELIIDRVNNYSFASRNVDKEDELDSLNEKLKTEHTKKKRLFDLYISGSYEVSELDAMMSDIDAQINYYEAQIEANEELKKNKKIQENLADLATVDFDSLEFREKQLYLKSLINKIYIDGEQVTIEWL

SEQ ID NO: 20172 - DNA, 50 bp, Listeria monocytogenes; identical to SEQ ID NO: 20167
  source 1..50: mol_type = genomic DNA

SEQ ID NO: 20173 - DNA, 40 bp, Listeria monocytogenes; identical to SEQ ID NO: 1298
  source 1..40: mol_type = genomic DNA

SEQ ID NO: 20174 - DNA, 40 bp, Listeria monocytogenes
  source 1..40: mol_type = genomic DNA
tttcggatcaagctatgagacacgcaaagagggaactaaa

SEQ ID NO: 20175 - DNA, 50 bp, Listeria monocytogenes; identical to SEQ ID NO: 20170
  source 1..50: mol_type = genomic DNA

SEQ ID NO: 20176 - protein, 452 aa, Listeria monocytogenes; identical to SEQ ID NO: 20166

SEQ ID NO: 20177 - DNA, 50 bp, Listeria monocytogenes; identical to SEQ ID NO: 20167
  source 1..50: mol_type = genomic DNA

SEQ ID NO: 20178 - DNA, 40 bp, Listeria monocytogenes
  source 1..40: mol_type = genomic DNA
tttcggttcaagctatgagggacgtaaagagggaactaaa

SEQ ID NO: 20179 - DNA, 40 bp, Listeria monocytogenes
  source 1..40: mol_type = genomic DNA
tttcggttcaagctatgagacacgtaaagagggaactaaa

SEQ ID NO: 20180 - DNA, 50 bp, Listeria monocytogenes; identical to SEQ ID NO: 20170
  source 1..50: mol_type = genomic DNA

SEQ ID NO: 20181 - protein, 452 aa, Listeria monocytogenes
MKAAIYIRVSTQEQVENYSIQAQTEKLTALCRSKDWDVYDIFIDGGYSGSNMNRPALNEMLSKLHEIDAVVVYRLDRLSRSQRDTITLIEEYFLKNNVEFVSLSETLDTSSPFGRAMIGILSVFAQLERETIRDRMVMGKIKRIEAGLPLTTAKGRTFGYDVIDTKLYINEEEAKQLRLIYDIFEEEQSITFLQKRLKKLGFKVRTYNRYNNWLTNDLYCGYVSYKDKVHVKGIHEPIISEEQFYRVQEIFARMGKNPNMNRDSASLLNNLVVCSKCGLGFVHRRKDTMSRGKKYHYRYYSCKTYKHTHELEKCGNKIWRADKLEELIIDRVNNYSFASRNVDKEDELDSLNEKLKTEHTKKKRLFDLYISGSYEVSELDAMMSDIDAQINYYEAQIEANEELKKNKKIQENLADLATVDFDSLEFREKQLYLKSLINKIYIDGEQVTIEWL

SEQ ID NO: 20182 - DNA, 50 bp, Listeria monocytogenes; identical to SEQ ID NO: 20167
  source 1..50: mol_type = genomic DNA

SEQ ID NO: 20183 - DNA, 40 bp, Listeria monocytogenes; identical to SEQ ID NO: 1298
  source 1..40: mol_type = genomic DNA

SEQ ID NO: 20184 - DNA, 40 bp, Listeria monocytogenes; identical to SEQ ID NO: 20174
  source 1..40: mol_type = genomic DNA

SEQ ID NO: 20185 - DNA, 50 bp, Listeria monocytogenes; identical to SEQ ID NO: 20170
  source 1..50: mol_type = genomic DNA

SEQ ID NO: 20186 - protein, 452 aa, Listeria monocytogenes
MKAAIYIRVSTQEQVENYSIQAQTEKLTALCRSKDWDVYDTFIDGGYSGSNMNRPALNEMLSKLHEIDAVVVYRLDRLSRSQKDTITLIEEYFLKNNVEFVSLSETLDTSSPFGRAMIGILSVFAQLERETIRDRMVMGKIKRIEAGLPLTTAKGRTFGYDVIDTKLYINEEEAKQLQLIYDIFEEEQSITFLQKRLKKLGFKVRTYNRYNNWLTNDLYCGYVSYKDKVHVKGIHEPIISEEQFYRVQEIFARMGKNPNMNRDSASLLNNLVVCGKCGLGFVHRRKDTVSRGKKYHYRYYSCKTYKHTHELEKCGNKIWRADKLEELIIDRVNNYSFASRNVDKEDELDSLNEKLKTEHTKKKRLFDLYISGSYEVSELDAMMSDIDAQINYYEAQIEANEELKKNKKIQENLADLATVDFDSLEFREKQLYLKSLINKIYIDGEQVTIEWL

SEQ ID NO: 20187 - DNA, 50 bp, Listeria monocytogenes; identical to SEQ ID NO: 20167
  source 1..50: mol_type = genomic DNA

SEQ ID NO: 20188 - DNA, 40 bp, Listeria monocytogenes; identical to SEQ ID NO: 1298
  source 1..40: mol_type = genomic DNA

SEQ ID NO: 20189 - DNA, 40 bp, Listeria monocytogenes; identical to SEQ ID NO: 20174
  source 1..40: mol_type = genomic DNA

SEQ ID NO: 20190 - DNA, 50 bp, Listeria monocytogenes; identical to SEQ ID NO: 20170
  source 1..50: mol_type = genomic DNA

SEQ ID NO: 20191 - protein, 540 aa, Klebsiella variicola
MPKAISYIRFSSKIQASGDSTKRQNKYINEWLKNNPDYHLDESLRFQDLGISGYSGANAKSGAFGEFLAAVESGVIEAGSVLLVESLDRVSRQDIDTARERLRKILLAGVDVVTLADNSWYKKESLNDPLSLIKAVLIMQRANEESATKSKRLRSAWDAKREEAAKGKIMSRRCVAWLRVSDDMSHFELIPDNVKAVQRVFQLRLEGLPFVRIARQMNEEGFYTLNQRNPVKGAWSHTTVKALLDNRSVIGFKVPSNCTVTKGVKEIPNYYPAVISEEHFYAVQQLKQGAGRRPSSEKPLLTNLFKGVMRCAECGFVTIVNCATEKWHGVYRCSMRYEGRCHAKSINRRLADKALVQGLLYNTNRLSLNRDNGSAIGSLQSELEQLQKQRERLIKLAMLADDTESMAKDLKALNSQIKDAEKAISDVHQREQSTQLETISHLDLTVKKDRIEAQIIIKRIVKEIRLNTAGKKCDVFLHNGLKLLNFPLDRVVDGAQWLEVLPLIDGDEFDFEGFTTKPRHIALEEAPNWVKEMEEQSNQP

SEQ ID NO: 20192 - DNA, 50 bp, Klebsiella variicola
  source 1..50: mol_type = genomic DNA
attagttattagagagttgtaattagggttacacatctcttatgataaaa

SEQ ID NO: 20193 - DNA, 40 bp, Klebsiella variicola
  source 1..40: mol_type = genomic DNA
gttggtgtgcagggtggaaagcaccagatggccggtctgg

SEQ ID NO: 20194 - DNA, 40 bp, Klebsiella variicola
  source 1..40: mol_type = genomic DNA
gttggtgtgcagggtggaattcaccagatggccggtctgg

SEQ ID NO: 20195 - DNA, 50 bp, Klebsiella variicola
  source 1..50: mol_type = genomic DNA
attttttattatttatttctaattttggttagaaaatattcttgataaca

SEQ ID NO: 20196 - protein, 540 aa, Enterobacter hormaechei; identical to SEQ ID NO: 20191

SEQ ID NO: 20197 - DNA, 50 bp, Enterobacter hormaechei; identical to SEQ ID NO: 20192
  source 1..50: mol_type = genomic DNA

SEQ ID NO: 20198 - DNA, 40 bp, Enterobacter hormaechei
  source 1..40: mol_type = genomic DNA
attagtatggagggtggacagcaccagatgcccggtttgt

SEQ ID NO: 20199 - DNA, 40 bp, Enterobacter hormaechei
  source 1..40: mol_type = genomic DNA
attagtatggagggtggacttcaccagatgcccggtttgt

SEQ ID NO: 20200 - DNA, 50 bp, Enterobacter hormaechei; identical to SEQ ID NO: 20195
  source 1..50: mol_type = genomic DNA

SEQ ID NO: 20201 - protein, 544 aa, Clostridium thermobutyricum
MKIAIYSRKSKFTGKGDSIENQIEMCKAHIKANIHGEHEFIIYEDEGFSGGNINRPEFKKLMNDIKHKKIDLLICYRLDRISRNVSDFSSVLEVLQEYKVDFISIKEQFDTSSPMGRAMIYIASVFSQLERETIAERVKDNMLEMAKNGKWTGGKIPLGFKSKKVSYIDDTGKKRYKTSLEHDSKDLEFVKFLYEKYLELGSLHKLEVYTHQNNIRSCSGRLFEKSTLKIILQNTIYVKANPNVVDYLTTHGCKVYGEPDGIHSLLSYNKTESTHKNGKSTKCRKNPSETFAAISNIQGYLEPELWLKVQLQFDKNKETFPRLGKTHNALLTGKLFCGVCKSRMLIQHGQVSPKTGKKRFYYVCYLKRTSQRKLCNPKNVQLDKIENVVLKSLKNLSYDKNLFLNNLQGKNHNNNNSTELLSLNKSLEEKKSQIDVLLNKLSLDHDDLLTDILFDKITKLKKECIEIENKIDSIKKESLIKENDALETSLIEKLISKCSYIENLSHEEQKQLINSLIENIYYYPPDEFGNDKIKINFIGSLDTN

SEQ ID NO: 20202 - DNA, 50 bp, Clostridium thermobutyricum
  source 1..50: mol_type = genomic DNA
tattgtttttctattcacactgcatgtgctgtatgaataaaaaaacaata

SEQ ID NO: 20203 - DNA, 40 bp, Clostridium thermobutyricum
  source 1..40: mol_type = genomic DNA
actagacattagtttcgcatgaccagtatcaagcaatact

SEQ ID NO: 20204 - DNA, 40 bp, Clostridium thermobutyricum
  source 1..40: mol_type = genomic DNA
actagacattagtttcgcagcaccagtatcaagcaatact

SEQ ID NO: 20205 - DNA, 50 bp, Clostridium thermobutyricum
  source 1..50: mol_type = genomic DNA
aatttttttttaagtatcactccagctgctgtatgaaaaattatacataa

SEQ ID NO: 20206 - protein, 539 aa, Gemmiger sp
MSYSDETLRRPRKVAFYGRVSTELEAQTAALKSQMEWYHKLAAQYPNWSVVNQYADDGVTGTVKEVRRAFMKMLYDAKEGKFDLIVTREVSRFARNTVDTVETVRELRQCGVEVYFVMEDIWTMESDGELRLSILACLAQEESRKISERSRAGQQVKRERGEPSAHNASFGYVYDRQHKTLAIEADKVEAVRKIFEMYADGISCSIIADELNMQGIRNKDGSDSWTTMQVRGIIKNPIYKGYMYRRVVSCTDYLTHKSVSIPEEEREYVKGNFPPIVSEELWEKCRRRRASSGPRKQGPAAQTYWNAGTALGDKWACRLFCSCGAGMYRQFKTPNSIRYGCRRANPQTGAEMGAKCRTNTVHSWVLEKMAEKVFAAAWSEYREEIREGCRELCRQQTYSRESQDKIRQCKKRMAKILKDVTELENAKEEGLVVERAYKALRRSYDTKISQEKALLARLQERWQVPEMGDVFTWNDLFPDEKVSREFLDAFVPRIISIDGERFIWELQLMQNHCTVQCEREGAGADAQIHIGKIVQEPPE

SEQ ID NO: 20207 - DNA, 50 bp, Gemmiger sp
  source 1..50: mol_type = genomic DNA
tttgcaaggctctggcataaggccaaagaagcgaggaaacatactgtacc

SEQ ID NO: 20208 - DNA, 40 bp, Gemmiger sp
  source 1..40: mol_type = genomic DNA
gatcggatagggagcgtgccaatggtcttacgcattttca

SEQ ID NO: 20209 - DNA, 40 bp, Gemmiger sp
  source 1..40: mol_type = genomic DNA
gatcggatagggagcgtgcccatggtcttacgcattttca

SEQ ID NO: 20210 - DNA, 50 bp, Gemmiger sp
  source 1..50: mol_type = genomic DNA
tttgcaaggggtgtcagtcaggccccagaagccagcggccctgctgctcc

SEQ ID NO: 20211 - protein, 499 aa, Mycobacteroides abscessus
MEKERAVLYARISLDKTGDEVGVQRQLRDMQALAQVRGYDVVDEIAENNITASKDLYRPGYEKVWGLVRSGQVDHVIVWQTSRFVRSRKERAEVIEQFGKHNVDVVAVKGPSLDLRTAYGRGLADVMTAFDSMEGEVKAERVSAAITDLARQGKGWGFTPYGWDVENGVRVVNQHEAGVVVELVDRVLAGESLHEIHRDLTARGEPSPGYALWMKLPEAEREKRLVTKRLKRKPTPLWPRSAIRTLISRDANIGIRRYSANGTEMEAVGDWPPIVERAKHDRLRALLSDPRRRSHTGPRPGGRKHLLTSGIGRCGVCGSDLRVSVRRNRRGQNEHYYSCSARGGCTARKQDFVDEMVTRTLIHRMSRPDALDWLTIGDDEAAQKLADRIAELQGRLDDVADSFARGAITARQMERITGQLTPDLAEAQRERSATARAVDRELLAPLAGEKAETRWRALAVSRQRAVLESLGVAVVLKRRNKPGPGVEPESIEITWGGTS

SEQ ID NO: 20212 - DNA, 50 bp, Mycobacteroides abscessus
  source 1..50: mol_type = genomic DNA
actgccctttactaagcaactaggcaactggtagcttgttaaatggcagc

SEQ ID NO: 20213 - DNA, 40 bp, Mycobacteroides abscessus
  source 1..40: mol_type = genomic DNA
acggtcggcgcattccaggcaactggtgataccgggcagc

SEQ ID NO: 20214 - DNA, 40 bp, Mycobacteroides abscessus; identical to SEQ ID NO: 20213
  source 1..40: mol_type = genomic DNA

SEQ ID NO: 20215 - DNA, 50 bp, Mycobacteroides abscessus
  source 1..50: mol_type = genomic DNA
attgctgttactgcagtaactaagcatctggttgctgaagaaatgacaga

SEQ ID NO: 20216 - protein, 477 aa, Bacillus mycoides
MRCAIYARVSTEEQAVEGYSISAQKKKLKAYCDAQDWDVVGYYVDEGISAKNTNRPELKRMIEHIEKGLIDCVLVHRLDRLTRSVLDLYTLLDVFEEYDCKFKSATEVYDTTTAIGRLFITIIAALAQWERENIGERVRVGQQEKVRQGKYTSPRKPYGYNADHKEGILTIIEEEAKVVRSIYNDYLKGHSATRISKRLNATKTAGRDYWNEKAVMYILENPLYIGTLRWRKETEHYFEVPNSVPAIIEEEMFNSVQILRESRQESHPRSQYGSYIFSGILKCPRCGRSLVGNYVVSKKKDGTKIKYKHYYCKGRKLNVCTMGNMSERKLEQAIIPHILSFYIDATDEDVKLENSNTENEIEQIKSELKIIEKRRKKWQYAWANDHLKDEEFTEFMQEENENEKVLTEELYKLKPAENKKLQNEELKNILKDIKLNWANLNDEEKKIFMQIILKKLVIERSDKLHAYKLEIVEMEFN

SEQ ID NO: 20217 - DNA, 50 bp, Bacillus mycoides
  source 1..50: mol_type = genomic DNA
tttatgtatttcaagaggttttgcccaataaacctcttataatccataaa

SEQ ID NO: 20218 - DNA, 40 bp, Bacillus mycoides
  source 1..40: mol_type = genomic DNA
cttcgttccttcttttcttccaaagaaactagaaccatgc

SEQ ID NO: 20219 - DNA, 40 bp, Bacillus mycoides
  source 1..40: mol_type = genomic DNA
cttcgttccttcttttcttataaagaaactagaaccatgc

SEQ ID NO: 20220 - DNA, 50 bp, Bacillus mycoides
  source 1..50: mol_type = genomic DNA
tttatgtattaatatatgttatatataataaatttcagaaagtccattaa

SEQ ID NO: 20221 - protein, 478 aa, Bacillus mycoides
MRCAIYARVSTEEQAVEGYSISAQKKKLKAYCDAQDWDVVGYYVDEGISAKNTNRPELKRMIEHIEKGLIDCVLVHRLDRLTRSVLDLYTLLDVFEEYDCKFKSATEVYDTTTAIGRLFITIIAALAQWERENIGERVRVGQQEKVRQGKYTSPRKPYGYNADHKEGILTIIEEEAKVVRSIYNDYLKGHSATRISKRLNATKTAGRDYWNEKAVMYILENPLYIGTLRWRKETEHYFEVPNSVPAIIEEEMFNSVQILRESRQESHPRSQYGSYIFSGILKCPRCGRSLVGNYVVSKKKDGTKIKYKHYYCKGRKLNVCTMGNMSERKLEQAIIPHILSFYIDATDEDVKLENSNTENEIEQIKSELKIIEKRRKKWQYAWANDHLKDEEFTEFMQEENENEKVLTEELYKLKPAENKKLQNEELKNILKDIKLNWANLNDEEKKIFMQIILKKLVIERSDKLHAYKLEIVEMEFNY

SEQ ID NO: 20222 - DNA, 50 bp, Bacillus mycoides; identical to SEQ ID NO: 20217
  source 1..50: mol_type = genomic DNA

SEQ ID NO: 20223 - DNA, 40 bp, Bacillus mycoides; identical to SEQ ID NO: 20218
  source 1..40: mol_type = genomic DNA

SEQ ID NO: 20224 - DNA, 40 bp, Bacillus mycoides; identical to SEQ ID NO: 20219
  source 1..40: mol_type = genomic DNA

SEQ ID NO: 20225 - DNA, 50 bp, Bacillus mycoides; identical to SEQ ID NO: 20220
  source 1..50: mol_type = genomic DNA

SEQ ID NO: 20226 - protein, 470 aa, Tyzzerella nexilis
MMDDVEAGKVNCIVTKDLSRFGREHVMMDYYLEFLFPEKRVRYIAVAENEDTEKGLSDFVPFKNLFNEWFAKDTSRKVKAAFKAKFATGQRIGAYAPIGYRKHPEIKNKLIIDEETRWIVEKIFDLAFHGRGAASITSILIAEKVPTPGFINFQRDGTFANIYAGAPEEKSYAWTIAQVKSIMKDETYIGHTIHYRETNISFKNKRRVRKPQSEWVRVENTQEPIISGQVFRQVQEQIANRRRKCKDGTTQIFSGLVKCADCGWSLSYGENRQNSKPYGHYHCSKYGQGTRQCSMHYIRYDVLYAYVLSRLQYWSGLVQHDEERLLKRLLNATDKGQAAARKKQTAELKKAEKRKAEVDTLFARMYEDWAAGRITEYNFSMLSGKYQSEQAELDEKIEQLQSAIATESQNAADAEKWIALMKECVNPTELTAELLNTLIEKIVVHEAVKGEDGSREQEVEIFYRFIGKID

SEQ ID NO: 20227 - DNA, 50 bp, Tyzzerella nexilis
  source 1..50: mol_type = genomic DNA
caatatctttaactatgtgataccggagtttcccatagttaaagatacca

SEQ ID NO: 20228 - DNA, 40 bp, Tyzzerella nexilis
  source 1..40: mol_type = genomic DNA
agtatcgaaatgggaaaccggaatgtcggttcctgattcc

SEQ ID NO: 20229 - DNA, 40 bp, Tyzzerella nexilis
  source 1..40: mol_type = genomic DNA
agtatcgaaatgggaaacctgaatgtcggttcctgattcc

SEQ ID NO: 20230 - DNA, 50 bp, Tyzzerella nexilis; identical to SEQ ID NO: 4195
  source 1..50: mol_type = genomic DNA

SEQ ID NO: 20231 - protein, 464 aa, Staphylococcus agnetis
MKVAIYTRVSTSEQASEGYSINEQRKKLISFCDINDWKDYEVFTDPGFSAGSTKRPALQKLLNSISDYDLVLVYKLDRLTRNVRDLLDLLEIFEANDVSFKSATEVFDTTTAIGKLFITMVGAMAEWERETIRERSLFGSHAAVREGNYIREAPFCYDNVDGKLKPNEHAKIIDFIVNQFKKGLSSYEIARRLNTTRQYPPKIKNWNRVTVNRLMRNPVLRGHTKYGDLFIENTHEPVLSEHDYLNIVEQLESRTHKSNTKHPSIFRGVLVCPQCGNRLHLYAGTIKSPNGHKYNVRRYKCETCNKNKEVQNISFNESEVETKFIESLKEFDLSKFSIEVNKKEEPKLEYDEDKIKQQRKNYTRSWSMGYIEDDEYYTLMNETKRLLEEIEKSNKRSVDESLNTQQIEAVTNLLLKGWSTMDIAEKEELVLSTVKAIQFDFIPRKENKEGNTNTIDIKHVNFKY

SEQ ID NO: 20232 - DNA, 50 bp, Staphylococcus agnetis
  source 1..50: mol_type = genomic DNA
tatggtagttacgtaaccatgtccgtagtagttgtttcgtaactaacaag

SEQ ID NO: 20233 - DNA, 40 bp, Staphylococcus agnetis
  source 1..40: mol_type = genomic DNA
gataaaaggtacgataagtgttgcacctgtaccacccatc

SEQ ID NO: 20234 - DNA, 40 bp, Staphylococcus agnetis
  source 1..40: mol_type = genomic DNA
gataaaaggtacgataagtaatgcacctgtaccacccatc

SEQ ID NO: 20235 - DNA, 50 bp, Staphylococcus agnetis
  source 1..50: mol_type = genomic DNA
tatgggaatgtgaaaaacatgttcaaacatgttgttatatatctaataag

SEQ ID NO: 20236 - protein, 568 aa, Aeromonas veronii; identical to SEQ ID NO: 12906

SEQ ID NO: 20237 - DNA, 50 bp, Aeromonas veronii
  source 1..50: mol_type = genomic DNA
tgtggtctattcaataaaaacagctcgcagtttttaggggaaatgccgta

SEQ ID NO: 20238 - DNA, 40 bp, Aeromonas veronii
  source 1..40: mol_type = genomic DNA
gcgggctttcttgatggtgtcgcagttcttgatgccatag

SEQ ID NO: 20239 - DNA, 40 bp, Aeromonas veronii
  source 1..40: mol_type = genomic DNA
gcgggctttcttgatggtgtggcagttcttgatgccatag

SEQ ID NO: 20240 - DNA, 50 bp, Aeromonas veronii
  source 1..50: mol_type = genomic DNA
tgtgctctaagccacccaaacaactgtcagtttttcaaaggaatgaccta

SEQ ID NO: 20241 - protein, 568 aa, Aeromonas veronii
MSRPVKAYSYIRFSTPKQAQGDSYRRQLQQAMDYCAEHNLQLDDKTIDDFGTSAFRGANMSEGALGRFVDAVKHGEIEQGSYLLVESVDRLSRQAVEEALEQFLAIVRAGIVIVTLSDKQVFRRGQVDFTKLIVSIVYMARANDESEMKSRRSRAAWSNGREQARKNNKVIANSRLPSWLTRDGEQIVPISERVAIVNEMFEMAKSGCGYEQIAKVFLDKGYKTFGKEADWRPAGIQAVIKSQAVIGVFQPHVIENGHRVPADEPILGYYPTIVSPALFEEVQHLISKRNKHSGSYRKGTFNNLFSGVLRCQCGESLRYQNKGRAGSPRNYLVCPKQNTAGCKLPNMLYGKVEPQLLQAVFLLNRVMKQRVEGEDKTIALRTTLAELRVQLEVETQKRKKAAQLVLDNDNDADYRVLFEQCKKKTQALEKQIQRAESDLMSRELSVKTLKYFVDPEDLRSTEQRQRFNGQLKTALKEIRFRFDGGYLWAEYMDIDGGRVLTQIFEDKLAGSSIYDGSSYLVRKTQTEAPYGVDPSVMQQEMDDYIRNLQKNDDGTDPDFEDLSSEYSK

SEQ ID NO: 20242 - DNA, 50 bp, Aeromonas veronii
  source 1..50: mol_type = genomic DNA
tgtggtctattcaataaaaacagctcgcagtttttgggggaaatgccgta

SEQ ID NO: 20243 - DNA, 40 bp, Aeromonas veronii; identical to SEQ ID NO: 20238
  source 1..40: mol_type = genomic DNA

SEQ ID NO: 20244 - DNA, 40 bp, Aeromonas veronii; identical to SEQ ID NO: 20239
  source 1..40: mol_type = genomic DNA

SEQ ID NO: 20245 - DNA, 50 bp, Aeromonas veronii; identical to SEQ ID NO: 20240
  source 1..50: mol_type = genomic DNA

SEQ ID NO: 20246 - protein, 562 aa, Vibrio europaeus
MEKIIYPYVRFSSEQQSGGSSYKRQMGDILKYAKDNGYTVNNSLELKDLGLSAYKAEHIEKGSLGDFLDALDTGIIETDGSAYLCIEQIDRLSRQSIDNAYQVFRRILKANVNVITLMDKKTYTKESLNDLMSIMYSSMLMAQANEESAKKGERILKSFDQKIDKLNNGETIQYVGIFPGWIDNKGTKQKTDFVVNEKAKIVKRAFKMYIEGTSMGDIARIFNEELVEQVAKRRHKNFTNSWSSAKINHLLKNRCVLGELRIAKTGDVYENYYPSIISVDDWDVVQSMTATKKTKKASGRKSINIFTGKMFCAGCGQKYYFETDDKITKKGRTLYYMLKCQGRRVLGCKSKSIKYDDFISSTPNMFGMVTQSKKDNSNKINQIKEKISEISTETKKIEKDIITLETMNENGDLDYATYLKESSKQRKKINVNDARIADFKANIARLSSDNKLEFFDKTDPVSVVKAKRFVNENFAAFVVSSDSKACTALYSNGMVIHFTLNNSKLEKKEKIKPVDGFGEFYELKEEILNAYKSGRMDGKFIEILKATNYWGVETPEKIYDLD

SEQ ID NO: 20247 - DNA, 50 bp, Vibrio europaeus
  source 1..50: mol_type = genomic DNA
ttcctgtttttctttcatagcatagtaattttatgtataattaacaggaa

SEQ ID NO: 20248 - DNA, 40 bp, Vibrio europaeus
  source 1..40: mol_type = genomic DNA
agcaggcgcgagattgactgtgattcgcttagctggaaat

SEQ ID NO: 20249 - DNA, 40 bp, Vibrio europaeus
  source 1..40: mol_type = genomic DNA
agcaggcgcgagattgactctgattcgcttagctggaaat

SEQ ID NO: 20250 - DNA, 50 bp, Vibrio europaeus
  source 1..50: mol_type = genomic DNA
ttccgaattaatttccatggaatactaattttttgcactgttaataggaa

SEQ ID NO: 20251 - protein, 480 aa, Streptococcus salivarius
MTMHKVAIYVRVSTTSQADEGYSIDEQKAKLTSYCEIKDWNIYEIYTDGGFSGSNTERPALEQLIRDAKRKLFDTVLVYKLDRLSRSQKDTLYLIEDVFLENNIEFVSLLENFDTSTPFGKAMIGLLSVFAQLEREQIKERMQLGKLGRAKSGKSMQWAKTSYGYDYIKETGTLSVNPYQALIVRKMFEWYLSGMSITKLRDTLNEQYGQDKEWNYRTVRVILSNPVYCGYNQFKGQIFPGTHEAIISEDDFNKTQEEIKTRQRTAAQRFNPRPFQAKYMLSGIAQCGYCSAPLAIKLGMKRKDGTRLVKYECKQRHPRKTKGVTVYNNNEKCDSGFYFKDDIEHFVLTEISKLQTDSDYIDKLFANTNQETIDRDSYQKQIDKLNAKISRLNDLYIDDRISLEELQKRSSDFMAERTALEKELDADSSLKTVERKKDIRRVLDTKDVLSLDYEQQKAIARALISKVRVTSETIVILWKL

SEQ ID NO: 20252 - DNA, 50 bp, Streptococcus salivarius
  source 1..50: mol_type = genomic DNA
tagagcgttttagttaccttcatttcaataaaggatactaaaattcttga

SEQ ID NO: 20253 - DNA, 40 bp, Streptococcus salivarius
  source 1..40: mol_type = genomic DNA
gagaagcacgactagcatttcgattagtgtaaaagctcgt

SEQ ID NO: 20254 - DNA, 40 bp, Streptococcus salivarius
  source 1..40: mol_type = genomic DNA
gagaagcacgactagcattaagattagtgtaaaagctcgt

SEQ ID NO: 20255 - DNA, 50 bp, Streptococcus salivarius
  source 1..50: mol_type = genomic DNA
taaagtcattagaagaccttcattaaaataaaggataagagtattcccta

SEQ ID NO: 20256 - protein, 598 aa, Escherichia coli
MNKIIPYGYLRVSSLEQVRTGGGLDTQDEEVRRYITQNSEKFDIDRMVVMSDAGMSAYTGSNIKEGELGRFLADVNAGLIPTGSALICYSVDRLSRQNPWVGTHLISTLIGAGIEIHSVAENQILRSDDPVGAIMSTIYLMRANNESVIKSERAKKGYEKRLNESITNKKVLTRQMPRWLFDCDGKYAIDPNMQNVINFTFDSYIAGQSTGFIAKELNNRGLMYGNTSWRGSYVAKLIRDERLIGKHIRYSKQIKGVKRVVIETIPNFYPVVVDVEKFFLANNMLTSVAKNIRGRTRVTYGDDSILRNLFNGVIKCGVCGGDTSVVQNTRKKIVNGEATYIPYKTFLRCRTRYELKNCVQSDIRYEVIERAILNHLMGLDISALLSVPVDNKIESYRTELELCKAEEVELHTLIEQREREGKRVRPRTIKAYEDVSDRIDELNKLIESYVEDTFVPDFNVDLNSIADVSNVSDRSLIKKGIATIADSICYKRISDFILVEIKYRNLSVKHVLVIDNKQSKVVVNFSIEYHENSHDYTCNGFILKYVKSPEEFHLMGVNIEDYAHMMNFVDFISDNEAKKIKEYLVSNLSRVLISNVPE

SEQ ID NO: 20257 - DNA, 50 bp, Escherichia coli
  source 1..50: mol_type = genomic DNA
tagtgtgtataacttccataatgcctgctatcgtatagctaaccacacaa

SEQ ID NO: 20258 - DNA, 40 bp, Escherichia coli
  source 1..40: mol_type = genomic DNA
ttagtgtaaagcataacgtctcggatctacacctgtgcag

SEQ ID NO: 20259 - DNA, 40 bp, Escherichia coli
  source 1..40: mol_type = genomic DNA
ttagtgtaaagcataacgtatcggatctacacctgtgcag

SEQ ID NO: 20260 - DNA, 50 bp, Escherichia coli
  source 1..50: mol_type = genomic DNA
tagtgtgtatattttccagaattcattaaattgtatgctaaaaaacccaa

SEQ ID NO: 20261 - protein, 598 aa, Escherichia coli
MNKIIPYGYLRVSSLEQVRTGGGLDTQDEEVRRYITQNSEKFDIDRMVVMSDAGMSAYTGSNIKEGELGRFLADVNAGLIPTGSALICYSVDRLSRQNPWVGTHLISTLIGAGIEIHSVAENQILRSDDPVGAIMSTIYLMRANNESVIKSERAKKGYEKRLNESITNKKVLTRQMPRWLFDCDGKYAIDPNMQNVINFTFDSYIAGQSTGFIAKELNNRGLMYGNTSWRGSYVAKLIRDERLIGKHIRYSKQIKGVKRVVIETIPNFYPVVVDVEKFFLANNMLTSVAKNIRGRTRVTYGDDSILRNLFNGVIKCGVCGGDTSVVQNTRKKIVNGEATYIPYKTFLRCRTRYELKNCVQSDIRYEVIERAILNHLIGLDISALLSVPVDNKIESYRTELELCKAEEVELHTLIEQREREGKRVRPRTIKAYEDVSDRIDELNKLIESYVEDTFVPDFNVDLNSIADVSNVSDRSLIKKGIATIADSICYKRISDFILVEIKYRNLSVKHVLVIDNKQSKVVVNFSIEYHENSHDYTCNGFILKYVKSPEEFHLMGVNIEDYAHMMNFVDFISDNEAKKIKEYLVSNLSRVLISNVPE

SEQ ID NO: 20262 - DNA, 50 bp, Escherichia coli; identical to SEQ ID NO: 20257
  source 1..50: mol_type = genomic DNA

SEQ ID NO: 20263 - DNA, 40 bp, Escherichia coli; identical to SEQ ID NO: 20258
  source 1..40: mol_type = genomic DNA

SEQ ID NO: 20264 - DNA, 40 bp, Escherichia coli; identical to SEQ ID NO: 20259
  source 1..40: mol_type = genomic DNA

SEQ ID NO: 20265 - DNA, 50 bp, Escherichia coli; identical to SEQ ID NO: 20260
  source 1..50: mol_type = genomic DNA

SEQ ID NO: 20266 - protein, 598 aa, Escherichia coli
MNKIIPYGYLRVSSLEQVRTGGGLDTQDEEVRRYITQNSEKFDIDRMVVMSDAGMSAYTGSNIKEGELGRFLADVNAGLIPTGSALICYSVDRLSRQNPWVGTHLISTLIGAGIEIHSVAENQILRSDDPVGAIMSTIYLMRANNESVIKSERAKKGYEKRLNESITNKKVLTRQMPRWLFDCDGKYAIDPNMQNVINFTFDSYIAGQSTGFIAKELNNRGLMYGNTSWRGSYVAKLIRDERLIGKHIRYSKQIKGVKRVVIETIPNFYPVVVDVEKFFLANNMLTSVAKNIRGRTRVTYGDDSILRNLFNGVIKCGVCGGDTSVVQNTRKKIVNGEATYIPYKTFLRCRTRYELKNCVQSDIRYEVIERAILNHLMGLDISALLSVPVDNKIESYRTELELCKAEEVELHTLIEQREREGKRVRPRTIKAYEDVSDRIDELNKLIESYVEDTFVPDFNVDLNSIADVSNVSDRSLIKKGIATIADSICYKRISDFILVEIKYRNLSVKHVLVIDNKQSKVVVNFSIEYHENSHDYTCNGFILKYVKSPEEFHLMGVNIEDYAHMMNFVDFISDNEAKKIKEYLVSNLSRVLISNVTE

SEQ ID NO: 20267 - DNA, 50 bp, Escherichia coli; identical to SEQ ID NO: 20257
  source 1..50: mol_type = genomic DNA

SEQ ID NO: 20268 - DNA, 40 bp, Escherichia coli; identical to SEQ ID NO: 20258
  source 1..40: mol_type = genomic DNA

SEQ ID NO: 20269 - DNA, 40 bp, Escherichia coli; identical to SEQ ID NO: 20259
  source 1..40: mol_type = genomic DNA

SEQ ID NO: 20270 - DNA, 50 bp, Escherichia coli; identical to SEQ ID NO: 20260
  source 1..50: mol_type = genomic DNA

SEQ ID NO: 20271 - protein, 598 aa, Escherichia coli
MNKIIPYGYLRVSSLEQVRTGGGLDTQDEEVRRYITQNSEKFDIDRMVVMSDAGMSAYTGSNIKEGELGRFLADVNAGLIPTGSALICYSVDRLSRQNPWVGTHLISTLIGAGIEIHSVAENQILRSDDPVGAIMSTIYLMRANNESVIKSERAKKGYEKRLNESITNKKVLTRQMPRWLFDCDGKYAIDPNMQNVINFTFDSYIAGQSTGFIAKELNNRGLMYGNTSWRGSYVAKLIRDERLIGKHIRYSKQIKGVKRVVIETIPNFYPVVVDVEKFFLANNMLTSVAKNIRGRTRVTYGDDSILRNLFNGVIKCGVCGGDTSVVQNTRKKIVNGEATYIPYKTFLRCRTRYELKNCVQSDIRYEVIERAILNHLMGLDISALLSVPVDNKIESYRTELELCKAEEVELHTLIEQREREGKRVRPRTIKAYEDVSDRIDELNKLIESYVEDTFVPDFNVDLNSIADVSNVSDRSLIKKGIATIADSICYKRISDFILVEIKYRNLSVKHALVIDNKQSKVVVNFSIEYHENSHDYTCNGFILKYVKSPEEFHLMGVNIEDYAHMMNFVDFISDNEAKKIKEYLVSNLSRVLISNVPE

SEQ ID NO: 20272 - DNA, 50 bp, Escherichia coli; identical to SEQ ID NO: 20257
  source 1..50: mol_type = genomic DNA

SEQ ID NO: 20273 - DNA, 40 bp, Escherichia coli; identical to SEQ ID NO: 20258
  source 1..40: mol_type = genomic DNA

SEQ ID NO: 20274 - DNA, 40 bp, Escherichia coli; identical to SEQ ID NO: 20259
  source 1..40: mol_type = genomic DNA

SEQ ID NO: 20275 - DNA, 50 bp, Escherichia coli; identical to SEQ ID NO: 20260
  source 1..50: mol_type = genomic DNA

SEQ ID NO: 20276 - protein, 525 aa, Pseudomonas aeruginosa
MPSAFSYVRFSSGKQAKGSSEHRQRAMLGQWLEQHPSFTLSDLRFEDLGRSGFSGEHLDHGLGQLLAAIDSGAIKSGDVILVEAVDRIGRLEPLEMLPLFSQIVKAGVSVITLEDGHVYDRSSINETSLFLLVAKIQQAHEYSNRLSRRINASYTARREKAKAGLGIKRETPVWLTTDGQLVPHVAPHIAQAFQDYADGLGERRICRKLRESGLEEFSKTNATTVRRWLKNRTAIGYWNDIPDVYPHVVDPALFYQVQQRLDAPKVDRAKPSAHYLTGLVKCAVCGRNYNYKQRKHTDPAMLCTSRARLAGEGCSNSKTYPVIVLDQVRKLTSLPFLQHAMESASSQADPSSQRLAVIDGEIGELSRKIGEATKALLALGFTPEIQESLEQLKTAREALEEERATLLLPQAEKLTAAQLEAFSNGLLDDEPMKLNHVLQTAGYSMVVHPDGSIDVDGKRFVYEGASRKEKVYKLRLIGEDKQWSLPILTPQMATYKSLFMAAVRLPGDPSEEELRRFEEAKHSER

SEQ ID NO: 20277 - DNA, 50 bp, Pseudomonas aeruginosa
  source 1..50: mol_type = genomic DNA
catatccatcttgagtcttctttctcgcaagacaatacgaaatagacaca

SEQ ID NO: 20278 - DNA, 40 bp, Pseudomonas aeruginosa
  source 1..40: mol_type = genomic DNA
gagaccgtgacctacatgctcgaagggcgtatgcgccacg

SEQ ID NO: 20279 - DNA, 40 bp, Pseudomonas aeruginosa
  source 1..40: mol_type = genomic DNA
gagaccgtgacctacatgcaagaagggcgtatgcgccacg

SEQ ID NO: 20280 - DNA, 50 bp, Pseudomonas aeruginosa
  source 1..50: mol_type = genomic DNA
catatccatgttaagtgtttttacaagtaacacacacacacacacacaca

SEQ ID NO: 20281 - protein, 525 aa, Pseudomonas aeruginosa
MPSAFSYVRFSSGKQAKGSSEHRQRAMLGQWLEQHPSFTLSDLRFEDLGRSGFSGEHLDHGLGQLLAAIDSGAIKSGDVILVEAVDRIGRLEPLEMLPLFSRIVKAGVSVITLEDGHVYDRSSVNETSLFLLVAKIQQAHEYSNRLSRRINASYTARREKAKAGLGIKRETPVWLTTDGQLVPHVAPHIAQAFQDYADGLGERRICRKLRESGLEEFSKTNATTVRRWLKNKTAIGYWNDIPDVYPHVVDPALFYRVQQRLDAPKVDRAKPSAHYLTGLVKCAVCGRNYNYKQRKHTDPAMLCTSRARLAGEGCSNSKTYPVIVLDQVRKLTSLPFLQHAMESASSQADPSSQRLAVIDGEIGELSRKIGEATKALLALGFTPEIQESLEQLKTAREALEEERATLLLPQAEKLTAAQLEAFSNGLLDDEPMKLNHVLQTAGYSMVVHPDGSIDVDGKRFVYEGANRKKKVYKLRLLGEDRQWELPILSPEQAASLARSVDGGYLPPNSSEEIARYYEKVKHLVR

SEQ ID NO: 20282 - DNA, 50 bp, Pseudomonas aeruginosa
  source 1..50: mol_type = genomic DNA
catatccatcttgagtcttctttctcgcaagacaacacgaaatagacaca

SEQ ID NO: 20283 - DNA, 40 bp, Pseudomonas aeruginosa
  source 1..40: mol_type = genomic DNA
gagaccgtgacctacatgctcgaaggacgcatgcgccacg

SEQ ID NO: 20284 - DNA, 40 bp, Pseudomonas aeruginosa
  source 1..40: mol_type = genomic DNA
gagaccgtgacctacatgcaagaaggacgcatgcgccacg

SEQ ID NO: 20285 - DNA, 50 bp, Pseudomonas aeruginosa; identical to SEQ ID NO: 20280
  source 1..50: mol_type = genomic DNA

SEQ ID NO: 20286 - protein, 525 aa, Pseudomonas aeruginosa
MPSAFSYVRFSSGKQAKGSSEHRQRAMLGQWLEQHPSFTLSDLRFEDLGRSGFSGEHLDHGLGQLLAAIDSGAIKSGDVILVEAVDRIGRLEPLEMLPLFSRIVKAGVSVITLEDGHVYDRSSVNETSLFLLVAKIQQAHEYSNRLSRRINASYTARREKAKAGLGIKRETPVWLTTDGQLVPHVAPHIAQAFQDYADGLGERRICRKLRESGLEEFSKTNATTVRRWLKNRTAIGYWNDIPDVYPHVVDPALFYRVQQRLDAPKVDRAKPSAHYLTGLVKCAVCGRNYNYKQRKHTDPAMLCTSRARLAGEGCTNSKTFPVIVLDQVRKLTSLPFLQHAMESASSQADPSSQRLAVIDGEIGELSRKIGEATKALLVLGFTPEIQESLEQLKTAREALEEERATLLLPQAEKLTAAQLEAFSNGLLDDEPMKLNHVLQTAGYSMVVHPDGSIDVDGKRFVYEGANRKKKVYKLRLLGEDRQWEPPILSPEQAASLARSVAGAYLPPNSSEEVARYYEKVKHLVR

SEQ ID NO: 20287 - DNA, 50 bp, Pseudomonas aeruginosa; identical to SEQ ID NO: 20282
  source 1..50: mol_type = genomic DNA

SEQ ID NO: 20288 - DNA, 40 bp, Pseudomonas aeruginosa; identical to SEQ ID NO: 20278
  source 1..40: mol_type = genomic DNA

SEQ ID NO: 20289 - DNA, 40 bp, Pseudomonas aeruginosa; identical to SEQ ID NO: 20279
  source 1..40: mol_type = genomic DNA

SEQ ID NO: 20290 - DNA, 50 bp, Pseudomonas aeruginosa; identical to SEQ ID NO: 20280
  source 1..50: mol_type = genomic DNA

SEQ ID NO: 20291 - protein, 525 aa, Pseudomonas aeruginosa
MPSAFSYVRFSSGKQAKGSSEHRQRAMLGQWLEQHPSFTLSDLRFEDLGRSGFSGEHLDHGLGQLLAAIDSGAIKSGDVILVEAVDRIGRLEPLEMLPLFSRIVKAGVSVITLEDGHVYDRSSVNETSLFLLVAKIQQAHEYSNRLSRRINASYTARREKAKAGLGIKRETPVWLTTDGQLVPHVAPHIAQAFQDYADGLGERRICRKLRESGLEEFSKTNATTVRRWLKNKTAIGYWNDIPDVYPHVVDPALFYRVQQRLDAPKVDRAKPSAHYLTGLVKCAVCGRNYNFKQRKHTDPAMLCTSRARLAGEGCSNSKTYPVIVLDQVRKLTSLPFLQHAMESASSQADPSSQRLAVIDGELAEVSRQIGEATKALLAVGLVPEIQESLERLKQARTVLEEERAALLLPQAEKLTPAQLEAFSNGLLDDEPMKLNHVLQTAGYSMVVHPDGSIDVDGKSFVYEGASRKERVYKLRLIGEDKRWSLPILTPQMATYKSLFMAAVRLPGDPSEEELRRFEEAKHSER

SEQ ID NO: 20292 - DNA, 50 bp, Pseudomonas aeruginosa; identical to SEQ ID NO: 20282
  source 1..50: mol_type = genomic DNA

SEQ ID NO: 20293 - DNA, 40 bp, Pseudomonas aeruginosa; identical to SEQ ID NO: 20278
  source 1..40: mol_type = genomic DNA

SEQ ID NO: 20294 - DNA, 40 bp, Pseudomonas aeruginosa; identical to SEQ ID NO: 20279
  source 1..40: mol_type = genomic DNA

SEQ ID NO: 20295 - DNA, 50 bp, Pseudomonas aeruginosa; identical to SEQ ID NO: 20280
  source 1..50: mol_type = genomic DNA

SEQ ID NO: 20296 - protein, 525 aa, Pseudomonas aeruginosa
MPSAFSYVRFSSGKQAKGSSEHRQRAMLGQWLEQHPSFTLSDLRFEDLGRSGFSGEHLDHGLGQLLAAIDSGAIKSGDVILVEAVDRIGRLEPLEMLPLFSRIVKAGVSVITLEDGHVYDRSSVNETSLFLLVAKIQQAHEYSNRLSRRINASYTARREKAKAGLGIKRETPVWLTTDGQLVPHVAPHIAQAFQDYADGLGERRICRKLRESGLEEFSKTNATTVRRWLKNRTAIGYWNDIPDVYPHVVDPALFYQVQQRLDAPKVDRAKPSAHYLTGLVKCAVCGRNYNYKQRKHTDPAMLCTSRARLAGEGCSNSKTYPVIVLDQVRKLTSLPFLQHAMESASSQADPSSQRLAVIDGEIGELSRKISEATKALLVLGFTPEIQESLEQLKTAREALEEERATLLLPQAEKLTTAQLEAFSNGLLDDEPMKLNHVLQTAGYSMVVHPDGSIDVDGKRFVYEGASRKEKVYKLRLIGEDKQWSLPILTPQMATYKSLFMAAVRLPGDPSEEELRRFEEAKHSER

SEQ ID NO: 20297 - DNA, 50 bp, Pseudomonas aeruginosa; identical to SEQ ID NO: 20282
  source 1..50: mol_type = genomic DNA

SEQ ID NO: 20298 - DNA, 40 bp, Pseudomonas aeruginosa; identical to SEQ ID NO: 20278
  source 1..40: mol_type = genomic DNA

SEQ ID NO: 20299 - DNA, 40 bp, Pseudomonas aeruginosa; identical to SEQ ID NO: 20279
  source 1..40: mol_type = genomic DNA

SEQ ID NO: 20300 - DNA, 50 bp, Pseudomonas aeruginosa; identical to SEQ ID NO: 20280
  source 1..50: mol_type = genomic DNA

SEQ ID NO: 20301 - protein, 525 aa, Pseudomonas aeruginosa
  SITE 141: note = misc_feature - Xaa can be any naturally occurring amino acid
  SITE 167: note = misc_feature - Xaa can be any naturally occurring amino acid
MPSAFSYVRFSSGKQAKGSSEHRQRAMLGQWLEQHPSFTLSDLRFEDLGRSGFSGEHLDHGLGQLLAAIDSGAIKSGDVILVEAVDRIGRLEPLEMLPLFSRIVKAGVSVITLEDGHVYDRSSVNETSLFLLVAKIQQAHXYSNRLSRRINASYTARREKAKAGLGXKRETPVWLTTDGQLVPHVAPHIAQAFQDYADGLGERRICRKLRESGLEEFSKTNATTVRRWLKNRTAIGYWNDIPDVYPHVVDPALFYQVQQRLDAPKVDRAKPSAHYLTGLVKCAVCGRNYNYKQRKHTDPAMLCTSRARLAGEGCSNSKTYPVIVLDQVRKLTSLPFLQHAMESASSQADPSSQRLAVIDGEIGELSRKISEATKALLVLGFTPEIQESLEQLKTAREALEEERATLLLPQAEKLTTAQLEAFSNGLLDDEPMKLNHVLQTAGYSMVVHPDGSIDVDGKRFVYEGASRKEKVYKLRLIGEDKQWSLPILTPQMATYKSLFMAAVRLPGDPSEEELRRFEEAKHSER

SEQ ID NO: 20302 - DNA, 50 bp, Pseudomonas aeruginosa; identical to SEQ ID NO: 20282
  source 1..50: mol_type = genomic DNA

SEQ ID NO: 20303 - DNA, 40 bp, Pseudomonas aeruginosa; identical to SEQ ID NO: 20278
  source 1..40: mol_type = genomic DNA

SEQ ID NO: 20304 - DNA, 40 bp, Pseudomonas aeruginosa; identical to SEQ ID NO: 20279
  source 1..40: mol_type = genomic DNA

SEQ ID NO: 20305 - DNA, 50 bp, Pseudomonas aeruginosa; identical to SEQ ID NO: 20280
  source 1..50: mol_type = genomic DNA

SEQ ID NO: 20306 - protein, 525 aa, Pseudomonas aeruginosa
  SITE 291: note = misc_feature - Xaa can be any naturally occurring amino acid
MPSAFSYVRFSSGKQAKGSSEHRQRAMLGQWLEQHPSFTLSDLRFEDLGRSGFSGEHLDHGLGQLLAAIDSGAIKSGDVILVEAVDRIGRLEPLEMLPLFSRIVKAGVSVITLEDGHVYDRSSVNETSLFLLVAKIQQAHEYSNRLSRRINASYTARREKAKAGLGIKRETPVWLTTDGQLVPHVAPHIAQAFQDYADGLGERRICRKLRESGLEEFSKTNATTVRRWLKNRTAIGYWNDIPDVYPHVVDPALFYQVQQRLDAPKVDRAKPSAHYLTGLVKCAVCGRNYNXKQRKHTDPAMLCTSRARLAGEGCSNSKTYPVIVLDQVRKLTSLPFLQHAMESASSQADPSSQRLAVIDGEIGELSRKISEATKALLVLGFTPEIQESLEQLKTAREALEEERATLLLPQAEKLTTAQLEAFSNGLLDDEPMKLNHVLQTAGYSMVVHPDGSIDVDGKRFVYEGASRKEKVYKLRLIGEDKQWSLPILTPQMATYKSLFMAAVRLPGDPSEEELRRFEEAKHSER

SEQ ID NO: 20307 - DNA, 50 bp, Pseudomonas aeruginosa; identical to SEQ ID NO: 20282
  source 1..50: mol_type = genomic DNA

SEQ ID NO: 20308 - DNA, 40 bp, Pseudomonas aeruginosa; identical to SEQ ID NO: 20278
  source 1..40: mol_type = genomic DNA

SEQ ID NO: 20309 - DNA, 40 bp, Pseudomonas aeruginosa; identical to SEQ ID NO: 20279
  source 1..40: mol_type = genomic DNA

SEQ ID NO: 20310 - DNA, 50 bp, Pseudomonas aeruginosa; identical to SEQ ID NO: 20280
  source 1..50: mol_type = genomic DNA

SEQ ID NO: 20311 - protein, 525 aa, Pseudomonas aeruginosa
  SITE 486: note = misc_feature - Xaa can be any naturally occurring amino acid
MPSAFSYVRFSSGKQAKGSSEHRQRAMLGQWLEQHPSFTLSDLRFEDLGRSGFSGEHLDHGLGQLLAAIDSGAIKSGDVILVEAVDRIGRLEPLEMLPLFSRIVKAGVSVITLEDGHVYDRSSVNETSLFLLVAKIQQAHEYSNRLSRRINASYTARREKAKAGLGIKRETPVWLTTDGQLVPHVAPHIAQAFQDYADGLGERRICRKLRESGLEEFSKTNATTVRRWLKNRTAIGYWNDIPDVYPHVVDPALFYQVQQRLDAPKVDRAKPSAHYLTGLVKCAVCGRNYNYKQRKHTDPAMLCTSRARLAGEGCSNSKTYPVIVLDQVRKLTSLPFLQHAMESASSQADPSSQRLAVIDGEIGELSRKISEATKALLVLGFTPEIQESLEQLKTAREALEEERATLLLPQAEKLTTAQLEAFSNGLLDDEPMKLNHVLQTAGYSMVVHPDGSIDVDGKRFVYEGASRKEKVYKLRLIGEDKQWSLXILTPQMATYKSLFMAAVRLPGDPSEEELRRFEEAKHSER

SEQ ID NO: 20312 - DNA, 50 bp, Pseudomonas aeruginosa; identical to SEQ ID NO: 20282
  source 1..50: mol_type = genomic DNA

SEQ ID NO: 20313 - DNA, 40 bp, Pseudomonas aeruginosa; identical to SEQ ID NO: 20278
  source 1..40: mol_type = genomic DNA

SEQ ID NO: 20314 - DNA, 40 bp, Pseudomonas aeruginosa; identical to SEQ ID NO: 20279
  source 1..40: mol_type = genomic DNA

SEQ ID NO: 20315 - DNA, 50 bp, Pseudomonas aeruginosa; identical to SEQ ID NO: 20280
  source 1..50: mol_type = genomic DNA

SEQ ID NO: 20316 - protein, 525 aa, Pseudomonas aeruginosa
MPSAFSYVRFSSGKQAKGSSEHRQRAMLGQWLEQHPSFTLSDLRFEDLGRSGFSGEHLDHGLGQLLAAIDSGAIKSGDVILVEAVDRIGRLEPLEMLPLFSRIVKAGVSVITLEDGHVYDRSSVNETSLFLLVARIQQAHEYSNRLSRRINASYTARREKAKAGLGIKRETPVWLTTDGQLVPHVAPHIAQAFQDYADGLGERRICRKLRESGLEEFSKTNATTVRRWLKNRTAIGYWNDIPDVYPHVVDPALFYQVQQRLDAPKVDRAKPSAHYLTGLVKCAVCGRNYNYKQRKHTDPAMLCTSRARLAGEGCSNSKTYPVIVLDQVRKLTSLPFLQHAMESASSQADPSSQRLAVIDGEIGELSRKISEATKALLVLGFTPEIQESLEQLKTAREALEEERATLLLPQAEKLTTAQLEAFSNGLLDDEPMKLNHVLQTAGYSMVVHPDGSIDVDGKRFVYEGASRKEKVYKLRLIGEDKQWSLPILTPQMATYKSLFMAAVRLPGDPSEEELRRFEEAKHSER

SEQ ID NO: 20317 - DNA, 50 bp, Pseudomonas aeruginosa; identical to SEQ ID NO: 20282
  source 1..50: mol_type = genomic DNA

SEQ ID NO: 20318 - DNA, 40 bp, Pseudomonas aeruginosa; identical to SEQ ID NO: 20278
  source 1..40: mol_type = genomic DNA

SEQ ID NO: 20319 - DNA, 40 bp, Pseudomonas aeruginosa; identical to SEQ ID NO: 20279
  source 1..40: mol_type = genomic DNA

SEQ ID NO: 20320 - DNA, 50 bp, Pseudomonas aeruginosa; identical to SEQ ID NO: 20280
  source 1..50: mol_type = genomic DNA

SEQ ID NO: 20321 - protein, 512 aa, Pseudomonas aeruginosa
MPSAFSYVRFSSGKQAKGSSEHRQRAMLGQWLEQHPSFTLSDLRFEDLGRSGFSGEHLDHGLGQLLAAIDSGAIKSGDVILVEAVDRIGRLEPLEMLPLFSRIVKAGVSVITLEDGHVYDRSSVNETSLFLLVAKIQQAHEYSNRLSRRINASYTARREKAKAGLGIKRETPVWLTTDGQLVPHVAPHIAQAFQDYADGLGERRICRKLRESGLEEFSKTNATTVRRWLKNRTAIGYWNDIPDVYPHVVDPALFYQVQQRLDAPKVDRAKPSAHYLTGLVKCAVCGRNYNYKQRKHTDPAMLCTSRARLAGEGCSNSKTYPVIVLDQVRKLTSLPFLQHAMESASSQADPSSQRLAVIDGEIGELSRKISEATKALLVLGFTPEIQESLEQLKTAREALEEERATLLLPQAEKLTTAQLEAFSNGLLDDEPMKLNHVLQTAGYSMVVHPDGSIDVDGKRFVYEGASRKEKVYKLRLIGEDKQWSLPILTPQMATYKSLFMAAVRLPGDPSEV

SEQ ID NO: 20322 - DNA, 50 bp, Pseudomonas aeruginosa; identical to SEQ ID NO: 20282
  source 1..50: mol_type = genomic DNA

SEQ ID NO: 20323 - DNA, 40 bp, Pseudomonas aeruginosa; identical to SEQ ID NO: 20278
  source 1..40: mol_type = genomic DNA

SEQ ID NO: 20324 - DNA, 40 bp, Pseudomonas aeruginosa; identical to SEQ ID NO: 20279
  source 1..40: mol_type = genomic DNA

SEQ ID NO: 20325 - DNA, 50 bp, Pseudomonas aeruginosa; identical to SEQ ID NO: 20280
  source 1..50: mol_type = genomic DNA

SEQ ID NO: 20326 - protein, 525 aa, Pseudomonas aeruginosa
MPSAFSYVRFSSGKQAKGSSEHRQRAMLGQWLEQHPSFTLSDLRFEDLGRSGFSGEHLDHGLGQLLAAIDSGAIKSGDVILVEAVDRIGRLEPLEMLPLFSRIVKAGVSVITLEDGHVYDRSSVNETSLFLLVAKIQQAHEYSNRLSRRINASYTARREKAKAGLGIKRETPVWLTTDGQLVPHVAPHIAQAFQDYADGLGERRICRKLRESGLEEFSKTNATTVRRWLKNRTAIGYWNDIPDVYPHVVDPALFYRVQQRLDAPKVDRAKPSAHYLTGLVKCAVCGRNYNYKQRKHTDPAMLCTSRARLAGEGCTNSKTFPVIVLDQVRKLTSLPFLQHAMESASSQADPSSQRLAVIDGEIGELSRKIGEATKALLVLGFTPEIQESLEQLKTAREALEEERATLLLPQAEKLTAAQLEAFSNGLLDDEPMKLNHVLQTAGYSMVVHPDGSIDVDGKRFVYEGANRKKKVYKLRLLGEDRQWEPPILSPEQAASLARSVAGAYLPPNSSEEVARYYEKVKHLFR

SEQ ID NO: 20327 - DNA, 50 bp, Pseudomonas aeruginosa; identical to SEQ ID NO: 20282
  source 1..50: mol_type = genomic DNA

SEQ ID NO: 20328 - DNA, 40 bp, Pseudomonas aeruginosa; identical to SEQ ID NO: 20278
  source 1..40: mol_type = genomic DNA

SEQ ID NO: 20329 - DNA, 40 bp, Pseudomonas aeruginosa; identical to SEQ ID NO: 20279
  source 1..40: mol_type = genomic DNA

SEQ ID NO: 20330 - DNA, 50 bp, Pseudomonas aeruginosa; identical to SEQ ID NO: 20280
  source 1..50: mol_type = genomic DNA

SEQ ID NO: 20331 - protein, 654 aa, Vibrio cyclitrophicus
MALIPYARVSTGKQIDGLSLSLQNDNALLEQLALKYGTTVSHLFYQDAGVSSYKGKNASVGELSRLLADIESGLISSGDIIVMRALDRLSRQNLTASEVLYNRIISAGVMIHTTIDNHLYKMDDPMSSILATLALKTANEESAKKSHLTNRYASHRIQQAKDGQKLDGYSFDVGIGRHPFWITIDKPTKTVRQHPINWDHAKHMIALALDGYGVSTVMRYAHSVGLELSYSACAKMFNTRAVYGVLEITHQREDHVLTDYYPTLCSESEYYQIRAIKDAQTKVSNNQRKQVSILSGIQKLYCGCCGSVLCIARNVTQKTEYYRCANRLVKCYPYIKQEYLDRIVLTAIGEKVLSSQLMDNGDDKTLQGIELELETKVMEYQKQQTFLFDNLDLFDDTMKSLLAAKKQSIAELESKIEQLKLENAKTNAIHNIDLSQYQYALDLYHQHIDCLERYIQGDNDLKSEIRHIVSTLVDRITVDSRYMIRIQFKDGSTSYYMLLRRRDGKKVHQRNYARIQIVSDSDYNGLISVYPELDSVTSTESLIDSHTTFLEDVVNPIPLGNVYVKPDTKVEAFFNLLVDDVYEWKRKSIMAAGATCTQWQDYKDSDVSLYGWTKVEVELTTKYYTKRTATLVHRNGLQLDQVAMGLGVHKVKIK

SEQ ID NO: 20332 - DNA, 50 bp, Vibrio cyclitrophicus
  source 1..50: mol_type = genomic DNA
attttagaacaacttgttttagcatcaccaaaaccagtgtatactcacgc

SEQ ID NO: 20333 - DNA, 40 bp, Vibrio cyclitrophicus
  source 1..40: mol_type = genomic DNA
caagcaactctgtttagcatcaccaaacagcatctgcgtg

SEQ ID NO: 20334 - DNA, 40 bp, Vibrio cyclitrophicus
  source 1..40: mol_type = genomic DNA
caagcaactctgtttagcaataccaaacagcatctgcgtg

SEQ ID NO: 20335 - DNA, 50 bp, Vibrio cyclitrophicus
  source 1..50: mol_type = genomic DNA
attttagaatacacagtttaatacataccaaaaacatagccaacacatgc

SEQ ID NO: 20336 - protein, 528 aa, Agrobacterium tumefaciens
MQENRAAIYARFSTDLQNERSVDDQIAVCREFAARNGLVVAGEYHDKARSGASIFGRDGLLGLMEDARDGKFKTVIVEALDRLSRDQEDLAGLHKRLSFAGVEILAIHDGKTDAIQVGIRGLVSTLFLADLKNKIRRGMTGVVRDGRHAGGKAYGYQPTLGQPGVMQIFEPEAEIVRRIYRETIEGKTSREIAAGLNEDKIMPPRGAQWNASTINGSAQRGYGIVRNPLYAGEIVWNRVHMVRDPETGKRISRPNPESEHKRAPAPHLAIVDQETYQRALALLEGKSRRGQGGSNTRNPKRLLSGILRCGRCGGGMSIHDHSGNAVRIRCSRSTQSGVCGNDKRYRLDKIERAVINGLKDQLSHPEILVEYVKAYREERRLDVDNFVRERASYERRVAEIAGQLDRLMQAMTRGILPIEAVEAQYGPLKAEKEEIEAKLANIPTTPVVELHPAAITRYKHSIDALAERLTSMDRITDSGVHVAFRDLVDHVTVLDREDGGVEAEIVGHIAALVGGPAEMLGGRMVAGE

SEQ ID NO: 20337 - DNA, 50 bp, Agrobacterium tumefaciens
  source 1..50: mol_type = genomic DNA
gctggggggacgtatggtagcgggagagcgtttcgagcaatccccccaaa

SEQ ID NO: 20338 - DNA, 40 bp, Agrobacterium tumefaciens
  source 1..40: mol_type = genomic DNA
gaagatgaatggtagcgggagagggacttgaacccccgac

SEQ ID NO: 20339 - DNA, 40 bp, Agrobacterium tumefaciens
  source 1..40: mol_type = genomic DNA
gaagatgaatggtagcgggcaagggacttgaacccccgac

SEQ ID NO: 20340 - DNA, 50 bp, Agrobacterium tumefaciens
  source 1..50: mol_type = genomic DNA
gctgggaggatggatggtggagggcaagtgtttctattaggccacgggaa

SEQ ID NO: 20341 - protein, 536 aa, Clostridium tertium
MIAAIYSRKSIATGKGESIENQIDSCKDYIKRFYPSVTEFKIYEDEGFSGSNTNRPRFQQLLKDAKNKEFNILICYRLDRISRSVADFATTYSLLEENSISFISINEQFDTATPMGRAMMNISATFAQLERETIAERVRDNMIYLARTGRWLGGQEPYGYKAEKTVYLDQNFEEKTLMKLSPIEEELKIIKLIYEKYIEFNSITQVSNFLVDCGVKGKNGGDWSTIQVSRILYNPLYVKSDINTHNHLREQGINVYGDPNGSGYLTYNKTKKKRTSRDISEWISAVSKHDGIIDSKTWLMVQTLLNNNKNKKVKRLGTSDNSSLLTGILKCSFCNSNMIIKQGKMSVKEGKRIDYYVCSKKDSTKGKACNNKNIRIDRLDKIVIDQLKNYNKNSLISALESALSTTDDSDDNTKLQTLTTLIEENEKKINNLVKQLSLSTNETVSEIIMKEINNISKENSIIKDKLSTNTNKIEKTRMEINNINIALDMLKRFDTTFDVITDIKQKRLMLNTIINKVLWDGLEYKAKIVILDDKKK

SEQ ID NO: 20342 - DNA, 50 bp, Clostridium tertium
  source 1..50: mol_type = genomic DNA
atctgttgttaagtagcagtaggacaagcttaagttacctaacaacagaa

SEQ ID NO: 20343 - DNA, 40 bp, Clostridium tertium
  source 1..40: mol_type = genomic DNA
ttctgccagatggcaaggacaaaactccgttccagcatct

SEQ ID NO: 20344 - DNA, 40 bp, Clostridium tertium
  source 1..40: mol_type = genomic DNA
ttctgccagatggcaaggactaaactccgttccagcatct

SEQ ID NO: 20345 - DNA, 50 bp, Clostridium tertium
  source 1..50: mol_type = genomic DNA
atctgttgtctggttggaaaaggactagctttacataaatcacaaaagta

SEQ ID NO: 20346 - protein, 463 aa, Staphylococcus aureus; identical to SEQ ID NO: 14001

SEQ ID NO: 20347 - DNA, 50 bp, Staphylococcus aureus
  source 1..50: mol_type = genomic DNA
gagtgttatgtaactagaaagaccgtagtagttacaaaacattcacgtaa

SEQ ID NO: 20348 - DNA, 40 bp, Staphylococcus aureus
  source 1..40: mol_type = genomic DNA
gaatggtaccacttctaacgcacacgttcccccaatataa

SEQ ID NO: 20349 - DNA, 40 bp, Staphylococcus aureus
  source 1..40: mol_type = genomic DNA
gaatggtaccacttctaaccaacacgttcccccaatataa

SEQ ID NO: 20350 - DNA, 50 bp, Staphylococcus aureus
  source 1..50: mol_type = genomic DNA
cagtgttatgtaagtggaaatatgcaagtagtttaacttgtttcacatac

SEQ ID NO: 20351 - protein, 452 aa, Listeria monocytogenes
MKAAIYIRVSTQEQIENYSIQAQTEKLTALCRSKDWDVYDIFIDGGYSGSNMNRPALNEMLSKLHEIDAVVVYRLDRLSRSQRDTITLIEEYFLKNNVEFVSLSETLDTSSPFGRAMIGILSVFAQLERETIRDRMVMGKIKRIEAGLPLTTAKGRTFGYNVIDTKLYINEEEAKQLQLIYDIFEEEKSITTLQKRLKKLGFKVKSYSSYNNWLTNDLYCGYVSYADKVHTKGVHEPIISEEQFYRVQEIFSRMGKNPNMNRDSASLLNNLVVCGKCGLGYVHRRKDTVSRGKKYHYRYYSCKTYKHTHELEKCGNKIWRADKLEELIIDRVNNYSFASRNVDKEDELDSLNEKLKTEHAKKKRLFDLYISGSYEVSELDGMMADIDAQINYYEAQIEANEELKKNKKIQENLADLATVDFDSLEFREKQLYLKSLINKIYIDGEQVTIEWL

SEQ ID NO: 20352 - DNA, 50 bp, Listeria monocytogenes
  source 1..50: mol_type = genomic DNA
tttagtacctcgttttctctcgttggaagaagaagaaacgagatacccaa

SEQ ID NO: 20353 - DNA, 40 bp, Listeria monocytogenes; identical to SEQ ID NO: 1298
  source 1..40: mol_type = genomic DNA

SEQ ID NO: 20354 - DNA, 40 bp, Listeria monocytogenes
  source 1..40: mol_type = genomic DNA
tttcggatcaagctatgagttacgcaaagagggaactaaa

SEQ ID NO: 20355 - DNA, 50 bp, Listeria monocytogenes
  source 1..50: mol_type = genomic DNA
ttaagcaacttttgttttattgtttttagaagaaaacagttgatagccaa

SEQ ID NO: 20356 - protein, 554 aa, Rhizobium laguerreae
MTRIAYSYLRFSTPEQSLGDSSRRQQAKTLEWCEKKEVKLDNVLKFHDLGKSGFTGAHFEEGALGEFFSLVKDGTIKAGSYLVLEAIDRFSRENPMTAAGRLFELVKAGITVVTVDDGEEYSPERLSGRDSNVMLLLVVKLTQAHAESLRKSDLVGQAWEKKKQIARTEKKPITKRCPEWLSIDGGKFVINEERAKIVYRIFEATIDGFGRRSISRRMNELGIPAFRGRKGWQTSSIAKVLSSKAVLGEYQPHVGRHSARNRSPQGEPISDYYPPIIDEKMFWQAQSVITSRQHGSAGRTGVRGAHILKGLAKCGECQSIMHISNKGQKPKGGVYLVCENAKRKMGCDNTKHYRVDETERKLLRALSQLVAEDIDFKRNEADQGSEVMSLSAQLADKETIRGKLLKLVEITDFDDALNERFQQTATEIKELKAKLKKAQADLKMVRSEYDSATRKALLDDLLADIQSADTMKVVATKVKLNAIIRGVVDHVTFSRIPGIQMTITNRSRFHVDTDGTYLTKGGQDIGTIVLLEENASDEAFEAFFGEPRSYFDWG

SEQ ID NO: 20357 - DNA, 50 bp, Rhizobium laguerreae
  source 1..50: mol_type = genomic DNA
tgttaattaatgtagcacaatgtcaggagattatgctacattaatcatta

SEQ ID NO: 20358 - DNA, 40 bp, Rhizobium laguerreae
  source 1..40: mol_type = genomic DNA
gccgggaggaccgaccatcagcagattatggccgccggcg

SEQ ID NO: 20359 - DNA, 40 bp, Rhizobium laguerreae
  source 1..40: mol_type = genomic DNA
gccgggaggaccgaccatcttcagattatggccgccggcg

SEQ ID NO: 20360 - DNA, 50 bp, Rhizobium laguerreae
  source 1..50: mol_type = genomic DNA
agttgattattccaacaaaatgtcttaagagtatcctgtcccaattatta

SEQ ID NO: 20361 - protein, 526 aa, Vibrio lentus
MKNCYLYRRYSTSKQSKGSSLERQQLLADRWCATNDGQLLDVITDEGYSAFKGDHISQGAFAGVLSAISSGVIPAGSYLLVENIDRLSRQAIGDALTTWMNILGADINIVTLMDGKIFTKESRNDLGSMLTYLVTQERAWSESHAKSVRTTNAIKAANTRLLNGEVARVTRPASWVTFTPSGYELNHKADAVRRLFELYLSGLGQASTAKQLNDEGVATLSGRSPKWSSASVRKVLLNENVTGIKNIDGNAVEVYPVVVTREDWLKAKDQLSSKSLGASITVGKVANPLTGFCHCGECSETMHYASSRSSAGVRYEYLQCASHRRLHKCGNVMFKLSHLFAVAKSLAAVLCDLPVEKDETQRLTAAVQDAALSLKDVRGRLATASDMAVKFPSEAAFSALSRLELEVTENTQHLEQAEIALASAKGVQAAPLIQLSAVRKLHLSDEASRREAAQIFRNSFESWVFNADGSSELLTKRHGVIYLDGAGRNLEIRAQSAAFEGIVSRFKAIPFVIGGKQGHITFDRTG

SEQ ID NO: 20362 - DNA, 50 bp, Vibrio lentus
  source 1..50: mol_type = genomic DNA
tttttctgtagtgataactaaggctcgcattaattatcatgtgatgtaaa

SEQ ID NO: 20363 - DNA, 40 bp, Vibrio lentus
  source 1..40: mol_type = genomic DNA
tttctgcgcgtcccaaatatcaccttgtgaaccaaggaat

SEQ ID NO: 20364 - DNA, 40 bp, Vibrio lentus
  source 1..40: mol_type = genomic DNA
tttctgcgcgtcccaaatacaaccttgtgaaccaaggaat

SEQ ID NO: 20365 - DNA, 50 bp, Vibrio lentus
  source 1..50: mol_type = genomic DNA
ctttgctgcctgaagagctgcagccagcattaattatccaatgatgtata

SEQ ID NO: 20366 - protein, 461 aa, Staphylococcus aureus; identical to SEQ ID NO: 10486

SEQ ID NO: 20367 - DNA, 50 bp, Staphylococcus aureus
  source 1..50: mol_type = genomic DNA
ttggaagttcggaataactatgctgatacctgatacacacttccaacaaa

SEQ ID NO: 20368 - DNA, 40 bp, Staphylococcus aureus
  source 1..40: mol_type = genomic DNA
ttggcggatgaggtatccagttacctcgttcgccaattat

SEQ ID NO: 20369 - DNA, 40 bp, Staphylococcus aureus
  source 1..40: mol_type = genomic DNA
ttggcggatgaggtatccacatacctcgttcgccaattat

SEQ ID NO: 20370 - DNA, 50 bp, Staphylococcus aureus
  source 1..50: mol_type = genomic DNA
ttgaaagttaaaaatcactatgatcatttctggttaaagaatcaaacaaa

SEQ ID NO: 20371 - protein, 649 aa, Klebsiella aerogenes
MLRPICYERVSSIQQIEGGGGLDDQRSVLEAYLDRNAALFNNDRVFIRDLGVSAFRNSNISPESQLGIFLQDVQNRKYGEGDALIVMSLDRISRRSSWAEDTIRFIVNSGVEVHDISASTVLRKDDPHSKLIMELIQMRSHNESLMKSVRAKAAWDRKIKEAIKEGKVISNRMPVWLVNEGGKYAINEEKVELIRSCFKMYAAGMSTGEIVKHYKQKGVLLQMVTVSNWVRDRRLLGEHKRYNDEVYRGVYPVVIDDELFLTANRMMDRVGLEKKKPREDLLLDHAVVKKIFRLFEDGVGTGSIVKQLEAGWSTVNVLRVLRDKKVVKMKIIDNLTFERVNQKLSLNGVANRIRKDLSIAQDDYITNLFPKILKCGCCGGNIAIHYNHVRTKYVICRTREEKKACDAKSIQYIRIEKNILETVKNVNFEQLMKKEETNSSPVDTLREELSSLREEEKAFIARIEERKKKGLLTGIMLSDGLTEVQDRIVQVEDELIGLQDIREIPKLDFNIDEVLDPMNVELRARIRKELRLVLKAIRYRVIANAIFVHLDYFNDYLTHVLVINNKRGGGEMLTEFIIEHRNDVRIYKSDSFCLTYTEGDKLPAFSTLDSKPINFIEYILLRDYIRELEGEESVTAIWMDRNEKFIFQS

SEQ ID NO: 20372 - DNA, 50 bp, Klebsiella aerogenes
  source 1..50: mol_type = genomic DNA
atgttcccattgattaacgtatgcgtcctttcgtatactatgggaacatt

SEQ ID NO: 20373 - DNA, 40 bp, Klebsiella aerogenes
  source 1..40: mol_type = genomic DNA
aatatattcatggcatgccgtcctttcgttttttagcaca

SEQ ID NO: 20374 - DNA, 40 bp, Klebsiella aerogenes
  source 1..40: mol_type = genomic DNA
aatatattcatggcatgcctgcctttcgttttttagcaca

SEQ ID NO: 20375 - DNA, 50 bp, Klebsiella aerogenes
  source 1..50: mol_type = genomic DNA
atgttgcaatcctctaccatattctgcctttctttttctttgtgcacatt

SEQ ID NO: 20376 - protein, 649 aa, Klebsiella aerogenes
MLRPICYERVSSIQQIEGGGGLDDQRSVLEAYLDRNAALFNNDRVFIRDMGVSAFRNSNISPESQLGIFLQDVQNRKYGEGDALIVMSLDRISRRSSWAEDTIRFIVNSGVEVHDISASTVLRKDDPHSKLIMELIQMRSHNESLMKSVRAKAAWDRKIKEAIKEGKVISNRMPVWLVNEGGKYAINEEKVELIRSCFKMYAAGMSTGEIVKHYKQKGVLLQMVTVSNWVRDRRLLGEHKRYNDEVYRGVYPVVIDDELFLTANRMMDRVGLEKKKPREDLLLDHEVVKKIFRLFEDGVGTGSIVKQLEAGWSTVNVLRVLRDKKVVKMKIIDNLTFERVNQKLSLNGVANRIRKDLSIAQDDYITNLFPKILKCGCCGGNIAIHYNHVRTKYVICRTREEKKACDAKSIQYIRIEKNILETVKNVDFEQLMKKEETNSSPVDILREELSSLREEEKAFITRIEERKKKGLLTGIMLSDGLTEVQDRILQVEDELIELQDIREIPKLDFNIDEVLDPMNVELRARIRKELRLVLKAIRYRVIANAIFVHLDYFNDYLTHILVINNKRGGGEMLTEFIIEQRNDVRIYKSDSFSLTYTEGDKLPAFSTLDSKPINFIEYILLRDYIRELEGEESVTAIWMDRNENFLFQS

SEQ ID NO: 20377 - DNA, 50 bp, Klebsiella aerogenes; identical to SEQ ID NO: 20372
  source 1..50: mol_type = genomic DNA

SEQ ID NO: 20378 - DNA, 40 bp, Klebsiella aerogenes; identical to SEQ ID NO: 20373
  source 1..40: mol_type = genomic DNA

SEQ ID NO: 20379 - DNA, 40 bp, Klebsiella aerogenes; identical to SEQ ID NO: 20374
  source 1..40: mol_type = genomic DNA

SEQ ID NO: 20380 - DNA, 50 bp, Klebsiella aerogenes; identical to SEQ ID NO: 20375
  source 1..50: mol_type = genomic DNA

SEQ ID NO: 20381 - protein, 649 aa, Klebsiella aerogenes
MLRPICYERVSSIQQLEGGGGLDDQRSVLEAYLDRNAALFNNDRVFIRDLGVSAFRNSNISPESQLGIFLQDVQNRKYGEGDALIVMSLDRISRRSSWAEDTIRFIVNSGVEVHDISASTVLRKDDPHSKLIMELIQMRSHNESLMKSVRAKAAWDRKIKEAIKEGKVISNRMPVWLVNEGGKYAINEEKVELIRSCFKMYAAGMSTGEIVKHYKQKGVLLQMVTVSNWVRDRRLLGEHKRYNDEVYRGVYPVVIDDELFLTANRMMDRVGLEKKKPREDLLLDHAVVKKIFRLFEDGVGTGSIVKQLEAGWSTVNVLRVLRDKKVVKMKIIDNLTFERVNQKLSLNGVANRIRKDLSIAQDDYITNLFPKILKCGCCGGNIAIHYNHVRTKYVICRTREEKKACDAKSIQYIRIEKNILETVKNVNFEQLMKKEETNSSPVDTLREELSSLREEEKAFIARIEERKKKGLLTGIMLSDGLTEVQDRIVQVEDELIGLQDIREIPKLDFNIDEVLDPMNVELRARIRKELRLVLKAIRYRVIANAIFVHLDYFNDYLTHVLVINNKRGGGEMLTEFIIEHRNDVRIYKSDSFCLTYTEGDKLPAFSTLDSKPINFIEYILLRDYIRELEGEESVTAIWMDRNEKFIFQS

SEQ ID NO: 20382 - DNA, 50 bp, Klebsiella aerogenes; identical to SEQ ID NO: 20372
  source 1..50: mol_type = genomic DNA

SEQ ID NO: 20383 - DNA, 40 bp, Klebsiella aerogenes; identical to SEQ ID NO: 20373
  source 1..40: mol_type = genomic DNA

SEQ ID NO: 20384 - DNA, 40 bp, Klebsiella aerogenes; identical to SEQ ID NO: 20374
  source 1..40: mol_type = genomic DNA

SEQ ID NO: 20385 - DNA, 50 bp, Klebsiella aerogenes; identical to SEQ ID NO: 20375
  source 1..50: mol_type = genomic DNA

SEQ ID NO: 20386 - protein, 568 aa, Butyrivibrio fibrisolvens
MSLYNMSYEELEAELAPNYRVGIYLRISKDDDIRERESSSIAHQREMLTDFCKKKGWSIAKEYVDDGFTGLNMKRPSLQRLLKDVEDRKINLVITKDYSRLGRNRLEVGTLREEFFPKNRCRYIALNDSIDTLYEDDTAASFKEIFNEHYSKDISNKVHSAYLSQARNGRFTGCVAPFGYMKDPDDPRHLIIDEETAPYVRDIFDMALDGHGVGYIKRRLEQNKVPCPTWWNRQRGIREHYTKYELQDPENGKYVWDDTVLTDMLINPVYYGAVSSQKKHYKFKVGVLGEKAPADWLVVENMHEPIVDQDTFDVVQEKIKSRKCTRGDGTTSLFAGLIKCGECGKALTIRKTNAKNPKEIYACKTYNHMGKNHCTQHRIEYDTLYDIVLKEIRDIAKKTIDADEVAEEVERGCEAEKIAERESMQRQLVKAKDRLDVLDRLVSKLYDDLLAEKITEKTFDSMMARTTKEQSELTAKIDEYETTLANEDAYDSSYDKWVELVGNYIDIKELDAETLNQLVKKIVVHEDIQDDGTRNISLEIHYNFKPVDEPHKYYLNDNAEGESSPLAV

SEQ ID NO: 20387 - DNA, 50 bp, Butyrivibrio fibrisolvens
  source 1..50: mol_type = genomic DNA
agttactacgaaaatggaataatacatttcattccataatcgtgggaaca

SEQ ID NO: 20388 - DNA, 40 bp, Butyrivibrio fibrisolvens
  source 1..40: mol_type = genomic DNA
agagagccgggagataacacattttatggcaggcctctta

SEQ ID NO: 20389 - DNA, 40 bp, Butyrivibrio fibrisolvens
  source 1..40: mol_type = genomic DNA
agagagccgggagataacaggttttatggcaggcctctta

SEQ ID NO: 20390 - DNA, 50 bp, Butyrivibrio fibrisolvens
  source 1..50: mol_type = genomic DNA
acttccaaataagttggaataaaaggtcttattcaattgatgttggaaca

SEQ ID NO: 20391 - protein, 571 aa, Paenibacillus terrae
MKRIATYYARCSTDKEEQKQSIDNQISGLMKYAEDHDYILSESGVFSSRDGGNIPYKGYVDEGFSGAKSTKYRKAFLQMMKDAKAGFFDVILTKSVSRFGRNVKEMLIHIDELKKIGVGVWFEDIQSFSLNNADMLKIQLFATLAEAESTSKSDSIQWAKKEAAKKGIWSGREPYGYNIIKGKLVINEYEAEVVRNIYKLYINDLYGVNKIAKKLYVDDQIPTKRGGKWTGSHVAKILKNEIYLGKVRQHRTRKSDINSNLIEKIPIDKQIIYDDQLLRIIDDEIFFRAKAEMASRPHIESFTYNTKHDDGKKVRTGAETNGRGRYSTSHLFSNLLCCGNCGGMMRKKVQKTTRQTHHYYYCRNHEQYGNSVCEYRNLVREEEMLEWIKEEIKERVNAPEINDWYYTKLIENRYQTVDFAKTIKEHTERLTELAEEKETNFRLVVKKFISDEEYNTRNQSIDSEMQKLQNEIKRLNFIDDEIYSLKLKFEDFNKELNSLDLNDLSNVVLRKFLQRITITTYEDETFREINWRFLDSDEDDIINNNPTIKQEIYEEEMLYEEEIAFMEQYGE

SEQ ID NO: 20392 - DNA, 50 bp, Paenibacillus terrae
  source 1..50: mol_type = genomic DNA
aatgaccttattataaacattgtacatgacaaatctattaaaaggttatt

SEQ ID NO: 20393 - DNA, 40 bp, Paenibacillus terrae
  source 1..40: mol_type = genomic DNA
tgaggcgttggatatgttacaggcgatgaacacaggacat

SEQ ID NO: 20394 - DNA, 40 bp, Paenibacillus terrae
  source 1..40: mol_type = genomic DNA
tgaggcgttggatatgttattggcgatgaacacaggacat

SEQ ID NO: 20395 - DNA, 50 bp, Paenibacillus terrae
  source 1..50: mol_type = genomic DNA
tataacctttaaataaactttgaattagacaaaacttgttcaccgttttt

SEQ ID NO: 20396 - protein, 559 aa, Streptococcus pyogenes
MSKEKIKVYLYTRVSTSIQIEGYSLEAQKSRMKAFAIYNDYEIVGEYEDAGKSGKSIEGRKQFNRMMEDIKSGKDGVSFVLVFKLSRFARNAADVLSTLQIMQDYGVNLICVEDGIDSSKDAGKLMISVLSAVAEIERENIRIQTMEGRIQKAREGKWNGGFAPYGYKLEDGKLFINEEEAVAIRTIFDQYVNTTIGANGLSKYLENHGIRKIPRQNGKNPLFDAGLIRKILKNPVYNGKIAFGRRTLEKVHGTRNEYKQVEQDEYLISEGIHEAIVSDEVWQAAQVKLKSQAKKYEHVNKGKDTRTHLLSGIVKCPICGAGMFGNKCTKKKKDGTKYKDFYYYGCKHRQMIRGHKCTFRKQIREELLDDAVAEVIVKIVSNPKFASMMQEKINMKVDTSEIEKEIDNYQKELRKSHSTKFKIIEEIDNLDVEDKHYKRRKQDLDDRLYRMYDKIDELESSLIDAKAKKQTIEAEKLTGDNIYKVLIYFDKLYKVMNDVERRQLITALISEIQVYEEKQPNGQWLKSITFKLPIIDDDLNISLDNNEQVECVSLLEKRS

SEQ ID NO: 20397 - DNA, 50 bp, Streptococcus pyogenes
  source 1..50: mol_type = genomic DNA
ttttgactcccgcagacccatcacgtggagtgcatagcgttgatacaaag

SEQ ID NO: 20398 - DNA, 40 bp, Streptococcus pyogenes
  source 1..40: mol_type = genomic DNA
gtttccccagacgcatcacgtcgagtgcgtagtgttgcta

SEQ ID NO: 20399 - DNA, 40 bp, Streptococcus pyogenes
  source 1..40: mol_type = genomic DNA
gtttccccagacgcatcacaacgagtgcgtagtgttgcta

SEQ ID NO: 20400 - DNA, 50 bp, Streptococcus pyogenes
  source 1..50: mol_type = genomic DNA
ttttgtatctctggggcccatcacaatgtgtacctaagactggtacagag

SEQ ID NO: 20401 - protein, 485 aa, Streptococcus agalactiae
MYKIGIYMRLSKEDYEKNEESNSIKNQRQLILSYIDKNFSDFCVDNKIEYIDDGYSGMNTNRPAFERLMEDIRDLNTNCIIVKDLSRFSRDYIETGNYLENIFPFLGVRFISINDGFDSKDNCNGTIEIDTQFKSLLYDYYSKELSEKIKLTLNSLKSKGKIINEAPFGYVKDPKNKYKIIKDDISAKVVRKAFDMILEGHSQGSIAKNFNKEKYLTGSERKRVLRGESLENYKKILWTTGQISRILRNESYTGTFLYNKTYKTPIRKSIPRPKEEWGRIENAFEPIIFKEEFNKVQDILNQRSFPAHNDARDVDSPLRSKVICGVCGHKMKFDYRAVVGKNEKKYDCRFRCRVCSLNSKSNSISSKAVESYVLESLKRRGVSLEERKTIKSKKVDQGKVNALKFEIQKNYELYLDSKLTREEFLVIKNNINEQLSSLKEESETKDKLENITMCNIDLKLTNEIVEDNIKEIIVDASKNIEIVYK

SEQ ID NO: 20402 - DNA, 50 bp, Streptococcus agalactiae
  source 1..50: mol_type = genomic DNA
ataagcaataacttgacacaatagggggagaatagtataatggtgacaga

SEQ ID NO: 20403 - DNA, 40 bp, Streptococcus agalactiae
  source 1..40: mol_type = genomic DNA
tgcaggaacaacgggatcagggaagtcagaaattatacag

SEQ ID NO: 20404 - DNA, 40 bp, Streptococcus agalactiae
  source 1..40: mol_type = genomic DNA
tgcaggaacaacgggatcattgaagtcagaaattatacag

SEQ ID NO: 20405 - DNA, 50 bp, Streptococcus agalactiae; identical to SEQ ID NO: 4225
  source 1..50: mol_type = genomic DNA

SEQ ID NO: 20406 - protein, 590 aa, Vibrio parahaemolyticus; identical to SEQ ID NO: 6986

SEQ ID NO: 20407 - DNA, 50 bp, Vibrio parahaemolyticus
  source 1..50: mol_type = genomic DNA
tttttactaattgttgatttcttcaataataaatccacatttggtaaaac

SEQ ID NO: 20408 - DNA, 40 bp, Vibrio parahaemolyticus; identical to SEQ ID NO: 6963
  source 1..40: mol_type = genomic DNA

SEQ ID NO: 20409 - DNA, 40 bp, Vibrio parahaemolyticus
  source 1..40: mol_type = genomic DNA
cgtagcggttgatttcttcagtatgggcgcaatggaaaac

SEQ ID NO: 20410 - DNA, 50 bp, Vibrio parahaemolyticus
  source 1..50: mol_type = genomic DNA
tttttaaaactctattacttcatcagtatgaaattcaaaataggtaaaac

SEQ ID NO: 20411 - protein, 460 aa, Clostridioides difficile
MDNIKRVALYIRVSTEEQALHGDSIRTQTEALEQYAKDNNFIIVDKYLDEGYSATNLKRPNLKRMIEDVKNNKIDLVMITKIDRLSRGVKNYYKIMETLEKHKCDWKTILENYDSSTAAGRLHINIMLSVAENEASQASERIKFVFNNKIRRGEVISGSTPFGYKIVDKHLVIDEEKAEIVRECFISYEKLTSMIKVLQHINNSFDANFSYNFIYKLLKNNIYTGTYIHNDLVVENFCNAIISSEQFNTVQKLLSKNTKVYNNKYLNSLGMQYIFSSMVICKCGRKMSGTYCLSSDKKIYKYYRCHVSQTTKKCSNTKRLSEKKLEAFLLKNVRRQLEEIAFGYESNNNKSKNKNNNNQLKNKIKKQINKLQDLYFDDLIDKEDYKLKYQKLNAQLIKLENNNSEEKKSIINLKNIRSFLEINFEKIYSDLSDQEKRTLWTSIIDTIVIDENKNLTINFL

SEQ ID NO: 20412 - DNA, 50 bp, Clostridioides difficile
  source 1..50: mol_type = genomic DNA
ttttgtactaacataccattacctgatggtagtaatatattagtacaaaa

SEQ ID NO: 20413 - DNA, 40 bp, Clostridioides difficile; identical to SEQ ID NO: 5543
  source 1..40: mol_type = genomic DNA

SEQ ID NO: 20414 - DNA, 40 bp, Clostridioides difficile
  source 1..40: mol_type = genomic DNA
tgtagattttcctgcaccttatggtcctaaaaatcctagt

SEQ ID NO: 20415 - DNA, 50 bp, Clostridioides difficile
  source 1..50: mol_type = genomic DNA
ttttgtaagttttaaacatttccttattgttgcaatttggtgttacaaaa

SEQ ID NO: 20416 - protein, 482 aa, Streptococcus suis
MPKVAIYIRVSTTSQAEEGYSIDEQKDKLTSYCNIKDWSIYNIYTDGGFSGSNTERPALEQLIKDAKRKVFDTVLVYKLDRLSRSQKDTLYLIEDIFLENKIDFVSLLENFDTSTPFGKAMVGILSVFAQLEREQIKERMQLGRLGRAKSGKSMMWARPSYGYDYHRDTGTMTVNPWQAIVIRSIFDWYLQGISITKIRDALNEQYGEDKGGKVWQYRAIRLILTNPVYCGYNQYKGQVFPGKHEPIISEDVFDKTQRELKLRQIETYEFTKNPRPFQAKYMLSGLAKCGYCHAPLKITLGKPRKDGSRTSRYECYQRHPKTTKGATVYNNNAKCHSGAYGRHEIEEYVLNEISKLQNDTNYLDELFSNPETESIDRESYQKQIDELTKKLSRLNDLYIDDRITLEDLKKKSLEFTTMRTLLEAELENDPKLQQEERKKDIRKVLSKGDVLSMDYEEQKVVIRALVEKVQVTAESIKIKFKI

SEQ ID NO: 20417 - DNA, 50 bp, Streptococcus suis
  source 1..50: mol_type = genomic DNA
tagcgaaatttactatccttcatttcaataaaggatactaaaattcttag

SEQ ID NO: 20418 - DNA, 40 bp, Streptococcus suis
  source 1..40: mol_type = genomic DNA
ccccaaaacgactaacatttccaccagagtgaaccctttt

SEQ ID NO: 20419 - DNA, 40 bp, Streptococcus suis
  source 1..40: mol_type = genomic DNA
ccccaaaacgactaacattcgcaccagagtgaaccctttt

SEQ ID NO: 20420 - DNA, 50 bp, Streptococcus suis
  source 1..50: mol_type = genomic DNA
tagataaatcataaatcaatcattcgaacatagtatttataatttattag

SEQ ID NO: 20421 - protein, 549 aa, Streptococcus pneumoniae
MSKEKIKVYLYTRVSTSIQIEGYSLEAQKSRMKAFAIYNDYEIVGEYEDAGKSGKSIEGRIQFNRMMEDIKSGKDGVSFVLVFKLSRFARNAADVLSTLQIMQDYGVNLICVEDGIDSSKDAGKLMISVLSAVAEIERENIRIQTMEGRIQKAREGKWNGGFAPYGYKLEDGKLFINEEEAVAIRTIFDQYVNTTIGANGISKYLENHGIRKIPRQNGKNPLFDAGLIRKILKNPVYNGKIAFGRRTLEKVHGTRNEYKQVEQDEYLISEGIHEAIVSDEVWQAAQVKLKSQAKKYEHVNKGKDTRTHLLSGIVKCPICGVGMFGNKCIKKKKDGTKYKDFYYYGYKHRQMIRGHKCTFSKQIREELLDDAVAEVIVKIVSNPKFASMMQEKINMKVDTSEIEKEIDNYQKELRKSHSTKFKLIEEIDNLDVEDKHYKRRKQDLDDRLYRMYDKIDELESSLIDAKAKKQTIEAEKLTGDNIYKVLIYFDKLYKVMNDVERRQLISALISEIQVYEEKQSNGQWLKSITFKLPIIEENLNIDLDNDEQV

SEQ ID NO: 20422 - DNA, 50 bp, Streptococcus pneumoniae
  source 1..50: mol_type = genomic DNA
gatttggacaatgatgaacaagttgagacggtagcacttttgtccaaaat

SEQ ID NO: 20423 - DNA, 40 bp, Streptococcus pneumoniae
  source 1..40: mol_type = genomic DNA
tcctcaaacgcatcacgtcgaatgtgtaagtttattagag

SEQ ID NO: 20424 - DNA, 40 bp, Streptococcus pneumoniae
  source 1..40: mol_type = genomic DNA
tcctcaaacgcatcacgtcttatgtgtaagtttattagag

SEQ ID NO: 20425 - DNA, 50 bp, Streptococcus pneumoniae
  source 1..50: mol_type = genomic DNA
tttttggacttacatgaaaaagtttttaaggaaggaaaactttgcaaaat

SEQ ID NO: 20426 - protein, 549 aa, Streptococcus pneumoniae
MSKEKIKVYLYTRVSTSIQIEGYSLEAQKSRMKAFAIYNDYEIVGEYEDAGKSGKSIEGRIQFNRMMEDIKSGKDGVSFVLVFKLSRFARNAADVLSTLQIMQDYGVNLICVEDGIDSSKDAGKLMISVLSAVAEIERENIRIQTMEGRIQKAREGKWNGGFAPYGYKLEDGKLFINEEEAVAIRTIFDQYVNTTIGANGISKYLENHGIRKIPRQNGKNPLFDAGLIRKILKNPVYNGKIAFGRRTLEKVHGTRNEYKQVEQDEYLISEGIHEAIVSDEVWQAAQVKLKSQAKKYEHVNKGKDTRTHLLSGIVKCPICGVGMFGNKCIKKKKDGTKYKDFYYYGCKHRQMIRGHKCTFSKQIREELLDDAVAEVIVKIVSNPKFASMMQEKINMKVDTSEIEKEIDNYQKELRKSHSTKFKLIEEIDNLDVEDKHYKRRKQDLDDRLYRMYDKIDELESSLIDAKAKKQTIEAEKLTGDNIYKVLIYFDKLYKVMNDVERRQLISALISEIQVYEEKQSNGQWLKSITFKLPIIEENLNIGLDNDEQV

SEQ ID NO: 20427 - DNA, 50 bp, Streptococcus pneumoniae
  source 1..50: mol_type = genomic DNA
ggtttggacaatgatgaacaagttgagacggtagcacttttgtccaaaat

SEQ ID NO: 20428 - DNA, 40 bp, Streptococcus pneumoniae; identical to SEQ ID NO: 20423
  source 1..40: mol_type = genomic DNA

SEQ ID NO: 20429 - DNA, 40 bp, Streptococcus pneumoniae; identical to SEQ ID NO: 20424
  source 1..40: mol_type = genomic DNA

SEQ ID NO: 20430 - DNA, 50 bp, Streptococcus pneumoniae; identical to SEQ ID NO: 20425
  source 1..50: mol_type = genomic DNA

SEQ ID NO: 20431 - protein, 471 aa, Listeria monocytogenes
MTVGIYIRVSTDEQVKEGFSISAQKEKLKAYCTAQGWEDFKFYVDEGKSAKDMHRPLLQEMITHIKKGLIDTVLVYKLDRLTRSVVDLHNLLSIFDEYNCAFKSATEVYDTSSAMGRFFITIISSVAQFERENTSERVSFGMAEKVRQGEYIPLAPFGYVKGPDGKLIVNEAEKEIFLHVVNMVSTGYSLRQTCEYLTNIGLKTRRSNDVWKVSTLIWMLKNPAVYGAIKWNNEIYENKHEPLINKATFNKLANILAIRSKSTTSRRGHVHHVFKGRLICPQCGKRLSGLRTKYVNKNKETFYNNNYRCATCKEHRRPAIQISEQKIEKAFIDYISNYTLNKADISSKKIDNNLRKQEMIQKEIVSLQRKREKFQKAWAADLMSDDEFSKLMIDTKMEIDVAEDRKKEYDVSLFVSPEDIAKRNNILRELKINWTSLSPTEKTDFISMFIEGIEYVKNDENKAVITKIRFL

SEQ ID NO: 20432 - DNA, 50 bp, Listeria monocytogenes
  source 1..50: mol_type = genomic DNA
tatagactttttgtcaaataaagtgatgtgtacttaacaaaaacactata

SEQ ID NO: 20433 - DNA, 40 bp, Listeria monocytogenes; identical to SEQ ID NO: 7183
  source 1..40: mol_type = genomic DNA

SEQ ID NO: 20434 - DNA, 40 bp, Listeria monocytogenes
  source 1..40: mol_type = genomic DNA
ttcaatgttactgtatcctgctgtgtacctatagcccatc

SEQ ID NO: 20435 - DNA, 50 bp, Listeria monocytogenes
  source 1..50: mol_type = genomic DNA
tatacagtaaaaaaaaaaaaaagtgctgtttatttgcaaactacactata

SEQ ID NO: 20436 - protein, 549 aa, Paenibacillus polymyxa
MAPVSSDFLLSLGIESIINYLRKSRADEEHERRTGEDVLKAQKELMDRVLEPLGIPYDQRPEVGSGDKISTRPVFQGVIDDLRIKKYQAIAVKEISRMGRGSYTDMGVIYDLIVENRIFILTPYKLYDPRNPSDLRQIRFELFMSREEFETTRERLFGGRVNNAIAGRWVAGPAPFGFDYNKDTKKLTINENEASIVRMIFDYYVNGVPQPDGTRRDVSFRALATYISKKTLIRTPKGKKEWHPHQLQQLISSERYKGTMRFRTTQRVNGKVVKRPEEEHIIVPDAFPAIIDPITWEKAQGKLLDSAHKPRNKMDFSPCELAGLCVCRKCGRRMVRQYSVQNYKTKSGAVSKYHKEFLWCTSAGCTFIKYRSVEEDLLEVLRHFSNLDKDILQEQLNLIIAVEQKDNRQEDISAYIEQRSKELKNRMRFIYEKYETGKYTDEMFDERKAEIDSELQELAILEEEANRQLPEKKNEIDIDVVKNNLTSVLEAYQAAEDKSDRNKILRSVFDRVIVELTERGRGRIPAKYVLYPVLRPGLVARDFFSLMSK

SEQ ID NO: 20437 - DNA, 50 bp, Paenibacillus polymyxa
  source 1..50: mol_type = genomic DNA
tagtcttatgagtaaataacctattcatacgttattacttgatacaccca

SEQ ID NO: 20438 - DNA, 40 bp, Paenibacillus polymyxa
  source 1..40: mol_type = genomic DNA
ggtgtgagccacgatcagttcatctgcactgatgagcgca

SEQ ID NO: 20439 - DNA, 40 bp, Paenibacillus polymyxa
  source 1..40: mol_type = genomic DNA
ggtgtgagccacgatcagttaatctgcactgatgagcgca

SEQ ID NO: 20440 - DNA, 50 bp, Paenibacillus polymyxa
  source 1..50: mol_type = genomic DNA
tattcttagtgaattataaactattaaaagattattaatacatacaatca

SEQ ID NO: 20441 - protein, 526 aa, Monoglobus pectinilyticus
MQYCLYLRKSRADSEAEALGEGETLARHEKALLDLAKKLNLNITAIYREIVSGETIAARPVMQQLLQEVEQGIWDGVLVMEVERLARGDTIDQGIVAQTFKFSDTKIITPIKTYNPNNEFDEEYFEFGLFMSRREYKTINRRLQRGRMASVKDGKYVANKAPYGYNRIRIENDKGWTLEINKEEADVVRLIFELYTVGEKQSDNTFNRLGTGFIAKRLNAMKVPPKRGKVWVVASIRDILINPVYIGMIRWNWRPQQKKMIDGQLHISRPRATDYLLCKGLHPPIISKETFNIAQDLMRHNPARPIGEKNTVKNSLSGIVVCGNCGRHMVRRPHTKYPDMLICSEPTCNNVGSQLRVVEERILQSLKEWLGEYKISWDITSPPVERISQVSIKKKALQKEQHELDTLNKQISKTHDLLEQGIYTTDVFLERSRALSLRMDEVKEHIAILDKELKTEITREDSAVNIIPKVEKLLEVYHDLPSPKAKNDMLKDVLEKVVYTKKERSKKGNLDNFNITIYPKIPKYIT

SEQ ID NO: 20442 - DNA, 50 bp, Monoglobus pectinilyticus
  source 1..50: mol_type = genomic DNA
tatagataacctcaatgtgccaattcttttgcacactgatgttatccata

SEQ ID NO: 20443 - DNA, 40 bp, Monoglobus pectinilyticus
  source 1..40: mol_type = genomic DNA
aatttccaaatgagcaagctcctccgtacctatatccgta

SEQ ID NO: 20444 - DNA, 40 bp, Monoglobus pectinilyticus; identical to SEQ ID NO: 20443
  source 1..40: mol_type = genomic DNA

SEQ ID NO: 20445 - DNA, 50 bp, Monoglobus pectinilyticus
  source 1..50: mol_type = genomic DNA
tataaataaaagaaatgtgacatttctcttctacacacaacttagccaag

SEQ ID NO: 20446 - protein, 544 aa, Anaerotruncus colihominis
MNVLKIRNEMRSGKSIFDLPLRVTFYARVSTDKDEQLNSLENQVQYYTELIQSKPNWTYIPGYIDEGISGTSTRKRDSFLRMISDAKAGRFDFIITKEISRFSRSTLDSIQYTQELLEHDVGVLFQNDNINTLDSDSEFRLVVMAGVAQDEVRKLSERLKFGFRQAIKNGHVLGNDKLWGYDKKDCVLTINEAEAKVVRRIFHLYANEQMGIRRISQQLYDEGFTSRKGNAFNVLTIRHILENPKYKGWYCANKSQTVDYRSKRKIFLDESEWVMYPDPSIPAIVSEELWDRANALYKRRSAQMMSHQSAAEFHNRYPYSGKIICEEHGTSFHRQVLKSAKGEKEVWQCRVYRNRGRAACSAPQMRTAELDQIMAQIFDQLARDKSAIVDAVMKVIQAVPNEHDYRQDAGRIEAELSAIYAKKDRLLEMSIEGALSTAEFKQRNDAFNQQIHELEGQMEVLRAEEEKSQISVEQLGKIKAALEAELSFQNGVNSALVATILDHIVVKKGSTREEVHLDIYLKFGDPYGVVFDRENSSFCFTRPR

SEQ ID NO: 20447 - DNA, 50 bp, Anaerotruncus colihominis
  source 1..50: mol_type = genomic DNA
ttcctccttctgcttcacccgtccaagaacggttgatgcggaaggaaaga

SEQ ID NO: 20448 - DNA, 40 bp, Anaerotruncus colihominis
  source 1..40: mol_type = genomic DNA
tctggtcgcacatatcatcaagaaatattacagcgccttt

SEQ ID NO: 20449 - DNA, 40 bp, Anaerotruncus colihominis
  source 1..40: mol_type = genomic DNA
tctggtcgcacatatcatcctgaaatattacagcgccttt

SEQ ID NO: 20450 - DNA, 50 bp, Anaerotruncus colihominis
  source 1..50: mol_type = genomic DNA
gtcctgcttcaatcttacccttccctgattagttgagataaaagaagaga

SEQ ID NO: 20451 - protein, 638 aa, Escherichia coli
MKPKLYSYVRFSSVKQREGNSLERQQDTALKIAARYNLELDTTAFHDLGMSAFKGKNAHEGKLSEFIKQIGAKVPVGSWLVVENLDRISRDDAWSALDIFKNILSKGIVVVTGMDEKVYKYADVKNNPTDLIISLLMFTRAHDESLTKKNRVEAQARSLIRHNLTREPGTPAKAIESVGQNVWWVDTKSGYVTPHPIYFTAAQKIIELKQNGETLLGIQRYLNEHYPAPKKRVYKDQTGQALAPKTEQWGKHLIRTFLNPTVHGQKTFTLDKRDESGVIIYDSESDEPLKETFIIPDYYPALMSEVDYLTLSKLDRHRAITRNSSKYPAGNPEPEIPLLSGIGILFCGKCGSFMFKSGSSENKYRYICGSKIVQGKPCGKKGFTSYQLEHTVLQLIADHVWNNHQEDKTAWYESEIEKASEAVKKLLKLATLTDDLEELADQINANKQKKITLEREFQQYKIRRSEIQTTGWDQFRNFDVHDTKNPDRKRIRLKVKQAIKRIDCYDIDGRHGHFEVTFADETKQRIVIKFNRNRSPGVSYVEAQTVNDHDLLKMQGLVLHSFIDELISPEKFAQHIKDKHEVSILNPTFITRLEDGVNRDEGNGLAIKVDSTTSKSYVTVNGIKYEINSLEDLETLSK

SEQ ID NO: 20452 - DNA, 50 bp, Escherichia coli
  source 1..50: mol_type = genomic DNA
actgtgaataattgactattgggtttgcctaacatataattattcactgt

SEQ ID NO: 20453 - DNA, 40 bp, Escherichia coli
  source 1..40: mol_type = genomic DNA
gcagggcgtattggcgggcttgccatctggcataccggga

SEQ ID NO: 20454 - DNA, 40 bp, Escherichia coli
  source 1..40: mol_type = genomic DNA
gcagggcgtattggcgggcctgccatctggcataccggga

SEQ ID NO: 20455 - DNA, 50 bp, Escherichia coli
  source 1..50: mol_type = genomic DNA
actgtgagttggacactattcttactgctttacatatgctaactcaatgt

SEQ ID NO: 20456 - protein, 638 aa, Citrobacter freundii
MKPKLYSYVRFSSVKQREGNSLERQQDTALKIAARYNLELDTTAFHDLGMSAFKGKNAHEGKLSEFIKQIGAKVPVGSWLVVENLDRISRDDAWSALDIFKNILSKGIVVVTGMDEKVYKYADVKNNPTDLIISLLMFTRAHDESLTKKNRVEAQARSLIRHNLTREPGTPAKAIESVGQNVWWVDTKSGYVTPHPIYFTAAQKIIELKQNGETLLGIQRYLNEHYPAPKKRVYKDQTGQALAPKTEQWGKHLIRTFLNPTVHGQKTFTLDKRDESGVIIYDSESDEPLKETFIIPDYYPALMSEVDYLTLSKLDRHRAITRNSSKYPAGNPEPEIPLLSGIGILFCGKCGSFMFKSGSSENKYRYICGSKIVQGKPCGKKGFTSYQLEHTVLQLIADHVWNNHQEDKTAWYESEIEKASEAVKKLLKLATLTDDLEELADQINANKQKKITLEREFQQYKIRRSEIQTTGWDQFRNFDVHDTKNPDRKRIRLKVKQAIKRIDCYDIDGRHGHFEVTFADETKQRIVIKFNRNRSPGVSYVEAQTVNDHDLLKMQGLVLHSFIDELISPEKFAQHIKDKHEVSILNPTFITRLEDGVNRDEGNGLAIKVDSTTSKSYATVNGIKYEINSLEDLETLSK

SEQ ID NO: 20457 - DNA, 50 bp, Citrobacter freundii; identical to SEQ ID NO: 20452
  source 1..50: mol_type = genomic DNA

SEQ ID NO: 20458 - DNA, 40 bp, Citrobacter freundii
  source 1..40: mol_type = genomic DNA
gcatggcgtattagcaggtttgccatcaggcatgccaggg

SEQ ID NO: 20459 - DNA, 40 bp, Citrobacter freundii
  source 1..40: mol_type = genomic DNA
gcatggcgtattagcaggtctgccatcaggcatgccaggg

SEQ ID NO: 20460 - DNA, 50 bp, Citrobacter freundii; identical to SEQ ID NO: 20455
  source 1..50: mol_type = genomic DNA

SEQ ID NO: 20461 - protein, 638 aa, Escherichia coli; identical to SEQ ID NO: 9771

SEQ ID NO: 20462 - DNA, 50 bp, Escherichia coli; identical to SEQ ID NO: 9772
  source 1..50: mol_type = genomic DNA

SEQ ID NO: 20463 - DNA, 40 bp, Escherichia coli; identical to SEQ ID NO: 20453
  source 1..40: mol_type = genomic DNA

SEQ ID NO: 20464 - DNA, 40 bp, Escherichia coli; identical to SEQ ID NO: 20454
  source 1..40: mol_type = genomic DNA

SEQ ID NO: 20465 - DNA, 50 bp, Escherichia coli; identical to SEQ ID NO: 20455
  source 1..50: mol_type = genomic DNA

SEQ ID NO: 20466 - protein, 638 aa, Klebsiella michiganensis; identical to SEQ ID NO: 9771

SEQ ID NO: 20467 - DNA, 50 bp, Klebsiella michiganensis; identical to SEQ ID NO: 9772
  source 1..50: mol_type = genomic DNA

SEQ ID NO: 20468 - DNA, 40 bp, Klebsiella michiganensis
  source 1..40: mol_type = genomic DNA
gcagcgggtgtttgccggcttgccttgcggcatgcccggg

SEQ ID NO: 20469 - DNA, 40 bp, Klebsiella michiganensis
  source 1..40: mol_type = genomic DNA
gcagcgggtgtttgccggcctgccttgcggcatgcccggg

SEQ ID NO: 20470 - DNA, 50 bp, Klebsiella michiganensis; identical to SEQ ID NO: 20455
  source 1..50: mol_type = genomic DNA

SEQ ID NO: 20471 - protein, 638 aa, Citrobacter portucalensis; identical to SEQ ID NO: 9771

SEQ ID NO: 20472 - DNA, 50 bp, Citrobacter portucalensis; identical to SEQ ID NO: 9772
  source 1..50: mol_type = genomic DNA

SEQ ID NO: 20473 - DNA, 40 bp, Citrobacter portucalensis
  source 1..40: mol_type = genomic DNA
gcagggcgtattagcgggcttgccatcaggcataccgggg

SEQ ID NO: 20474 - DNA, 40 bp, Citrobacter portucalensis
  source 1..40: mol_type = genomic DNA
gcagggcgtattagcgggcctgccatcaggcataccgggg

SEQ ID NO: 20475 - DNA, 50 bp, Citrobacter portucalensis; identical to SEQ ID NO: 20455
  source 1..50: mol_type = genomic DNA

SEQ ID NO: 20476 - protein, 638 aa, Enterobacter ludwigii
MKPKLYSYVRFSSVKQREGNSLERQQDTALKIAARYNLELDTTAFHDLGMSAFKGKNAHEGKLSEFIKQIGVKVPVGSWLVVENLDRISRDDAWTALDIFKSILSKGIVVVTGMDEKVYKYADVKNNPTDLIISLLMFTRAHDESLTKKNRVEAQARSLIRHNLTREAGTPAKAIESVGQNVWWVDTKSGYVTPHSMYFAAAQKIIELKQNGETLLGIQRYLNEHYPAPKKRVYKDQTGKALTPKTEQWGKHLIRTFLNPTVYGQKVFTLDKRDESGVVIYDPDSEEPLKEIFVIPDYYPALISEIDYLTLSKLDRHRAVTRSSSKYPEGNPEPEIPLLSGIGILFCGKCGSFMFKSGSNENKYRYICGSKIVQGKPCGKNGFTAYQLEHTVLQLIADHVWNNHQEDKTAWYESEIEKTSESIDKLLKLATLTDSLEELAEQIKLNKHNKATLEREFHQYKINRSEIQTTGWQQFRQFDVHDTKNPNRKQIRLKVKQAIRRIDCYDIDGRHGHFEVTFADETKQRIVIKFNRNRSPGVSYVEAQTVNDHDLLKMQGLVLHSFIDVLISPDKFAQHIQEKHEVSLLNPTYITELEDGIRHDEVNGIAIRVDGTTSKSYATINGIKHVINSLEDLNKISN

SEQ ID NO: 20477 - DNA, 50 bp, Enterobacter ludwigii
  source 1..50: mol_type = genomic DNA
actgtgaataattgactattaggcttgcctaacatacaattattcactgt

SEQ ID NO: 20478 - DNA, 40 bp, Enterobacter ludwigii
  source 1..40: mol_type = genomic DNA
gcagcgggtattggcaggtttgccgtccggcatgccagga

SEQ ID NO: 20479 - DNA, 40 bp, Enterobacter ludwigii
  source 1..40: mol_type = genomic DNA
gcagcgggtattggcaggtctgccgtccggcatgccagga

SEQ ID NO: 20480 - DNA, 50 bp, Enterobacter ludwigii; identical to SEQ ID NO: 20455
  source 1..50: mol_type = genomic DNA

SEQ ID NO: 20481 - protein, 638 aa, Lelliottia amnigena; identical to SEQ ID NO: 9771

SEQ ID NO: 20482 - DNA, 50 bp, Lelliottia amnigena; identical to SEQ ID NO: 9772
  source 1..50: mol_type = genomic DNA

SEQ ID NO: 20483 - DNA, 40 bp, Lelliottia amnigena
  source 1..40: mol_type = genomic DNA
gcaacgggtgttggcgggtttaccattcggcatgcccgga

SEQ ID NO: 20484 - DNA, 40 bp, Lelliottia amnigena
  source 1..40: mol_type = genomic DNA
gcaacgggtgttggcgggtctaccattcggcatgcccgga

SEQ ID NO: 20485 - DNA, 50 bp, Lelliottia amnigena; identical to SEQ ID NO: 20455
  source 1..50: mol_type = genomic DNA

SEQ ID NO: 20486 - protein, 519 aa, Bacillus subtilis
MTATAKAIKHVAMYLRISREKKGKNVDTLENHRVKLLEKIKEEGLTHEEFGEVVSGGSSELEKRPKLQELLERIEEFDAILCFEISRLSRNGLISQTVKQYCIDYDKPIITNEDIYDLANSSDDRLWFDVESMFSSQEHSKIGKRSKMNKIQMAKAGLDIAGGVPFGYKRNKETKKLEIYEPEAEIVRYIFKLHGQGLGSFKIRDILNEKGIKPARGNHWNLPAIKRIIRNEKYKGWNFFNDRKRIKRNGKFTYEIVDTIIVKDAHPPIIPPEEWDNANIERERRAKVASRIKHKKTVSMVSDLLYCGICGRKLSIRSDRKTKKVHVKTCDYLMHENGSKCRNNGVLLEKVEEEVLKTIKKYKKDLQEVIDQLLEADISNVEQEIKSEITSLQRQQRELHSQKKNLIKAVASGVLTGEDIRSEKEKIEAKQNAVNSKLEELESQLQTLDVDTIIEVNKRAIEALKDFERHSPENQNNTLKRVISRILYTRDMPDEIKALTTRNPLRREYPFTLEIEYLT

SEQ ID NO: 20487 - DNA, 50 bp, Bacillus subtilis
  source 1..50: mol_type = genomic DNA
atacatcatataaaaaacttagtacctacttcatttgttatatgacgtat

SEQ ID NO: 20488 - DNA, 40 bp, Bacillus subtilis; identical to SEQ ID NO: 648
  source 1..40: mol_type = genomic DNA

SEQ ID NO: 20489 - DNA, 40 bp, Bacillus subtilis; identical to SEQ ID NO: 5219
  source 1..40: mol_type = genomic DNA

SEQ ID NO: 20490 - DNA, 50 bp, Bacillus subtilis
  source 1..50: mol_type = genomic DNA
atacatcatatataatatatactatataatacatataatacattacatat

SEQ ID NO: 20491 - protein, 535 aa, Eisenbergiella tayi
MSKEYNIGIYIRLSMADEDTGYGSKAESDSIGNQRMLINRFLDNHPELSHCQRSEFADDGYTGTNFHRPQFTQMMEKVKRGEINLICVKDFSRFSRDYIETGNYLECTFPFMGVRFISINDGYDSDDYKGTTGGLEVVMRSIIYAAYSKDLSVKTTSAKIQMMKQGKYVGGYAPYGYVLHPTIRNKLAVDPEAADVIRRIFREALEGSNTSQIARSLNDDGIPTPGQYFKSKHPDKKKFSNMSEKISWETVMVYNILKNLVYTGTLVSRKMKSCGVGSKKRVVNEPIIVEGTHEAIISKEDFELAQKVIRGGGRNPMRKQHDYPLKGLVRCGNCKRAMTRRKNKAGIRYFQCIHSVNNGNTDCPVGRSFPEMDIEKVVFHALTQFLALAQKESVQNREVGDLRKSAIKECAEKIRILQKQNEQHKASKLRLYEKYAAGGITKEAYLQQKAATDAKIAENDEAIQHSHERMKELDSETSCSDEKLDAVCDQYADCKALTYELTHAFISAVYIYDLDNIEIVWKFKDFLTTSEGETK

SEQ ID NO: 20492 - DNA, 50 bp, Eisenbergiella tayi; identical to SEQ ID NO: 11927
  source 1..50: mol_type = genomic DNA

SEQ ID NO: 20493 - DNA, 40 bp, Eisenbergiella tayi
  source 1..40: mol_type = genomic DNA
gcggtaataataagtaaaggaaacaagccggtgttcccgg

SEQ ID NO: 20494 - DNA, 40 bp, Eisenbergiella tayi
  source 1..40: mol_type = genomic DNA
gcggtaataataagtaaagctaacaagccggtgttcccgg

SEQ ID NO: 20495 - DNA, 50 bp, Eisenbergiella tayi
  source 1..50: mol_type = genomic DNA
tttggtctcggctggacaaaagaactgtatttttcggttgagggaataac

SEQ ID NO: 20496 - protein, 462 aa, Clostridium innocuum
MMEKVKRGEINLICVKDFSRFSRDYIETGNYLECTFPFMGVRFISINDGYDSDDYKGTTGGLEVVMRSIIYAAYSKDLSVKTTSAKIQMMKQGKYVGGYAPYGYVLHPTIRNKLAVDPEAADVIRRIFREALEGSNTSQIARSLNDDGIPTPGQYFKSKHPDKKKFSNMSEKISWETVMVYNILKNLVYTGTLVSRKMKSCGVGSKKRVVNEPIIVEGTHEAIISKEDFELAQKVIRGGGRNPTRKQHDYPLKGLVRCGNCKRAMTRRKNKAGIRYFQCIHSVNNGNTDCPVGRSFPEMDIEKVVFHALTQFLALAQKEAIQNREVGDLRKSAIKECADKIRALQKQNEQNKASKLRLYEKYAAGSITKEAYIQQKAAADVKIAENDGAIQRSHERMKELDSETACSDEKLDAVCEQYADCKALTYELTHAFISAVYIYDLDNIEIVWKFKDFLTTSEGEAK

SEQ ID NO: 20497 - DNA, 50 bp, Clostridium innocuum; identical to SEQ ID NO: 11927
  source 1..50: mol_type = genomic DNA

SEQ ID NO: 20498 - DNA, 40 bp, Clostridium innocuum
  source 1..40: mol_type = genomic DNA
cacagcgctatcacttaaagacctatgctgatttggccag

SEQ ID NO: 20499 - DNA, 40 bp, Clostridium innocuum
  source 1..40: mol_type = genomic DNA
cacagcgctatcacttaaactcctatgctgatttggccag

SEQ ID NO: 20500 - DNA, 50 bp, Clostridium innocuum; identical to SEQ ID NO: 20495
  source 1..50: mol_type = genomic DNA

SEQ ID NO: 20501 - protein, 535 aa, Faecalibacterium prausnitzii
MSKEYNIGIYIRLSMADEDTGYGSKAESDSIGNQRMLINRFLDNHLELSHCQRSEFADDGYTGTNFHRPQFTQMMEKVKRGEINLICVKDFSRFSRDYIETGNYLECTFPFMGVRFISINDGYDSDDYKGTTGGLEVVMRSIIYAAYSKDLSVKTTSAKIQMMKQGKYVGGYAPYGYVLHPTIRNKLAVDPEAADVIRRIFREALEGSNTSQIARSLNDDGIPTPGQYFKSKHPDKKKFSNMSEKISWETVMVYNILKNLVYTGTLVSRKMKSCGVGSKKRVVNEPIIVEGTHEAIISKEDFELAQKVIRGGGRNPTRKQHDYPLKGLVRCGNCKRAMTRRKNKAGIRYFQCIHSVNNGNTDCPVGRSFPEMDIEKVVFHALTQFLALAQKEAIQNREVGDLRKSAIKECADKIRTLQKQNEQHKASKLRLYEKYAAGSITKEAYIQQKAAADVKIAENDGAIQRSHERMKELDSETACSDEKLDAVCEQYADCKALTYELTHAFISAVYIYDLDNIEIVWKFKDFLTTSEGEAK

SEQ ID NO: 20502 - DNA, 50 bp, Faecalibacterium prausnitzii; identical to SEQ ID NO: 11927
  source 1..50: mol_type = genomic DNA

SEQ ID NO: 20503 - DNA, 40 bp, Faecalibacterium prausnitzii
  source 1..40: mol_type = genomic DNA
aaactgcattgttacgaaagacctgtcccgtttcgggcgg

SEQ ID NO: 20504 - DNA, 40 bp, Faecalibacterium prausnitzii
  source 1..40: mol_type = genomic DNA
aaactgcattgttacgaaactcctgtcccgtttcgggcgg

SEQ ID NO: 20505 - DNA, 50 bp, Faecalibacterium prausnitzii; identical to SEQ ID NO: 20495
  source 1..50: mol_type = genomic DNA

SEQ ID NO: 20506 - protein, 520 aa, Streptococcus suis
MKKVITIEATPSIIRSSSDDFSLKKRRVAGYARVSTDHEDQATSYESQIRYYSEYINGRDDWEFVKMYSDEGISGTNTKLRTGFKAMVEDALNGKIDLIITKSVSRFARNTVDSLTTVRQLKEVGVEIYFEKENIWTLDSKGELLITIMSSLAQEESRSISENVTWGLRKQFAEGKVHFPYTNVLGFKAGEDGAIIVDQDEAKTVRYIFQQALIGKSPYHIAKDLTEQGIPSPSGKSQWNATTIKRMLRNEKYKGDALLQKTFTIDFLTKKKNINRGELPQYYVENNHEAIVDRETFDAVQLVLDNKGRKSSTTIFSSKLVCGDCGHFFGSKVWHSTSKYRRVIYQCNEKYKGISKCSTPHVTEEEVKQWFVSAVNQVLDNRLEVIDNLYVLLSIGNLEVIDEQIKVLETEAEVVSQLVANLVSENAIISQDQDKYLKKYNQLTSKYEGIVQEIESLELHRMKKSKRNKELQVFINALEKQEGLLLEFDEFLWETMIEHVTVSGAKEIFIKFKNGQIVRV

SEQ ID NO: 20507 - DNA, 50 bp, Streptococcus suis
  source 1..50: mol_type = genomic DNA
tgtattaaaatgagtactaataccgaagtatgagttctgaaattgataca

SEQ ID NO: 20508 - DNA, 40 bp, Streptococcus suis
  source 1..40: mol_type = genomic DNA
tttggtcctgacccataccgatgcggaccatgtgggcgat

SEQ ID NO: 20509 - DNA, 40 bp, Streptococcus suis
  source 1..40: mol_type = genomic DNA
tttggtcctgacccataccaatgcggaccatgtgggcgat

SEQ ID NO: 20510 - DNA, 50 bp, Streptococcus suis
  source 1..50: mol_type = genomic DNA
tataataaaactgctacaaatatgaaagtacaagtcatttaattgataaa

SEQ ID NO: 20511 - protein, 507 aa, Bacillus pumilus
MSFRKETVDEIIKYDDYPYKVYTRVSTDRDEQISSKENQIDVCRYWIEQHNYEWDDRSVLLDDGISGTVLEDRAAMKYIFSLAEKKEIKMVIFKSITRLARDLKDALYIREILVSNGVRVVTLEEDYDSLYESKASMKFEMSALFAEQLPKSMSVNISGVLAAKARRGEHSGRVPYGYQKDGKHLVINESEAQVIRLIFHLYNNEGLGHKRVTYALQEKCKLGEIPPPKKRSNWQLTTVQTILRNPIYCGVHIANRHTTIKVDGRKKFIRNPPEKWTVYEDFCPPIVSREDWEKANNKQTVNKKTKFTPWNELRQLLICGKCGSNMVIIQTSRAKKNGEKTYWKYVKCSNYRRAGNEGCVNHVPIMYEEVRDLVIENLIEFSGGITHDFKKNAIDQKEKQMKTIKAELKSLETQNKRLLELYLEDQIISKAEFQTKRNDIQTKIIKLEQSLFSLQQVQNEKNSMAQIQAVLQELEDREKDLKHVFEKLIDHIVIHPNGQMNFHYRFN

SEQ ID NO: 20512 - DNA, 50 bp, Bacillus pumilus
  source 1..50: mol_type = genomic DNA
tatttgtaaaaggtatgcataacaaatgctaagcatatcttttacaaaac

SEQ ID NO: 20513 - DNA, 40 bp, Bacillus pumilus
  source 1..40: mol_type = genomic DNA
tgttcgaaatcatatttcgaatgccatgcaaaagctagga

SEQ ID NO: 20514 - DNA, 40 bp, Bacillus pumilus
  source 1..40: mol_type = genomic DNA
tgttcgaaatcatatttcgattgccatgcaaaagctagga

SEQ ID NO: 20515 - DNA, 50 bp, Bacillus pumilus
  source 1..50: mol_type = genomic DNA
tatttgaaacttgtatacataagaatttctaagctaaatcttaagagaac

SEQ ID NO: 20516 - protein, 486 aa, Flavonifractor plautii
MKAVIYARYSSDSQREESIEGQLRECKEYAERNGITVLSTYIDRALSAKTDNRPDFQRMIKDSANGLFDIVLVWKLDRFARNRYDSAHYKAILKKNGVKVVSAKEAIAEDSTGILLESLLEGYAEFYSVELSEKIHRGQKENALKGLNNGGGIPLGYVLGSDKRLAVDPMTAPVVLEIFTRYADGETVRAIVESLNERGLQTKHNKPYSLGSFNAILKNRKYIGEYRYQDVVIPGGVPAIVPQELFDRVQARIARNKRAPAMSKADEAFLLTTKLFCGKCGRLMVGESGTSHTGKKHYYYKCGSAKRKTGCTKKAVKKDWIENLVVERTMQMIFDDTTLDAIASMVLDVQARENTSLPVLKAQLAQTEQGIQNMLNAIQQGIFTVSTKQRLEELEATKEQLTVSILQEELQKPHLSREQILFFLQRFRAVDPTKQEQRQRLIDSFVNAVYVYDDKIILTFNYQDGTETITLDDINGSDLEASAPPE

SEQ ID NO: 20517 - DNA, 50 bp, Flavonifractor plautii
  source 1..50: mol_type = genomic DNA
tcggatttggaagcaagcgctccaccagaaagggaggtcaaaaaagatat

SEQ ID NO: 20518 - DNA, 40 bp, Flavonifractor plautii
  source 1..40: mol_type = genomic DNA
tcgactccccccgcctccaccagaaaagaaagacacgacg

SEQ ID NO: 20519 - DNA, 40 bp, Flavonifractor plautii
  source 1..40: mol_type = genomic DNA
tcgactccccccgcctccaatagaaaagaaagacacgacg

SEQ ID NO: 20520 - DNA, 50 bp, Flavonifractor plautii
  source 1..50: mol_type = genomic DNA
tctgatttgtaaacatacagtccaatacaaaggaagagcctattagatat

SEQ ID NO: 20521 - protein, 638 aa, Lelliottia amnigena; identical to SEQ ID NO: 9771

SEQ ID NO: 20522 - DNA, 50 bp, Lelliottia amnigena
  source 1..50: mol_type = genomic DNA
tgaataattgactattgggcttacctaacatataattattcactgtttaa

SEQ ID NO: 20523 - DNA, 40 bp, Lelliottia amnigena
  source 1..40: mol_type = genomic DNA
cgggtgttggcgggtttgccattcggcatgcccggaatag

SEQ ID NO: 20524 - DNA, 40 bp, Lelliottia amnigena
  source 1..40: mol_type = genomic DNA
cgggtgttggcgggtttgcaattcggcatgcccggaatag

SEQ ID NO: 20525 - DNA, 50 bp, Lelliottia amnigena
  source 1..50: mol_type = genomic DNA
ttaataatttttgattggacttacaagaaatgtaagagttaactttgaaa

SEQ ID NO: 20526 - protein, 537 aa, Enterococcus faecalis; identical to SEQ ID NO: 11881

SEQ ID NO: 20527 - DNA, 50 bp, Enterococcus faecalis; identical to SEQ ID NO: 11882
  source 1..50: mol_type = genomic DNA

SEQ ID NO: 20528 - DNA, 40 bp, Enterococcus faecalis
  source 1..40: mol_type = genomic DNA
ggtttcaagcaagcaaagggggacgtgattgccatttatg

SEQ ID NO: 20529 - DNA, 40 bp, Enterococcus faecalis
  source 1..40: mol_type = genomic DNA
ggtttcaagcaagcaaaggaggacgtgattgccatttatg

SEQ ID NO: 20530 - DNA, 50 bp, Enterococcus faecalis
  source 1..50: mol_type = genomic DNA
acaaatcttggttaaaaagaaagaagtgtttcccaaagtaataaatacaa

SEQ ID NO: 20531 - protein, 493 aa, Enterobacter hormaechei
MKQNGKAYSYIRFSSKKQEQGDSVRRQTELAEQYAHANNLILSDKNFQDLGISAFKEGSRPSLGDMLEAIEKGQIEQGSTIIIESLDRLSRRGIDVTQQIIKSILQNNVFIASLVDGLLLNRESVNDLVSVIRIALAADLAHKESEKKSQRLRETKGQQRQRALNGEIINKVLPFWLERKEDNFIFSDRIEAAKRIIELRRKGFGTNKIAKALNDEGHKPLRSSGWNHTTVGKTINSVALYGAYQTSETTKDRKVILLDIIEGYYPALISKEEFMLLQSDHKHNKPGYKSEFNAFAGLLKHECGGALVRKFHVASGKTYQYHVCANARDGKCVVTKNFKNLEVALYRIMKELKYEKKSYLDKSLLTEQINIKTKIQDLNDMLLTLTKIPVSVMHTISNLEAKLHEIEERIKQQNSMIISEKAFNLNLLLEIKDPQELNLMLKRVVDKIIVFNAGKKWRVKISYRNRHTQNFIWDGEKITFISDTKKLLEFINS

SEQ ID NO: 20532 - DNA, 50 bp, Enterobacter hormaechei
  source 1..50: mol_type = genomic DNA
gatttgttactttgaaacaattgtgtgatattgttgcaaagaagcaaaat

SEQ ID NO: 20533 - DNA, 40 bp, Enterobacter hormaechei; identical to SEQ ID NO: 4963
  source 1..40: mol_type = genomic DNA

SEQ ID NO: 20534 - DNA, 40 bp, Enterobacter hormaechei
  source 1..40: mol_type = genomic DNA
cttactgccaaactgcatactgacgttgctggtaactaac

SEQ ID NO: 20535 - DNA, 50 bp, Enterobacter hormaechei
  source 1..50: mol_type = genomic DNA
gattggttaaatgaaaacagatttctgatatttttaaattaaagtataac

SEQ ID NO: 20536 - protein, 493 aa, Enterobacter roggenkampii
MKQNGKAYSYIRFSSKKQEQGDSVRRQTELAEQYAHANNLILSDKNFQDLGISAFKEGSRPSLGDMLEAIEKGQIEQGSTIIIESLDRLSRRGIDVTQQIIKSILQNNVFIASLVDGLLLNRESVNDLVSVIRIALAADLAHKESEKKSQRLRETKGQQRQRALNGEIINKVLPFWLERKEDNFIFSDRIEAAKRIIELRRKGLGTNKIAKALNDEGHKPLRSSGWNHTTVGKTINSVALYGAYQTSETTKDRKVILLDIIEGYYPALISKEEFMLLQSDHKHNKPGYKSEFNAFAGLLKHECGGALVRKFHVASGKTYQYHVCANARDGKCVVTKNFKNLEVALYRIMKELKYEKKSYLDKSLLTEQINIKTKIQDLNDMLLTLTKIPVSVMHTISNLEAKLHEIEERIKQQNSMIISEKAFNLNLLLEIKDPQELNLMLKRVVDKIIVFNAGKKWRVKISYRNRHTQNFIWDGEKITFISDTKKLLEFINS

SEQ ID NO: 20537 - DNA, 50 bp, Enterobacter roggenkampii; identical to SEQ ID NO: 20532
  source 1..50: mol_type = genomic DNA

SEQ ID NO: 20538 - DNA, 40 bp, Enterobacter roggenkampii; identical to SEQ ID NO: 4963
  source 1..40: mol_type = genomic DNA

SEQ ID NO: 20539 - DNA, 40 bp, Enterobacter roggenkampii; identical to SEQ ID NO: 20534
  source 1..40: mol_type = genomic DNA

SEQ ID NO: 20540 - DNA, 50 bp, Enterobacter roggenkampii; identical to SEQ ID NO: 20535
  source 1..50: mol_type = genomic DNA

SEQ ID NO: 20541 - protein, 557 aa, Bifidobacterium bifidum
MSKQSEKITALYCRLSRDDEQEGASGSIKNQQSILEKYAKDNGFSNPRVFIDDGWSGTTFARPAFTEIMELAEKGLIGTLIVKDHSRLGRNRLVVGQLLEEGFDSLGVRYIAIMDNIDTAKGISDLVPMQDLFNEWHAKNTSQKVRNVFKNKGMSGVPLTTNPPFGYMKNPDDKKEWMIDEEAAKVVRRIFALCVDGFGPTQIAKKLKADKVMTPTEYWNSIGRNCSKPPEIPFNWCSDTVANILSKQEYCGDTVNFRSTTKSFKNKTKIERPQEEWKIFPNTHPAIIEREVFELVQELRQHRRRPTKSGIVSPFSGLLYCADCGEKLYYSVTGNYKREQANFFCSSYRKNSEVCSAHYIREKIVKETVLESMRRILLNVQAFEKEFARKQMECYSEDKKKELAQKRRELNKAKKRIAEIDSLIQKIYEDNAIGKISDERYVTLSMSYEEEQQRLKADIPEMESYLETETDKTESLQKFIDKVKKITELKELTPELIHEFIDRIIVYAPRYLDGKRVQLMDIYYNGVGILRELSPEEMENAFQEHLEEWERNKAKTA

SEQ ID NO: 20542 - DNA, 50 bp, Bifidobacterium bifidum; identical to SEQ ID NO: 11457
  source 1..50: mol_type = genomic DNA

SEQ ID NO: 20543 - DNA, 40 bp, Bifidobacterium bifidum
  source 1..40: mol_type = genomic DNA
ataaaaaagggagcggcgaaatccgctctctttttttatc

SEQ ID NO: 20544 - DNA, 40 bp, Bifidobacterium bifidum
  source 1..40: mol_type = genomic DNA
ataaaaaagggagcggcgacttccgctctctttttttatc

SEQ ID NO: 20545 - DNA, 50 bp, Bifidobacterium bifidum
  source 1..50: mol_type = genomic DNA
cacgtgccttaattatgtagccccctggcagacactagctcagcacgatg

SEQ ID NO: 20546 - protein, 557 aa, Bittarella massiliensis
MSKQSVKITALYCRLSRDDEQDGLSGSIKNQQSILEKYAKENGFKNTRVFIDDGWSGVTFTRPAFTEIMELAEQGLIANLIVKDHSRLGRNRLIVGQLLEEEFDRLGIRYIAIMDNIDTAKGLSDIVPMQDLFNEWHAKNTSQKVRNVFKNKGMAGIPLTTNPPFGYMKNPETSKEWLIDEPAAKIVRQIFEMCVSGLGPTQIAKRLKSDKILTPTEYWNSIGRNCGNPPARQFNWCSDTVASILSKQEYCGDTVNFRSTTKSFKNKKKIERPQEEWQIFPNTHPAIIDRETFELVQELRQHRRRPTKSGIVSMFSGLLYCADCGEKLYYSVTNNYKREQAYFFCSSYRKNSEVCSAHYIREKVVEENVLENMRRVFRYVQAYEKEFAKQQMKCYGEEKQKELSEKRRELTKAEKRIKDIDLLIQKIYEDNAMGKLSDERFATMSMAYEEEQKNLKEAIPDMQAYLETETDKSEGLQRFIDKVKQITQPTKLTPELVHEFIEKIVIHERRYLDGKRYQLMDIYYNGVDVIRGLTPEEMEEAFQEHLAKRKINKAKTA

SEQ ID NO: 20547 - DNA, 50 bp, Bittarella massiliensis; identical to SEQ ID NO: 11457
  source 1..50: mol_type = genomic DNA

SEQ ID NO: 20548 - DNA, 40 bp, Bittarella massiliensis
  source 1..40: mol_type = genomic DNA
acacaaaaaagaccatccgaaaggatggtcttttttgctg

SEQ ID NO: 20549 - DNA, 40 bp, Bittarella massiliensis
  source 1..40: mol_type = genomic DNA
acacaaaaaagaccatccgctaggatggtcttttttgctg

SEQ ID NO: 20550 - DNA, 50 bp, Bittarella massiliensis; identical to SEQ ID NO: 20545
  source 1..50: mol_type = genomic DNA

SEQ ID NO: 20551 - protein, 537 aa, Enterobacter hormaechei
MNTAYAYIRFSSEKQSAGDSVRRQQSLIDSWGKNNPDYILSKKIYKDEGLSAFTGKHAAGDLGRLMNDISNGSITAGDVILIESLDRLSRENISTATDRLKAILIRGVNVVTLTDQKQYTPESLNSPMDLIMSILTAQRAHEESESKSKRMREVWAKKRTEAEENGKIITKSCPRWLTVNSDRTGFDPIPDRVQTINRIFSLRVKGESLSAISKILNEEGRLTFTGKAGKWNQSTIQQLVSNRALIGYKVQSRNSVVNHPDIPNYYPVVVDLQTFQAVQQLKSDQFGKKQTSDIPALVNLFKSVLRCKECGNIMILNSVTVNRDGYYVCSMRRQGRCDAKPINRKATDEALVKGMFYNLDRLMLSKPEQNPVTALEAQKQDLTERLNKLVVALEIAPDITEIISRMNAIKGDIQAIESQIAQHKQRLQSHISASVQGLDLLVKADRIEFQLVMKRHVETILINTLKKSADIHMFNGLKLLNFPLDRVVDGAQWLEILPLIDGEEFDFEGFATKPRHIASEEAPEWVKEMEEQPNQML

SEQ ID NO: 20552 - DNA, 50 bp, Enterobacter hormaechei
  source 1..50: mol_type = genomic DNA
aataatgtttagacatgtgcattggtcatagtaactttctaaacgtgcat

SEQ ID NO: 20553 - DNA, 40 bp, Enterobacter hormaechei
  source 1..40: mol_type = genomic DNA
aagcacggtacggatgttggtcatggtcaggttgacgatc

SEQ ID NO: 20554 - DNA, 40 bp, Enterobacter hormaechei
  source 1..40: mol_type = genomic DNA
aagcacggtacggatgttgtacatggtcaggttgacgatc

SEQ ID NO: 20555 - DNA, 50 bp, Enterobacter hormaechei
  source 1..50: mol_type = genomic DNA
cattatgttatttcaagtgctttgtacatagtaactgcatgatgctactt

SEQ ID NO: 20556 - protein, 514 aa, Klebsiella variicola
MNTAYAYIRFSSEKQSTGDSVRRQQSLIDSWGKNNPDYILSQKIYKDEGLSAFTGKHAAGDLGRLMNDISNGSITAGDVILIESLDRLSRENISTATDRLKAILIHGVNVVTLTDQKQYTPESLNSPMDLIMSILTAQRAHEESESKSKRMREVWAKKRTEAEENGKIITKSCPRWLTVNSDRRGFDPIPDRVQTINRIFSLRVKGESLSAISKILNEEGKLTFTGKAGKWNQSTIQQLVSNRALIGYKVQSRNSVVNHPDIPDYYPVVVDLQTFQAVQQLKSDQFGKKQTSDIPALVNLFKSVLRCKECGNIMILNSVTVNRDGYYVCSMRRQGRCEAKPINRKATDEALVNGLFYNLDRLMLSKPEQSPVTALEAQKQDLTERLNKLVVALEIAPDITEIISRMNAIKGDIQAIESQIAQHKQRIQSHVSETVQGLDLLVKAERVEFQLVMKRHVETILINTLRKSADIHMFNGLKLLNFPLDRVVDGEIFLEVLPLLEADEFDFDTYRVIE

SEQ ID NO: 20557 - DNA, 50 bp, Klebsiella variicola
  source 1..50: mol_type = genomic DNA
aataatgtttagacatgtgcattggtcatagtaactctctaaacgtgcat

SEQ ID NO: 20558 - DNA, 40 bp, Klebsiella variicola
  source 1..40: mol_type = genomic DNA
gagcacggtacggatattggtcatcgtcaggttgacgatc

SEQ ID NO: 20559 - DNA, 40 bp, Klebsiella variicola
  source 1..40: mol_type = genomic DNA
gagcacggtacggatattgtacatcgtcaggttgacgatc

SEQ ID NO: 20560 - DNA, 50 bp, Klebsiella variicola; identical to SEQ ID NO: 20555
  source 1..50: mol_type = genomic DNA

SEQ ID NO: 20561 - protein, 547 aa, Vibrio parahaemolyticus
MRTAYSYVRLSSKKQIQGYGQERQWQAIQAAALAHGWELSEKTFSDLGVSGWKGANIETGALSQFLQCVEDGYVEKGSVLIVENVDRLSRAGVQRAVSLLMQLLASGISIYTFTDSKLYEPDSHNPLMDLMAWALSAQRAFEESERKSQMILNAKAKAREKARLTGEIITRRCPSWLRVNQDKTAFELIPERVETVRKIFDLYVNGYGTPRIGRLLTEEGRKPLTGRAWYPRSISRILQYRAVLGEYQPTLNGKPEGDAIKNYYPAIIDEDRFNEVQAVLKEGGAGKGRRGKEMRNYFAGLLRCSCGEGMHIVSSCVKGKRYYQLRCLQYRISCFGSSWNFYKLSSFVLFALRRLPILEVMGSQDNNNIKELIAKERELTFLLEDTRRQLDNTINAIGALGLNDQLQSKFRELKTSVTNIEKQLSNVKTELETSQGKLVIQKQDSEMLTGRFLELIDSTKDIDGRIKLNQVLRRYLSKIEMHADKKEEYRYIKIYRKDGDELVSIQCDHSLKGALFESKDGLETFELLPATDAKRNEISNTLLCTPK

SEQ ID NO: 20562 - DNA, 50 bp, Vibrio parahaemolyticus
  source 1..50: mol_type = genomic DNA
ttatgcctttaaggaaacctaactaaagtattgtatcggttatgacataa

SEQ ID NO: 20563 - DNA, 40 bp, Vibrio parahaemolyticus; identical to SEQ ID NO: 4428
  source 1..40: mol_type = genomic DNA

SEQ ID NO: 20564 - DNA, 40 bp, Vibrio parahaemolyticus; identical to SEQ ID NO: 4429
  source 1..40: mol_type = genomic DNA

SEQ ID NO: 20565 - DNA, 50 bp, Vibrio parahaemolyticus
  source 1..50: mol_type = genomic DNA
ttctgcattgaagaaagcctaactttataaatgtttacaacattacatga

SEQ ID NO: 20566 - protein, 547 aa, Vibrio parahaemolyticus
MRTAYSYVRLSSKKQIQGYGQERQWQAIQAAALAHGWELSEKTFSDLGVSGWKGANIETGALSQFLQCVEDGYIEKGSVLIVENVDRLSRAGVQRAVSLLMQLLASGISIYTFTDSKLYEPDSHNPLMDLMAWALSAQRAFEESERKSQMILNAKAKAREKARLTGEIITRRCPSWLRVNQDKTAFELIPERVEIVRKIFDLYVNGYGTPRIGRLLTEEGRKPLTGRAWYPRSISRILQYRAVLGEYQPTLNGKPEGDAIKNYYPAIIDEDRFNEVQAVLKEGGAGKGRRGKEMRNYFAGLLRCSCGEGMHIVSSCVKGKRYYQLRCLQYRISCFGSSWNFYKLSSFVLFALRRLPILEVMGSQDNNNIKELNAKERELTFLLEDTRRQLDNTINAIAALGLNDQLQSKFRELKTSVTNIEKQLSNVKTELETSQGKLVIQKQDSEMLTGRFLELIDSTKDIDGRIKLNQVLRRYLSKIEMHADKKEEYRYIKIYRKDGDELVSIQCDHSLKGALFESKDGLETFELLPATDAKRNEISNTLLCTPK

SEQ ID NO: 20567 - DNA, 50 bp, Vibrio parahaemolyticus; identical to SEQ ID NO: 20562
  source 1..50: mol_type = genomic DNA

SEQ ID NO: 20568 - DNA, 40 bp, Vibrio parahaemolyticus; identical to SEQ ID NO: 4428
  source 1..40: mol_type = genomic DNA

SEQ ID NO: 20569 - DNA, 40 bp, Vibrio parahaemolyticus; identical to SEQ ID NO: 4429
  source 1..40: mol_type = genomic DNA

SEQ ID NO: 20570 - DNA, 50 bp, Vibrio parahaemolyticus; identical to SEQ ID NO: 20565
  source 1..50: mol_type = genomic DNA

SEQ ID NO: 20571 - protein, 481 aa, Streptococcus sp oral taxon 431
MKSTNKVAIYVRVSTTSQAEEGYSIEEQIDKLESYCKIKDWTVYKVYTDGGFSGSNTERPALENLIKDADKKKFDTVLVYKLDRLSRSQKDTLFLIEDVFIKNGIEFLSLQENFDTSTPFGKAMIGLLSVFAQLEREQIKERMQLGKLGRAKAGKSMMWAKTSYGYDYHKETGTMTINPVQALAIKFIFESYLSGRSITKLRDDLNEKYPKEKPWNYRAVRVILDNPVYCGYNQYLGEIYKGNHEPIISKETYDKTQEELKIRQRTALENLNPRPFQAKYMLSGIAQCGYCLAPLKIIMGVKRKDGSRFKKYECHQRHPRKLRGVTTYNDNKKCDSGFYYKDDLEAYVLQEVNKLQHDSEYLETIFSDNRKESIDRESYQKQIRELSKKLSRLNDLYIDDRITLEELQSKSSEFLSMRALLEKELEDDPALKQEKTKNTIKQSLSKGDIYKMDYESQKTIVRALIRKVQVTADSIVIKWRI

SEQ ID NO: 20572 - DNA, 50 bp, Streptococcus sp oral taxon 431
  source 1..50: mol_type = genomic DNA
gagagaattttactatccctcatttcaatcaaggatactaaaattattga

SEQ ID NO: 20573 - DNA, 40 bp, Streptococcus sp oral taxon 431
  source 1..40: mol_type = genomic DNA
aagaaggaccactaacatttctacaagagtgaaccctttt

SEQ ID NO: 20574 - DNA, 40 bp, Streptococcus sp oral taxon 431
  source 1..40: mol_type = genomic DNA
aagaaggaccactaacattaatacaagagtgaaccctttt

SEQ ID NO: 20575 - DNA, 50 bp, Streptococcus sp oral taxon 431
  source 1..50: mol_type = genomic DNA
gagaaaaatattaaagtccttattaaaatgaagaaaatagaaattatgga

SEQ ID NO: 20576 - protein, 472 aa, Microbacterium caowuchunii
MRNGVIYGRISDDPTGKAAGVERQVDECRTLAEAASVHIVETLIDNDLSATTGKRRPSFERVLELVRAGQVDTVVIWHTDRLYRLPRDLEPIIELADDRRLRFLTVTSSEIDLNTASGRMVARILAAASAQEVEHKAERQKSASDQRAARGLPTTRPGYGYERVDGRDVVVEAEAHVIRDAARRVLASESLRAVAADLNARGVPSPGGAPWQGVTLRQMLRRPSLAGLRTHRGVTVGAFDPTLHPAILDVDTHERLLALFDDPARRRPSGGRTPKHLLSGLAECGLCAEVLGGRMHRLPPWQPKPGSKSKPVKAAYACNKCHKVRRLQAPVDELVDRVIVARLERPDAAAMFTTGDPAAAREARDAIDATDARLALAADQFADGTLTGDQLRRITEKLRARRSELEQQLTAVLPPQMPHDLVGPRARAVWDGLHIDAKRAVIRALARVIIMPAGIGRSFNPDDVRIDWHAPA

SEQ ID NO: 20577 - DNA, 50 bp, Microbacterium caowuchunii
  source 1..50: mol_type = genomic DNA
aagaatggaaactgaatagacatagggaagagcattgagttaacatctcc

SEQ ID NO: 20578 - DNA, 40 bp, Microbacterium caowuchunii
  source 1..40: mol_type = genomic DNA
aagaatcaggaagaccagcggcaccagcatgtagatctcc

SEQ ID NO: 20579 - DNA, 40 bp, Microbacterium caowuchunii
  source 1..40: mol_type = genomic DNA
aagaatcaggaagaccagcttcaccagcatgtagatctcc

SEQ ID NO: 20580 - DNA, 50 bp, Microbacterium caowuchunii
  source 1..50: mol_type = genomic DNA
agaaattgaattggcagagacatattgaagagcaatttggtaatacctac

SEQ ID NO: 20581 - protein, 509 aa, Escherichia coli
MRRAISYIRFSSERQLKGDSVRRQSKLVTDWLDKNPEFYLDSSLSFKDLGKSAFSGKHLKGGLGDFLTAIEKGLVKAGDTLLIESLDRLSRQDIDIASELLRRILRAGVDIVTLSDGEHYTRESLKDPLSLIKSILIMQRAHEESLRKSERVQAAWNRKKELISEGIKVSRRCPAWLRLNDDRRTFTIIPDKVEVVKRAFDLRLQGLSFWAITRTLNDEGHLSLNQYTPKQKGWSDTAVKKLLRNRAVIGCFTPAGREEVQGYYPAIISESLFYRVQQLNTGQYGRASISSNPLSVNLFRGIIKCSECGATIVLGGYALKRFGMYRCPNRSANRCSAKAISRKQTDTTILYMLALCDRFETENTDTIDSLKLQREDLQRKISKMAELAIELDDMTIITEKLRDMKNALSKLNHDIEEETKRIKAITTGSLKDIDRTTKEGMIETQLLIKGVLKEIVIDAAKRRCKVTFHNGKVIDLPITENPSEDVTEAIQSLSEVTERGLIDVDVVAI

SEQ ID NO: 20582 - DNA, 50 bp, Escherichia coli; identical to SEQ ID NO: 13162
  source 1..50: mol_type = genomic DNA

SEQ ID NO: 20583 - DNA, 40 bp, Escherichia coli; identical to SEQ ID NO: 5293
  source 1..40: mol_type = genomic DNA

SEQ ID NO: 20584 - DNA, 40 bp, Escherichia coli
  source 1..40: mol_type = genomic DNA
gtggtccggtattgtcttcttcattacatttttattttcg

SEQ ID NO: 20585 - DNA, 50 bp, Escherichia coli
  source 1..50: mol_type = genomic DNA
tagtgtaatctcttaaagaaaatattaacaatgggttaggaaagacaaca

SEQ ID NO: 20586 - protein, 509 aa, Escherichia coli
MRRAISYIRFSSERQLKGDSVRRQSKLVTDWLDKNPEFYLDSSLSFKDLGKSAFSGKHLKGGLGDFLTAIEKGLVKAGDTLLIESLDRLSRQDIDIASELLRRILRAGVDIVTLSDGEHYTRESLKDPLSLIKSILIMQRAHEESLRKSERVQAAWNRKKELISEGIKVSRRCPAWLRLNDDRRTFTIIPDKVEVVKRAFDLRLQGLSFWAITRTLNDEGHLSLNQYTPKQKGWSDTAVKKLLRNRAVIGCFTPAGREEVQGYYPAIISESLFYRVQQLNTGQYGRASVSSNPLSVNLFRGIIKCSECGATIVLGGYALKRFGMYRCPNRSANRCSAKAISRKQTDTTILYMLALCDRFETENTDTIDSLKLQREDLQRKISKMAELAIELDDMTIITEKLRDMKNALSKLNHDIEEETKRIKAITTGSLKDIDRTTKEGMIETQLLIKGVLKEIVIDAAKRRCKVTFHNGKVIDLPITENPSEDVTEAIQSLSEVTERGLIDVDVVAI

SEQ ID NO: 20587 - DNA, 50 bp, Escherichia coli; identical to SEQ ID NO: 13162
  source 1..50: mol_type = genomic DNA

SEQ ID NO: 20588 - DNA, 40 bp, Escherichia coli; identical to SEQ ID NO: 5293
  source 1..40: mol_type = genomic DNA

SEQ ID NO: 20589 - DNA, 40 bp, Escherichia coli; identical to SEQ ID NO: 20584
  source 1..40: mol_type = genomic DNA

SEQ ID NO: 20590 - DNA, 50 bp, Escherichia coli; identical to SEQ ID NO: 20585
  source 1..50: mol_type = genomic DNA

SEQ ID NO: 20591 - protein, 509 aa, Escherichia coli; identical to SEQ ID NO: 13161

SEQ ID NO: 20592 - DNA, 50 bp, Escherichia coli; identical to SEQ ID NO: 13162
  source 1..50: mol_type = genomic DNA

SEQ ID NO: 20593 - DNA, 40 bp, Escherichia coli; identical to SEQ ID NO: 5293
  source 1..40: mol_type = genomic DNA

SEQ ID NO: 20594 - DNA, 40 bp, Escherichia coli; identical to SEQ ID NO: 20584
  source 1..40: mol_type = genomic DNA

SEQ ID NO: 20595 - DNA, 50 bp, Escherichia coli; identical to SEQ ID NO: 20585
  source 1..50: mol_type = genomic DNA

SEQ ID NO: 20596 - protein, 509 aa, Escherichia coli; identical to SEQ ID NO: 18006

SEQ ID NO: 20597 - DNA, 50 bp, Escherichia coli; identical to SEQ ID NO: 13162
  source 1..50: mol_type = genomic DNA

SEQ ID NO: 20598 - DNA, 40 bp, Escherichia coli; identical to SEQ ID NO: 5293
  source 1..40: mol_type = genomic DNA

SEQ ID NO: 20599 - DNA, 40 bp, Escherichia coli; identical to SEQ ID NO: 20584
  source 1..40: mol_type = genomic DNA

SEQ ID NO: 20600 - DNA, 50 bp, Escherichia coli; identical to SEQ ID NO: 20585
  source 1..50: mol_type = genomic DNA

SEQ ID NO: 20601 - protein, 509 aa, Escherichia coli
MRRAISYIRFSSERQLKGDSVRRQSKLVTDWLDKNPEFYLDSSLSFKDLGKSAFSGKHLKGGLGDFLTAIEKGLVKAGDTLLIESLDRLSRQDIDIASELLRRILRAGVDVVTLSDGEHYTKESLKDPLSLIKSILIMQRAHEESLRKSERVQAAWNRKKELISEGIKISKRCPAWLRLNDDRRTFTIIPDKVEVVKRAFDLRLQGLSFWAITRTLNDEGHLSLNQYTPKQKGWSDTAVKKLLRNRAVIGCFTPAGREEVQGYYPAIISESLFYRVQQLNTGQYGRASVSSNPLSVNLFRGIIKCSECGATIVLGGYALKRFGMYRWPNRSANRCSAKAISRKQTDATILYMLALCDRFETENTDTIDSLRLQREDLQRKISKMAELAIELDDMTIITEKLRDMKNALSKLNHDIEEETKRIKAITTGSLKDIDRTTKEGMIETQLLIKGVLKEIVIDAAKRRCKVTFHNGRAITLPITENPSKDVTEAIQSLSEVTERGLIDVDEVII

SEQ ID NO: 20602 - DNA, 50 bp, Escherichia coli; identical to SEQ ID NO: 12182
  source 1..50: mol_type = genomic DNA

SEQ ID NO: 20603 - DNA, 40 bp, Escherichia coli; identical to SEQ ID NO: 5293
  source 1..40: mol_type = genomic DNA

SEQ ID NO: 20604 - DNA, 40 bp, Escherichia coli; identical to SEQ ID NO: 20584
  source 1..40: mol_type = genomic DNA

SEQ ID NO: 20605 - DNA, 50 bp, Escherichia coli; identical to SEQ ID NO: 20585
  source 1..50: mol_type = genomic DNA

SEQ ID NO: 20606 - protein, 509 aa, Escherichia coli
MRRAISYIRFSSERQLKGDSVRRQSKLVTDWLDKNPEFYLDSSLSFKDLGKSAFSGKHLKGGLGDFLTAIEKGLVKAGDTLLIESLDRLSRQDIDIASELLRRILRAGVDVVTLSDGEHYTKESLKDPLSLIKSILIMQRAHEESLRKSERVQAAWNRKKELISEGIKISKRCPAWLRLNDDRRTFTIIPDKVEVVKRAFDLRLQGLSFWAITRTLNDEGHLSLNQYTPKQKGWSDTAVKKLLRNRAVIGCFTPAGREEVQGYYPAIISESLFYRVQQLNTGQYGRASVSSNPLSVNLFRGIIKCSECGATIVLGGYALKRFGMYRCPNRSANRCSAKAISRKQTDATILYMLALCDRFETENTDTIDSLRLQREDLQRKISKMAELAIELDDMTIITEKLRDMKNALSKLNHDIEEETKRIKAITTGSLKDIDRTTKEGMIETQLLIKGVLKEIVIDAAKRRCKVTFHNGRAITLPITENPSKDVTEAIQSLSEVTERGLIDVDEVII

SEQ ID NO: 20607 - DNA, 50 bp, Escherichia coli; identical to SEQ ID NO: 12182
  source 1..50: mol_type = genomic DNA

SEQ ID NO: 20608 - DNA, 40 bp, Escherichia coli; identical to SEQ ID NO: 5293
  source 1..40: mol_type = genomic DNA

SEQ ID NO: 20609 - DNA, 40 bp, Escherichia coli; identical to SEQ ID NO: 20584
  source 1..40: mol_type = genomic DNA

SEQ ID NO: 20610 - DNA, 50 bp, Escherichia coli; identical to SEQ ID NO: 20585
  source 1..50: mol_type = genomic DNA

SEQ ID NO: 20611 - protein, 509 aa, Escherichia coli; identical to SEQ ID NO: 11051

SEQ ID NO: 20612 - DNA, 50 bp, Escherichia coli; identical to SEQ ID NO: 12182
  source 1..50: mol_type = genomic DNA

SEQ ID NO: 20613 - DNA, 40 bp, Escherichia coli; identical to SEQ ID NO: 5293
  source 1..40: mol_type = genomic DNA

SEQ ID NO: 20614 - DNA, 40 bp, Escherichia coli; identical to SEQ ID NO: 20584
  source 1..40: mol_type = genomic DNA

SEQ ID NO: 20615 - DNA, 50 bp, Escherichia coli; identical to SEQ ID NO: 20585
  source 1..50: mol_type = genomic DNA

SEQ ID NO: 20616 - protein, 509 aa, Escherichia coli; identical to SEQ ID NO: 12181

SEQ ID NO: 20617 - DNA, 50 bp, Escherichia coli; identical to SEQ ID NO: 12182
  source 1..50: mol_type = genomic DNA

SEQ ID NO: 20618 - DNA, 40 bp, Escherichia coli; identical to SEQ ID NO: 5293
  source 1..40: mol_type = genomic DNA

SEQ ID NO: 20619 - DNA, 40 bp, Escherichia coli; identical to SEQ ID NO: 20584
  source 1..40: mol_type = genomic DNA

SEQ ID NO: 20620 - DNA, 50 bp, Escherichia coli; identical to SEQ ID NO: 20585
  source 1..50: mol_type = genomic DNA

SEQ ID NO: 20621 - protein, 509 aa, Escherichia coli
MRRAISYIRFSSERQLKGDSVRRQSKLVTDWLDKNPEFYLDSSLSFKDLGKSAFSGKHLKGGLGDFLTAIEKGLVKAGDTLLIESLDRLSRQDIDIASELLRRILRAGVDVVTLSDGEHYTKESLKDPLSLIKSILIMQRAHEESLRKSERVQAAWNRKKELISEGIKISKRCPAWLRLNDDRRTFTIIPDKVEVVKRAFDLRLQGLSFWAITRTLNDEGHLSLNQYTPKQKGWSDTAVKKLLRNRAVIGCFTPAGREEVQGYYPAIISESLFYRVQQLNTGQYGRASVSSNPLSVNLFRGIIKCSECGATIVLGGYALKRFGMYRCPNRSANRCSAKAISRKQTDATILYMLALCDRFETENTDIIDSLKLQREDLQRKISKMAELAIELDDMTIITEKLRDMKNALSKLNHDIEEETKRIKAITTGSLKDIDRTTKEGMIETQLLIKGVLKEIVIDAAKRRCKVTFHNGRAITLPITENPSEDVTEAIQSLSEVTERGLIDVDEVII

SEQ ID NO: 20622 - DNA, 50 bp, Escherichia coli; identical to SEQ ID NO: 12182
  source 1..50: mol_type = genomic DNA

SEQ ID NO: 20623 - DNA, 40 bp, Escherichia coli; identical to SEQ ID NO: 5293
  source 1..40: mol_type = genomic DNA

SEQ ID NO: 20624 - DNA, 40 bp, Escherichia coli; identical to SEQ ID NO: 20584
  source 1..40: mol_type = genomic DNA

SEQ ID NO: 20625 - DNA, 50 bp, Escherichia coli; identical to SEQ ID NO: 20585
  source 1..50: mol_type = genomic DNA

SEQ ID NO: 20626 - protein, 509 aa, Escherichia coli
MRRAISYIRFSSERQLKGDSVRRQSKLVTDWLDKNPEFYLDSSLSFKDLGKSAFSGKHLKGGLGDFLTAIEKGLVKAGDTLLIESLDRLSRQDIDIASELLRRILRAGVDIVTLSDGEHYTRESLKDPLSLIKSILIMQRAHEESLRKSERVQAAWNRKKELISEGIKVSRRCPAWLRLNDDRRTFTIIPDKVEVVKRAFDLRLQGLSFWAITRTLNDEGHLSLNQYTPKQKGWSDTAVKKLLRNRAVIGCFTPAGREEVQGYYPAIISESLFYRVQQLNTGQYGRASVSSNPLSVNLFRGIIKCSECGATIVLGGYALKRFGMYRCPNRSANRCSAKAISRKQTDTTILYMLALCDRFETENTDTIDSLKLQREDLQRKISKMAELAIELDDMTIITEKLRDMKNALSKLNHDIEEEAKRIKAITTGSLKDIDRTTKEGMIETQLLIKGVLKEIVIDAAKRRCKVTFHNGKVIDLPITENPSEDVTEAIQSLSEVTERGLIDVDVVAI

SEQ ID NO: 20627 - DNA, 50 bp, Escherichia coli; identical to SEQ ID NO: 13162
  source 1..50: mol_type = genomic DNA

SEQ ID NO: 20628 - DNA, 40 bp, Escherichia coli; identical to SEQ ID NO: 5293
  source 1..40: mol_type = genomic DNA

SEQ ID NO: 20629 - DNA, 40 bp, Escherichia coli; identical to SEQ ID NO: 20584
  source 1..40: mol_type = genomic DNA

SEQ ID NO: 20630 - DNA, 50 bp, Escherichia coli; identical to SEQ ID NO: 20585
  source 1..50: mol_type = genomic DNA

SEQ ID NO: 20631 - protein, 509 aa, Escherichia coli
MRRAISYIRFSSERQLKGDSVRRQSKLVTDWLDKNPEFYLDSSLSFKDLGKSAFSGKHLKGGLGDFLTAIEKGLVKAGDTLLIESLDRLSRQDVDQASELLRNILRSGVDVVTLSDGEHYTKESLKDPLSLIKSILIMQRAHEESLRKSERVQAAWNRKKELISEGIKISKRCPAWLRLNDDRRTFTIIPDKVEVVKRAFDLRLQGLSFWAITRTLNDEGHLSLNQYTPKQKGWSDTAVKKLLRNRAVIGCFTPAGREEVQGYYPAIISESLFYRVQQLNTGQYGRASVSSNPLSVNLFRGIIKCSECGATIVLGGYALKRFGMYRCPNRSANRCSAKAISRKQTDATILYMLALCDRFETENTDIIDSLKLQREDLQRKISKMAELAIELDDMTIITEKLRDMKNALSKLNHDIEEETKRIKAITTGSLKDIDRTTKEGMIETQLLIKGVLKEIVIDAAKRRCKVTFHNGRAITLPITEDPSEDVTEAIQSLSEVTERGLIDVDEVII

SEQ ID NO: 20632 - DNA, 50 bp, Escherichia coli
  source 1..50: mol_type = genomic DNA
tagtgtatttagagaacaaatatcagtataatgggttcctaaacacatca

SEQ ID NO: 20633 - DNA, 40 bp, Escherichia coli; identical to SEQ ID NO: 5293
  source 1..40: mol_type = genomic DNA

SEQ ID NO: 20634 - DNA, 40 bp, Escherichia coli; identical to SEQ ID NO: 20584
  source 1..40: mol_type = genomic DNA

SEQ ID NO: 20635 - DNA, 50 bp, Escherichia coli; identical to SEQ ID NO: 20585
  source 1..50: mol_type = genomic DNA

SEQ ID NO: 20636 - protein, 509 aa, Escherichia coli
MRRAISYIRFSSERQLKGDSVRRQSKLVTDWLDKNPEFYLDSSLSFKDLGKSAFSGKHLKGGLGDFLTAIEKGLVKAGDTLLIESLDRLSRQDIDIASELLRRILRAGVDIVTLSDGEHYTGESLKDPLSLIKSILIMQRAHEESLRKSERVQAAWNRKKELISEGIKVSRRCPAWLRLNDDRRTFTIIPDKVEVVKRAFDLRLQGLSFWAITRTLNDEGHLSLNQYTPKQKGWSDTAVKKLLRNRAVIGCFTPAGREEVQGYYPAIISESLFYRVQQLNTGQYGRASVSSNPLSVNLFRGIIKCSECGATIVLGGYALKRFGMYRCPNRSANRCSAKAISRKQTDTTILYMLALCDRFETENTDTIDSLKLQREDLQRKISKMAELAIELDDMTIITEKLRDMKNALSKLNHDIEEETKRIKAITTGSLKDIDRTTKEGMIETQLLIKGVLKEIVIDAAKRRCKVTFHNGKAITLPITENPSDNVTEAIQSLSEVTERGLIDVDEVII

SEQ ID NO: 20637 - DNA, 50 bp, Escherichia coli; identical to SEQ ID NO: 13162
  source 1..50: mol_type = genomic DNA

SEQ ID NO: 20638 - DNA, 40 bp, Escherichia coli; identical to SEQ ID NO: 5293
  source 1..40: mol_type = genomic DNA

SEQ ID NO: 20639 - DNA, 40 bp, Escherichia coli; identical to SEQ ID NO: 20584
  source 1..40: mol_type = genomic DNA

SEQ ID NO: 20640 - DNA, 50 bp, Escherichia coli; identical to SEQ ID NO: 20585
  source 1..50: mol_type = genomic DNA

SEQ ID NO: 20641 - protein, 509 aa, Escherichia coli
MRRAISYIRFSSERQLKGDSVRRQSKLVTDWLDKNPEFYLDSSLSFKDLGKSAFSGKHLKGGLGDFLTAIEKGLVKAGDTLLIESLDRLSRQDIDIASELLRRILRAGVDVVTLSDGEHYTKESLKDPLSLIKSILIMQRAHEESLRKSERVQAAWNRKKELISEGIKISRRCPAWLKLNDDRRTFTIIPDKVEVVKRAFDLRLQGLSFWAITRTLNDEGHLSLNQYTPKQKGWSDTAVKKLLRNRAVIGCFTPAGREEVQGYYPAIISESLFYRVQQLNTGQYGRASVSSNPLSVNLFRGIIKCSECGATIVLGGYALKRFGMYRCPNRSANRCSAKAISRKQTDATILYMLALCDRFETENTDTIDSLKLQREDLQRKISKMAELAIELDDMTIITEKLRDMKNALSKLNHDIEEETKRIKAITTGSLKDIDRTTKEGMIETQLLIKGVLKEIVIDAAKRRCKVTFHNGKAITLPITENPSEDVTEAIQSLSEVTEKGLIDVDVVEI

SEQ ID NO: 20642 - DNA, 50 bp, Escherichia coli; identical to SEQ ID NO: 12182
  source 1..50: mol_type = genomic DNA

SEQ ID NO: 20643 - DNA, 40 bp, Escherichia coli; identical to SEQ ID NO: 5293
  source 1..40: mol_type = genomic DNA

SEQ ID NO: 20644 - DNA, 40 bp, Escherichia coli; identical to SEQ ID NO: 20584
  source 1..40: mol_type = genomic DNA

SEQ ID NO: 20645 - DNA, 50 bp, Escherichia coli; identical to SEQ ID NO: 20585
  source 1..50: mol_type = genomic DNA

SEQ ID NO: 20646 - protein, 509 aa, Escherichia coli
MRRAISYIRFSSERQLKGDSVRRQSKLVTDWLDKNPEFYLDSSLSFKDLGKSAFSGKHLKGGLGDFLTAIEKGLVKAGDTLLIESLDRLSRQDIDIASELLRRILRAGVDVVTLSDGEHYTKESLKDPLSLIKSILIMQRAHEESLRKSERVQAAWNRKKELISEGIKISRRCPAWLKLNDDRRTFTIIPDKVEVVKRAFDLRLQGLSFWAITRTLNDEGHLSLNQYTPKQKGWSDTAVKKLLRNRAVIGCFTPAGREEVQGYYPAIISESLFYRVQQLNTGQYGRASVSSNPLSVNLFRGIIKCSECGATIVLGGYALKRFGMYRCPNRSANRCSAKAISRKQTDATILYMLALCDRFETENTDTIDSLKLQREDLQRKISKMAELAIELDDMTIITEKLRDMKNALSKLNHDIEEETKRIKAITTGSLKDIDRTTKEGMIETQLLIKGVLKEIVIDAAKRRCKVTFHNGKVIDLPITENPSEDVTEAIQSLSEVTERGLIDVDEVII

SEQ ID NO: 20647 - DNA, 50 bp, Escherichia coli; identical to SEQ ID NO: 12182
  source 1..50: mol_type = genomic DNA

SEQ ID NO: 20648 - DNA, 40 bp, Escherichia coli; identical to SEQ ID NO: 5293
  source 1..40: mol_type = genomic DNA

SEQ ID NO: 20649 - DNA, 40 bp, Escherichia coli; identical to SEQ ID NO: 20584
  source 1..40: mol_type = genomic DNA

SEQ ID NO: 20650 - DNA, 50 bp, Escherichia coli; identical to SEQ ID NO: 20585
  source 1..50: mol_type = genomic DNA

SEQ ID NO: 20651 - protein, 477 aa, Escherichia coli
MRRAISYIRFSSERQLKGDSVRRQSKLVTDWLDKNPEFYLDSSLSFKDLGKSAFSGKHLKGGLGDFLTAIEKGLVKAGDTLLIESLDRLSRQDIDIASELLRRILRAGVDIVTLSDGEHYTRESLKDPLSLIKSILIMQRAHEESLRKSERVQAAWNRKKELISEGIKVSRRCPAWLRLNDDRRTFTIIPDKVEVVKRAFDLRLQGLSFWAITRTLNDEGHLSLNQYTPKQKGWSDTAVKKLLRNRAVIGCFTPAGREEVQGYYPAIISESLFYRVQQLNTGQYGRASVSSNPLSVNLFRGIIKCSECGATIVLGGYALKRFGMYRCPNRSANRCSAKAISRKQTDTTILYMLALCDRFETENTDTIDSLKLQREDLQRKISKMAELAIELDDMTIITEKLRDMKNALSKLNHDIEEETKRIKAITTGSLKDIDRTTKEGMIETQLLIKGVLKEIVIDAAKRRCKVTFHNGKELTYL

SEQ ID NO: 20652 - DNA, 50 bp, Escherichia coli; identical to SEQ ID NO: 13162
  source 1..50: mol_type = genomic DNA

SEQ ID NO: 20653 - DNA, 40 bp, Escherichia coli; identical to SEQ ID NO: 5293
  source 1..40: mol_type = genomic DNA

SEQ ID NO: 20654 - DNA, 40 bp, Escherichia coli; identical to SEQ ID NO: 20584
  source 1..40: mol_type = genomic DNA

SEQ ID NO: 20655 - DNA, 50 bp, Escherichia coli; identical to SEQ ID NO: 20585
  source 1..50: mol_type = genomic DNA

SEQ ID NO: 20656 - protein, 509 aa, Escherichia coli
MRRAISYIRFSSERQLKGDSVRRQSKLVTDWLDKNPEFYLDSSLSFKDLGKSAFSGKHLKGGLGDFLTAIEKGLVKAGDTLLIESLDRLSRQDIDIASELLRRILRAGVDVVTLSDGEHYTRESLKDPLSLIKSILIMQRAHEESLRKSERVQAAWNRKKELISEGIKVSRRCPAWLRLNDDRRTFTIIPDKVEVVKRAFDLRLQGLSFWAITRTLNDEGHLSLNQYTPKQKGWSDTAVKKLLRNRAVIGCFTPAGREEVQGYYPAIISESLFYRVQQLNTGQYGRASVSSNPLSVNLFRGIIKCSECGATIVLGGYALKRFGMYRCPNRSANRCSAKAISRKQTDATILYMLALCDRFETENTDTIDSLKLQREDLQRKISKMAELAIELDDMTIITEKLRDMKNALSKLNHDIEEETQRIKAITTGSLKDIDRTTKEGMVETQLLIKGVLKEIVIDAAKRRCKVTFHNGRIIDLPITENPSEDVTEAIQSLSEVTERGLIDVDVVEI

SEQ ID NO: 20657 - DNA, 50 bp, Escherichia coli; identical to SEQ ID NO: 12182
  source 1..50: mol_type = genomic DNA

SEQ ID NO: 20658 - DNA, 40 bp, Escherichia coli; identical to SEQ ID NO: 5293
  source 1..40: mol_type = genomic DNA

SEQ ID NO: 20659 - DNA, 40 bp, Escherichia coli; identical to SEQ ID NO: 20584
  source 1..40: mol_type = genomic DNA

SEQ ID NO: 20660 - DNA, 50 bp, Escherichia coli; identical to SEQ ID NO: 20585
  source 1..50: mol_type = genomic DNA

SEQ ID NO: 20661 - protein, 509 aa, Escherichia coli
MRRAISYIRFSSERQLKGDSVRRQSKLVTDWLDKNPEFYLDSSLSFKDLGKSAFSGKHLKGGLGDFLTAIEKGLVKAGDTLLIESLDRLSRQDIDIASELLRRILRAGVDIVTLSDGEHYTGESLKDPLSLIKSILIMQRAHEESLRKSERVQAAWNRKKELISEGIKVSRRCPAWLRLNDDRRTFTIIPDKVEVVKRAFDLRLQGLSFWAITRTLNDEGHLSLNQYTPKQKGWSDTAVKKLLRNRAVIGCFTPAGREEVQGYYPAIISESLFYRVQQLNTGQYGRASVSSNPLSVNLFRGIIKCSECGATIVLGGYALKRFGMYRCPNRSANRCSAKAISRKQTDTTILYMLALCDRFETENTDTIDSLKLQREDLQRKISKMAELAIELDDMTIITEKLRDMKNALSKLNHDIEEETKRIKAITTGSLKDIDRTTKEGMIETQLLIKGVLKEIVIDAAKRRCKVTFHNGKVMDLPITENPSEDVTEAIQSLSEVTERGLIDVDVVAI

SEQ ID NO: 20662 - DNA, 50 bp, Escherichia coli; identical to SEQ ID NO: 13162
  source 1..50: mol_type = genomic DNA

SEQ ID NO: 20663 - DNA, 40 bp, Escherichia coli; identical to SEQ ID NO: 5293
  source 1..40: mol_type = genomic DNA

SEQ ID NO: 20664 - DNA, 40 bp, Escherichia coli; identical to SEQ ID NO: 20584
  source 1..40: mol_type = genomic DNA

SEQ ID NO: 20665 - DNA, 50 bp, Escherichia coli; identical to SEQ ID NO: 20585
  source 1..50: mol_type = genomic DNA

SEQ ID NO: 20666 - protein, 509 aa, Escherichia coli
MRRAISYIRFSSERQLKGDSVRRQSKLVTDWLDKNPEFYLDSSLSFKDLGKSAFSGKHLKGGLGDFLTAIEKGLVKAGDTLLIESLDRLSRQDIDIASELLRRILRAGVDVVTLSDGEHYTRESLKDPLSLIKSILIMQRAHEESLRKSERVQAAWNRKKELISEGIKISRRCPAWLKLNDDRRTFTIIPDKVEVVKRAFDLRLQGLSFWAITRTLNDEGHLSLNQYTPKQKGWSDTAVKKLLRNRAVIGCFTPAGREEVQGYYPAIISESLFYRVQQLNTGQYGRASVSSNPLSVNLFRGIIKCSECGATIVLGGYALKRFGMYRCPNRSANRCSAKAISRKQTDATILYMLALCDRFETENTDTIDSLKLQREDLQRKISKMAELAIELDDMTIITEKLRDMKNALSKLNHDIEEETKRIKAITTGSLKDIDRTTKEGMIETQLLIKGVLKEIVIDAAKRRCKVTFHNGRAITLPITENPSEDVTEAIQSLSEVTERGLLDVDTFQL

SEQ ID NO: 20667 - DNA, 50 bp, Escherichia coli; identical to SEQ ID NO: 12182
  source 1..50: mol_type = genomic DNA

SEQ ID NO: 20668 - DNA, 40 bp, Escherichia coli; identical to SEQ ID NO: 5293
  source 1..40: mol_type = genomic DNA

SEQ ID NO: 20669 - DNA, 40 bp, Escherichia coli; identical to SEQ ID NO: 20584
  source 1..40: mol_type = genomic DNA

SEQ ID NO: 20670 - DNA, 50 bp, Escherichia coli; identical to SEQ ID NO: 20585
  source 1..50: mol_type = genomic DNA

SEQ ID NO: 20671 - protein, 509 aa, Escherichia coli
MRRAISYIRFSSERQLKGDSVRRQSKLVTDWLDKNPEFYLDSSLSFKDLGKSAFSGKHLKGGLGDFLTAIEKGLVKAGDTLLIESLDRLSRQDIDIASELLRRILRAGVDVVTLSDGEHYTKESLKDPLSLIKSILIMQRAHEESLRKSERVQAAWNRKKELISEGIKISRRCPAWLKLNDDRRTFTIIPDKVEVVKRAFDLRLQGLSFWAITRTLNDEGHLSLNQYTPKQKGWSDTAVKKLLRNRAVIGCFTPAGREEVQGYYPAIISESLFYRVQQLNTGQYGRASVSSNPLSVNLFRGIIKCSECGATIVLGGYALKRFGMYRCPNRSANRCSAKAISRKQTDATILYMLALCDRFETENTDIIDSLKLQREDLQRKISKMAELAIELDDMTIITEKLRDMKNALSKLNHDIEEETKRIKAITTGSLKDIDRTTKEGMIETQLLIKGVLKEIVIDAAKRRCKVTFHNGKSITLPITENPSEDVTEAIQSLSEVTERGLIDVDEVII

SEQ ID NO: 20672 - DNA, 50 bp, Escherichia coli; identical to SEQ ID NO: 12182
  source 1..50: mol_type = genomic DNA

SEQ ID NO: 20673 - DNA, 40 bp, Escherichia coli; identical to SEQ ID NO: 5293
  source 1..40: mol_type = genomic DNA

SEQ ID NO: 20674 - DNA, 40 bp, Escherichia coli; identical to SEQ ID NO: 20584
  source 1..40: mol_type = genomic DNA

SEQ ID NO: 20675 - DNA, 50 bp, Escherichia coli; identical to SEQ ID NO: 20585
  source 1..50: mol_type = genomic DNA

SEQ ID NO: 20676 - protein, 509 aa, Escherichia coli
MRRAISYIRFSSERQLKGDSVRRQSKLVTDWLDKNPEFYLDSSLSFKDLGKSAFSGKHLKGGLGDFLTAIEKGLVKAGDTLLIESLDRLSRQDIDIASELLRRILRAGVDVVTLSDGEHYTKESLKDPLSLIKSILIMQRAHEESLRKSERVQAAWNRKKELISEGIKISKRCPAWLRLNDDRRTFTIIPDKVEVVKRAFDLRLQGLSFWAITRTLNDEGHLSLNQYTPKQKGWSDTAVKKLLRNRAVIGCFTPAGREEVQGYYPAIISESLFYRVQQLNTGQYGRASVSSNPLSVNLFRGIIKCSECGATIVLGGYALKRFGMYRCPNRSANRCSAKAISRKQTDATILYMLALCDRFETENTDIIDSLKLQREDLQRKISKMAELAIELDDMTIITEKLRDMKNALSKLNHDIEEETKRIKAITTGSLKDIDRTTKEGMIETQLLIKGVLKEIVIDAAKRRCKVTFHNGRAITLPITEDPSEDVTEAIQSLSEVTERGLIDVDEVII

SEQ ID NO: 20677 - DNA, 50 bp, Escherichia coli; identical to SEQ ID NO: 12182
  source 1..50: mol_type = genomic DNA

SEQ ID NO: 20678 - DNA, 40 bp, Escherichia coli; identical to SEQ ID NO: 5293
  source 1..40: mol_type = genomic DNA

SEQ ID NO: 20679 - DNA, 40 bp, Escherichia coli; identical to SEQ ID NO: 20584
  source 1..40: mol_type = genomic DNA

SEQ ID NO: 20680 - DNA, 50 bp, Escherichia coli; identical to SEQ ID NO: 20585
  source 1..50: mol_type = genomic DNA

SEQ ID NO: 20681 - protein, 509 aa, Escherichia coli
MRRAISYIRFSSERQLKGDSVRRQSKLVTDWLDKNPEFYLDSSLSFKDLGKSAFSGKHLKGGLGDFLTAIEKGLVKAGDTLLIESLDRLSRQDIDIASELLRRILRAGVDVVTLSDGEHYTKESLKDPLSLIKSILIMQRAHEESLRKSERVQAAWNRKKELISEGIKISRRCPAWLKLNDDRRTFTIIPDKVEVVKRAFDLRLQGLSFWAITRTLNDEGHLSLNQYTPKQKGWSDTAVKKLLRNRAVIGCFTPAGREEVQGYYPAIISESLFYRVQQLNTGQYGRASVSSNPLSVNLFRGIIKCSECGATIVLGGYALKRFGMYRCPNRSANRCSAKAISRKQTDATILYMLALCDRFETENTDTIDSLKLQREDLQRKISKMAELAIELDDMTIITEKLRDMKNALSKLNHDIEEETKRIKAITTGSLKDIDRTTKEGMIETQLLIKGVLKEIVIDAAKRRCKVTFHNGRIIDLPITENPSEDVTEAIQSLSEVTERGLIDVDEVII

SEQ ID NO: 20682 - DNA, 50 bp, Escherichia coli; identical to SEQ ID NO: 12182
  source 1..50: mol_type = genomic DNA

SEQ ID NO: 20683 - DNA, 40 bp, Escherichia coli; identical to SEQ ID NO: 5293
  source 1..40: mol_type = genomic DNA

SEQ ID NO: 20684 - DNA, 40 bp, Escherichia coli; identical to SEQ ID NO: 20584
  source 1..40: mol_type = genomic DNA

SEQ ID NO: 20685 - DNA, 50 bp, Escherichia coli; identical to SEQ ID NO: 20585
  source 1..50: mol_type = genomic DNA

SEQ ID NO: 20686 - protein, 509 aa, Escherichia coli
MRRAISYIRFSSERQLKGDSVRRQSKLVTDWLDKNPEFYLDSSLSFKDLGKSAFSGKHLKGGLGDFLTAIEKGLVKAGDTLLIESLDRLSRQDIDIASELLRRILRAGVDVVTLSDGEHYTKESLKDPLSLIKSILIMQRAHEESLRKSERVQAAWNRKKELISEGIKISKRCPAWLRLNDDRRTFTIIPDKVEVVKRAFDLRLQGLSFWAITRTLNDEGHLSLNQYTPKQKGWSDTAVKKLLRNRAVIGCFTPAGREEVQGYYPAIISESLFYRVQQLNTGQYGRASVSSNPLSVNLFRGIIKCSECGATIVLGGYALKRFGMYRCPNRSANRCSAKAISRKQTDATILYMLALCDRFETENTDIIDSLKLQREDLQRKISKMAELAIELDDMTIITEKLRDMKNALSKLNHDIEEETKRIKAITTGSLKDIDRTTKEGMIETQLLIKGVLKEIVIDAAKRRCKVTFHNGRAITLPITENPSKDVTEAIQSLSEVTERGLIDVDEVII

SEQ ID NO: 20687 - DNA, 50 bp, Escherichia coli; identical to SEQ ID NO: 12182
  source 1..50: mol_type = genomic DNA

SEQ ID NO: 20688 - DNA, 40 bp, Escherichia coli; identical to SEQ ID NO: 5293
  source 1..40: mol_type = genomic DNA

SEQ ID NO: 20689 - DNA, 40 bp, Escherichia coli; identical to SEQ ID NO: 20584
  source 1..40: mol_type = genomic DNA

SEQ ID NO: 20690 - DNA, 50 bp, Escherichia coli; identical to SEQ ID NO: 20585
  source 1..50: mol_type = genomic DNA

SEQ ID NO: 20691 - protein, 509 aa, Escherichia coli
MRRAISYIRFSSERQLKGDSVRRQSKLVTDWLDKNPEFYLDSSLSFKDLGKSAFSGKHLKGGLGDFLTAIEKGLVKAGDTLLIESLDRLSRQDIDIASELLRRILRAGVDIVTLSDGEHYTRESLKDPLSLIKSILIMQRAHEESLRKSERVQAAWNRKKELISEGIKVSRRCPAWLRLNDDRRTFTIIPDKVEVVKRAFDLRLQGLSFWAITRTLNDEGHLSLNQYTPKQKGWSDTAVKKLLRNRAVIGCFTPAGREEVQGYYPAIISESLFYRVQQLNTGQYGRASVSSNPLSVNLFRGIIKCSECGATIVLGGYALKRFGMYRCPNRSANRCSAKAISRKQTDTTILYMLALCDRFETENTDTIDSLKLQREDLQRKISKMAELAIELDDMTVITEKLRDMKNALSKLNHDIEEETKRIKAITTGSLKDIDRTTKEGMIETQLLIKGVLKEIVIDAAKRRCKVTFHNGKVIDLPITENPSEDVTEAIQSLSEVTERGLIDVDVVAI

SEQ ID NO: 20692 - DNA, 50 bp, Escherichia coli; identical to SEQ ID NO: 13162
  source 1..50: mol_type = genomic DNA

SEQ ID NO: 20693 - DNA, 40 bp, Escherichia coli; identical to SEQ ID NO: 5293
  source 1..40: mol_type = genomic DNA

SEQ ID NO: 20694 - DNA, 40 bp, Escherichia coli; identical to SEQ ID NO: 20584
  source 1..40: mol_type = genomic DNA

SEQ ID NO: 20695 - DNA, 50 bp, Escherichia coli; identical to SEQ ID NO: 20585
  source 1..50: mol_type = genomic DNA

SEQ ID NO: 20696 - protein, 509 aa, Escherichia coli
MRRAISYIRFSSERQLKGDSVRRQSKLVTDWLDKNPEFYLDSSLSFKDLGKSAFSGKHLKGGLGDFLTAIEKGLVKAGDTLLIESLDRLSRQDIDIASELLRRILRAGVDVVTLSDGEHYTRESLKDPLSLIKSILIMQRAHEESLRKSERVQAAWNRKKELISEGIKVSRRCPAWLRLNDDRRTFTIIPDKVEVVKRAFDLRLQGLSFWAITRTLNDEGHLSLNQYTPKQKGWSDTAVKKLLRNRAVIGCFTPAGREEVQGYYPAIISESLFYRVQQLNTGQYGRASVSSNPLSVNLFRGIIKCSECGATIVLGGYALKRFGMYRCPNRSANRCSAKAISRKQTDATILYMLALCDRFETENTDTIDSLKLQREDLQRKISKMAELAIELDDMTIITEKLRDMKNALSKLNHDIEEETQRIKAITTGSLKDIDRTTKEGMVETQLLIKGVLKEIVIDAAKRRCKVTFHNGKVIDLPITENPSEDVTEAIQSLSEVTERGLIDVDEVII

SEQ ID NO: 20697 - DNA, 50 bp, Escherichia coli; identical to SEQ ID NO: 12182
  source 1..50: mol_type = genomic DNA

SEQ ID NO: 20698 - DNA, 40 bp, Escherichia coli; identical to SEQ ID NO: 5293
  source 1..40: mol_type = genomic DNA

SEQ ID NO: 20699 - DNA, 40 bp, Escherichia coli; identical to SEQ ID NO: 20584
  source 1..40: mol_type = genomic DNA

SEQ ID NO: 20700 - DNA, 50 bp, Escherichia coli; identical to SEQ ID NO: 20585
  source 1..50: mol_type = genomic DNA

SEQ ID NO: 20701 - protein, 509 aa, Escherichia coli
MRRAISYIRFSSERQLKGDSVRRQSKLVTDWLDKNPEFYLDSSLSFKDLGKSAFSGKHLKGGLGDFLTAIEKGLVKAGDTLLIESLDRLSRQDIDIASELLRRILRAGVDVVTLSDGEHYTKESLKDPLSLIKSILIMQRAHEESLRKSERVQAAWNRKKELISEGIKISRRCPAWLKLNDDRRTFTIIPDKVEVVKRAFDLRLQGLSFWAITRTLNDEGHLSLNQYTPKQKGWSDTAVKKLLRNRAVIGCFTPAGREEVQGYYPAIISESLFYRVQQLNTGQYGRASVSSNPLSVNLFRGIIKCSECGATIVLGGYALKRFGMYRCPNRSANRCSAKAISRKQTDATILYMLALCDRFETENTDTIDSLKLQREDLQRKISKMAELAIELDDMTIITEKLRDMKNALSKLNHDIEEETKRIKAITTGSLKDIDRTTKEGMIETQLLIKGVLKEIVIDAAKRRCKVTFHNGKVIDLPITENPSEDVTEAIQSLSEVIERGLIDADVVEI

SEQ ID NO: 20702 - DNA, 50 bp, Escherichia coli; identical to SEQ ID NO: 12182
  source 1..50: mol_type = genomic DNA

SEQ ID NO: 20703 - DNA, 40 bp, Escherichia coli; identical to SEQ ID NO: 5293
  source 1..40: mol_type = genomic DNA

SEQ ID NO: 20704 - DNA, 40 bp, Escherichia coli; identical to SEQ ID NO: 20584
  source 1..40: mol_type = genomic DNA

SEQ ID NO: 20705 - DNA, 50 bp, Escherichia coli; identical to SEQ ID NO: 20585
  source 1..50: mol_type = genomic DNA

SEQ ID NO: 20706 - protein, 446 aa, Escherichia coli
MRRGISYIRFSSERQLKGDSVRRQSKLVTDWLDKNPEFYLDSSLSFKDLGKSAFSGKHLKGGLGDFLTAIEKGLVKAGDTLLIESLDRLSRQDIDIASELLRRILRAGVDVVTLSDGEHYTKESLKDPQSLIKSILIMQRAHEESLRKSERVQAAWNRKKELISEGIKISRRCPAWLKLNDDRRTFTIIPDKVEVVKRAFDLRLQGLSFWAITRTLNDEGHLSLNQYTPKQKGWSDTAVKKLLRNRAVIGCFTPAGREEVQGYYPAIISESLFYRVQQLNTGQYGRASVSSNPLSVNLFRGIIKCSECGATIVLGGYALKRFGMYRCPNRSANRCSAKAISRKQTDATILYMLALCDRFETENTDTIDSLKLQREDLQRKISKMAELAIELDDMTIITEKLRDMKNALSKLNHDIEEETKRIKAITTGSLKDIDRTTKEGMVETQS

SEQ ID NO: 20707 - DNA, 50 bp, Escherichia coli; identical to SEQ ID NO: 12182
  source 1..50: mol_type = genomic DNA

SEQ ID NO: 20708 - DNA, 40 bp, Escherichia coli; identical to SEQ ID NO: 5293
  source 1..40: mol_type = genomic DNA

SEQ ID NO: 20709 - DNA, 40 bp, Escherichia coli; identical to SEQ ID NO: 20584
  source 1..40: mol_type = genomic DNA

SEQ ID NO: 20710 - DNA, 50 bp, Escherichia coli; identical to SEQ ID NO: 20585
  source 1..50: mol_type = genomic DNA

SEQ ID NO: 20711 - protein, 509 aa, Escherichia coli
MRRAISYIRFSSERQLKGDSVRRQSKLVTDWLDKNPEFYLDSSLSFKDLGKSAFSGKHLKGGLGDFLTAIEKGLVKAGDTLLIESLDRLSRQDIDIASELLRRILRAGVDVVTLSDGEHYTRESLKDPLSLIKSILIMQRAHEESLRKSERVQAAWNRKKELISEGIKVSRRCPAWLRLNDDRRTFTIIPDKVEVVKRAFDLRLQGLSFWAITRTLNDEGHLSLNQYTPKQKGWSDTAVKKLLRNRAVIGCFTPAGREEVQGYYPAIISESLFYRVQQLNTGQYGRASVSSNPLSVNLFRGIIKCSECGATIVLGGYALKRFGMYRCPNRSANRCSAKAISRKQTDATILYMLALCDRFETENTDIIDSFKLQREDLQRKISKMAELAIELDDMTIITEKLRDMKNALSKLNHDIEEETKRIKAITTGSLKDIDRTTKEGMIETQLLIKGVLKEIVIDAAKRRCKVTFHNGKAITLPITENPSEDVTEAIQSLSEVTERGLIDVDEVII

SEQ ID NO: 20712 - DNA, 50 bp, Escherichia coli; identical to SEQ ID NO: 12182
  source 1..50: mol_type = genomic DNA

SEQ ID NO: 20713 - DNA, 40 bp, Escherichia coli; identical to SEQ ID NO: 5293
  source 1..40: mol_type = genomic DNA

SEQ ID NO: 20714 - DNA, 40 bp, Escherichia coli; identical to SEQ ID NO: 20584
  source 1..40: mol_type = genomic DNA

SEQ ID NO: 20715 - DNA, 50 bp, Escherichia coli; identical to SEQ ID NO: 20585
  source 1..50: mol_type = genomic DNA

SEQ ID NO: 20716 - protein, 509 aa, Escherichia coli
MRRGISYIRFSSERQLKGDSVRRQSKLVTDWLDKNPEFYLDSSLSFKDLGKSAFSGKHLKGGLGDFLTAIEKGLVKAGDTLLIESLDRLSRQDIDIASELLRRILRAGVDVVTLSDGEHYTKESLRDPLSLIKSILIMQRAHEESLRKSERVQAAWNRKKELISEGIKISRRCPAWLKLNDDRRTFTIIPDKVEVVKRAFDLRLQGLSFWAITRTLNDEGHLSLNQYTPKQKGWSDTAVKKLLRNRAVIGCFTPAGREEVQGYYPAIISESLFYRVQQLNTGQYGRASVSSNPLSVNLFRGIIKCSECGATIVLGGYALKRFGMYRCPNRSANRCSAKAISRKQTDATILYMLALCDRFETENTDTIDSLKLQREDLQRKISKMAELAIELDDMTIITEKLRDMKNALSKLNHDIEEETKRIKAITTGSLKDIDRTTKEGMVETQLLIKGVLKEIVIDAAKRRCKVTFHNGKVIDLPITENPSEDVTEAIQSLSEVTERGLIDVDEVII

SEQ ID NO: 20717 - DNA, 50 bp, Escherichia coli; identical to SEQ ID NO: 12182
  source 1..50: mol_type = genomic DNA

SEQ ID NO: 20718 - DNA, 40 bp, Escherichia coli; identical to SEQ ID NO: 5293
  source 1..40: mol_type = genomic DNA

SEQ ID NO: 20719 - DNA, 40 bp, Escherichia coli; identical to SEQ ID NO: 20584
  source 1..40: mol_type = genomic DNA

SEQ ID NO: 20720 - DNA, 50 bp, Escherichia coli; identical to SEQ ID NO: 20585
  source 1..50: mol_type = genomic DNA

SEQ ID NO: 20721 - protein, 509 aa, Escherichia coli
MRRAISYIRFSSERQLKGDSVRRQSKLVTDWLDKNPEFYLDSSLSFKDLGKSAFSGKHLKGGLGDFLTAIEKGLVKAGDTLLIESLDRLSRQDIDIASELLRRILRAGVDIVTLSDGEHYTGESLKDPLSLIKSILIMQRAHEESLRKSERVQAAWNRKKELISEGIKVSRRCPAWLRQNDDRRTFTIIPDKVEVVKRAFDLRLQGLSFWAITRTLNDEGHLSLNQYTPKQKGWSDTAVKKLLRNRAVIGCFTPAGREEVQGYYPAIISESLFYRVQQLNTGQYGRASVSSNPLSVNLFRGIIKCSECGATIVLGGYALKRFGMYRCPNRSANRCSAKAISRKQTDTTILYMLALCDRFETENTDTIDSLKLQREDLQRKISKMAELAIELDDMTIITEKLRDMKNALSKLNHDIEEETKRIKAITTGSLKDIDRTTKEGMIETQLLIKGVLKEIVIDAAKRRCKVTFHNGKVIDLPITENPSEDVTEAIQSLSEVTERGLIDVDVVAI

SEQ ID NO: 20722 - DNA, 50 bp, Escherichia coli; identical to SEQ ID NO: 13162
  source 1..50: mol_type = genomic DNA

SEQ ID NO: 20723 - DNA, 40 bp, Escherichia coli; identical to SEQ ID NO: 5293
  source 1..40: mol_type = genomic DNA

SEQ ID NO: 20724 - DNA, 40 bp, Escherichia coli; identical to SEQ ID NO: 20584
  source 1..40: mol_type = genomic DNA

SEQ ID NO: 20725 - DNA, 50 bp, Escherichia coli; identical to SEQ ID NO: 20585
  source 1..50: mol_type = genomic DNA

SEQ ID NO: 20726 - protein, 509 aa, Escherichia coli
MRRAISYIRFSSERQLKGDSVRRQSKLVTDWLDKNPEVYLDSSLSFKDLGKSAFSGKHLKGGLGDFLTAIEKGLVKAGDTLLIESLDRLSRQDIDIASELLRRILRAGVDIVTLSDGEHYTRESLKDPLSLIKSILIMQRAHEESLRKSERVQAAWNRKKELISEGIKVSRRCPAWLRLNDDRRTFTIIPDKVEVVKRAFDLRLQGLSFWAITRTLNDEGHLSLNQYTPKQKGWSDTAVKKLLRNRAVIGCFTPAGREEVQGYYPAIISESLFYRVQQLNTGQYGRASVSSNPLSVNLFRGIIKCSECGATIVLGGYALKRFGMYRCPNRSANRCSAKAISRKQTDTTILYMLALCDRFETENTDTIDSLKLQREDLQRKISKMAELAIELDDMTIITEKLRDMKNALSKLNHDIEEETKRIKAITTGSLKDIDRTTKEGMIETQLLIKGVLKEIVIDAAKRRCKVTFHNGKVIDLPITENPSEDVTEAIQSLSEVTERGLIDVDVVAI

SEQ ID NO: 20727 - DNA, 50 bp, Escherichia coli; identical to SEQ ID NO: 13162
  source 1..50: mol_type = genomic DNA

SEQ ID NO: 20728 - DNA, 40 bp, Escherichia coli; identical to SEQ ID NO: 5293
  source 1..40: mol_type = genomic DNA

SEQ ID NO: 20729 - DNA, 40 bp, Escherichia coli; identical to SEQ ID NO: 20584
  source 1..40: mol_type = genomic DNA

SEQ ID NO: 20730 - DNA, 50 bp, Escherichia coli; identical to SEQ ID NO: 20585
  source 1..50: mol_type = genomic DNA

SEQ ID NO: 20731 - protein, 510 aa, Vibrio fluvialis
MAYSYLRYSTRTQELGNSFERQLNAAKAYCDRNSLTLSEQNYEDLGRSAYRNKRRPALDEMLKHIKSGVIPRGSHILLESTDRLSRRGFKHALDLLHEIVGLGCVIAVIDKSEVFTKDNIDQFNHALGFMLEADRSHQESVRKSNLIRAAKGQIRKDRKIKGRTPFWIDVKGDEVVFNEHVETIKRIIELRVQGYSSQRIAATMNKEGYKTKSGRAITASTVLTNYRNRAVYGAKEWFETQPDGSLKSIEITSGLFPPICDRATYERINEKKHATQTTSTRTSKYSGLMKCSACGSALTVRNVKRSKDGSVYKYRRCIGSLEGRCDVKSNFKSVDEVLDRALRDMVYRRSTSIDDKVPEQQNAVKELELRISDLSEATKHVRNPVALGMLYDDIQNEKDKLTEAREVLRLLESVPSVDTCEYASLLDSGLTNQEINEQLKQTIEKIELRNSVTASGKPTCRNTIYKIIFVDGNKRTFIASHAAQGGKFELNLFSDTKKLRDYLRENSTDE

SEQ ID NO: 20732 - DNA, 50 bp, Vibrio fluvialis
  source 1..50: mol_type = genomic DNA
gtttgtcattttaaacaaaatactaatgtaatatgtttgaaaagcaaaac

SEQ ID NO: 20733 - DNA, 40 bp, Vibrio fluvialis
  source 1..40: mol_type = genomic DNA
ggagggctatggtattacaaatgtgctgcaaggcacaaaa

SEQ ID NO: 20734 - DNA, 40 bp, Vibrio fluvialis
  source 1..40: mol_type = genomic DNA
ggagggctatggtattacatctgtgctgcaaggcacaaaa

SEQ ID NO: 20735 - DNA, 50 bp, Vibrio fluvialis
  source 1..50: mol_type = genomic DNA
ttttggcattcatgacaaaatatttctggaaaaatccactgaagcagaac

SEQ ID NO: 20736 - protein, 532 aa, Butyricicoccus pullicaecorum
MEKNKRVYCLYRVSTKGQVEKDDIPMQKQYCREFAESQGWTIIKEFAEKGVSGFKVAAADRDAIQEIRQDAEERKFDILLVFMFDRLGRRDDETPFVVEWFIRNGIEVWSAMEGQQKMDDHIDKLLNYIRYWQASGESLKTSARTKTRLSQIVQEGRFRGGIVPYGYRLEKQGRFNKKNHEVNEILIDPDEAAVVRIIFEKYVYEGFGAQRLSRWLYNNGYLNRKGTNFANTTIIKMLKNIMYVGILRSGETRSEIFPELQIVPLDLYERAQELMEARTMHHNEVPFNSKGKALLSGMVYCAHCGSKLVLTTSSGRRAKGEPKRETRIRYACHYKIRHPQDCDGQTGYSGEKLDGIIDKIVIQLFERVKTAPRSQLIQKQREKELQLANSSVANLEKLHAAAERELESYKKEIIKTINGTGSFGADILGEMIEDTRSKLAALAQELEQAKEKAADLKSSAVAVQKEYDEIMSWADLYAGSSIEGKKMILRQLIERVNIGKNFEIEVEFKISVTQFFDFLYPEGDKSVYYRAS

SEQ ID NO: 20737 - DNA, 50 bp, Butyricicoccus pullicaecorum
  source 1..50: mol_type = genomic DNA
tggcagaaaaccgaaccctttgctctcgcaaggtggtaagttttctgccc

SEQ ID NO: 20738 - DNA, 40 bp, Butyricicoccus pullicaecorum
  source 1..40: mol_type = genomic DNA
cggatgcgaaccgaacgctctcccaactgagctacaggcc

SEQ ID NO: 20739 - DNA, 40 bp, Butyricicoccus pullicaecorum
  source 1..40: mol_type = genomic DNA
cggatgcgaaccgaacgctgacccaactgagctacaggcc

SEQ ID NO: 20740 - DNA, 50 bp, Butyricicoccus pullicaecorum
  source 1..50: mol_type = genomic DNA
tggcagaactgcgctccctttgaagactctagggggaatcctttcttgcc

SEQ ID NO: 20741 - protein, 532 aa, Pseudomonas fragi
MTVKNPLPRAFSDVFRDDETINVYSYIRFSSKAQKLGFSEVRQLEQLNRFFEQYPQARQIEKYEDLGVSAFRGKNLKSGQLAKFVERIKAKEILPNALLLVESFDRISRMGGYDALELIISIIQADCSIYTLFDNRLYSKRKKDSSVDISLIQNILERANDESRNKSDRITDAKARNIEKGVNGGIITKRCPFWIDYIDGKFVLNENAKAVKRAAELCYEMGFQSIAKELNKENHPKKYTDSIVGKVLHKHAIYGSFLSLKLDEDGNRTILNKEIKDYYPAVISESEFHRISAKLKERQDPKLAGRKAADFRNVLRGLVFCACGSTFRFQAQKSQYVDLVCHLSTSGQCDYAKKKMGVRHRYARIEEIFFNYQDKIPFSLITTKNEDFKALEKEHNEILGQIILKEKALENTFSILEKTSDSAQKYITVKIDELSSDLDRLKSEERKVSLKISSMDLSRASEINTIEIFRLLISARGRMKINNFLHSQSIKIIITPARKKYYSVDIYHADKHIDTINVTPDGYTSENKAHLK

SEQ ID NO: 20742 - DNA, 50 bp, Pseudomonas fragi
  source 1..50: mol_type = genomic DNA
attctacaaatccaaccagtcattgcaatcaatggggctttttgtataaa

SEQ ID NO: 20743 - DNA, 40 bp, Pseudomonas fragi
  source 1..40: mol_type = genomic DNA
aatccgtacaccgatgaacgcagtgatcggtttgcttgaa

SEQ ID NO: 20744 - DNA, 40 bp, Pseudomonas fragi
  source 1..40: mol_type = genomic DNA
aatccgtacaccgatgaacgaagtgatcggtttgcttgaa

SEQ ID NO: 20745 - DNA, 50 bp, Pseudomonas fragi; identical to SEQ ID NO: 4320
  source 1..50: mol_type = genomic DNA

SEQ ID NO: 20746 - protein, 515 aa, Paenibacillus amylolyticus
MRYEDTAIYVRVSTTKESQKFSPEHQRMDCEEKARQLSLKVREEYIYVDRDSGTSIVGRPSIQTLIEDAGKGYFKTILFSSLSRFSRDTYDSLGLKRTLVDKLGLRVVSLDENYDSQVDHDEFKFQIFSAVNQKLSEQISISSRRGIRQSGMKGNYLGTIAPLGYDKIKVDDRKTIIPNERARIVQLIFDMYVNQKMGEKAITKYLNKEKVPSYRGGKWGVTSVERILTNEIYTGKNIFNKFTVVKVYNDINNISDKSRKLVKRDKELWEESGKQTHEAIVSEELFRKAQEIRLERGGGKRGGVRNKVNVFAGIIKCKHCGSSLNIVTSNGKKNSYRYLLCSKRRRQGETGCENHNRIPYDDFKDALIERLSEKLRSKTKSGKTVTFTKKAKEDTGKLIVKYEKQIQNTRKLLFEIRKQKLNDEIDDEQYEFEKEQYEQEIKQKQEQLSKMKSELERALNDSEQFKEINISLDELSDLGQFTEVDQVNLILKKLVSNITVDKANNVEIHSVLGRL

SEQ ID NO: 20747 - DNA, 50 bp, Paenibacillus amylolyticus
  source 1..50: mol_type = genomic DNA
ttgtgtatttcaaaccacatctcgaatgtgatgtgatttgaaatttataa

SEQ ID NO: 20748 - DNA, 40 bp, Paenibacillus amylolyticus
  source 1..40: mol_type = genomic DNA
ggtgcgtaaccatatttcgaatgtgatgcagaaactcaat

SEQ ID NO: 20749 - DNA, 40 bp, Paenibacillus amylolyticus; identical to SEQ ID NO: 20748
  source 1..40: mol_type = genomic DNA

SEQ ID NO: 20750 - DNA, 50 bp, Paenibacillus amylolyticus
  source 1..50: mol_type = genomic DNA
ttgtgtaataaatacaacatggcaaatgtgatgggatgttgctttcataa

SEQ ID NO: 20751 - protein, 457 aa, Enterocloster lavalensis
MIKGACYVRVSTDNQLENYSIEEQTDRLRAYCKAKDIHIVKFYTDGGYSGGNLNRPALQQMLTDIDYGIIDLVVVYKLDRLSRSQKDTLTLIEDRFLSKNVDFISINENFDTSTPFGRAMIGILSVFAQLEKDQITERFTMGRIGRAKSGYFHGGPTAPTGYDYIDGNLIVNEYEAMQVRDLYARFLKGYSVYDCWQYMQKKYTTKYGGWKSETLVRNVLKNEVYTGKVKFKGTIYHGNHPAIIPEAQFRQVQELFSSSHRSSDTFKRSPFKASTLLASLIYCGKCGARFHGEHGNYSCYSRTKGDKKYIIDPNCRNKKWKIPELDALVTDYIARLNFSDLENKTPSPQPPIDYSARLGEIDRQIGKLIDLYQVGSIPIETISKKIEILSKEKSTLEEAARQKSAPSSSLEEMITARSTFMSIIKTGTLEEKRACLTLLVDRIIIDDDDVNIILHKI

SEQ ID NO: 20752 - DNA, 50 bp, Enterocloster lavalensis
  source 1..50: mol_type = genomic DNA
gtatacagatattcaaagtccatgtgcatggagtttgaatacttgtaatt

SEQ ID NO: 20753 - DNA, 40 bp, Enterocloster lavalensis
  source 1..40: mol_type = genomic DNA
caaacaggcgctgaccatgtgcatgggcttcggctgcaac

SEQ ID NO: 20754 - DNA, 40 bp, Enterocloster lavalensis
  source 1..40: mol_type = genomic DNA
caaacaggcgctgaccatgagcatgggcttcggctgcaac

SEQ ID NO: 20755 - DNA, 50 bp, Enterocloster lavalensis
  source 1..50: mol_type = genomic DNA
gtctacagagaataagaggccatcagcctggagttactttttttttaaat

SEQ ID NO: 20756 - protein, 580 aa, Pseudomonas psychrophila
MQYETRKAYSYIRFSTPDQAKGDSYRRQTEAAKRYCQLNGLQWANTSEYLFFDKGRSAFKGKNLDDNSELSRFLSYINNGTILPGSVLIVESLDRLSRDRITEALPRFLDILKSGVDIYTSIDEKLYTQDVHDFDLLFSIIHMSRAHSESSIKGERVSKAWKQKQTEAREHKKPLGKACPYWLTFDGNAYEPIVERAEIVQRIFKLAVEGYGQGAIAKILNEYKVPVFGSDKRNKNGLWASSSTGKILVNRALLGEYQPTGLVNGIRRAIGEPVVNFYPAIISDDEFYQAQAARNTRKISKATKTTQNFNIWQGIAKCSSCNESMHLVNKGTPPKGGKYLRCYGAAKGACKSKLVPLGPSERIYMEILAKVDSLSLVQDSQSKIAKEIAVIDVRFASVKGRLAEIERQLISLDLDIPQAVVLSIAKLEREAKELTAKSAELKQQAQREKIINKKEFFSKLDMVTYEARARANYLLKTLDVTVTIGREDGCTLYAVASNDHLNFFVVQTGDAVDFIPLGEKALETIYDQGDGAGHSAIRETMKARLSEIGKALARDSVLVELLRSIKATEVSNVEQCPKQN

SEQ ID NO: 20757 - DNA, 50 bp, Pseudomonas psychrophila
  source 1..50: mol_type = genomic DNA
attggtgtattaacccacaacctaaacaggttgtggcagaatacacccat

SEQ ID NO: 20758 - DNA, 40 bp, Pseudomonas psychrophila
  source 1..40: mol_type = genomic DNA
gccgggcgggccggtaaataacacattgtggctgccggcg

SEQ ID NO: 20759 - DNA, 40 bp, Pseudomonas psychrophila
  source 1..40: mol_type = genomic DNA
gccgggcgggccggtaaatggcacattgtggctgccggcg

SEQ ID NO: 20760 - DNA, 50 bp, Pseudomonas psychrophila
  source 1..50: mol_type = genomic DNA
aatgaagtagtggcccacaatctaggccggttgtggtgcctcacgcctgt

SEQ ID NO: 20761 - protein, 502 aa, Pantoea stewartii
MIQAFSYVRFSTKSQATGTSLERQLNASKLFCSQNNLVLSSKKYNDLGISGFKNVKRPELEQMLEAIESGDIPQGSFILIEAIDRLSRKGISHTQDVLKQILSKGVKVAFVGEDAKTLAGQILDKNSLNDLSSVILVALAADLAHKESVRKSKLIKSAKAIIRQKALDGKKVRGHTMFWITWNEQKNNFKLNDKTSVVQEIVELRLKGNGPRKIAEALNLKEIPSPSGKKWNHATISSVLRSHVLYGAYQTHQHIDGKAIPDVLIQNHYPAVINYETYLQLQSDGKKQTSGKPSKANPFSGILKCSCGQGMNFSRKVNTYNGVSKEYEYHFCLASTEGRCSNKKRIRDLVPILVNIMDKLSLKTVTRKNLHQEEITRKKEKIEQLNNMLIEMDNPPMSVFQTIQRLEKELEELYKENDKPEVSQQDVQLLSSIHDAQEYNMHLKRIVQRIVVYQLDKTGKNLRIKVLKIDGHWQNFLIKSGEVVFSADTARLKKLFSGMKED

SEQ ID NO: 20762 - DNA, 50 bp, Pantoea stewartii
  source 1..50: mol_type = genomic DNA
tttttaccttatggaaacaagtcacgtaagttattaccattatgacaaaa

SEQ ID NO: 20763 - DNA, 40 bp, Pantoea stewartii
  source 1..40: mol_type = genomic DNA
aatcccggcgaaaaaatcgcggaatatattggcccccaga

SEQ ID NO: 20764 - DNA, 40 bp, Pantoea stewartii
  source 1..40: mol_type = genomic DNA
aatcccggcgaaaaaatcgaggaatatattggcccccaga

SEQ ID NO: 20765 - DNA, 50 bp, Pantoea stewartii
  source 1..50: mol_type = genomic DNA
tttttaagaattgaaatcacgtcaagtatcttatttgaaccatgacagaa

SEQ ID NO: 20766 - protein, 563 aa, Pseudomonas arcuscaelestis
MSKTIFPYVRFSSPEQMKGDSQRRQIEKIRHYAVSNGYQLNETLDLQDLGLSAYHAEHMEADAGLGRFLLAIESGLIPLDGTSYLCIEQLDRLSRQSIDQANELFKKILRANVNIITMMDSRVYTKDSLNNFMEIVYSLFLMEQAHQESAKKASRIKSVFNGRLAKLERGEKIQYAGQIPGWLKKTKVSGVFEIDETKANVVREIFTRKSNDESLKKIADDLNSRGVGRLRNKSDGSKLWTTGALSNLLKAESTYGVLIVKQTTKIKSLSGNRNEVTELGRFDSYYPAVISRELFMSAREKLREINTIKDYGRSTSKNLFSGLVYCGYCGERMYFDEDDKVLKSGRKYYRHLKCIGYLHKLCDKGKLKYDKFESVFPWSYAYDAEKGSAHTQAKISALSSERLNIEGELALNRDRLESLTAAFEASEDYDADFFLKTSSSISRKISAKQQELDSIITQISFFAGSVAEPLEFDLTNASDRDKAKIQLKRILAAIIVYPTESMGFLLFKNGNVQSIDAIARAKTDMKAFSYFARYAKDLKQKLESGSGDAKLKKIFDALRHWSD

SEQ ID NO: 20767 - DNA, 50 bp, Pseudomonas arcuscaelestis
  source 1..50: mol_type = genomic DNA
tttcccaaaagtatgcagcttagcgtgatgagtgttaccctttagggaat

SEQ ID NO: 20768 - DNA, 40 bp, Pseudomonas arcuscaelestis
  source 1..40: mol_type = genomic DNA
tgctggcgcgagattgagcgtgatgcggcgggcgggaaat

SEQ ID NO: 20769 - DNA, 40 bp, Pseudomonas arcuscaelestis
  source 1..40: mol_type = genomic DNA
tgctggcgcgagattgagcaggatgcggcgggcgggaaat

SEQ ID NO: 20770 - DNA, 50 bp, Pseudomonas arcuscaelestis; identical to SEQ ID NO: 4325
  source 1..50: mol_type = genomic DNA

SEQ ID NO: 20771 - protein, 500 aa, Bacillus subtilis
MIAIYVRVSTEEQAIKGSSIDSQIEACIKKAGTKDVLKYADEGFSGELLERPALNRLREDASKGLISQVICYDPDRLSRKLMNQLIIDDELRKRNIPLIFVNGEYANSPEGQLFFAMRGAISEFEKAKIKERTSSGRLQKMKKGMIIKDSKLYGYKFVKEKRTLEIFEEEAKIIRMIFNYFTDHKSPFFGRVNGIALHLSQMGVKTKKGAKVWHRQVVRQILMNSSYKGEHKQYKYDTEGSYVSKQAGNKSIIKIRPEEEQITVAIPAIIPAEQWDYAQELLGQSKRKHLSISPHNYLLSGLVRCGKCGNTMTGKKRKSHGKDYYVYTCRKNYSGAKDRGCGKEMSENKLNRHVWSEIFKFITNPQKYASFKEIEQSNHLSDELELILKEIEKTKKGRKRLLTLISLSDDDDLDIDEIKAQIIELQKKQNQLTEKCNEIQSKMKVLDDTSSSENALKRAVDYFQSIGADNLTLEDKKTIVNFIVKEVTVVDSDTIYIETY

SEQ ID NO: 20772 - DNA, 50 bp, Bacillus subtilis
  source 1..50: mol_type = genomic DNA
caccccccttttgtaattacaatctcattatttattacaaaaggggggtg

SEQ ID NO: 20773 - DNA, 40 bp, Bacillus subtilis
  source 1..40: mol_type = genomic DNA
gcgcaaatgcatgaggatttcattttcaatacacctcgca

SEQ ID NO: 20774 - DNA, 40 bp, Bacillus subtilis
  source 1..40: mol_type = genomic DNA
gcgcaaatgcatgaggatttaattttcaatacacctcgca

SEQ ID NO: 20775 - DNA, 50 bp, Bacillus subtilis
  source 1..50: mol_type = genomic DNA
ctcccccattcaccaattacaatctaattggtttttcactcactgggttt

SEQ ID NO: 20776 - protein, 500 aa, Bacillus subtilis
MIAIYVRVSTEEQAIKGSSIDSQIEACIKKAGTKDVLKYADEGFSGELLERPALNRLREDASKGLISQVICYDPDRLSRKLMNQLIIDDELRKRNIQLIFVNGEYANSPEGQLFFAMRGAISEFEKAKIKERTSSGRLQKMKKGMIIKDSKLYGYKFVKEKRTLEIFEEEAKIIRMIFNYFTDHKSPFFGRVNGIALHLTQMGVKTKKGAKVWHRQVVRQILMNSSYKGEHKQYKYDTEGSYVSKQAGNKSIIKIRPEEEQITVVIPAIVPAEQWEYAQELLGQSKRKHLSISPHNYLLSGLVRCGKCGNTMTGKKRKSHGKDYYVYTCRKNYSGAKDRGCGKEMSENKLNRHVWGEIFKFITNPQKYASFKEIEQSNHLSDELELIQKEIEKTKKGRKRLLTLISLSDDDDLDIDEIKAQIIELQKKQNQLTEKCNEIQSKMKVLDDTSSSENALKRAIDYFQSIGADNLTLEDKKTIVNFIVKEVTVVDSDTVYIETY

SEQ ID NO: 20777 - DNA, 50 bp, Bacillus subtilis; identical to SEQ ID NO: 20772
  source 1..50: mol_type = genomic DNA

SEQ ID NO: 20778 - DNA, 40 bp, Bacillus subtilis; identical to SEQ ID NO: 20773
  source 1..40: mol_type = genomic DNA

SEQ ID NO: 20779 - DNA, 40 bp, Bacillus subtilis; identical to SEQ ID NO: 20774
  source 1..40: mol_type = genomic DNA

SEQ ID NO: 20780 - DNA, 50 bp, Bacillus subtilis; identical to SEQ ID NO: 20775
  source 1..50: mol_type = genomic DNA

SEQ ID NO: 20781 - protein, 517 aa, Phaeobacter inhibens
MTQRNANTDQAKATVQKAVIYCRVSSIHQETEGNGLVSQETRCRQFAEQNGLHVEAVFPDTKSGGGDFMQRPGMVALLSFLDAQPDESFVVVFDDLKRFARDRDFHFRLREAFRARNAHIKCLNFNFEDTPEGEFIETIMAAQGQLERMQNARQVAQKMKARMQNGYWVHNPPIGYQYKTVRGHGKVLTACEPLASIVREGIESYASGRFQSQAEVKRFFESFPDFPRNKHGEVKQQRVTDMLTNPIYTGHICSETYGINWLKGHHDGLISVATFDKVQERREGVAKMPARKNIGDDFALRGFACCAGCGVPFRSSWSKGKSKHYAYYLCQTKSCEHYGKSIARDKMENAVGEVIKQLEPSPQLITLINAMFKQAWNARLEQAKAIQSSAKRKLQTCEKQIDALLDRLVQTSNQSVVAAYENKIAVLEHDKALLSEKATQALPGQRSYEEKLELAVKFITSPWKLWASNNIKLRRLVLKLAFADRLIYDRNKGARTPEFTLPFKALEGVMSSNLKNG

SEQ ID NO: 20782 - DNA, 50 bp, Phaeobacter inhibens
  source 1..50: mol_type = genomic DNA
ggagggtgttatgagtagtaatctgaaaactggtgcacttagtgggagcg

SEQ ID NO: 20783 - DNA, 40 bp, Phaeobacter inhibens
  source 1..40: mol_type = genomic DNA
aaggtcggtcttgaaaaaggaaaaatggtgccgctgaagg

SEQ ID NO: 20784 - DNA, 40 bp, Phaeobacter inhibens
  source 1..40: mol_type = genomic DNA
aaggtcggtcttgaaaaagtcaaaatggtgccgctgaagg

SEQ ID NO: 20785 - DNA, 50 bp, Phaeobacter inhibens
  source 1..50: mol_type = genomic DNA
gcaggttctctattgtgtgaatcttcaaactggtgttctctgtgggatca

SEQ ID NO: 20786 - protein, 470 aa, Ruminococcus gnavus; identical to SEQ ID NO: 3151

SEQ ID NO: 20787 - DNA, 50 bp, Ruminococcus gnavus; identical to SEQ ID NO: 17477
  source 1..50: mol_type = genomic DNA

SEQ ID NO: 20788 - DNA, 40 bp, Ruminococcus gnavus
  source 1..40: mol_type = genomic DNA
attttcaacctatgccgttcctatgatatcaggagaaatc

SEQ ID NO: 20789 - DNA, 40 bp, Ruminococcus gnavus
  source 1..40: mol_type = genomic DNA
attttcaacctatgccgttactatgatatcaggagaaatc

SEQ ID NO: 20790 - DNA, 50 bp, Ruminococcus gnavus
  source 1..50: mol_type = genomic DNA
aaattcttgggcatatacatactcacaagagtgaaccaggaaggaaatga

SEQ ID NO: 20791 - protein, 468 aa, Mycobacterium kansasii
MYLRQSLDRSGEALAVSRQRADCLKLCDVKGWTDIREFPDNDRSASSGVRPAYQRMLAAIRAGEVDAVVVWDLDRLHRRPIELEEFIGLADEKRLKLATVTGECDLSTDNGRLFARIKGAVARSEVERKGARQKSAAKQHADMGRAWWSVRPFGYDAEPDPVTGGWWTSRRDPITKAIVHNPIREHPTEGPLLRNAYRAVLAGTNLETIAKAWNAAGVTGPKGGTWRGANLGPLLLRARNAGLREYRGEEVADGQWPAIVSREVYEGVRAILTDPARRTRSSFGRKHLLSGIAVCGECGHGLGSGTVKTGAVNYRCKQCFKVSRNAAQLDAMVVEAVVARLSRDDAADLVADRERPDIDGLIEQRKALREQQKALGVAHGDGKLSLVAFSAADQRLMEQIDALSAQIDDAPRAEIFDGVIGSDDVDAAFAALDLGRRRAIVNALMTVTVKPTGRGKSFDRTSVDIEFR

SEQ ID NO: 20792 - DNA, 50 bp, Mycobacterium kansasii
  source 1..50: mol_type = genomic DNA
ctagttaggccctatgagctgaaccaggtcattggttggtggcttaggat

SEQ ID NO: 20793 - DNA, 40 bp, Mycobacterium kansasii
  source 1..40: mol_type = genomic DNA
gcagataggtctcctgcaccagatcctcggcgtcgtgcac

SEQ ID NO: 20794 - DNA, 40 bp, Mycobacterium kansasii
  source 1..40: mol_type = genomic DNA
gcagataggtctcctgcacaagatcctcggcgtcgtgcac

SEQ ID NO: 20795 - DNA, 50 bp, Mycobacterium kansasii
  source 1..50: mol_type = genomic DNA
ctagataggatcctggagcagaacaaggacattaggtaaaaactaaggaa

SEQ ID NO: 20796 - protein, 484 aa, Mycobacteroides chelonae
MAGQSTAQVTQAIIYARVSSDKAAGRSVEEQERECRAECERRGWPVAHVLTDNDLSASRFATKDRPEYKRLRDLLAPGDVLVTWEASRAQRDLARYVELRDLCAERGVRWSYSGRLFDLTDGDDRFATGLDALLAEKEAEQTRVRILRAHRANLAEGKPHGRVPYGYRIVRDPDTGKAVGRVVDPVRAPLVAEAARRVLDGQSLASMVRWIATKDPDPKWNEAKLRRILVNPTTAGYRTHSITEKGKRGPQVIHGEGTWEPIITREQHTDLVALFATRKSGPRGSEPRHLLSGIVTCGVCENYLWLGKGGRKKDGSHYDVYSCQNRHAARNKQALDEVITSVIEGMLSSPEALAALAAPPPDPSPSAVAELEELKRQLRGVEDQMAENKMPADVGARVATRLTERIAASEAAAAPVYTEPIVRELATAPDPVALWRSLALTQKREFIRAVMTVKIERVGRGRWHAKEAGIIITPRSKISTVTPA

SEQ ID NO: 20797 - DNA, 50 bp, Mycobacteroides chelonae
  source 1..50: mol_type = genomic DNA
catgcagggtatctagccaaataatggttatttgtcgtaaactccgcttt

SEQ ID NO: 20798 - DNA, 40 bp, Mycobacteroides chelonae
  source 1..40: mol_type = genomic DNA
gtagacggtgtcgaagaaatgtttgagggcaccggacatg

SEQ ID NO: 20799 - DNA, 40 bp, Mycobacteroides chelonae
  source 1..40: mol_type = genomic DNA
gtagacggtgtcgaagaaatttttgagggcaccggacatg

SEQ ID NO: 20800 - DNA, 50 bp, Mycobacteroides chelonae
  source 1..50: mol_type = genomic DNA
aaagcatgagaacaagcaaaataattatcatttctcaaaaactccacttt

SEQ ID NO: 20801 - protein, 484 aa, Mycobacteroides immunogenum; identical to SEQ ID NO: 20796

SEQ ID NO: 20802 - DNA, 50 bp, Mycobacteroides immunogenum; identical to SEQ ID NO: 20797
  source 1..50: mol_type = genomic DNA

SEQ ID NO: 20803 - DNA, 40 bp, Mycobacteroides immunogenum
  source 1..40: mol_type = genomic DNA
gtagacggtgtcgaaaaaatgcttgagggcgccagacatg

SEQ ID NO: 20804 - DNA, 40 bp, Mycobacteroides immunogenum
  source 1..40: mol_type = genomic DNA
gtagacggtgtcgaaaaaattcttgagggcgccagacatg

SEQ ID NO: 20805 - DNA, 50 bp, Mycobacteroides immunogenum; identical to SEQ ID NO: 20800
  source 1..50: mol_type = genomic DNA

SEQ ID NO: 20806 - protein, 503 aa, Clostridium perfringens
MKRIAIYSRKSVFIEGSISIETQINMCKEYMISKFPDATFEIFEDEGFSGGNTNRPAFQKMLKLAELKEIDIVVCYKIDRIARNTLDFLNILEIFKKNNVELVSITEGFDPNTQMGKVMLTLLASFAEMERTNIQQRVKDSMFSLAQKGNWTGGAPPLGFKVKESGGIEIDNKSLILDAFNMKFKKYKNTEIIEYIESKYNHKFVNTTLASMLRKPIYTKSSKEVSTYLKTKGYKILREENNSNSYYTYKNNNQDYAIVNNDIEGLIDPYVWISINKAMDDNSNGETNRFSEKFWLTKTLRCKYCGKTYFGQTKIVKSKYTNKDGVSKEYIGTYEYYMCRDMLKGRLKTCENTKRLKKVDLEKKIEELIYILKDRSIFEKKYYKKEVDNPAKELKELESNMKKLDKTINNLTDKIALLSNDAAMILIDKIETLVKEKKVLKDKMIKIELESLDNIDGKEEFIYENILEFNTNLSVDQKRNIAINIFKEIVYDYKTDKFEVFFN

SEQ ID NO: 20807 - DNA, 50 bp, Clostridium perfringens
  source 1..50: mol_type = genomic DNA
tttgttcaacttagaagtgtagcacttcctataatgtttattttaacaaa

SEQ ID NO: 20808 - DNA, 40 bp, Clostridium perfringens; identical to SEQ ID NO: 1448
  source 1..40: mol_type = genomic DNA

SEQ ID NO: 20809 - DNA, 40 bp, Clostridium perfringens; identical to SEQ ID NO: 1449
  source 1..40: mol_type = genomic DNA

SEQ ID NO: 20810 - DNA, 50 bp, Clostridium perfringens
  source 1..50: mol_type = genomic DNA
cttgttccaaaaagaaatttagcatagcctataataatatttatactaaa

SEQ ID NO: 20811 - protein, 503 aa, Clostridium perfringens
MKRIAIYSRKSVFIEGSISIETQINMCKEYMISKFPDATFEIFEDEGFSGGNTNRPAFQKMLKLAELKEIDIVVCYKIDRIARNTLDFLNILEIFKKNNVELVSITEGFDPNTQMGKVMLTLLASFAEMERTNIQQRVKDSMFSLAQKGNWTGGAPPLGFKVKESGGIEIDNKNLILDAFNMKFKKYKNTEIIEYIESKYNHKFVNTTLASMLRKPIYTKSSKEVSTYLKTKGYKILREENNSNSYYTYKNNNQDYAIVNNDIEGLIDPYVWISINKAMDDNSNGETNRFSEKFWLTKTLRCKYCGKTYFGQTKIVKSKYTNKDGVSKEYIGTYEYYMCRDMLKGRLKTCENTKRLKKADLEKKIEELIYILKDRSIFEKKYYKKEVDNPAKELKELESNMKKLDKTINNLTDKIALLSNDAAMILIDKIETLVKEKKVLKDKMIKIELESLDNIDGKEEFIYENILEFNTNLSVDQKRNIAINIFKEIVYDYKTDKFEVFFN

SEQ ID NO: 20812 - DNA, 50 bp, Clostridium perfringens; identical to SEQ ID NO: 20807
  source 1..50: mol_type = genomic DNA

SEQ ID NO: 20813 - DNA, 40 bp, Clostridium perfringens; identical to SEQ ID NO: 1448
  source 1..40: mol_type = genomic DNA

SEQ ID NO: 20814 - DNA, 40 bp, Clostridium perfringens; identical to SEQ ID NO: 1449
  source 1..40: mol_type = genomic DNA

SEQ ID NO: 20815 - DNA, 50 bp, Clostridium perfringens; identical to SEQ ID NO: 20810
  source 1..50: mol_type = genomic DNA

SEQ ID NO: 20816 - protein, 503 aa, Clostridium perfringens
MKRIAIYSRKSVFIEGSISIETQINMCKEYMISKFPDATFEIFEDEGFSGGNTNRPAFQKMLKLAELKEIDIVVCYKIDRIARNTLDFLNILEIFKKNNVELVSITEGFDPNTQMGKVMLTLLASFAEMERTNIQQRVKDSMFSLAQKGNWTGGAPPLGFKVKESGGIEIDNKNLILDVFNMKFKKYKNTEIIEYIESKYNHRFVNTTLASMLRKPVYAKSSKEISTYLKTKGYKILREENNSNSYYTYKNNNQDYAIVNNDIEGLIDPYVWISINKAMDDNSNGETNRFSEKFWLTKTLRCKYCGKTYFGQTKIVKSKYTNKDGVSKEYIGTYEYYMCRDMLKGRLKTCENTKRLKKADLEKKIEELIYILKDRSIFEKKYYKKEVDNPAKELKELESNMKKLDKTINNLTDKIALLSNDAAMILIDKIETLVKEKKVLKDKMIKIELESLDNIDGKEEFIYENILEFNTNLSVDQKRNIAINIFKEIVYDYKTDKFEVFFN

SEQ ID NO: 20817 - DNA, 50 bp, Clostridium perfringens; identical to SEQ ID NO: 20807
  source 1..50: mol_type = genomic DNA

SEQ ID NO: 20818 - DNA, 40 bp, Clostridium perfringens; identical to SEQ ID NO: 1448
  source 1..40: mol_type = genomic DNA

SEQ ID NO: 20819 - DNA, 40 bp, Clostridium perfringens; identical to SEQ ID NO: 1449
  source 1..40: mol_type = genomic DNA

SEQ ID NO: 20820 - DNA, 50 bp, Clostridium perfringens; identical to SEQ ID NO: 20810
  source 1..50: mol_type = genomic DNA

SEQ ID NO: 20821 - protein, 470 aa, Rhodococcus pyridinivorans
METYAVLYGRISDDRHGRSQSVPGQLDEATATATEYGWTIRETVTDVDRGASRYSLVDRPGFRSLRSILRPGDVLVTAETSRITRQLGEHAAFVEWCAERDIRWCIRGRLYNLNDAGDRAHLGYAAVSASEEVDRLRERVLRGTARRAKAGLPHSRIPWCYRRTVDLHTGRTLGIEPDPERAPIIRAIVDRTLDGESVFRIAREMNERGIPSPENSARGWTGPNLRALLIRPALAGIRRYKGEDYPGTWEPIVTIEEHDRLCAMFARTPTPSANRGPAPSSLLSAIAVCGVCGAPVDWRDARTNRSARYTCSAAAHCVSRVSGPVDALAESAMVDFFETEIGREAVQSESRGDALVEVRAELTQLQQRLEQAADEYAAGTLSIGMLTRLESRLTGRIDELQRLIELTEVPVLERFRHGGDPRTIWQALDLDSRRAIVRRCLRVEILPARAHTKIFDPTTVRITVIGGEMF

SEQ ID NO: 20822 - DNA, 50 bp, Rhodococcus pyridinivorans
  source 1..50: mol_type = genomic DNA
ctggtaggggctgcgtttcagtgccaactccagaacgcaacccctgccac

SEQ ID NO: 20823 - DNA, 40 bp, Rhodococcus pyridinivorans
  source 1..40: mol_type = genomic DNA
gcggtacggcgaccagtgccatccgaggcacaccgtgctc

SEQ ID NO: 20824 - DNA, 40 bp, Rhodococcus pyridinivorans
  source 1..40: mol_type = genomic DNA
gcggtacggcgaccagtgctctccgaggcacaccgtgctc

SEQ ID NO: 20825 - DNA, 50 bp, Rhodococcus pyridinivorans
  source 1..50: mol_type = genomic DNA
ctgatagggagaacgttttagtgttctgtatagaagatcaaacctgccac

SEQ ID NO: 20826 - protein, 487 aa, Aeromonas veronii
MTAFSYIRFSTKDQAQGDSYQRQIASSRDWCKQRGIELSGKGYADLGISAFTEKTRASLADMLEAIQLGTIKAGDWIILENLDRLSRQGIDKTQEIIKSILRHGVKIVSLQDGLELDSGSLNDLVAVIRIALSADLAHKESLKKSERVSAAKASQRELAKQGKAIGKRLPYWLERDGYSYQFNDGVDAVRLMIQLRTDGLGFHKIAMALNASEFKPRWADHWSDTTIRNILSSPALYGRYQFRDGDGVDDYYPALVSYAEFKAFQSTFTASAGGQEHHNHLFGLVRCGACGGAMSKKVSKRKVAGEWKHYKGWICTKTLSGACAQKSPMMDLDTLVIKAVKRLKVSDSKKVSREANQLDQEIDTKKARLYEITQALVSGNGSVSVLSAAASTLERELKDLLVQRKDSVSTSQSEIQTLYDLRDDPKLFNVALRRVVDRITVSHKGSSTWHVVIHQRNGHLISVAAFRKSQRSPWQYLFGNTAEIAEL

SEQ ID NO: 20827 - DNA, 50 bp, Aeromonas veronii
  source 1..50: mol_type = genomic DNA
ttttcccactaaattaagttgattgtgatatactgtttctagtggagaac

SEQ ID NO: 20828 - DNA, 40 bp, Aeromonas veronii
  source 1..40: mol_type = genomic DNA
ggcgggggccagattgactgtgatgtgtttgctcgggaac

SEQ ID NO: 20829 - DNA, 40 bp, Aeromonas veronii
  source 1..40: mol_type = genomic DNA
ggcgggggccagattgactatgatgtgtttgctcgggaac

SEQ ID NO: 20830 - DNA, 50 bp, Aeromonas veronii
  source 1..50: mol_type = genomic DNA
ttttgcaaccctcttaagttaattattttatatggtgaaaggtggggatc

SEQ ID NO: 20831 - protein, 507 aa, Citrobacter freundii
MKRVISYIRFSSEKQAKGDSLRRQSKMVTDWLKAHPEYCLDESLTFRDLGVSGFTGKHLQGGLGDFLTAIEKGLVKAGDTLLIESLDRLSRQDVDQASELLRNILRSGVDVVTLSDGEHYTKESLKDPLALIKSILIMQRAHEESLRKSERIQAAWDAKKESAKAGIKISKRCPAWLKLNDDRKSFSVIPEKVETVKRCFQLRLEGKSIWDIVRTLNAEGHQTLNQYKAGSFGQTSVQDLLKNRSVIGYFTPKGCEEISGYYPSIIPETDFYRVQQLSYSRYGRKPVSENPMAVNLFKGVIRCSECGHTLIINGFTEKRHGIYRCPCKQENRCNAKGLSRKQTDGTLLALLSRIDRFEPEQINVIDTLKLQREGILKNIEKLVELSLIIDDMTAITSKLKQLKSELSLIESDIEKENQRIKSIDTGSLSDCDLSTKAGRIEAQLIIRGVVKEAVLDTTNKRCKVVFHNGKVIDLPITENPSEAVTEAIQSLSEIASKGLLDIDEFSL

SEQ ID NO: 20832 - DNA, 50 bp, Citrobacter freundii
  source 1..50: mol_type = genomic DNA
tagtgtatttagacattgctaattctagatagacacgtttaaatacacca

SEQ ID NO: 20833 - DNA, 40 bp, Citrobacter freundii; identical to SEQ ID NO: 7518
  source 1..40: mol_type = genomic DNA

SEQ ID NO: 20834 - DNA, 40 bp, Citrobacter freundii
  source 1..40: mol_type = genomic DNA
tggagtaaaccgggtgattatggacagccgcccggtacat

SEQ ID NO: 20835 - DNA, 50 bp, Citrobacter freundii
  source 1..50: mol_type = genomic DNA
cagtgtaaacccttattgctaattatagataatccccaaagaatgaccca

SEQ ID NO: 20836 - protein, 611 aa, Vibrio parahaemolyticus
MEMKKAYSYIRYSSPQQAKGDSFRRQLSATQAYCSANGYELDEEVSVYQELGVSGFKGDQENLKRFINDCISGRIKKGSLLIVENLDRLSRQTINVALRQFLEILEYVDIYTLQDEKYYSSDVAHSDNQLLDIMTSLIVMSRAYNESATKQKRLKDKWNEKRENINSKKLTTVCPHWLTLNKDWSRFDVKQDRVRIIEKIFELCLSGRGFNQILRFLNSDLENYPTPSKKSKVWARTTVARILSDRRVIGEFQPYIGDNCNREPFGDPIPDYFPPIIDENIFLNAQISLKQRQIGAGKTNGEHFSNVFRGFLYCGTCGSKIEYVNKGTPPKSNSYLTCTNAKRGGECPQSKHFRYTPIEHMLIHLSTVNGFIPKPEQPSDIKRQLEQVEALRDAANNKLSVLLEQDFSLPIISAKVKELSCQIVDFDNQITSFQDKLNSNMQDYEYEQLYFDTVLEPDNLKKYTNRTIFHNYLTKKIKKALLFSEGRCALLFFEMTDSALHSVILDEKYNFGGVSMSDGKDAFKRLNGNGLTVVDENLWKIQKQFLDFVQSSKEISLTIEDKEIVSSCLISISKTLSKIISNYKHTKLFDLVMDELLLLESVLSKYQKKLI

SEQ ID NO: 20837 - DNA, 50 bp, Vibrio parahaemolyticus
  source 1..50: mol_type = genomic DNA
tattggtgatattgacctaacagaattttattgtgataatatcaccacaa

SEQ ID NO: 20838 - DNA, 40 bp, Vibrio parahaemolyticus
  source 1..40: mol_type = genomic DNA
agctggtggctttgacgacatcttcttgggtacaccaaac

SEQ ID NO: 20839 - DNA, 40 bp, Vibrio parahaemolyticus; identical to SEQ ID NO: 20838
  source 1..40: mol_type = genomic DNA

SEQ ID NO: 20840 - DNA, 50 bp, Vibrio parahaemolyticus
  source 1..50: mol_type = genomic DNA
taatcctgtcaataacttaacaagattttatggtgattttttccccacaa

SEQ ID NO: 20841 - protein, 549 aa, Pectobacterium carotovorum
MKKVAYCYCRVSQRTQRTENGGYGMTRQQNLLLRYIGEYTDTERLGYVLNPENVVYLNAEGVSGFSGKNIENGSVLMDFINDVENGRIKNAVLCIENIDRFSRTNPQKAAMLFLRLIDAGCNIHEAENEIVHHPSSDLNLISSGLIRSNRESLRKQKLSLKNWDRRFDETIKSQVALTARCPYWLDVNDGQYIAVEEHIRAIRFVFEKYNNGYGQASIRDELNKRGWLCNGQKWSAWSVHRSLNDIRLTGRHKSAREQYDGMMMYPVIISDIEFQTAQQRLKSKNRGQKINKRANNIFAGLLICGLCKKSYIGVRFDTKNKRRYARCIQAVDGHCSGTGFSYEALENAILEYVRNVEVKASTDNSNEIIKLEQELVYAINYRNEIQSDIDKQDIPDPSDRRILKNLQAKVSDIELQINHLKNSESIGYEIKNISDKINEDLLNVENVELRNEFNSRLRKVIQNIYITRYNNNILNIGVHYFSNAGNDTQWLLANAHDGTVYKNMFIEGKRVVCCVGDDIVEYDGYRELYLLNDQIVPKDVVIEALSKYS

SEQ ID NO: 20842 - DNA, 50 bp, Pectobacterium carotovorum
  source 1..50: mol_type = genomic DNA
tactttattttgactttgataagcatcattagtcatgctaaaataaagta

SEQ ID NO: 20843 - DNA, 40 bp, Pectobacterium carotovorum; identical to SEQ ID NO: 4958
  source 1..40: mol_type = genomic DNA

SEQ ID NO: 20844 - DNA, 40 bp, Pectobacterium carotovorum
  source 1..40: mol_type = genomic DNA
tacgctgattgagctgatgaacgtcattgcgatcgtcgcc

SEQ ID NO: 20845 - DNA, 50 bp, Pectobacterium carotovorum
  source 1..50: mol_type = genomic DNA
taattttttctctttttattaaggaacattgatcataaaagaagaaaata

SEQ ID NO: 20846 - protein, 605 aa, Escherichia coli
MKKCFIYHRVSSEFQLSRTGIQRQEDSLQAYVERTNLLADMEDPEPTIISDRGISAFKTNENNFSIGELGRWMDQVRDGMWDGSALVLESIDRFSRQNPFTVVAYLSELVSHNITIHDVSLSMLINRTNSAMLPIVTMSAQRAYEESKLKSDRIRDGWRRRRENAFNNGTIVTNKRPRWIDVKNDKYVLNDKVAIVREIFRLYKKGIGTSTIAKILNTRGEKWLFESGRLWRSESVHKILKNKRVTGVIFISETIRDYNSTDKSIDRNTYEMDLYPIAISKEEYTLVQQLLKMRRTNNGRITNIKDTGELKKSNIFNRVFRCAKCGEAMYHNVVLANRDSKKRGKFKEEYRYIRCIGERDGLCDNKALRYEVVEQFVIEHIKGMDFTKILKPNEINPEIELVRVLIEEEKAHIQEYELGIERLKKQDKKIPFDVLTELQDSRDKLRTLEERQFSFADIKVDTDYIKSVDSSVIFDQTNIAIRSMVEHELIKIIDTIKLYRMGKHYVITLKYRSVGILKHVLIVEAKKIPTLISNIVIERTGKTVEYSTPSFSLVIADGDSPRLKTSDGVPISMIDYSLLLNYVDDVDRDDIVGVWMREKFNTLTS

SEQ ID NO: 20847 - DNA, 50 bp, Escherichia coli
  source 1..50: mol_type = genomic DNA
tgtttgtttacaatagccgtcctacaaatgtatattatgctatacaaaca

SEQ ID NO: 20848 - DNA, 40 bp, Escherichia coli; identical to SEQ ID NO: 1288
  source 1..40: mol_type = genomic DNA

SEQ ID NO: 20849 - DNA, 40 bp, Escherichia coli; identical to SEQ ID NO: 1289
  source 1..40: mol_type = genomic DNA

SEQ ID NO: 20850 - DNA, 50 bp, Escherichia coli; identical to SEQ ID NO: 4340
  source 1..50: mol_type = genomic DNA

SEQ ID NO: 20851 - protein, 605 aa, Escherichia coli
MKKCFIYHIVSSEFQLSRTGIQRQEDSLQAYVERTNLLADMEDPEPTIISDRGISAFKTNENNFSIGELGRWMDQVRDGMWDGSALVLESIDRFSRQNPFTVVAYLSELVSHNITIHDVSLSMLINRTNSAMLPIVTMSAQRAYEESKLKSDRIRDGWRRRRENAFNNGTIVTNKRPRWIDVKNDKYVLNDKVAIVREIFRLYKKGIGTSTIAKILNTRGEKWLFESGRLWRSESVHKILKNKRVTGVIFISETIRDYNSTDKSIDRNTYEMDLYPIAISKEEYTLVQQLLKMRRTNNGRITNIKDTGELKKSNIFNRVFRCAKCGEAMYHNVVLANRDSKKRGKFKEEYRYIRCIGERDGLCDNKALRYEVVEQFVIEHIKGMDFTKILKPNEINPEIELVRVLIEEEKAHIQEYELGIERLKKQDKKIPFDVLTELQDSRDKLRTLEERQFSFADIKVDTDYIKSVDSSVIFDQTNIAIRSMVEHELIKIIDTIKLYRMGKHYVITLKYRSVGILKHVLIVEAKKIPTLISNIVIERTGKTVEYSTPSFSLVIADGDSRRLKTSDGVPISMIDYSLLLNYVDDVDRDDIVGVWMREKFNTLTS

SEQ ID NO: 20852 - DNA, 50 bp, Escherichia coli; identical to SEQ ID NO: 20847
  source 1..50: mol_type = genomic DNA

SEQ ID NO: 20853 - DNA, 40 bp, Escherichia coli; identical to SEQ ID NO: 1288
  source 1..40: mol_type = genomic DNA

SEQ ID NO: 20854 - DNA, 40 bp, Escherichia coli; identical to SEQ ID NO: 1289
  source 1..40: mol_type = genomic DNA

SEQ ID NO: 20855 - DNA, 50 bp, Escherichia coli; identical to SEQ ID NO: 4340
  source 1..50: mol_type = genomic DNA

SEQ ID NO: 20856 - protein, 605 aa, Escherichia coli
MKKCFIYHRVSPEFQLARTGIQRQEDSLQAYVERTNLLADMEDPEPTIISDRGISAFKTNENNFSIGELGRWMDQVRDGMWDGSALVLESIDRFSRQNPFTVVAYLSELVSHNITIHDVSLSMLINRTNSAMLPIVTMSAQRAYEESKLKSDRIRDGWRRRRENAFNNGTIVTNKRPRWIDVKNDKYVLNDKVAIVREIFRLYKKGIGTSTIAKILNTRGEKWLFESGRLWRSESVHKILKNKRVTGVIFISETIRDYNSTDKSIDRNTYEMDLYPIAISKEEYTLVQQLLKMRRTNNGRITNIKDTGELKKSNIFNRVFRCAKCGEAMYHNVVLANRDSKRRGKFKEEYRYIRCIGERDGLCDNKALRYEVVEQFVIEHIKGMDFTKILKPNEINPEIELVRVLIEEEKAHIQEYELGIERLKKQDKKIPFDVLTELQDSRDKLRTLEERQFSFADIKVDTDYIKSVDSSVIFDQTNIAIRSMVENELIKIIDTIKLYRMGKHYVITLKYRSVGILKHVLIVEAKKTPTLISNIVIERTGKTVEYSTASFSLVITDGDSPRLKTSDGVQISMIDYSLLLNYVDDVDRDDIVGVWMREKFNTLTS

SEQ ID NO: 20857 - DNA, 50 bp, Escherichia coli; identical to SEQ ID NO: 20847
  source 1..50: mol_type = genomic DNA

SEQ ID NO: 20858 - DNA, 40 bp, Escherichia coli; identical to SEQ ID NO: 1288
  source 1..40: mol_type = genomic DNA

SEQ ID NO: 20859 - DNA, 40 bp, Escherichia coli; identical to SEQ ID NO: 1289
  source 1..40: mol_type = genomic DNA

SEQ ID NO: 20860 - DNA, 50 bp, Escherichia coli; identical to SEQ ID NO: 4340
  source 1..50: mol_type = genomic DNA

SEQ ID NO: 20861 - protein, 605 aa, Escherichia coli
MKKCFIYHRVSSEFQLARTGIQRQEDSLQAYVERTNLLADMEDPEPTIISDRGISAFKTNENNFSIGELGRWMDQVRDGMWDGSALVLESIDRFSRQNPFTVVAYLSELVSHNITIHDVSLSMLINRTNSAMLPIVTMSAQRAYEESKLKSDRIRDGWRRRRENAFNNGTIVTNKRPRWIDVKNDKYVLNDKVAIVREIFRLYKKGIGTSTIAKILNTRGEKWLFESGRLWRSESVHKILKNKRVTGVIFISETIRDYNSTDKSIDRNTYEMDLYPIAISKEEYTLVQQLLKMRRTNNGRITNIKDTGELKKSNIFNRVFRCAKCGEAMYHNVVLANRDSKRRGKFKEEYRYIRCIGERDGLCDNKALRYEVVEQFVIEHIKGMDFTKILKPNEINPEIELVRVLIEEEKAHIQEYELGIERLKKQDKKIPFDVLTELQDSRDKLRTLEERQFSFADIKVDTDYIKSVDSSVIFDQTNIAIRSMVENELIKIIDTIKLYRMGKHYVITLKYRSVGILKHVLIVEAKKTPTLISNIVIERTGKTVEYSTASFSLVITDGDSPRLKTSDGVQISMIDYSLLLNYVDDVDRDDIVGVWMREKFNTLTS

SEQ ID NO: 20862 - DNA, 50 bp, Escherichia coli; identical to SEQ ID NO: 20847
  source 1..50: mol_type = genomic DNA

SEQ ID NO: 20863 - DNA, 40 bp, Escherichia coli; identical to SEQ ID NO: 1288
  source 1..40: mol_type = genomic DNA

SEQ ID NO: 20864 - DNA, 40 bp, Escherichia coli; identical to SEQ ID NO: 1289
  source 1..40: mol_type = genomic DNA

SEQ ID NO: 20865 - DNA, 50 bp, Escherichia coli; identical to SEQ ID NO: 4340
  source 1..50: mol_type = genomic DNA

SEQ ID NO: 20866 - protein, 605 aa, Escherichia coli
MKKCFIYHRVSSEFQLARTGIQRQEDSLQAYVERTNLLADMEDPEPTIISDRGISAFKTNENNFSIGELGRWMDQVRDGMWDGSALVLESIDRFSRQNPFTVVAYLSELVSHNITIHDVSLSMLINRTNSAMLPIVTMSAQRAYEESKLKSDRIRDGWRRRRENAFNNGTIVTNKRPRWIDVKNDKYVLNDKVAIVREIFRLYKKGIGTSTIAKILNTRGEKWLFESGRLWRSESVHKILKNKRVTGVIFISETIRDYNSTDKSIDRNTYEMDLYPIAISKEEYTLVQQLLKMRRTNNGRITNIKDTGELKKSNIFNRVFRCAKCGEAMYHNVVLANRDSKKRGKFKEEYRYIRCIGERDGLCDNKALRYEVVEQFVIEHIKGMDFTKILKPNEINPEIELVRVLIEEEKAHIQEYELGIERLKKQDKKIPFDVLTELQDSRDKLRTLEERQFSFADIKVDTDYIKSVDSSVIFDQTNIAIRSMVENELIKIIDTIKLYRMGKHYVITLKYRSVGILKHVLIVEAKKTPTLISNIVIERTGKTVEYSTASFSLVITDGDSPRLKTSDGVQISMIDYSLLLNYVDDVDRDDIVGVWMREKFNTLTS

SEQ ID NO: 20867 - DNA, 50 bp, Escherichia coli; identical to SEQ ID NO: 20847
  source 1..50: mol_type = genomic DNA

SEQ ID NO: 20868 - DNA, 40 bp, Escherichia coli; identical to SEQ ID NO: 1288
  source 1..40: mol_type = genomic DNA

SEQ ID NO: 20869 - DNA, 40 bp, Escherichia coli; identical to SEQ ID NO: 1289
  source 1..40: mol_type = genomic DNA

SEQ ID NO: 20870 - DNA, 50 bp, Escherichia coli; identical to SEQ ID NO: 4340
  source 1..50: mol_type = genomic DNA

SEQ ID NO: 20871 - protein, 543 aa, Pseudomonas coronafaciens
MPRKCYPYIRFSHKKQEFGTSVARQGDIHQFIEKHSLIVDTTLEDLGVSAFRGKNAKKGQLGGFIDLVEQGLIEPNSILLIENFDRLSRQKVIKSTQIFINLLNHGVDIAILDTGKIYSRDALHTSDFFLAIIEFERANAESARKSDFVSSAWTQYRAEMRATKAPKTRKTPSWIGVEGTIRTRPGEAATARFVVIEKEARKIRKIFELALSRGISETARAVNEWLEPDEPKYSLHQIQYLLKNRKVIGEHQPQKMGEDKNGDLKLAPEGGTILNYYPAIIDRTVFDEVQEQIKNRKPFAGRFSATRLNIFSGFIVCGHCNGTIRYMDKSNSEDPGKKQYLICTNSMTGKCVMPHRLTYEFNTIVWNVFRTVDKLNLSEVFQNDEAILKLNVSIKDEENSLADIEKQLTRFKNQLLEMLTSGKEISDTFNQMLIEIEKKKLLHVDNLKTLIEQKNLQVEQSEASKNFSRENILTLMNDRSDEGTRQRIKLNYHLSKLIRSIRLTWTKKPSGKRGIGDPSIGIFFTSGTYRGIQVGAAQSHLKS

SEQ ID NO: 20872 - DNA, 50 bp, Pseudomonas coronafaciens
  source 1..50: mol_type = genomic DNA
cagtgtcttattgcacaacaaagctggctttagtatgttaaaagacacta

SEQ ID NO: 20873 - DNA, 40 bp, Pseudomonas coronafaciens
  source 1..40: mol_type = genomic DNA
tagaggctgcgagcatggctgcatctattgtttcgccagg

SEQ ID NO: 20874 - DNA, 40 bp, Pseudomonas coronafaciens
  source 1..40: mol_type = genomic DNA
tagaggctgcgagcatggccacatctattgtttcgccagg

SEQ ID NO: 20875 - DNA, 50 bp, Pseudomonas coronafaciens
  source 1..50: mol_type = genomic DNA
cagtggattattatacaaccacaccagcattagtattaggcaagccagtg

SEQ ID NO: 20876 - protein, 457 aa, Clostridium perfringens
MAEVQHNVIYTRKSRGTDEELQLQTNLCLRYCKDKNYKVDEVFSEINSSNSYRTEYNKLIDYVKEHRNTRIICTTSDRLNRNLVAHLTLIEVAKKSDSFIETVNDGVVSVDTSEQRLMQQVIASVNEFQYQQTREKMAKGRAEAKKGGTWMGGCLYGYSTSNKRLTINPIQADVVKDIFEKASQGYSTKEISDYLTDKDIKNNNGNHFTPRAIRLLIKHSGYTGQQGDKTYPPIISKELYLKANQQLRSIQQNRKKSYPLSGKIRCKNCGGIMVIGAKKSQGYALICSCKTSYSTRLNKVDCENQGCKLSTVENLVISDCKGYIENRLSELYNELKEDETIIGNHKEELQGIKDEIVKLTERLEKLKKLFLMDMIDEEELREQSKETKENIAIKELELQRMESYPLSVIISEIQDKIVLLEELKVSDSIADMVKIIDHVEYYKTNAELQVNTVFKDI

SEQ ID NO: 20877 - DNA, 50 bp, Clostridium perfringens
  source 1..50: mol_type = genomic DNA
ttgtctattacagggatatatgttagacttaggtgtcaccaaatagacca

SEQ ID NO: 20878 - DNA, 40 bp, Clostridium perfringens
  source 1..40: mol_type = genomic DNA
tggtttagtttacccagatagaactcctcacactgggtta

SEQ ID NO: 20879 - DNA, 40 bp, Clostridium perfringens
  source 1..40: mol_type = genomic DNA
tggtttagtttacccagattaaactcctcacactgggtta

SEQ ID NO: 20880 - DNA, 50 bp, Clostridium perfringens
  source 1..50: mol_type = genomic DNA
ttgtctttttcttataaatatgtttaagttatttgtaaataatttgtcca

SEQ ID NO: 20881 - protein, 584 aa, Serratia fonticola
MTKRNLYSYVRWSSDRQSKGTSLERQTAKAKEFAILHNLELVELLDAGLSAYRGKNTTQGALGGFIEAVEKGAIPNDSYLFVENLDRLSRQDILTANKLFSHLLELGLTVVTGMDGKIYTRQSVTANPTDLMLSILLFSRANEESQTKQKRVYGNIAALVERHNAGLPTTIKTAGSHVWWVDASGHKHEATKPHPILWKAARKAVELFLEGYSAHAVCDYLNEHYEAPPVRFTKATNNKNDKSKFSYPLLRRMKTSRTLIGERTISAGDMVYTLDNYYPSLCSPTEFAQLQDLNENNKLTSGPKKTRITLLSGLGVLKCGHCGGAMTFMVGIGGKIRYMCANGKDRIGDCKAWSIGLDILERTLIPALIRGYMDYTIGGNAKSDDIKASIQTTQEALQAIESQIENITNAITFGGNLAPLVERLALLTKDKNTKLLEIDKLTRQSLLADDRDSAVERITDFVYQIRPNVLTDLNHPIRLQIREAVRAVIESCNVVKREDRGLIITYVIKGKSYRTMYIFQATTKGNYEDSTVDIDENDNPVIYPEGELLENRKEAETKLFKAVDAMQKEIGLPPIDGRLMWARR

SEQ ID NO: 20882 - DNA, 50 bp, Serratia fonticola
  source 1..50: mol_type = genomic DNA
ttagttttctaagttacatcaacaaaacctagtgtaaactagacaaatca

SEQ ID NO: 20883 - DNA, 40 bp, Serratia fonticola
  source 1..40: mol_type = genomic DNA
gaatgcgtggctgctgagcaaaattgatgaatacaagttc

SEQ ID NO: 20884 - DNA, 40 bp, Serratia fonticola
  source 1..40: mol_type = genomic DNA
gaatgcgtggctgctgagcgtaattgatgaatacaagttc

SEQ ID NO: 20885 - DNA, 50 bp, Serratia fonticola
  source 1..50: mol_type = genomic DNA
tcagttttttattttgtatcctcagtacctagtgtagtacagacacatat

SEQ ID NO: 20886 - protein, 539 aa, Salmonella enterica
MYATIRDGEVQMKVPVWSYARVSTLNQVDGFGIQRQVNTINQFIQYLVLDHRLPFVLDTDNITQMISEGKSAFKGKNWNPKTKLGQYRKMVMDGVVPDSVLIVENIDRLTRLDPFQAVEIISGLINRGTTILEIETGMTYSRYIPESITVLTMQINRANGESKRKSVMMKKSHQNRYGNVSKVRPRWFDVVEVDGIKQYRTNNTAKAIQRMYNDYVNGIGAAQIVRTYGDTDNGKPWTLVTVLRALSDKRVADDARYPSIIDKALYERVQAMKLSPSKGNTHQKHMLNLFAGMSRCPLCGQAIITKRNSHGGLFTVCLGKRTDKTCTARSIAYNALERPLLNAIIGLDFSEVYGQEESNVLTLRDQWIQNERDIAAFRERLTKASRHEKFAILDELEVMNREQDELTIRLKSVDAPKDITLTYDDDKLDMNVEYRIELNNRMKKLIQRIDIVREDVSKTNYKIFCSIKYWTELLTHLVIIDVDVQRIGRGGTNQLTTTLRSVSSLDLEGNIKGNPDMEALEYWQNVVSKATQKAIESLT

SEQ ID NO: 20887 - DNA, 50 bp, Salmonella enterica
  source 1..50: mol_type = genomic DNA
tacttactataccaattgggagcagttagtgtataatgtacgccacgata

SEQ ID NO: 20888 - DNA, 40 bp, Salmonella enterica
  source 1..40: mol_type = genomic DNA
ccatcagcagcatggaacagtcggtggtgccgccgccaat

SEQ ID NO: 20889 - DNA, 40 bp, Salmonella enterica
  source 1..40: mol_type = genomic DNA
ccatcagcagcatggaacatacggtggtgccgccgccaat

SEQ ID NO: 20890 - DNA, 50 bp, Salmonella enterica
  source 1..50: mol_type = genomic DNA
tccttaccctttcacctgatagcatattgtgtataataggtgccacaata

SEQ ID NO: 20891 - protein, 514 aa, Leisingera methylohalidivorans
MTSKTTQTPLRKKCIIYARVSSAKQTIDGSGLSSQERTCRDFAERNSYEVVEVFTDVMSGGAAERPGMNALLAYLRHVNTKEFVVVVDDIARFARDVSIHTALRDKIISSGAKIESPSQKFDEDAGSRFIETVMAAIAEHERLKNAEQSRRRSIARMQNGYWVLRAPFGYRYEKDPRGGKRLVKAEPVASIVKEALEGFASGRFQSQSEVKRFLEAKPEFPNNYNKRNEVNWDTVKAILTNILYAGYIKYPKWDIPLTKAQHEPLITYATHELIQVHLDERSVAPARKGISNDFPLRGFLICEACGHALTACWARSHTGKRYPYYLCQYRGCSEKGKSSPRDKVEKQFCDYLKRLVPTQTTFELAKGLFRRAWEARNSSAVSETKRLRTKARQIERDVNKLVQSLVRSESARARVAYEKRIEELEQEKALIEDEVAKTSNPRHPFEKMFELSMRFLANPYEIWENGDLATKRTVLRLVFAKPLSFNRKKGIQTGETTFPFKALRFLEGTDVSLV

SEQ ID NO: 20892 - DNA, 50 bp, Leisingera methylohalidivorans
  source 1..50: mol_type = genomic DNA
ttggaaggtacggatgttagtttggtgcacctaaagcgacaaacttcaaa

SEQ ID NO: 20893 - DNA, 40 bp, Leisingera methylohalidivorans
  source 1..40: mol_type = genomic DNA
atatttgtggtatacggtggtgccgctgaagggactcgaa

SEQ ID NO: 20894 - DNA, 40 bp, Leisingera methylohalidivorans; identical to SEQ ID NO: 20893
  source 1..40: mol_type = genomic DNA

SEQ ID NO: 20895 - DNA, 50 bp, Leisingera methylohalidivorans
  source 1..50: mol_type = genomic DNA
tagaaaggtttgtttgtttgtttggtggaagtaaattgactagcatcaaa

SEQ ID NO: 20896 - protein, 549 aa, Anaerotruncus rubiinfantis
MTNTNYPDNITALYARLSQEDALDGESNSIANQKKILLKYATDNGFSNPLFFIDDGVSGVTFDRPGWNEMIHLAECGKVKTVIVKDMSRMGRDYLKVGYYTESFFAECDIRYIAINDGVDSDKGDNDFTPFRNLFNDFYARDTSKKIRAVMRAKGNSGEHLCTNPPYGYRKDPEDKKRWIVDEEAAEVVKRIFVLCVDGKGPMQIAKLLTADKVLTVKAYYAKRDGKPMPDNLYRWDYKSVAGILERPEYMGCTVNFKTYSKSHKLKKRLDNAPENYRIFPNTQPAIIDEKVFERVQELRKNKRRPAKQAERQGLFSGLLYCADCGSKLHFATGKNMTPEQDCYRCARYKSNTGDCTMHYIREETLKLFVLRRIFDVTAMFIDNADDFRRVVQKQRFDEMEKAVKRRKKELEQAKKRIAELDRIFKRIYEDDITGAISHERFLKLSIEYEAEQKELTEFVKIEQAAVDTYEQDRADFDSFAVIIRKYVGIKELTPTIVNEFVKKIIVHAPDKSSGHRRQKIQLVWNFIGELEQDEDAQTIERHSKSRTA

SEQ ID NO: 20897 - DNA, 50 bp, Anaerotruncus rubiinfantis
  source 1..50: mol_type = genomic DNA
ttacttccttgtgggtgtgcgcctaatggcaacagctgataaggaagtat

SEQ ID NO: 20898 - DNA, 40 bp, Anaerotruncus rubiinfantis
  source 1..40: mol_type = genomic DNA
agaaacagggatgccgccaaacggcggcatccctgtttta

SEQ ID NO: 20899 - DNA, 40 bp, Anaerotruncus rubiinfantis
  source 1..40: mol_type = genomic DNA
agaaacagggatgccgccactcggcggcatccctgtttta

SEQ ID NO: 20900 - DNA, 50 bp, Anaerotruncus rubiinfantis
  source 1..50: mol_type = genomic DNA
tgacttcctgaaaatgctgcgcctcttgactccagcaataaatgaagtct

SEQ ID NO: 20901 - protein, 541 aa, Pseudomonas nitroreducens
MPKIGAKVYSYLRFSDPKQAAGHSADRQAQYAKAWAAERGLVLDESLTLRDEGLSAYHQKHIKQGALGVFLQAVDAGRIPEGSVLVVEGLDRLSRAEPILAQAQLAQIINAGISVVTASDGREYNRQSLKAQPMDLVYSLLVMIRAHEESDTKSKRVKAAIRRQCEGWVAGTYRGLIRNGADPHWLEWDGAAWQFVPARVEAVRFALDCYRQGLGAKRTLELMQEKGMDPAELKLGGQQLYRLVHLQPLRGGKRISVDDDEFILEDYYPRLLSDTEFAELSALTGQRHRRRGKGAIPGVVTGIGLTWCGYCGSAMEAQNQMSKVRPDGTLMPGHRRLACSVTAEHSECRVHGSCSVVPLERALMDYCSDQMNLQRFMEPVDQATALRARLVEARTEVQKVEQQLERVTDALLAGESEGAAPLAFVRKARELEQELQVRQASVQQLERELAGLARYQSPADAARWASLAEGVMAQDAESRERVRQMMMDTFSQIVIYLRGIRPAGRKAPFMDVLLISRSGQRRWMRLDRKSGEWAVGNDRPV

SEQ ID NO: 20902 - DNA, 50 bp, Pseudomonas nitroreducens
  source 1..50: mol_type = genomic DNA
agtttagattgactgctctatgggttccccaatgattgcgaatatatact

SEQ ID NO: 20903 - DNA, 40 bp, Pseudomonas nitroreducens
  source 1..40: mol_type = genomic DNA
gatgaggatcgccttggggttgccggcggccacccagaac

SEQ ID NO: 20904 - DNA, 40 bp, Pseudomonas nitroreducens
  source 1..40: mol_type = genomic DNA
gatgaggatcgccttgggggagccggcggccacccagaac

SEQ ID NO: 20905 - DNA, 50 bp, Pseudomonas nitroreducens
  source 1..50: mol_type = genomic DNA
acttaatatttattgctctaagtggacaccactgattgccaataaagact

SEQ ID NO: 20906 - protein, 503 aa, Clostridium perfringens
MKRIAIYSRKSVFIEGSISIETQINMCKEYMINKFPDATFEIFEDEGFSGGNTNRPAFQKMLKLAELKEIDIVVCYKIDRIARNTLDFLNILEIFKKNNVELVSITEGFDPNTQMGKVMLTLLASFAEMERTNIQQRVKDSMFSLAQKGNWTGGAPPLGFKVKESGGIEIDNKSLILDAFNMKFKKYKNTEIIEYIESKYNHKFVNTTLASMLRKPIYTKSSKEVSTYLKTKGYKILREENNSNSYYTYKNNNQDYAIVNNDIEGLIDPYVWISINKAMDDNSNGETNRFSEKFWLTKTLRCKYCGKTYCGQTKIVKSKYTNKDGDSKEYIGTYEYYMCRDMFRGRLKTCENTKRLKKKDLEKKIEELIYILKDRNIFEKKYYKSEVNNPAKELKELELNMKKLDKTINNLTDKIALLSNDAAMILIDKIETLVKEKKALKDKMIKIELKSLDNLEGKEEFIYENILKFNTNLSVDQKRNIAINIFKEIVYDYKTDKFEVFFN

SEQ ID NO: 20907 - DNA, 50 bp, Clostridium perfringens
  source 1..50: mol_type = genomic DNA
aattagaagtgtagcacttcaaccaatgtttattttaacaaaaaaagact

SEQ ID NO: 20908 - DNA, 40 bp, Clostridium perfringens
  source 1..40: mol_type = genomic DNA
ccattgaaacacttccaccagtagcgtggaagaagcttcc

SEQ ID NO: 20909 - DNA, 40 bp, Clostridium perfringens
  source 1..40: mol_type = genomic DNA
ccattgaaacacttccacctctagcgtggaagaagcttcc

SEQ ID NO: 20910 - DNA, 50 bp, Clostridium perfringens
  source 1..50: mol_type = genomic DNA
aataagaagaagactagtccaagttctgtttatttccttttaaaaggagt

SEQ ID NO: 20911 - protein, 615 aa, Klebsiella variicola
MLIQTKIRRSPMKKVFVYHRVSSDQQLDGSGIARQAELLEGYLERTGICAEMDDPAPVVLSDQGVSAFKGLNISEGELGAWMEQVRNGMWDSSILVVESIDRFSRQNPFDVMGYINALMAHNVAIHDVMANIVISRSNSKDLPFVMMNAQRAYDESKYKSDRIRKGWAKKREQAFNKGTIVTNKRPQWIEIENDKYVVNEKAAVVKEIFALYQTGMGCPTIAKQLQRKEGEQYKFNRPWTGELVHKILTNRRVTGKIFISEIIRNHDDIENPVTQKKYDMDVYPVVINEEEFELVQELLKSRRSNAGRITVKKDGQEEVLIKSNLFSGIARCTECGGPMYHNVVRAKRTPKKGDPKIEEYRYIRCLNERDGLCENKAMTYETVERFVVEHLLGMDLSTVMKEQEFNPEIEVLRIQIDQVKDQITNYENGIERRKSAGKPISFDMREELDDAKSELERLLARQASLATVQVDVPVLQDVNVTELYDVNNVDIRTRYESELNKIVSNIRLKRNGTSYTIDINYKQNELKRHVLFVENKKKEQTLISEVIIEDVDGAKFYYTPSFMIMLKDGEIRFQQTNEDLSIIDYSLLLNYIDAVDRNDAVGVWMRNQFNFLTSN

SEQ ID NO: 20912 - DNA, 50 bp, Klebsiella variicola; identical to SEQ ID NO: 11002
  source 1..50: mol_type = genomic DNA

SEQ ID NO: 20913 - DNA, 40 bp, Klebsiella variicola
  source 1..40: mol_type = genomic DNA
cttttgcgtgataatcatacaaataagtgccattacaaca

SEQ ID NO: 20914 - DNA, 40 bp, Klebsiella variicola
  source 1..40: mol_type = genomic DNA
cttttgcgtgataatcatagaaataagtgccattacaaca

SEQ ID NO: 20915 - DNA, 50 bp, Klebsiella variicola
  source 1..50: mol_type = genomic DNA
atattttaaagagtgatacacactgaattgtgttattttgtgaggaatct

SEQ ID NO: 20916 - protein, 615 aa, Escherichia coli
MLIQTKIRRSPMKKVFVYHRVSSDQQLDGSGIARQAELLEGYLERTGICAEMDDPAPVVLSDQGVSAFKGLNISEGELGAWMEQVRNGMWDSSILVVESIDRFSRQNPFDVMGYINALMAHNVAIHDVMANIVISRSNSKDLPFVMMNAQRAYDESKYKSDRIRKGWAKKREQAFNKGTIVTNKRPQWIEVENDKYVVNEKAAVVKEIFALYQTGMGCPTIAKQLQRKEGEQYKFNRPWTGELVHKILTNRRVTGKIFISEIIRNHDDIENPVTQKKYDMDVYPVVINEEEFELVQELLKSRRPNAGRVTVKKDGQEEVLIKSNLFSGIARCTECGGPMYHNVVRAKRTPKKGDPKIEEYRYIRCLNERDGLCENKAMTYETVERFVVEHLLGMDLSTVMKEQEFNPEIEVLRIQIDQVKDQITNYENGIERRKSAGKPISFDMREELDDAKSELERLLARQASLATVQVDVPVLQDVNVTELYDVNNVDIRTRYESELNKIVSNIRLKRNGTSYTIDINYKQNELKRHVLFVENKKKEQTLISEVIIEDVDGAKFYYTPSFMIMLKDGEIRFQQTNEDLSIIDYSLLLNYIDAVDRNDAVGVWMRNQFNFLTSN

SEQ ID NO: 20917 - DNA, 50 bp, Escherichia coli; identical to SEQ ID NO: 11002
  source 1..50: mol_type = genomic DNA

SEQ ID NO: 20918 - DNA, 40 bp, Escherichia coli; identical to SEQ ID NO: 1288
  source 1..40: mol_type = genomic DNA

SEQ ID NO: 20919 - DNA, 40 bp, Escherichia coli
  source 1..40: mol_type = genomic DNA
tttttgcatgataatcatagaaataggtgccattacagca

SEQ ID NO: 20920 - DNA, 50 bp, Escherichia coli; identical to SEQ ID NO: 20915
  source 1..50: mol_type = genomic DNA

SEQ ID NO: 20921 - protein, 506 aa, Clostridium beijerinckii
MILKKIIVLNRVSSNRQDFESQNNAIREYIDKNNILVDQWITEEGVSGYSNKLSDRQAIKQIEEMALLGELDTLIIFNLDRIGRTTEGAEFIKRMTYSNVKVISVTEGLLNSGNDTDELINGIKFWMAQQESKKISLRSKNGKEATNKKGLFAGGPVNFGYGVLDQKMFVIPEEAEIVKLIFDLYIKCGKNETVKYLQEKNITKRGKRFSQHMVHDLLKDTVYIGLKRYNQWQKVSTDPTNKKRKYNNETLKFQEYREELRILDDNTFNKVQELIEKRTSSKDKVKYTNRTNALFEGLLWHRCGDEEIRKLHLDNKKDKYGNVIYSYRCSHCRRNFYKDVTKTYGSKKYNKLLENNVLKLMNNMSIEELEKKAKEKQGSTSNSILVSIESHKKELDKKRKAISNMEKELINIFSGESSMDKDILINMITKTKEDIVTLSDNLKSLEAEYIEISKTISIDRALIEQYKSFNYVYGLADDKQKKLLLQEVVEKITFDGDKLIITLFLE

SEQ ID NO: 20922 - DNA, 50 bp, Clostridium beijerinckii
  source 1..50: mol_type = genomic DNA
aagtgggtttatattcgtatatcagtagagaatagaacgtaaaccctctt

SEQ ID NO: 20923 - DNA, 40 bp, Clostridium beijerinckii
  source 1..40: mol_type = genomic DNA
gtcaggtatattagattccgtactgataccagctccgccg

SEQ ID NO: 20924 - DNA, 40 bp, Clostridium beijerinckii
  source 1..40: mol_type = genomic DNA
gtcaggtatattagattccctactgataccagctccgccg

SEQ ID NO: 20925 - DNA, 50 bp, Clostridium beijerinckii
  source 1..50: mol_type = genomic DNA
aagtgccttttctctcctaaattcctagagaatagaaactctgccctttt

SEQ ID NO: 20926 - protein, 495 aa, Klebsiella michiganensis
MKQNGQAYSYIRFSSKKQEQGDSVRRQTELAEQYAHANNLILSDKNFQDLGISAFKEGSRPSLGDMLEAIEKGQIEQGSTIIIESLDRLSRRGIDVTQQIIKSILQHNVFIASLVDGLLLNRESVNDLVSVIRIALAADLAYKESEKKSQRLRETKGQQRQRALNGEVINKILPFWLERKQDKIVFSDRLDTVKRIIELRRKGLGTNKIARTLNDEGHKPLRSAGWNHTTVGKTINSVALYGAYQTSETTKDRKVILLDIIENYYPAIISKDEFILLQSDQKQNKPGYKSEQNAFAGILKHECGGALVRKFHVVSGKTYQYHICANARDGKCNITKNFKNIEVALYRIMKELKVEKNTTFDQTLLVERDAIKTRIQWLNDQLMELSESPKTVIQTILNLEKKVEELEAKIKTQNSMVISEQAFDFNLLQDIQEPQELNLMLKRIVENITIYNIGKKWRIKVLYRNRHVQSFIWDGEKTSFVSDTKKISDLANSWI

SEQ ID NO: 20927 - DNA, 50 bp, Klebsiella michiganensis
  source 1..50: mol_type = genomic DNA
tcttcccccctttgaaactgcatggtaatattgttgcaaagaagcaaaat

SEQ ID NO: 20928 - DNA, 40 bp, Klebsiella michiganensis; identical to SEQ ID NO: 4508
  source 1..40: mol_type = genomic DNA

SEQ ID NO: 20929 - DNA, 40 bp, Klebsiella michiganensis
  source 1..40: mol_type = genomic DNA
cttactgccgaactgcatgcggacgttgctggatactagc

SEQ ID NO: 20930 - DNA, 50 bp, Klebsiella michiganensis
  source 1..50: mol_type = genomic DNA
tctttccaaatgcaaatgtgcatgcgaatattgttctaaggaagaatcat

SEQ ID NO: 20931 - protein, 480 aa, Rhodococcus hoagii
MNRPRAIIYTRVSYDKSGRSTSTQQQERACRSVCDVEGWPVADVIEDADLGASRRSTKARPGFQRLQQILGRGDVLVMWEGSRGTRRLGEYAEFRDLCAERGVMWHIGGRLYDLDDPGDRLTLGIGASVSEYEADQMHGRIMRGIQAHADAGKPWGSLPYGYRRVRDEDSGRTVNWRIESTEAALLREAVERVLHGESVYTVAREFNERGIAPPRGARTGWAGSPLREMLVRPVYAGIRRYGGVDIEGTWPALWDLETHDRLVGALATKDPIIRPGRVPASLLSAIAVCGVCGGPMEFRTGKPEIGRRARYECRRSCLGRRADKVDDMVREAVVMFFTSAPGEKLLARQHDTSGAHKALEEARQLQARLDEAQDAYADGDIELSALQRVTARLRPRIEEAKHRAEQASANPVLEHFRDADPREVWEQLTVLERRAVVADCLRVTILRMPFPSKKFEPDFVKITVRGEVPVDSLFFTDDRD

SEQ ID NO: 20932 - DNA, 50 bp, Rhodococcus hoagii
  source 1..50: mol_type = genomic DNA
gcggcccggactattcggcagaggcagctctggtcaggagtccgggtagg

SEQ ID NO: 20933 - DNA, 40 bp, Rhodococcus hoagii
  source 1..40: mol_type = genomic DNA
gaggtcggcacaccgcaggcagctcgtgctgcccggcagg

SEQ ID NO: 20934 - DNA, 40 bp, Rhodococcus hoagii
  source 1..40: mol_type = genomic DNA
gaggtcggcacaccgcaggctgctcgtgctgcccggcagg

SEQ ID NO: 20935 - DNA, 50 bp, Rhodococcus hoagii
  source 1..50: mol_type = genomic DNA
gcggcccagctgtgaaggcagaggctggactggccacaggacaaggcagg

SEQ ID NO: 20936 - protein, 583 aa, Rhizobium leguminosarum
MRTAYAYLRFSTPEQILGDSVRRQTSLTTDWCERNGVHLDKSLSFEDLGVSAFKGKHVEEGALGVFFKLVGEGKIKRGSYLVIEALDRFSRENPFAAAGRLFDLIKLGITVVTADDGREYSEETLGGGDIGPMVLLMIKLSQSHAESVRKSQRIGPAWKNKKDLARSEGIPLTSRCPEWLELRDGRFHPRKERVDIVKRIFQETIDGFGRRAIVARLNGEPIEPFKAGQKWKNPDRVGGWQTSSVARILNNRAVLGEYQPHTGKAGNRVAYGEPIANYYPKVIDEAIFWRAQSAMRERRQQSSGRRGDKGAHLLRGLARCSNCRSPMHIINKGPPPKGGIYLSCSANRRNTGCENDKSWRVDQLEEALLLCLTSFKTRSFLTEKDETSRDAEGIDAMKGELGELESRADNLLGMVERGDKRAETRYLELSAEIEKRKAAIEGAEKELGMRQSDPGDEARLAEILKLSTDIFTLTGPERLEARTRLSSLIRRMVHLIECDPDRGPYAVLAIDTKLWHITRPTEGAFAYQIDLPAWGVEEPPPRLLFLLAKNPSADARDAFFRKRGGYLLSPEGSKSFFPERAKS

SEQ ID NO: 20937 - DNA, 50 bp, Rhizobium leguminosarum
  source 1..50: mol_type = genomic DNA
ttttaatgtatcacaacgtcagaagattgtgatacattaatttcacgaat

SEQ ID NO: 20938 - DNA, 40 bp, Rhizobium leguminosarum
  source 1..40: mol_type = genomic DNA
ggaggaccgaccatcagaagattatggccgccggccgcgg

SEQ ID NO: 20939 - DNA, 40 bp, Rhizobium leguminosarum
  source 1..40: mol_type = genomic DNA
ggaggaccgaccatcagaaagttatggccgccggccgcgg

SEQ ID NO: 20940 - DNA, 50 bp, Rhizobium leguminosarum
  source 1..50: mol_type = genomic DNA
ttttcatgtaatttaaaatctgaaagttatgttacattaaattaagtaat

SEQ ID NO: 20941 - protein, 674 aa, Streptomyces violaceoruber
MDQKNTAALDIAMGVVDRVTHSVRLRAVAYARVSTEEQAKGYGVQSALKKITRYMGRKGMDYVGTYTDEGISGSLEAADREDLKRLMADAHRTPRPFDIVVVSEGRAIGRVGRAFWRWVWALEDIGVFVGVVEDDYDNSTAEGRKKMRRDADYAETEWETIRKRTQGGLQEKAEEGGWPGGMPPYGYEIACKGQKGKSHLVQCEAEVLVLKAMWGLVVEDGMNTNQLAERLNVLGLLTRSGVPWSATNARAKLLSESTLNARVIFRNPNRTRAGHGAKFGRDGKPLNGETVIIKLDPIFTPEEVAALKSAMGRLANGKPKSQPQAYPLSKRLFNEHTECNSHHVGMARTSRGGRWYRCTGLAAKYPGDTVCGCKMVDADAMESAVWGEVVNLLGDPDRLRAMAAEWVGMTEGDKVQHADRIADFDRQIADLDRAITTMVKDYAKAGLPASAVAAASAALIEERRQLTDIRDEAAQWLEETKATAQRARDLEALATMARTRLADMTPADQDDVLGLLDVRVTITGPVPKPKLGLACSLAEWFKEAGRKVPAELTDEAWALAEPVVKAWEPPNHKLIPGRLMLDAMFYKARTGCKWSDLPERFGLWKGIHSRYKTWRNCGVWDDVMAALPQEGPGYRPVPKLNLVPPFRVEGRVDPRVLTGADIQEEMVAPEAGVP

SEQ ID NO: 20942 - DNA, 50 bp, Streptomyces violaceoruber
  source 1..50: mol_type = genomic DNA
atggtggccccggaagcaggtgtccccacacctcttcccggggatgccgc

SEQ ID NO: 20943 - DNA, 40 bp, Streptomyces violaceoruber
  source 1..40: mol_type = genomic DNA
acgcttcgcgatgggggtgcccggaccggccaccagcgga

SEQ ID NO: 20944 - DNA, 40 bp, Streptomyces violaceoruber
  source 1..40: mol_type = genomic DNA
acgcttcgcgatgggggtgagcggaccggccaccagcgga

SEQ ID NO: 20945 - DNA, 50 bp, Streptomyces violaceoruber
  source 1..50: mol_type = genomic DNA
atgctggcttcagcagcagatgtcagcactgctctcagcctggctcccgt

SEQ ID NO: 20946 - protein, 447 aa, Clostridium botulinum
MLRCAIYIRVSTEEQAMHGLSMDAQKADLTDYAKKHNYEIIDYYVDSGKTARKRLSKRKDLQRMIEDVKLNKIDIIIFTKLDRWFRNVRDYYKIQEVLEDHNVDWKTIFENYDTSTANGRLHINIMLSVAQDEADRTSERIKRVFENKLKNNEPTSGSLPIGYKIKEKSIIIDEEKAPIAKDVFDFYYYHQSQTKVFKEILNKYNLSLCEKTIRRMLENKLYIGIYREHENFCPPLIDKNKFDEVQLILKRRNIKYIPTKRIFLFTSLLICKECRHKMIGNAQIRNTKAGKIEYILYRCNQSYARHTCNHRKVIYENKIETYLLNNIESELKKFIYDYELEDIPKVKNKVNKTNIKRKLEKLKELYINDLIDIDMYKEDYEKYTEILNTKEEKIEQRNLQPLKDFLNSDFKSLYSSISREEKRLLWRGIISEIQIDCNNDITIIPHP

SEQ ID NO: 20947 - DNA, 50 bp, Clostridium botulinum
  source 1..50: mol_type = genomic DNA
atgtttactaataagacgttctcaacccataaagtcttattagtaaacat

SEQ ID NO: 20948 - DNA, 40 bp, Clostridium botulinum
  source 1..40: mol_type = genomic DNA
cagattcccagatgcccctacagaaagaggtacaaaacat

SEQ ID NO: 20949 - DNA, 40 bp, Clostridium botulinum
  source 1..40: mol_type = genomic DNA
cagattcccagatgcccctagagaaagaggtacaaaacat

SEQ ID NO: 20950 - DNA, 50 bp, Clostridium botulinum
  source 1..50: mol_type = genomic DNA
atgtttggtagaattaagtcataaagccatcaggtcatcccagtaaacat

SEQ ID NO: 20951 - protein, 496 aa, Corynebacterium testudinoris
MNVLIYARVSHDKSAQGRSVAEQIHETTQWAERENWTVAEVVQETGSASRYARKARHAWDEVMDAIKERRVDAVLTWEASRATRDLAVYGQLREACAAHGVRWGYSGTLYDLRDRSDRFRTGLDMLMAEDEAARTSERVQRSMRSLADKGLPHGKLLYGYTRTYGPNRELIGIDPHPEQAPIVQEIYQRTLAGDSLYAIAQSLNKRGIPTRRPVRNPRREGQGWITQSIKQVLKNPAYAGLRVHQGEVVGPAAWDGLINHEDWEKVQAIFLDPKRKTRTGDTTARHLLSGIATCGVCGSAMLTNKQYAGRNKDKNGNRIPTKDRDIYLIYLCKGPNGTSGFHVSMKEEHLDLLVTEAILARLERPDFLPALGEGDQVREEEREALLAEIAELQAWLEKVRERALDERDLDLLFDQERRVKPKISELQERAKELTSLDPVVKKLAEAENIRVHWEALSLEDQRRVIRMLVVPVVDRATPGTRGRKGPRPDRVRLHWR

SEQ ID NO: 20952 - DNA, 50 bp, Corynebacterium testudinoris
  source 1..50: mol_type = genomic DNA
acacccctgccgcaaactttcaccccgctgattgtttggagcttaggtgt

SEQ ID NO: 20953 - DNA, 40 bp, Corynebacterium testudinoris
  source 1..40: mol_type = genomic DNA
cacgatggccacgttggctcccgaaaccgccgataggtgg

SEQ ID NO: 20954 - DNA, 40 bp, Corynebacterium testudinoris
  source 1..40: mol_type = genomic DNA
cacgatggccacgttggctatcgaaaccgccgataggtgg

SEQ ID NO: 20955 - DNA, 50 bp, Corynebacterium testudinoris
  source 1..50: mol_type = genomic DNA
ccccccttggaccgaaaagtcaccatgctgattttttttttcttcggtct

SEQ ID NO: 20956 - protein, 521 aa, Mycobacteroides chelonae
MKQQLRAIVGSRVSHLDDDKATTRKVSHKAQTEEGERWAKSQGYEVVGTFEDLGVSAGKTTPFERPDLGKWLAPERLHEWDVLVFSKIDRAFRSTNDCVEFARWTKENRKILAFSGDGVVLDYLHPKGESLDQMMSEFFIYVGSFFAAIELNRFRTRATDRLSYLRMTDRVSHGVPPLGFRTVPHPSGQGKALERDPEGYALLHEIKDKLLHEHYSMTALVKWLHDPRCLANKETDPTTGRSRSVHLANCACRQTNAASARGGDKWWTATTLRRVLTSERTQGIRMSGGKPVLDSQGTPIRMAEPTFTDDEWEQIQQALNQRSTSGRARHMTDNPFAGVVYCVCGYAVAQHRRKSSSGKEHTYVRCGQGCRGAWKLADVLEQLDFHFLGGYADQEMTKLVFVPGEDRSEELAGIERSIARLRWESDNDLVDDEDLYQSRMASLLSRKREIGQIVVPARWERQGTGKTYQELWADPETDRRQVMRDARIRLVLHFIPKGSDAPFVTQSHFVDMWNPSEQAKT

SEQ ID NO: 20957 - DNA, 50 bp, Mycobacteroides chelonae
  source 1..50: mol_type = genomic DNA
tgttgtcgtgtgtgcagccttcacgttgtactgtgccatacatgaaacaa

SEQ ID NO: 20958 - DNA, 40 bp, Mycobacteroides chelonae
  source 1..40: mol_type = genomic DNA
cgtgtccggtggctttcacgttgtactgcgccacttcgat

SEQ ID NO: 20959 - DNA, 40 bp, Mycobacteroides chelonae
  source 1..40: mol_type = genomic DNA
cgtgtccggtggctttcaccctgtactgcgccacttcgat

SEQ ID NO: 20960 - DNA, 50 bp, Mycobacteroides chelonae
  source 1..50: mol_type = genomic DNA
tcttgttattttgtctgctttccccctggactgtgaattacatgaaacag

SEQ ID NO: 20961 - protein, 497 aa, Mycobacteroides abscessus
MKQQLRAVVGSRVSHLDDDKATTRKVSHKAQTEEGERWAKSQGYELVGTFEDLGVSAGKTTPFERPDLGKWLAPERLHEWDVLVFSKIDRAFRSTSDCVDFARWTKENRKILAFSGDGVVLDYLHPKGESLDQMMSEFFIYVGSFFAAIELNRFRTRATDRLSYLRMTDRVSHGVPPLGFRTVPHPSGQGKALERDPEGYALLHEIKDKLLHENYSLTGVVQWLNETGRQTAVAKARKGDAKWSVTSLKRTLTNERTQGIRMSGGKPVLDSQGTPIRMAEPTFTEDEWEQIQQALNQRSTSGRARHMTDNPFAGIVYCVCGYAVAQHRRKSSSGKEHTYVRCGQGCRGAWKLADVQEQLDLSFLAGYADQEMTKLVFVPGEDRSEELAGIERSIARLRWESDNDLVDDEDLYQSRMASLLSRKREIGQIVVPARWERQGTGKTYQELWADPETDRRQVMRDARIRLVLHFIPKGSDAPFVTQSHFVDMWNPSEQAKA

SEQ ID NO: 20962 - DNA, 50 bp, Mycobacteroides abscessus; identical to SEQ ID NO: 20957
  source 1..50: mol_type = genomic DNA

SEQ ID NO: 20963 - DNA, 40 bp, Mycobacteroides abscessus
  source 1..40: mol_type = genomic DNA
cgtggccggtggccttcacgttgtactgcgccacctcgat

SEQ ID NO: 20964 - DNA, 40 bp, Mycobacteroides abscessus
  source 1..40: mol_type = genomic DNA
cgtggccggtggccttcaccctgtactgcgccacctcgat

SEQ ID NO: 20965 - DNA, 50 bp, Mycobacteroides abscessus; identical to SEQ ID NO: 20960
  source 1..50: mol_type = genomic DNA

SEQ ID NO: 20966 - protein, 532 aa, Mycobacteroides abscessus
MKQQLRAVVGSRVSHLDDDKATTRKVSHKAQTEEGERWAMSQGYEVVGTFEDLGVSAGKTTPFERPDLGKWLAPERLHEWDVLVFSKIDRAFRSTNDCVEFARWIKENRKILAFSGDGVVLDYLHPKNESLDQMMSEFFIYVGSFFAAIELNRFRTRATDRLSYLRMTDRVSHGVPPLGFRTVPHPSGQGKALERDPEGYTLLHEIKDKLLHEHYSMTALVKWLHDPRCLANKETDPTTGRSRPVHLANCACRQTNAASARGGDKWWTATTLRRVLTSERTQGIRMSGGKPVLDSQGTPIRMAEPTFTEDEWEQIQQALNQRSKSGRARYMTVNPFAGIVYCVCGYAVSQHRRKSSSGKEHTYVRCGQGCRGAWKLADVLEQLDFHFLAGYGDQEMTRLVFVPGEDRSDELVGIDRSIARLRWESDNDLVDDEDLYQTRMASLLSRKRELGQIVVPARWERQGTGRTYQELWADPETDRRQVMRDARIRLVLHFIPKGSDAPFVTQSHFVDMWNPSEEAKALSGNGIGGMST

SEQ ID NO: 20967 - DNA, 50 bp, Mycobacteroides abscessus
  source 1..50: mol_type = genomic DNA
tgttgtcgtgtgtgcggccttcacgttgtactgtgccatacatgaaacaa

SEQ ID NO: 20968 - DNA, 40 bp, Mycobacteroides abscessus; identical to SEQ ID NO: 20963
  source 1..40: mol_type = genomic DNA

SEQ ID NO: 20969 - DNA, 40 bp, Mycobacteroides abscessus; identical to SEQ ID NO: 20964
  source 1..40: mol_type = genomic DNA

SEQ ID NO: 20970 - DNA, 50 bp, Mycobacteroides abscessus; identical to SEQ ID NO: 20960
  source 1..50: mol_type = genomic DNA

SEQ ID NO: 20971 - protein, 502 aa, Yersinia enterocolitica
MPQQNNGIAYSYVRFSSKRQEQGDSVRRQTEMAEKYALEKGLTLSSKNFQDLGISAFKEGKRPSLVDMLDTIENGQITAGSTIIIEALDRLSRRGIDATLETVKDILRKDVQVVSLSDGLLLTKNSLNDLQSIIRIAVAADLANKESERKSSRLRETKGQQRQAALAGKAINKILPFWLQRASERYKFSDKAHIAREIIRLKQEGKGSNMIAKTLNKQGVAGIRSSQWNHASITKMLKHPALYGAYQTGETTKERELIKLDLIENYYPALISKEDWLLIQSDQSKSTRGRRTTDNPYSGLLRCDCGGALVKRQTTVKNKLYVYHGCLNAKDGRCEQNLSIKGLDQALKTILGRLEFKKRPTPDQSIHQERKQLEDRISNLNNKLLTLDDIPVSVIKTIGTLEERLKTVTDLILQNEREQRGIDAVQSETLSSITDSLELNLLLKRVLKSITVSASGNGWAVKVLHLSGHKQNFLMVDGKIKFLSDTIALQKLLASFKKTTEE

SEQ ID NO: 20972 - DNA, 50 bp, Yersinia enterocolitica
  source 1..50: mol_type = genomic DNA
aattttcacatatgaaactacatggtgatattgttacttaatagcaaagg

SEQ ID NO: 20973 - DNA, 40 bp, Yersinia enterocolitica; identical to SEQ ID NO: 5808
  source 1..40: mol_type = genomic DNA

SEQ ID NO: 20974 - DNA, 40 bp, Yersinia enterocolitica
  source 1..40: mol_type = genomic DNA
cttgctgccgaattgcatgttgatattgttagtacttagc

SEQ ID NO: 20975 - DNA, 50 bp, Yersinia enterocolitica
  source 1..50: mol_type = genomic DNA
atttatgaccctggaaacaacatgttgatgttgatgatcctttgcaaaga

SEQ ID NO: 20976 - protein, 500 aa, Pectobacterium brasiliense
MPQDNNGIAYSYVRFSSKRQASGDSLRRQTEMAEEYASRNNLKLSSKNYQDLGISAFREGIRLSLADMLTAIDEGQIAAGSTIIIEALDRLSRRGIDVTQETVKEILRKDVQIVSLSDGLVLTKSSLNDLQSVIRIALAADLAHKESERKAQRLRETKGQQRQDALNGIPINKILPFWLKRTETGYAFSDKVETARQIVALKQEGKGSNMIAKFLNKQGIAGIRTAQWNHASITKMLKNPALYGAYQTGETNKEREMIQLEIVEGYYPALINKDEWLLLQSDQSKSTRGRRSTDNPYSGLLRCGCGGALIKRKSTVRGKLYVYHGCLNAKDGRCSQNLSIKGLDGALATMLGRLEFKKAVTVDQSIYLEKQQIENRIANLNKTLQEVDHVPASVIQTIITMEARIKEITQQIETGEREQRGIDAVNNAKLSSITDSLELNLLLKRVLKSITVTRSGLGWAVRIFHLSGHSQSFLLVNGQLRLVSDSIALKNLLNEYLKDD

SEQ ID NO: 20977 - DNA, 50 bp, Pectobacterium brasiliense
  source 1..50: mol_type = genomic DNA
aattattatatatgaaactgcatggtgatgttgttacttaatagcaaagg

SEQ ID NO: 20978 - DNA, 40 bp, Pectobacterium brasiliense
  source 1..40: mol_type = genomic DNA
cttgctgccgaactgcatggtgatattgttggtacttaac

SEQ ID NO: 20979 - DNA, 40 bp, Pectobacterium brasiliense
  source 1..40: mol_type = genomic DNA
cttgctgccgaactgcatgttgatattgttggtacttaac

SEQ ID NO: 20980 - DNA, 50 bp, Pectobacterium brasiliense; identical to SEQ ID NO: 20975
  source 1..50: mol_type = genomic DNA

SEQ ID NO: 20981 - protein, 489 aa, Clostridium perfringens
MKRVAKFIRTSTLDQHTSIDNQSEILDNWIAQNNCILYKTYNDEGISGTKKKFRVQWLQMLEDAKNKEFDILICKSYSRFGRNQIETLQAIKELRENKIRIVFLEDGLDSMIDDSRFGLMAWLSEEESKRTSKRIKGVFSHFKEVGKIYNCIAPFGYDYDINKKNFVVNKNESEVVKRVFRLYLLGNGTNKIANILESEGVPTKNGGKWRGNTIKNMIRNEVYLGTLVQNKSSNIEVTNSKRNFHNEDEYIKHLNNHEAIVNEETFIKANEIFKKNSDKVKNRSVGVRASNTSLFSNLLRCGSCNSSMSIRRKSKRKPFYNCIEYERLGLKCGHNSNFIQEEFLIEYIEQKLNELIENNFENIKIIEKNDIKKTLENDLKNIQKKIDEQINLANNLLKLYNNKMINDIQFKLQNESISNMLNSLIENKKIIEEKINNLPKKNNEFKKDVNNVVRLPIAQWSNAMLKKIIDKITVGVDGTIKIDWKINKM

SEQ ID NO: 20982 - DNA, 50 bp, Clostridium perfringens
  source 1..50: mol_type = genomic DNA
agacctatatagttatataaaacaactgcaaaatataactatataggtct

SEQ ID NO: 20983 - DNA, 40 bp, Clostridium perfringens; identical to SEQ ID NO: 6113
  source 1..40: mol_type = genomic DNA

SEQ ID NO: 20984 - DNA, 40 bp, Clostridium perfringens; identical to SEQ ID NO: 6113
  source 1..40: mol_type = genomic DNA

SEQ ID NO: 20985 - DNA, 50 bp, Clostridium perfringens
  source 1..50: mol_type = genomic DNA
atacatatatgtgtatatattccaactgtaaaatatacatatatgtgtgt

SEQ ID NO: 20986 - protein, 555 aa, Proteus terrae; identical to SEQ ID NO: 18986

SEQ ID NO: 20987 - DNA, 50 bp, Proteus terrae; identical to SEQ ID NO: 18987
  source 1..50: mol_type = genomic DNA

SEQ ID NO: 20988 - DNA, 40 bp, Proteus terrae
  source 1..40: mol_type = genomic DNA
attgactgtttttgaagggcaaccgcagtttaaatcaacc

SEQ ID NO: 20989 - DNA, 40 bp, Proteus terrae
  source 1..40: mol_type = genomic DNA
attgactgtttttgaagggctaccgcagtttaaatcaacc

SEQ ID NO: 20990 - DNA, 50 bp, Proteus terrae
  source 1..50: mol_type = genomic DNA
tgaattcccattaaaaagtttacactagcaaaattttccaggcataaata

SEQ ID NO: 20991 - protein, 555 aa, Proteus mirabilis
MLCYSYVRFSTPEQARGDSHRRQMEFAKNYCKLNNLTLVEDLSFNDFGISAYKGDNLKNGALGKFLELVHSGYIPNGSTLIIESFDRLSRQTAIKAQAIFSEIISAGITIVTAMDNRSYNLKSVTENPFDLMYSLMIMIRANEESETKSKRVKEAIKANIRNKKIVSSKLPYWIKHNKEKDILELIPERVEVILYIIEKYLSGLGISKLTQHLNDNIKPFAGKNWYPVYLQKLLRSPSLYGERQYNIDNTLHIMDNYYPAIINKSKFAVIQENLDLRAPTRGGKISSAITGIRKAYCGYCYGVLVSQSTRRNGKIVDGLRRVRCNSNHNGKHCITSTFRASLVEHAIAEYCSQHIDLSFLEPTSNASKLKLSEYKLELHELNKKINNYVKFISEGHVSPAIVASLNEAENRKKEIEYNINKLDLDILSDNKEELIKKWREIKTNLESYNEENILKLRELIRISIKTIYVFQYGVWGKENSIILPSRKSIPIEKGAFTIQITFKSGVRKTLVLGDKIEDMEVIPQNRTIKENGKTYTSEEYTKILEDKIKIEYEQK

SEQ ID NO: 20992 - DNA, 50 bp, Proteus mirabilis
  source 1..50: mol_type = genomic DNA
tgtttaccctacataaactttgcacaggcaaagtttatgtagagtaaata

SEQ ID NO: 20993 - DNA, 40 bp, Proteus mirabilis
  source 1..40: mol_type = genomic DNA
attgacggttttagaaggacaaccacaattaagatcaacc

SEQ ID NO: 20994 - DNA, 40 bp, Proteus mirabilis
  source 1..40: mol_type = genomic DNA
attgacggttttagaaggactaccacaattaagatcaacc

SEQ ID NO: 20995 - DNA, 50 bp, Proteus mirabilis; identical to SEQ ID NO: 20990
  source 1..50: mol_type = genomic DNA

SEQ ID NO: 20996 - protein, 580 aa, Kosakonia sacchari
MKKCYLYVRVSSDQQIQGDGLDRQESMLINYFNDNAAAQDFDPQYEVIKDEGRSAFKAEHLQENAGLGKFFKQVKEGLIQPGSVLIVESLDRFSRENPFRCVEYISHLDKKQIELHDVDKRLIISRRHSNSLTFATMIAERAYEESRLKSYRIRKGWDKRRRMAKEEGQYMIKNCPPWISIVNNKYELNDNAKIIREIFDLYLSGIRSFNISKMMNNSGRLINDKLWTGTKVCRVLRNVRCKGDYITNITDRNFDDDTINVTSDILKIYPAVVSDDEFREVQRRLEGHNYSGRIRNDLKKTLFSYVVKCSFCGSALSMNTTGKYTYLKCSNSRENNGCSASMLPYMPFEKAMLKHIKDIDIAAVLNNTDRTFNEIDKIKSEIVELKKNIDEYVQGIAKRKKQGQLIPFAMIDEQSQAEDKLKVLKELLSSKLESTNITHVEFSDDVHDVKNIEERARLEVELKKVIKRIDILSESKKKFIIADVQYYNDDHIKHVLLLNKKSGSINAVGEISQKNGWRIYSFSENNRLIFRVESNGDVWTVQARNDQSIEDIRTYMTMMVGREPEDFDYHLNEDCIEWVE

SEQ ID NO: 20997 - DNA, 50 bp, Kosakonia sacchari; identical to SEQ ID NO: 19802
  source 1..50: mol_type = genomic DNA

SEQ ID NO: 20998 - DNA, 40 bp, Kosakonia sacchari
  source 1..40: mol_type = genomic DNA
tttaatggtgtcgcagtttttgatgccgtacatggtgatc

SEQ ID NO: 20999 - DNA, 40 bp, Kosakonia sacchari
  source 1..40: mol_type = genomic DNA
tttaatggtgtcgcagtttaagatgccgtacatggtgatc

SEQ ID NO: 21000 - DNA, 50 bp, Kosakonia sacchari
  source 1..50: mol_type = genomic DNA
atttgggctgctatttaatataataatataccatagataatatatctact

SEQ ID NO: 21001 - protein, 580 aa, Franconibacter pulveris
MKKCYLYVRVSSDQQIQGDGLDRQESMLINYFKDNAAAQDFDPQYEVIRDEGRSAFKAEHLQENAGLGKFFKQVKEGLIQPGSVLIVESLDRFSRENPFRCVEYISHLDKKQIELHDVDKRLIISRRHSNSLTFATMIAERAYEESRLKSYRIRKGWDKRRRMAKEEGQYMIKNCPPWISIVNKKYELNDNSKIIRDIFELYLSGIRSFNISKMMNDSGRLINGKLWTGTKICRVLRNVRCKGDYITNITDRNFDDDTIKVTSDILKIYPAVVSDDEFREVQRRLEGHNYSGRIRNDLKKTLFSYVVKCSYCGSALSMSTTGKYTYLKCSNSRENNGCFASMLPYMPFEKAMLKHIKDIDIAAVLNNTERTFNEIDKIKSEIVELEKNIDEYVQGIAKRKKQGQLIPFAMLDEQSQAEDKLKALKESLSTKLESASITHVEFSDDVHDVKNIEERARLEVELKKVIKRIDILSESKKKFIIADVQYYNDDNIKHVLLLNKKNGTINAVGEISQKNGWRIYSFSENNRLIFRVESNGDIWTVQARNDQSIEDIRTYMTMMVGREPDGFDYHLNENFIEWIE

SEQ ID NO: 21002 - DNA, 50 bp, Franconibacter pulveris; identical to SEQ ID NO: 11592
  source 1..50: mol_type = genomic DNA

SEQ ID NO: 21003 - DNA, 40 bp, Franconibacter pulveris
  source 1..40: mol_type = genomic DNA
tttgatggtgtcacagttttttatgccgtacataatcgtc

SEQ ID NO: 21004 - DNA, 40 bp, Franconibacter pulveris
  source 1..40: mol_type = genomic DNA
tttgatggtgtcacagtttaatatgccgtacataatcgtc

SEQ ID NO: 21005 - DNA, 50 bp, Franconibacter pulveris; identical to SEQ ID NO: 21000
  source 1..50: mol_type = genomic DNA

SEQ ID NO: 21006 - protein, 441 aa, Clostridium innocuum
MEMKNARLYARVSTDEQRKKEQSVPDQLEALKEYCQEHNYNIKGIYHDDGISAATIDKRKDFCRMLDDLQQNEVILFTKLDRFSRDLLDGNLLLKRFAPLNVSFKAILEPDIDVTTADGKFRFDLMVSLAERERKIDSERILFSFERKVARGEFLGGRLPIGYIKDNKRAVIDPEKAAFVKDIFETMEIEQNTFRVMKAMNHKYGLNKDKKYYYRKLIDQRYTGVYRGKTNVFPQIISPNQYDNVQSILQGRYIKRGPSRRDYIFSGLLLCSQCGRKLAGSATSGKYKIYKCSNLQKGEKMHCCFAEKKLEKKILPKIMPLLQKYLLDLEASEAKVSQNRDIIQISKQKINRLQDLYIDGKIDKDTFDRKYADLNEIISAEEQKSNIVSIQEAKQRYTQLLDMDIENIYSTLNDNEKRKLWHSFIDRIVIKSYDEIDIFLL

SEQ ID NO: 21007 - DNA, 50 bp, Clostridium innocuum
  source 1..50: mol_type = genomic DNA
ctactgactattatcccttacaccgctgtttgtggtgtaatagtcagtaa

SEQ ID NO: 21008 - DNA, 40 bp, Clostridium innocuum
  source 1..40: mol_type = genomic DNA
ttttggtgaagcatacattgcagaaatcggttatcagcat

SEQ ID NO: 21009 - DNA, 40 bp, Clostridium innocuum
  source 1..40: mol_type = genomic DNA
ttttggtgaagcatacattttagaaatcggttatcagcat

SEQ ID NO: 21010 - DNA, 50 bp, Clostridium innocuum
  source 1..50: mol_type = genomic DNA
ctatcgccttgtggcctttacccctttgtctgtggttaatgtgtcaatta

SEQ ID NO: 21011 - protein, 452 aa, Listeria seeligeri
MKAAIYIRVSTQEQIENYSIQAQTEKLTALCRSKDWDVYDIFIDGGYSGSNMNRPALNEMLSKLHEIDAVVVYRLDRLSRSQKDTITLIEEYFLKNNVEFVSLSETLDTSSPFGRAMIGILSVFAQLERETIRDRMVMGQIKRVESGLPLTTAKGRTFGYDVIDTKLYTNEEEAKQLQMIYDIFEQEKSITFLQKRLKELGFKVKSYSSYNKWLMNDLYIGYVSYSDKVHVKGIHEPIISEDQFYRVQEIFSRMGKNPNMNKESSSLLNNLIVCEKCGLGYVHRAKDTVSRGKKYHYRYYSCKTYKHTHELEKCGNKIWRADKLEEIIISRVKNYSFATRNLDKEDELDSITEKLKTEHSKKKRLFDLYMNGSYEVAELDKLMADIDAQINYYNSQIEANEELKRNKKVQESLAELATVDFDSLEFREKQIYLKSIINKIYINDEQVTIEWI

SEQ ID NO: 21012 - DNA, 50 bp, Listeria seeligeri
  source 1..50: mol_type = genomic DNA
tttagtctctcgatttctctcgctggacggagacaaatcgagaaactaaa

SEQ ID NO: 21013 - DNA, 40 bp, Listeria seeligeri
  source 1..40: mol_type = genomic DNA
ttttggttcaagctacgatggacggaaagagggaaccaag

SEQ ID NO: 21014 - DNA, 40 bp, Listeria seeligeri
  source 1..40: mol_type = genomic DNA
ttttggttcaagctacgattcacggaaagagggaaccaag

SEQ ID NO: 21015 - DNA, 50 bp, Listeria seeligeri
  source 1..50: mol_type = genomic DNA
ttcatgctcttaccttctttcagttcacagagacactgaaggaaaataaa

SEQ ID NO: 21016 - protein, 677 aa, Vibrio mediterranei
MKTLPKIYNYARVSTTKQLKGVGLETQQQRSVLEKLSEEHNLPIHDENFVDHGLSAYHGKHKEGALGLVLSRIESGEIPSGSILVVFSLDRLSRETVNIAMEQLLSIINRGVRVYTHIDDKMFDAKSQNLTADLIVSLITMQRANEESETKSKRIIAAAKLGLQRWHETGEPQSTLGRAPFWIEQSTNSFNINAEGVKKAIEMRIAGFGDLKIKQYLDANFEYKPTRLKGRVKRTNSWDYIAISQLWGRRSLIGENTYTIEGIEHVMDNYYPALISEDTFRKLQIQKKTKQGRDTASGKIPLLKSLARCGFCGGAMVFVDKGGNRVNYQCNLAMKGEHPREVYNVNMLDLLTLEVCKDAYLSESSKSNDTLVVEQKLKLESELLDQQESRDNLLDSYKTTPSKSILGLIVDSESKIVELEAKLDAINIKTIELNTDELSNLPEIFTDSIRTDFLNPKRYEIRNNLRRFISSITLSRSEEPCRDAKTKVANCVDITWHFKNGQKRRLSMLPYQFIKSDGDKTLYLPFVYLYGTKSKVKVEDGDEFLSGILEKLHALDLTKTLYPSKGRYQWSKLSLECGKTYWAPLDNAEFGEQGAPFTEFSLSVEDDFLQEHAQRTDYLSLMFNYPSSGDERYDYPETTFLELANKFNFEEERDFSSTLQDNSFNHELYSSLDFLKS

SEQ ID NO: 21017 - DNA, 50 bp, Vibrio mediterranei
  source 1..50: mol_type = genomic DNA
tgaggaaatatgtcaatattatagtttgctaataaaaaacaattcccctc

SEQ ID NO: 21018 - DNA, 40 bp, Vibrio mediterranei
  source 1..40: mol_type = genomic DNA
tgaagagtacttattgtggtttgacaaaaaaggttggcct

SEQ ID NO: 21019 - DNA, 40 bp, Vibrio mediterranei; identical to SEQ ID NO: 21018
  source 1..40: mol_type = genomic DNA

SEQ ID NO: 21020 - DNA, 50 bp, Vibrio mediterranei
  source 1..50: mol_type = genomic DNA
taatgaactatatgaatattatattttgatgataaaagcataatagcctc

SEQ ID NO: 21021 - protein, 559 aa, Streptococcus pyogenes; identical to SEQ ID NO: 20396

SEQ ID NO: 21022 - DNA, 50 bp, Streptococcus pyogenes
  source 1..50: mol_type = genomic DNA
ccttttgactcccgcagacccatcacgtggagacggtagcacttttatcc

SEQ ID NO: 21023 - DNA, 40 bp, Streptococcus pyogenes
  source 1..40: mol_type = genomic DNA
ttgtttccccagacgcatcacgtcgagtgcgtagtgttgc

SEQ ID NO: 21024 - DNA, 40 bp, Streptococcus pyogenes
  source 1..40: mol_type = genomic DNA
ttgtttccccagacgcatcctgtcgagtgcgtagtgttgc

SEQ ID NO: 21025 - DNA, 50 bp, Streptococcus pyogenes
  source 1..50: mol_type = genomic DNA
ccttttgaagaatccagatctatactccggagacagcacagcttgtattc

SEQ ID NO: 21026 - protein, 493 aa, Bittarella massiliensis; identical to SEQ ID NO: 11031

SEQ ID NO: 21027 - DNA, 50 bp, Bittarella massiliensis; identical to SEQ ID NO: 11032
  source 1..50: mol_type = genomic DNA

SEQ ID NO: 21028 - DNA, 40 bp, Bittarella massiliensis
  source 1..40: mol_type = genomic DNA
cgctatacttaattttggattccattttgcgagaaaaaag

SEQ ID NO: 21029 - DNA, 40 bp, Bittarella massiliensis
  source 1..40: mol_type = genomic DNA
cgctatacttaattttggaacccattttgcgagaaaaaag

SEQ ID NO: 21030 - DNA, 50 bp, Bittarella massiliensis
  source 1..50: mol_type = genomic DNA
cattatgcctttaaacaaaatagaacaatattttataaaaggaattaatt

SEQ ID NO: 21031 - protein, 475 aa, Limosilactobacillus fermentum
MKIAVYVRVSTLEQAESGYSIGEQTEKLKSYCRIKDWQVAKIYTDPGFSGSSLDRPAMQQLIGDCKLGVFDAVLVYKLDRLSRSQKDTLYLIEDVFNAYNIHFMSLSENFDTSTPFGKAMIGLLSVFAQLEREQIKERMQMGKLGRVKAGKISAWSNVPFGYTKVKDSYDVDPLRAGIVRRIYADYLAGKSITKITKELNREGHIGKGVNWSYRTVRQVLGNVTYTGRIIFKGQVYDGLHTGIISKADWDEVQRVLKIRQLDQAKKSNNPRPFQARYMLSGLLKCHYCGATLAIAKSHTKNGPLWRYVCPTRHVNKYHRNNAARYRIPPVNCELTYKYKDDLEKAVLREVKKVALDPDAVVASQDDGQSTIDKQAIKAQLAKIKRQQAKLVDLYLMSDDLNVDQLHDRAEKLKVQADALQAQLIHDTKRADAFKKTATDAAQIDQLDYEHQTAIVRMLIDHINVSNTGLDIYWQI

SEQ ID NO: 21032 - DNA, 50 bp, Limosilactobacillus fermentum
  source 1..50: mol_type = genomic DNA
taaaaagatttagagagtgttatttcaaccaccatctctaaatcttttct

SEQ ID NO: 21033 - DNA, 40 bp, Limosilactobacillus fermentum; identical to SEQ ID NO: 6858
  source 1..40: mol_type = genomic DNA

SEQ ID NO: 21034 - DNA, 40 bp, Limosilactobacillus fermentum; identical to SEQ ID NO: 6859
  source 1..40: mol_type = genomic DNA

SEQ ID NO: 21035 - DNA, 50 bp, Limosilactobacillus fermentum
  source 1..50: mol_type = genomic DNA
taaaaaggtttgatgagtgtaatatattcatccatccatccatcatttat

SEQ ID NO: 21036 - protein, 552 aa, Eubacterium ventriosum
MKNKKIKCDIYTRVSTTMQVDGYSLDAQKEKLKRYAEFQNMEIVNEYSDEGKSGKSVEGRPEFQRMLDNIENGTDEVQFVLVFKLSRFGRNAADVLNSLQRMQDFGVNLICVEDGIDSSKDSGKLMISVLSAVAEIERENILVQTMEGRKQKAREGKWNGGFAPYGYELVNGELQIAEDEAEIIRLIYDKFIHTNMGISAIAAWLNQHGYKKKKRQNNTLDAFASSFIKGVLDNPVYCGKLAYGRRKNEKVSGTRNEYRIVKQENYMLHDGIHEGIISETDWELAHQKREKTGVKYEKTHSLDHEHILSGILRCPLCGSGMYGNVNRKKKKDGTLYKDYFYYACKHRRLVDGHKCGYRKQWSEEKINNAVEEVIRKLVKNPKFEEAILNKIGSRIDTEEIEKEIEGLEKQHRQLTGAKARLGQQMDSLDIMDKFYEKKYQDMETRLYRLYDEIEGVENSIEEVKNRLLNIRQQKISEENVYQFLLYFDKLYDKFTDLEKKEFLNSFVEQVDIYEQEQPDGRFLKHIKFRFPVYFGDRETQELCWDNESTVET

SEQ ID NO: 21037 - DNA, 50 bp, Eubacterium ventriosum
  source 1..50: mol_type = genomic DNA
gacaacgaaagtaccgttgagacggttgttcttttgtcccaacaaaagcc

SEQ ID NO: 21038 - DNA, 40 bp, Eubacterium ventriosum
  source 1..40: mol_type = genomic DNA
cacaaatcatgtggagacggtatgtttattgtccaaactc

SEQ ID NO: 21039 - DNA, 40 bp, Eubacterium ventriosum
  source 1..40: mol_type = genomic DNA
cacaaatcatgtggagacggcatgtttattgtccaaactc

SEQ ID NO: 21040 - DNA, 50 bp, Eubacterium ventriosum
  source 1..50: mol_type = genomic DNA
ggcaacgtattattacttgagactgctcttctgttgagaagagaaaaggc

SEQ ID NO: 21041 - protein, 489 aa, Bacillus cereus
MASIEDIRHVAIYLRLSRDEEKKGIDEILANHKKRLIQHCESKKWSYDIYQEIASGADRNRQQLDDMLAKVENNEYDAVVVHAVDRLGRDKKHNADIQEKLFVNDTYIATPEGTFDWDNDSDMMLLDFNSLLAAQELRITKRRLQRGKLAASEKGLWVHGDPPLGYDKDPATRKLVKNKKAEHITYIFKAIADGKTIPEICHELNEVMGVRTRTGKKFAYNSICRIVNNEVYTGTLVYNKYWKKRKERPKDEWKRIKNTHPAIIDEKTWAKVNEIVNTYSFSAPRSRNKIYPTTKLIFCGNCGKVQGTQMAHTGKMYIKICRYCKNRTFQYEPVLRHIKKELANHIPEILKDIKGLERNDNSTEMEYKKKQIQKQIIKTATALDTIETMRIEGDLTPTRYRERKTEYEEKVEQLHSELQEIEKQNPQEKIAGLKEKKQRIEYLLQNWQFLDGEGLTDEEVNRSLHFIIERIDWTYGKGDEKPMVEIEYK

SEQ ID NO: 21042 - DNA, 50 bp, Bacillus cereus
  source 1..50: mol_type = genomic DNA
aaatagtccctaaaaaactacaaaacaaggttgtttggtggggactacag

SEQ ID NO: 21043 - DNA, 40 bp, Bacillus cereus
  source 1..40: mol_type = genomic DNA
actcgtatttactggaccgactggttctgggaagacaacg

SEQ ID NO: 21044 - DNA, 40 bp, Bacillus cereus; identical to SEQ ID NO: 21043
  source 1..40: mol_type = genomic DNA

SEQ ID NO: 21045 - DNA, 50 bp, Bacillus cereus
  source 1..50: mol_type = genomic DNA
aaatagtcatggtaatatgacaaaacaaggttttttaattccccctaaag

SEQ ID NO: 21046 - protein, 489 aa, Bacillus anthracis
MASIEDIRHVAIYLRLSRDEENKGVNEILSNHRKRLTELCERNKWSYDLYQEIASGADRKRQQLEEMLVKVERNEYDAVVVHAVDRLGRDKKHTADIQEKLFVNDTFIVTPDRIFDWDDDNDMMLLDFNSLLAAQELRITKRRLQRGKLAASEKGLWVHGDPPLGYDKDPVTRKLMKNANAEHVTYIFKAIADGKTIPEICHELNEVMGVRTRTGKKFAYNSICRIVNNEVYTGTLVYNKYWKKRKERPKNEWKRIKNAHPAIIDEKTWAQVNEIVNTYSFSAPRSRNKIYPTTKLIYCGNCGKVQGTQMAHTGKMYIKICRYCKNRTYQYEPVLKLIKADLANHIPEILKDIKGLERNDNSVEMEYKKKQIKKQINKTTTALDTIETMRIEGDLTPARYRERKTEYEEKMEQLHLELQEIEKQNPQEKIADLKEKKKRIEYLLQNWQFLDGEGLTDEEVNRSLHFIIERIDWTYAKGDEKPMVEIEYK

SEQ ID NO: 21047 - DNA, 50 bp, Bacillus anthracis; identical to SEQ ID NO: 21042
  source 1..50: mol_type = genomic DNA

SEQ ID NO: 21048 - DNA, 40 bp, Bacillus anthracis
  source 1..40: mol_type = genomic DNA
actcgtatttactggaccgactggttcagggaagacaaca

SEQ ID NO: 21049 - DNA, 40 bp, Bacillus anthracis; identical to SEQ ID NO: 21048
  source 1..40: mol_type = genomic DNA

SEQ ID NO: 21050 - DNA, 50 bp, Bacillus anthracis; identical to SEQ ID NO: 21045
  source 1..50: mol_type = genomic DNA

SEQ ID NO: 21051 - protein, 489 aa, Bacillus cereus
MASIEDIRHVAIYLRLSRDEEKKGIDEILANHKKRLIQHCESKKWSYDIYQEIASGADRNRQQLDDMLAKVENNEYDAVVVHAVDRLGRDKKHNADIQEKLFVNDTYIATPEGTFDWDNDSDMMLLDFNSLLAAQELRITKRRLQRGKLAASEKGLWVHGDPPLGYDKDPATRKLVKNKKAEHITYIFKAIADGKTIPEICHELNEVMGVRTRTGKKFAYNSICRIVNNEVYTGTLVYNKYWKKRKERPKDEWKRIKNTHPAIIDEKTWAKVNEIVNTYSFSAPRSRNKIYPTTKLIFCGNCGKVQGTQMAHTGKMYIKICRYCKNRTFQYEPVLRLIKADLANHIPEILKDIKGLERNDNSAETEYKKKQIQKQITKTATALDTIETMRIEGDLTPTRYRERKTEYEEKVEQLHSELQEIEKQNPQEKIASLKEKKLRIEYLLQNWQFLDGEGLTDEEVNRSLHFIIERIEWTYAKGDEQPTVEIKYK

SEQ ID NO: 21052 - DNA, 50 bp, Bacillus cereus; identical to SEQ ID NO: 21042
  source 1..50: mol_type = genomic DNA

SEQ ID NO: 21053 - DNA, 40 bp, Bacillus cereus
  source 1..40: mol_type = genomic DNA
actcgtgtttactggaccgactggttctgggaagacaacg

SEQ ID NO: 21054 - DNA, 40 bp, Bacillus cereus; identical to SEQ ID NO: 21053
  source 1..40: mol_type = genomic DNA

SEQ ID NO: 21055 - DNA, 50 bp, Bacillus cereus; identical to SEQ ID NO: 21045
  source 1..50: mol_type = genomic DNA

SEQ ID NO: 21056 - protein, 489 aa, Bacillus toyonensis
MAFTENIRHVAIYLRLSRDEENKGINEILANHRKTLTELCDRNKWSYDLYQEIASGADRKRQQLDEMLVKVERNEYDAIVVNAVDRLGRDKKHTADIQEKLFVNDTFIVTPDRIFDWDDDNDMMLLDFNSLLAAQELRITKRRLQKGKLAASEKGLWVHGDPPLGYDKDPATRKLVKNKKAEHITYIFKAIADGKTIPDVCHELNEVMGVRTRTGKKFAYNSICRIVNNEVYTGTLVYNKYWKKRKERPKNEWKRIENAHPAIIDKETWGKVNKLVNTYSFSAPRSKNKIYPTTKLIFCGNCGKVQGTQMAHTGKLYIKICRYCKNRTYQYEPILKLIKEDVGSHIPKILKDIKELEQNDNGAEMEYKKKQVQKQINKINTALDTIETMRIEGDLNPTRYRERKAEYEEKMEQLHLEFQEIEKQNPQEKIANLHEMKQRIEYLLQNWQFLDGEGLTDEEVNRSLHFIIERIEWTYGKGDKQPTMKIKYK

SEQ ID NO: 21057 - DNA, 50 bp, Bacillus toyonensis; identical to SEQ ID NO: 21042
  source 1..50: mol_type = genomic DNA

SEQ ID NO: 21058 - DNA, 40 bp, Bacillus toyonensis; identical to SEQ ID NO: 21043
  source 1..40: mol_type = genomic DNA

SEQ ID NO: 21059 - DNA, 40 bp, Bacillus toyonensis; identical to SEQ ID NO: 21043
  source 1..40: mol_type = genomic DNA

SEQ ID NO: 21060 - DNA, 50 bp, Bacillus toyonensis; identical to SEQ ID NO: 21045
  source 1..50: mol_type = genomic DNA

SEQ ID NO: 21061 - protein, 481 aa, Streptococcus sp group B; identical to SEQ ID NO: 391

SEQ ID NO: 21062 - DNA, 50 bp, Streptococcus sp group B; identical to SEQ ID NO: 1812
  source 1..50: mol_type = genomic DNA

SEQ ID NO: 21063 - DNA, 40 bp, Streptococcus sp group B
  source 1..40: mol_type = genomic DNA
gttgggcttaacgtgcttctcgatgaaagtgatactgagc

SEQ ID NO: 21064 - DNA, 40 bp, Streptococcus sp group B
  source 1..40: mol_type = genomic DNA
gttgggcttaacgtgcttctggatgaaagtgatactgagc

SEQ ID NO: 21065 - DNA, 50 bp, Streptococcus sp group B
  source 1..50: mol_type = genomic DNA
taaataaatagaaaaccctagatttgaatccagattttgccatttcctgg

SEQ ID NO: 21066 - protein, 481 aa, Streptococcus agalactiae; identical to SEQ ID NO: 2986

SEQ ID NO: 21067 - DNA, 50 bp, Streptococcus agalactiae; identical to SEQ ID NO: 1812
  source 1..50: mol_type = genomic DNA

SEQ ID NO: 21068 - DNA, 40 bp, Streptococcus agalactiae
  source 1..40: mol_type = genomic DNA
ccaagataccatcggcgtctctgtttacgtaaatccccta

SEQ ID NO: 21069 - DNA, 40 bp, Streptococcus agalactiae
  source 1..40: mol_type = genomic DNA
ccaagataccatcggcgtctgtgtttacgtaaatccccta

SEQ ID NO: 21070 - DNA, 50 bp, Streptococcus agalactiae; identical to SEQ ID NO: 21065
  source 1..50: mol_type = genomic DNA

SEQ ID NO: 21071 - protein, 481 aa, Streptococcus agalactiae; identical to SEQ ID NO: 391

SEQ ID NO: 21072 - DNA, 50 bp, Streptococcus agalactiae; identical to SEQ ID NO: 1812
  source 1..50: mol_type = genomic DNA

SEQ ID NO: 21073 - DNA, 40 bp, Streptococcus agalactiae; identical to SEQ ID NO: 21068
  source 1..40: mol_type = genomic DNA

SEQ ID NO: 21074 - DNA, 40 bp, Streptococcus agalactiae; identical to SEQ ID NO: 21069
  source 1..40: mol_type = genomic DNA

SEQ ID NO: 21075 - DNA, 50 bp, Streptococcus agalactiae; identical to SEQ ID NO: 21065
  source 1..50: mol_type = genomic DNA

SEQ ID NO: 21076 - protein, 481 aa, Streptococcus agalactiae
MITTNKVAIYVRVSTTNQAEEGYSIEEQKDKLKSYCNIKDWNVFNVYTDGGFSGSNTERPALEQLIKDAKKKKFDTVLVYKLDRLSRSQKDTLYLIEDIFLENNIDFVSLLENFDTSTPFGKAMVGILSVFAQLEREQIKERMQLGKLGRAKAGKSMMWAKVAYGYTYHKGSGEMTINELEAIVVREIFNSYLEGMSITKLRDKINDTYPKTPAWSYRIIRQILDNPVYCGYNQYKGEVYKGNHEPIISEEDFNKTQDELKIRQRTAAEKFNPRPFQAKYMLSGIAQCGYCKAPLKIIMGAVRKDGTRFIKYECYQRHPRTTRGVTTYNNNQKCHSSSYYKQDVEDYVLREISKLQNDKKAIDELFENTNMDTIDRESIKKQIEAISSKIKRLNDLYIDDRITIDELRKKSTEFTLSKTFLKEKLENDPILKQQESKDNIKKKLSCDDILTMDYDQQKIIVKGLINKVQVTADKVIIKWKI

SEQ ID NO: 21077 - DNA, 50 bp, Streptococcus agalactiae; identical to SEQ ID NO: 1812
  source 1..50: mol_type = genomic DNA

SEQ ID NO: 21078 - DNA, 40 bp, Streptococcus agalactiae; identical to SEQ ID NO: 21063
  source 1..40: mol_type = genomic DNA

SEQ ID NO: 21079 - DNA, 40 bp, Streptococcus agalactiae; identical to SEQ ID NO: 21064
  source 1..40: mol_type = genomic DNA

SEQ ID NO: 21080 - DNA, 50 bp, Streptococcus agalactiae; identical to SEQ ID NO: 21065
  source 1..50: mol_type = genomic DNA

SEQ ID NO: 21081 - protein, 481 aa, Streptococcus agalactiae; identical to SEQ ID NO: 2986

SEQ ID NO: 21082 - DNA, 50 bp, Streptococcus agalactiae; identical to SEQ ID NO: 1812
  source 1..50: mol_type = genomic DNA

SEQ ID NO: 21083 - DNA, 40 bp, Streptococcus agalactiae; identical to SEQ ID NO: 21063
  source 1..40: mol_type = genomic DNA

SEQ ID NO: 21084 - DNA, 40 bp, Streptococcus agalactiae; identical to SEQ ID NO: 21064
  source 1..40: mol_type = genomic DNA

SEQ ID NO: 21085 - DNA, 50 bp, Streptococcus agalactiae; identical to SEQ ID NO: 21065
  source 1..50: mol_type = genomic DNA

SEQ ID NO: 21086 - protein, 481 aa, Streptococcus agalactiae; identical to SEQ ID NO: 391

SEQ ID NO: 21087 - DNA, 50 bp, Streptococcus agalactiae; identical to SEQ ID NO: 1812
  source 1..50: mol_type = genomic DNA

SEQ ID NO: 21088 - DNA, 40 bp, Streptococcus agalactiae
  source 1..40: mol_type = genomic DNA
gctaaacaacctactaatatcaaagaacatagtactcccc

SEQ ID NO: 21089 - DNA, 40 bp, Streptococcus agalactiae
  source 1..40: mol_type = genomic DNA
gctaaacaacctactaatatgaaagaacatagtactcccc

SEQ ID NO: 21090 - DNA, 50 bp, Streptococcus agalactiae; identical to SEQ ID NO: 21065
  source 1..50: mol_type = genomic DNA

SEQ ID NO: 21091 - protein, 481 aa, Streptococcus agalactiae; identical to SEQ ID NO: 2986

SEQ ID NO: 21092 - DNA, 50 bp, Streptococcus agalactiae; identical to SEQ ID NO: 1812
  source 1..50: mol_type = genomic DNA

SEQ ID NO: 21093 - DNA, 40 bp, Streptococcus agalactiae
  source 1..40: mol_type = genomic DNA
cagaaatataagccacatttccaacggcgtaagccagagt

SEQ ID NO: 21094 - DNA, 40 bp, Streptococcus agalactiae
  source 1..40: mol_type = genomic DNA
cagaaatataagccacatttgcaacggcgtaagccagagt

SEQ ID NO: 21095 - DNA, 50 bp, Streptococcus agalactiae; identical to SEQ ID NO: 21065
  source 1..50: mol_type = genomic DNA

SEQ ID NO: 21096 - protein, 481 aa, Streptococcus agalactiae; identical to SEQ ID NO: 21076

SEQ ID NO: 21097 - DNA, 50 bp, Streptococcus agalactiae; identical to SEQ ID NO: 1812
  source 1..50: mol_type = genomic DNA

SEQ ID NO: 21098 - DNA, 40 bp, Streptococcus agalactiae; identical to SEQ ID NO: 21068
  source 1..40: mol_type = genomic DNA

SEQ ID NO: 21099 - DNA, 40 bp, Streptococcus agalactiae; identical to SEQ ID NO: 21069
  source 1..40: mol_type = genomic DNA

SEQ ID NO: 21100 - DNA, 50 bp, Streptococcus agalactiae; identical to SEQ ID NO: 21065
  source 1..50: mol_type = genomic DNA

SEQ ID NO: 21101 - protein, 481 aa, Streptococcus agalactiae; identical to SEQ ID NO: 391

SEQ ID NO: 21102 - DNA, 50 bp, Streptococcus agalactiae; identical to SEQ ID NO: 1812
  source 1..50: mol_type = genomic DNA

SEQ ID NO: 21103 - DNA, 40 bp, Streptococcus agalactiae
  source 1..40: mol_type = genomic DNA
acgatagacaagcctcatttctttggttgaacatctcatt

SEQ ID NO: 21104 - DNA, 40 bp, Streptococcus agalactiae
  source 1..40: mol_type = genomic DNA
acgatagacaagcctcatttgtttggttgaacatctcatt

SEQ ID NO: 21105 - DNA, 50 bp, Streptococcus agalactiae; identical to SEQ ID NO: 21065
  source 1..50: mol_type = genomic DNA

SEQ ID NO: 21106 - protein, 568 aa, Acetivibrio thermocellus
MKQLMKRAAVLCRVSTEDQAEGTSLDTQAEICMEEAKRRGYHVTEEDVFKEDGYSGALGIDARPVLHQLWEKYQAGEYDAIFVYRQDRLSRSLALFAALRDEARKVRRCGLKGDGFIFVQGSNDDTPEGKLQSNILATFAEYEREVIKLRTVTGKKKLAKAGKYSGGSQPFGYRWDDEKEQWVIREDEAKIVKLIFQWYVYGDESGQPLGMVRIAEKLTELGIPTPNQFRKTRKGRAGKMQAYWSDATVQRILTHTVYAGTNYLWRGDKMQVSPEQVEKIKNEKTDGWFEVDFPPIIDKMLWEKAQEKRVQSRGGFNRKRPKPILAGRIFCGICQRPFHDAMYNKGTKLVFKCNGKLKQYHLDGSPKCDSPVLDGEAVTAEVKKRIIDMLQDKDQMRKAIEEYVGSLERRKEELETLLSPISEQISQLQEKQKRLATVYVDGALSHEDYKRQINELKEQELAVRKRYEHYWPEMENLTKLEQNIAVVKEAIEEELFDVRYRPDENTVTENIAFVKVHDEKHLTVGFPQRVVIWEELLDRLQVKLWVYPDRLEVRGIVPIEDIANPKYC

SEQ ID NO: 21107 - DNA, 50 bp, Acetivibrio thermocellus
  source 1..50: mol_type = genomic DNA
agatatagcgaatcctaaatactgttcagtatttaggaatcgcttaaatt

SEQ ID NO: 21108 - DNA, 40 bp, Acetivibrio thermocellus
  source 1..40: mol_type = genomic DNA
caagtatacctaaatgtagttaattataacagcacgaatg

SEQ ID NO: 21109 - DNA, 40 bp, Acetivibrio thermocellus
  source 1..40: mol_type = genomic DNA
caagtatacctaaatgtagtaaattataacagcacgaatg

SEQ ID NO: 21110 - DNA, 50 bp, Acetivibrio thermocellus
  source 1..50: mol_type = genomic DNA
agaaaaagcacatttataatactgtactgtatttatgaataccataaatt

SEQ ID NO: 21111 - protein, 471 aa, Streptococcus pyogenes; identical to SEQ ID NO: 4386

SEQ ID NO: 21112 - DNA, 50 bp, Streptococcus pyogenes
  source 1..50: mol_type = genomic DNA
aagcattatttaggcactacaactagtatagttgtacatgaaaaacgctg

SEQ ID NO: 21113 - DNA, 40 bp, Streptococcus pyogenes; identical to SEQ ID NO: 4388
  source 1..40: mol_type = genomic DNA

SEQ ID NO: 21114 - DNA, 40 bp, Streptococcus pyogenes; identical to SEQ ID NO: 4389
  source 1..40: mol_type = genomic DNA

SEQ ID NO: 21115 - DNA, 50 bp, Streptococcus pyogenes; identical to SEQ ID NO: 4390
  source 1..50: mol_type = genomic DNA

SEQ ID NO: 21116 - protein, 471 aa, Streptococcus pyogenes
MRKVAIYSRVSTINQAEEGYSIQGQIEALTKYCEAMEWKIYKNYSDAGFSGGKLERPAITELIEDGKNNKFDTILVYKLDRLSRNVKDTLYLVKDVFTANNIHFVSLKENIDTSSAMGNLFLTLLSAIAEFEREQIKERMQFGVMNRAKSGKTTAWKTPPYGYRYNKDEKTLSVNELEAANVRQMFDMIISGCSIMSITNYARDNFVGNTWTHVKVKRILENETYKGLVKYREQTFSGDHQAIIDEKTYNKAQIALAHRTDTKTNTRPFQGKYMLSHIAKCGYCGAPLKVCTGRAKNDGTRRQTYVCVNKTESLARRSVNNYNNQKICNTGRYEKKHIEKYVIDVLYKLQHDKEYLKKIKKDDNIIDITPLKKEIEIIDKKINRLNDLYINDLIDLPKLKKDIEELNHLKDDYNKAIKLNYLDKKNEDSLGMLMDNLDIRKSSYDVQSRIVKQLIDRVEVTMDNIDIIFKF

SEQ ID NO: 21117 - DNA, 50 bp, Streptococcus pyogenes; identical to SEQ ID NO: 21112
  source 1..50: mol_type = genomic DNA

SEQ ID NO: 21118 - DNA, 40 bp, Streptococcus pyogenes; identical to SEQ ID NO: 4388
  source 1..40: mol_type = genomic DNA

SEQ ID NO: 21119 - DNA, 40 bp, Streptococcus pyogenes; identical to SEQ ID NO: 4389
  source 1..40: mol_type = genomic DNA

SEQ ID NO: 21120 - DNA, 50 bp, Streptococcus pyogenes; identical to SEQ ID NO: 4390
  source 1..50: mol_type = genomic DNA

SEQ ID NO: 21121 - protein, 410 aa, Streptococcus pyogenes
MIEDGKNNKFDTILVYKLDRLSRNVKDTLYLVKDVFTANNIHFVSLKENIDTSSAMGNLFLTLLSAIAEFEREQIKERMQFGVMNRAKSGKTTAWKTPPYGYRYNKDEKTLSVNELEAANVRQMFDMIISGCSIMSITNYARDNFVGNTWTHVKVKRILENETYKGLVKYREQTFSGDHQAIIDEKTYNKAQIALAHRTDTKTNTRPFQGKYMLSHIAKCGYCGAPLKVCTGRAKNDGTRRQTYVCVNKTESLARRSVNNYNNQKICNTGRYEKKHIEKYVIDVLYKLQHDKEYLKKIKKDDNIIDITPLKKEIEIIDKKINRLNDLYINDLIDLPKLKKDIEELNHLKDDYNKAIKLNYLDKKNEDSLGMLMDNLDIRKSSYDVQSRIVKQLIDRVEVTMDNIDIIFKF

SEQ ID NO: 21122 - DNA, 50 bp, Streptococcus pyogenes; identical to SEQ ID NO: 21112
  source 1..50: mol_type = genomic DNA

SEQ ID NO: 21123 - DNA, 40 bp, Streptococcus pyogenes; identical to SEQ ID NO: 4388
  source 1..40: mol_type = genomic DNA

SEQ ID NO: 21124 - DNA, 40 bp, Streptococcus pyogenes; identical to SEQ ID NO: 4389
  source 1..40: mol_type = genomic DNA

SEQ ID NO: 21125 - DNA, 50 bp, Streptococcus pyogenes; identical to SEQ ID NO: 4390
  source 1..50: mol_type = genomic DNA

SEQ ID NO: 21126 - protein, 471 aa, Streptococcus pyogenes
MRKVAIYSRVSTINQAEEGYSIQGQIEALTKYCEAMEWKIYKNYSDAGFSGGKLERPAITELIEDGKNNKFDTILVYKLDRLSRNVKDTLYLVKDVFTANNIHFVSLKENIDTSSAMGNLFLTLLSAIAEFEREQIKERMQFGVMNRAKSGKTTAWKTPPYGYRYNKDEKTLSVNELEAANVRQMFDMIISGCSIMSITNYARDNFVGNTWTHVKVKRILENETYKGLVKYREQTFSGDHQAIIDEKTYNKAQIALAHRTDTKTNTRPFQGKYMLSHIAKCGYCGAPLKVCTGRAKNDGTRRQTYVCVNKTESLARRSVNNYNNQKICNTGQYEKKHIEKYVIDVLYKLQHDKEYLKKIKKDDNIIDITPLKKEIEIIDKKINRLNDLYINDLIDLPKLKKDIEELNHLKDDYNKAIKLNYLDKKNEDSLGMLMDNLDIRKSSYDVQSRIVKQLIDRVEVTMDNIDIIFKF

SEQ ID NO: 21127 - DNA, 50 bp, Streptococcus pyogenes; identical to SEQ ID NO: 21112
  source 1..50: mol_type = genomic DNA

SEQ ID NO: 21128 - DNA, 40 bp, Streptococcus pyogenes; identical to SEQ ID NO: 4388
  source 1..40: mol_type = genomic DNA

SEQ ID NO: 21129 - DNA, 40 bp, Streptococcus pyogenes; identical to SEQ ID NO: 4389
  source 1..40: mol_type = genomic DNA

SEQ ID NO: 21130 - DNA, 50 bp, Streptococcus pyogenes; identical to SEQ ID NO: 4390
  source 1..50: mol_type = genomic DNA

SEQ ID NO: 21131 - protein, 471 aa, Streptococcus pyogenes
MRKVAIYSRVSTINQAEEGYSIQGQIEALTKYCEAMEWKIYKNYSDAGFSGGKLERPAITELIEDGKNNKFDTILVYKLDRLSRNVKDTLYLVKDVFTANNIHFVSLKENIDTSSAMGNLFLTLLSAIAEFEREQIKERMQFGVMNRAKSGKTTAWKTPPYGYRYNKDEKTLSVNELEAANVRQMFDMVISGCSIMSITNYARDNFVGNTWTHVKVKRILENETYKGLVKYKEQTFSGDHQAIIDEKTYNKAQIALAHRTDTKTNTRPFQGKYMLSHIAKCGYCGAPLKVCTGRAKNDGTRRQTYVCVNKTESLARRSVNNYNNQKICNTGRYEKKHIEKYVIDVLYKLQHDKEYLKKIKKDDNIIDITPLKKEIEIIDKKINRLNDLYINDLIDLPKLKKDIEELNHLKDDYNKAIKLNYLDKKNEDSLGMLMDNLDIRKSSYDVQSRIVKQLIDRVEVTMDNIDIIFKF

SEQ ID NO: 21132 - DNA, 50 bp, Streptococcus pyogenes; identical to SEQ ID NO: 21112
  source 1..50: mol_type = genomic DNA

SEQ ID NO: 21133 - DNA, 40 bp, Streptococcus pyogenes; identical to SEQ ID NO: 4388
  source 1..40: mol_type = genomic DNA

SEQ ID NO: 21134 - DNA, 40 bp, Streptococcus pyogenes; identical to SEQ ID NO: 4389
  source 1..40: mol_type = genomic DNA

SEQ ID NO: 21135 - DNA, 50 bp, Streptococcus pyogenes; identical to SEQ ID NO: 4390
  source 1..50: mol_type = genomic DNA

SEQ ID NO: 21136 - protein, 471 aa, Streptococcus pyogenes
MRKVAIYSRVSTINQAEEGYSIQGQIEALTKYCEAMEWKIYKNYSDAGFSGGKLKRPAITELIEDGKNNKFDTILVYKLDRLSRNVKDTLYLVKDVFTANNIHFVSLKENIDTSSAMGNLFLTLLSAIAEFEREQIKERMQFGVMNRAKSGKTTAWKTPPYGYRYNKDEKTLSVNELEAANVRQMFNMIISGCSIMSITNYARDNFVGNTWTHVKVKRILENETYKGLVKYREQTFSGDHQAIIDEKTYNKAQIALAHRTDTKTNTRPFQGKYMLSHIAKCGYCGAPLKVCTGRAKNDGTRRQTYVCVNKTESLARRSVNNYNNQKICNTGRYEKKHIEKYVIDVLYKLQHDKEYLKKIKKDDNIIDITPLKKEIEIIDKKINRLNDLYINDLIDLPKLKKDIEELNHLKDDYNKAIKLNYLDKKNEDSLGMLMDNLDIRKSSYDVQSRIVKQLIDRVEVTMDNIDIIFKF

SEQ ID NO: 21137 - DNA, 50 bp, Streptococcus pyogenes; identical to SEQ ID NO: 21112
  source 1..50: mol_type = genomic DNA

SEQ ID NO: 21138 - DNA, 40 bp, Streptococcus pyogenes; identical to SEQ ID NO: 4388
  source 1..40: mol_type = genomic DNA

SEQ ID NO: 21139 - DNA, 40 bp, Streptococcus pyogenes; identical to SEQ ID NO: 4389
  source 1..40: mol_type = genomic DNA

SEQ ID NO: 21140 - DNA, 50 bp, Streptococcus pyogenes; identical to SEQ ID NO: 4390
  source 1..50: mol_type = genomic DNA

SEQ ID NO: 21141 - protein, 471 aa, Streptococcus pyogenes
MRKVAIYSRVSTINQAEEGYSIQGQIEALTKYCEAMEWKIYKNYSDAGFSGGKLERPAITELIEDGKNNKFDTILVYKLDRLSRNVKDTLYLVKDVFTANNIHFVSLKENIDTSSAMGNLFLTLLSAIAEFEREQIKERMQFGVMNRAKSGKTTAWKTPPYGYRYNKDEKTLSVNELEAANVRQMFDMIISGCSIMSITNYARDNFVGNTWTHVKVKRILENETYKGLVKYREQTFSGDHQAIIDEKTYNKAQIALAHRTDTKTNTRPFQGKYILSHIAKCGYCGAPLKVCTGRAKNDGTRRQTYVCVNKTESLARRSVNNYNNQKICNTGRYEKKHIEKYVIDVLYKLQHDKEYLKKIKKDDNIIDITPLKKEIEIIDKKINRLNDLYINDLIDLPKLKKDIEELNHLKDDYNKAIKLNYLDKKNEDSLGMLMDNLDIRKSSYDVQSRIVKQLIDRVEVTMDNIDIIFKF

SEQ ID NO: 21142 - DNA, 50 bp, Streptococcus pyogenes; identical to SEQ ID NO: 21112
  source 1..50: mol_type = genomic DNA

SEQ ID NO: 21143 - DNA, 40 bp, Streptococcus pyogenes; identical to SEQ ID NO: 4388
  source 1..40: mol_type = genomic DNA

SEQ ID NO: 21144 - DNA, 40 bp, Streptococcus pyogenes; identical to SEQ ID NO: 4389
  source 1..40: mol_type = genomic DNA

SEQ ID NO: 21145 - DNA, 50 bp, Streptococcus pyogenes; identical to SEQ ID NO: 4390
  source 1..50: mol_type = genomic DNA

SEQ ID NO: 21146 - protein, 471 aa, Streptococcus pyogenes
MRKVAIYSRVSTINQAEEGYSIQGQIEALTKYCEAMEWKIYKNYSDAGFSGGKLERPAITELIEDGKNNKFDTILVYKLDRLSRNVKDTLYLVKDVFTANNIHFVSLKENIDTSSAMGNLFLTLLSAIAEFEREQIKERMQFGVMNRAKSGKTTAWKTPPYGYRYNKDEKTLSVNELEAANVRQMFDMIISGCSIMSITNYARDNFVGNTWTHVKVKRILENETYKGLVKYREQTFSGDHQAIIDEKTYNKAQIALAHRTDTKTNTRPFQGKYMLSHIAKCGYCGAPLKVCTGRAKNDGTRRQTYVCVNKTESLARRSVNNYNNQKICNTGRYEKKHIEKYVIDVLYKLQHDKEYLKKIKKDDNIHHITPLKKEIEIIDKKINRLNDLYINDLIDLPKLKKDIEELNHLKDDYNKAIKLNYLDKKNEDSLGMLMDNLDIRKSSYDVQSRIVKQLIDRVEVTMDNIDIIFKF

SEQ ID NO: 21147 - DNA, 50 bp, Streptococcus pyogenes; identical to SEQ ID NO: 21112
  source 1..50: mol_type = genomic DNA

SEQ ID NO: 21148 - DNA, 40 bp, Streptococcus pyogenes; identical to SEQ ID NO: 4388
  source 1..40: mol_type = genomic DNA

SEQ ID NO: 21149 - DNA, 40 bp, Streptococcus pyogenes; identical to SEQ ID NO: 4389
  source 1..40: mol_type = genomic DNA

SEQ ID NO: 21150 - DNA, 50 bp, Streptococcus pyogenes; identical to SEQ ID NO: 4390
  source 1..50: mol_type = genomic DNA

SEQ ID NO: 21151 - protein, 471 aa, Streptococcus pyogenes
MRKVAIYSRVSTINQAEEGYSIQGQIEALTKYCEAMEWKIYKNYSDAGFSGGKLERPAITELIEDGKNNKFDTILVYKLDRLSRNVKDTLYLVKDVFTANNIHFVSLKENIDTSSAMGNLFLTLLSAIAEFEREQIKERMQFGVMNRAKSGKTTAWKTPPYGYRYNKDEKTLSVNELEAANVRQMFDMIISGCSIMSITNYARDNFVGNTWTHVKVKRILENETYKGLVKYREQTFSGDHQAIIDEKTYNKAQIALAHRTDTKTNTRPFQGKYMLSHIAKCGYCGAPLKVCTGRAKNDGTRRQTYVCVNKTESLARRSVNNYNNQKICNTGRYEKKHIEKYVIDVLYKLQHDKEYLKKIKKDDNIIDITPLKKEIEIIDKKINRLNDSYINDLIDLPKLKKDIEELNHLKDDYNKAIKLNYLDKKNEDSLGMLMDNLDIRKSSYDVQSRIVKQLIDRVEVTMDNIDIIFKF

SEQ ID NO: 21152 - DNA, 50 bp, Streptococcus pyogenes; identical to SEQ ID NO: 21112
  source 1..50: mol_type = genomic DNA

SEQ ID NO: 21153 - DNA, 40 bp, Streptococcus pyogenes; identical to SEQ ID NO: 4388
  source 1..40: mol_type = genomic DNA

SEQ ID NO: 21154 - DNA, 40 bp, Streptococcus pyogenes; identical to SEQ ID NO: 4389
  source 1..40: mol_type = genomic DNA

SEQ ID NO: 21155 - DNA, 50 bp, Streptococcus pyogenes; identical to SEQ ID NO: 4390
  source 1..50: mol_type = genomic DNA

SEQ ID NO: 21156 - protein, 471 aa, Streptococcus pyogenes
MRKVAIYSRVSTINQAEEGYSIQGQIEALTKYCEAMEWKIYKNYSDAGFSGGKLERPAITELIEDGKNNKFDTILVYKLDRLSRNVKDTLYLVKDVFTANNIHFVSLKENIDTSSAMGNLFLTLLSAIAEFEREQIKERMQFGVMNRAKSGKTTAWKTPPYGYRYNKDEKTLSVNELEAANVRQMFDMIISGCSIMSITNYARDNFVGNTWTHVKVKRILENETYKGLVKYREQTFSGDHQAIIDEKTYNKAQIALAHRTDTKTNTRPFQGKYLLSHIAKCGYCGAPLKVCTGRAKNDGTRRQTYVCVNKTESLARRSVNNYNNQKICNTGRYEKKHIEKYVIDVLYKLQHDKEYLKKIKKDDNIIDITPLKKEIEIIDKKINRLNDLYINDLIDLPKLKKDIEELNHLKDDYNKAIKLNYLDKKNEDSLGMLMDNIDIRKSSYDVQSRIVKQLIDRVEVTMDNIDIIFKF

SEQ ID NO: 21157 - DNA, 50 bp, Streptococcus pyogenes; identical to SEQ ID NO: 21112
  source 1..50: mol_type = genomic DNA

SEQ ID NO: 21158 - DNA, 40 bp, Streptococcus pyogenes; identical to SEQ ID NO: 4388
  source 1..40: mol_type = genomic DNA

SEQ ID NO: 21159 - DNA, 40 bp, Streptococcus pyogenes; identical to SEQ ID NO: 4389
  source 1..40: mol_type = genomic DNA

SEQ ID NO: 21160 - DNA, 50 bp, Streptococcus pyogenes; identical to SEQ ID NO: 4390
  source 1..50: mol_type = genomic DNA

SEQ ID NO: 21161 - protein, 471 aa, Streptococcus pyogenes
MRKVAIYSRVSTINQAEEGYSIQGQIEALTKYCEAMEWKIYKNYSDAGFSGGKLERPAITELIEDGKNNKFDTILVYKLDRLSRNVKDTLYLVKDVFTANNIHFVSLKENIDTSSAMGNLFLTLLSAIAEFEREQIKERMQFGVMNRAKSGKTTAWKTPPYGYRYNKDEKTLSVNELEAANVRQMFDMIISGCSIMSITNYARDNFVGNTWTHVKVKRILENETYKGLVKYREQTFSGDHQAIIDEKTYNKAQIALAHRTDTKTNTRPFQGKYMLSHIAKCGYCGAPLKVCTGRAKNDGTRRQTYVCVNKTESLARRSVNNYNNQKICNTGRYEKKHIEKYVIDVLYKLQHDKEYLKKIKKDDNIIDITPLKKEIEIIDKKINRLNDLYINDLIDLPKLKKDIGELNHLKDDYNKAIKLNYLDKKNEDSLGMLMDNLDIRKSSYDVQSRIVKQLIDRVEVTMDNIDIIFKF

SEQ ID NO: 21162 - DNA, 50 bp, Streptococcus pyogenes; identical to SEQ ID NO: 21112
  source 1..50: mol_type = genomic DNA

SEQ ID NO: 21163 - DNA, 40 bp, Streptococcus pyogenes; identical to SEQ ID NO: 4388
  source 1..40: mol_type = genomic DNA

SEQ ID NO: 21164 - DNA, 40 bp, Streptococcus pyogenes; identical to SEQ ID NO: 4389
  source 1..40: mol_type = genomic DNA

SEQ ID NO: 21165 - DNA, 50 bp, Streptococcus pyogenes; identical to SEQ ID NO: 4390
  source 1..50: mol_type = genomic DNA

SEQ ID NO: 21166 - protein, 459 aa, Cryobacterium sp LW097
MTRRAALYFRQSLDVQEGIDRQRTRCRALVAARGWTVAGEYTDNDTSATKKRGETTAWATMLTDAKAGNFDIVVAVDLDRLVRTVRDLISLTETGVKVLTVDGEIDLTTADGEFRATMLAGIASFETRRKGERQKRANAARASLGLRSGGRRPFGFDQDGVTVRPIEAEAIRDGYNSLIAGVPLGGIARDWNARGLVSGQARSKAGHKGEASPWSPGSVRLVLLNPRNMGKRAHLGEIVADAVWPALVDESTWLATSAVLRDPARRSGKPNGRYLLSGLAVCGICGATAHAGANARAGVRGYRCSGSTGHFARKAQPVEEFVGAAIVARASLPEANEMLFDTERPDIADLNSELNMARERLVAIAVDYADGALTASQLRAITARLRERISGLESKLADGARVDILGPLISAPNVGAAWEAMPVAQQRTIIALLARVTLHPPGRGTRTFRPESVGIDWLL

SEQ ID NO: 21167 - DNA, 50 bp, Cryobacterium sp LW097
  source 1..50: mol_type = genomic DNA
ctctgctaaatagacgacttgcgcacccgcaggacacgtagatagcatta

SEQ ID NO: 21168 - DNA, 40 bp, Cryobacterium sp LW097
  source 1..40: mol_type = genomic DNA
atccgcgacagaccacgccacccggagtatccggtcgtag

SEQ ID NO: 21169 - DNA, 40 bp, Cryobacterium sp LW097
  source 1..40: mol_type = genomic DNA
atccgcgacagaccacgcctgccggagtatccggtcgtag

SEQ ID NO: 21170 - DNA, 50 bp, Cryobacterium sp LW097
  source 1..50: mol_type = genomic DNA
ccctggtaaattccagtcttgggctgctgtaggacatagacaaagcttta

SEQ ID NO: 21171 - protein, 577 aa, Pseudomonas aeruginosa
MPYAYPYIRFSSDVQKDGNSLLRQTKAIQAYLAENPHLEVDKRLNLEDLGKSGYAGQHLEKGGALHLFLEKIKKGEVEKGSVLIIEHFNRLSRLPLIKSITLFNEILANGVNIAVLEERQIFTAENLTSMDYLKAVLRFEVAHAESRDKSNKGIDNWQIKKQRLRDARDPVSARAEFTKTVPLWLTVDDRDILINEDKAVVVKLVFELCSKRNYGFMKIAKHLNENNIPRLDNSGRAWTFDIVKRLVHNRALIGEYQPRISVRKEGRKRLEYVPSSEAPITGVFPLVIEPALFDEVQAKTQSRKIGGGGRRADMPNLFLKLLRCNECGGSIKHQKHHNGYKEYRYLKCYNSLYGHCVSPGNRAWRYDDFESMFFQYAGRLNLDEIFTAANSEIETVMAEISSIEVSLAKQERKIEDLVRQVYESETVSTTLNSLLVSLEQGVNASKQRIREKHQQLASLRSQDIEKHKEILKNSRELISQSQMEPQLRDKINAHLREIIVSISIDFPSRYASVTFKSGVVREFHSDGVFANLVPKAEGEQREKDLAAIYAWPSLTDEEKAKKYQEEGLNIVPLKVEL

SEQ ID NO: 21172 - DNA, 50 bp, Pseudomonas aeruginosa
  source 1..50: mol_type = genomic DNA
gattctatttattgcacctaatggtcaatagtggcataattagaagcata

SEQ ID NO: 21173 - DNA, 40 bp, Pseudomonas aeruginosa
  source 1..40: mol_type = genomic DNA
gtctacccgcgccaggtggtcaagcgcaccctggcgcaca

SEQ ID NO: 21174 - DNA, 40 bp, Pseudomonas aeruginosa; identical to SEQ ID NO: 21173
  source 1..40: mol_type = genomic DNA

SEQ ID NO: 21175 - DNA, 50 bp, Pseudomonas aeruginosa
  source 1..50: mol_type = genomic DNA
gtttctattgttacaacataataatcaataggggaaaattcagtagcaaa

SEQ ID NO: 21176 - protein, 584 aa, Sinorhizobium medicae; identical to SEQ ID NO: 1236

SEQ ID NO: 21177 - DNA, 50 bp, Sinorhizobium medicae
  source 1..50: mol_type = genomic DNA
atcgtgatgtctgctccttgtcccgctttcactttcgccttctttcaagt

SEQ ID NO: 21178 - DNA, 40 bp, Sinorhizobium medicae
  source 1..40: mol_type = genomic DNA
ttcgacgatacgaaccgcagcgggcgtcgcggccgcgtcg

SEQ ID NO: 21179 - DNA, 40 bp, Sinorhizobium medicae
  source 1..40: mol_type = genomic DNA
ttcgacgatacgaaccgcatcgggcgtcgcggccgcgtcg

SEQ ID NO: 21180 - DNA, 50 bp, Sinorhizobium medicae
  source 1..50: mol_type = genomic DNA
ttgctgatgctcaatccttctccctctttctttctctctctctctcaact

SEQ ID NO: 21181 - protein, 493 aa, Leclercia adecarboxylata
MKQNGKAYSYIRFSSKKQEQGDSVRRQTELAEQYAHVHGLILSDKNFQDLGISAFKEGNRPSLGDMLEAIEKGQIEQGSTIIIESLDRLSRRGIDVTQQIIKSILQRNVFIASLVDGLLLNRESVNDLVSVIRIALAADLAYKESEKKSQRLRETKGQQRQRALNGEVINKILPFWLERQKDKFLFSDRIDTVKRIIELRREGLGTNKIAKVLNEEGHRPLRSAGWNHTTIAKTINSVALYGAYQTSETTIDRKVILLDIIEDYYPAVISKEEFMLLQSDQKHNKPGYKSEHNAFSGILKHECGGALVRKFHVASGKTYQYHVCANARDGKCNVTKNFKNIEVALFRVMKELKIEERTNFDKSLLAEESAIKEKIQDLNNLIINLPKIPVSVIQTISALEEKLEEIESKIKQQNSMIISENAFDINLLQEIKEPQKLNMMLKRVIEQITISNTGKKWWIKVLYKNRHIQSFIWDGEKITFFSDTKKILDYINS

SEQ ID NO: 21182 - DNA, 50 bp, Leclercia adecarboxylata
  source 1..50: mol_type = genomic DNA
atttactccctttgaaactgcatagtaatattgttgcaaagaagcaaaat

SEQ ID NO: 21183 - DNA, 40 bp, Leclercia adecarboxylata; identical to SEQ ID NO: 4963
  source 1..40: mol_type = genomic DNA

SEQ ID NO: 21184 - DNA, 40 bp, Leclercia adecarboxylata
  source 1..40: mol_type = genomic DNA
cttactgccaaactgcatatggacgttgctggtaactaac

SEQ ID NO: 21185 - DNA, 50 bp, Leclercia adecarboxylata
  source 1..50: mol_type = genomic DNA
atttatttcatataaatatgcatatgaatattgttacattaagtcccaat

SEQ ID NO: 21186 - protein, 461 aa, Enterocloster bolteae
MRKDVKRVAIYIRVSTYEQAQEGYSIDEQKERLVQYCKAMGWVVSELYIDPGFSGSNLERPGLQKLISEIKAYDSVLVYKLDRISRSQKDTMYLIEDVFLKNDVDFVSMSESFDTSTPFGRAAVGLLATFAQLERENIKERMTMGMKGRARKGYWKGTSRPPIGYDYKEGNLEVNDYEAMQIRELFTIAANGIPNMPYNVKNMARYLSQKYSNKYGNWSDSTGITYTIQNKVYIGMVKYKDEYFPGNHMPLIDNELFEKANNRLNTYLSTFGEHTTYTKYMLSGLTVCGTCGLPYYRRNSQTKIGGIKKEYGYYSCQGRKIDMPNRCQSKIYRQEALEDKVITQIESLKYKDYSTGNGKNDTASLLQELKQIDSRQERLIDLYSLGSVSREQIDDKIRELNQQREKVKVLLSAQNTLKSEEIIKMSTCIRNVDYATQCDIAGMLIEKVVVEGENIRVYWNF

SEQ ID NO: 21187 - DNA, 50 bp, Enterocloster bolteae
  source 1..50: mol_type = genomic DNA
tttgttattctggtagtaagtatgttaatactatccttcaaattaacaaa

SEQ ID NO: 21188 - DNA, 40 bp, Enterocloster bolteae
  source 1..40: mol_type = genomic DNA
cttattgttcgcaaccagtttaatactttccttccccatg

SEQ ID NO: 21189 - DNA, 40 bp, Enterocloster bolteae
  source 1..40: mol_type = genomic DNA
cttattgttcgcaaccagtaaaatactttccttccccatg

SEQ ID NO: 21190 - DNA, 50 bp, Enterocloster bolteae
  source 1..50: mol_type = genomic DNA
actgttataataacagtgggtatgaaaataatctactagtaattaacaga

SEQ ID NO: 21191 - protein, 470 aa, Clostridium perfringens
MRVAIYIRKSRGTEEDLLKHEEVLTNLCNANNWSYDLYKEIGSSQDNQREQYNRMKENIENYSKIVVMALDRLSREKQEQAELTKLINKYNFEIVTPTRIYTKHDNLLMDIQELLARQEYQMIRARQIQGTKTSFERGNWVGGIPTIGYKYDRNIRKLVIDEEKAKIYLFIKELALKGYNSSTIVSECYKKNYRSLTNKDFTPTAINRILKCRTYLGEVPYSGEWRKGNHEPLCTYEEYDTICDYITHRRVGIKSKAKTFPLSNLIVCGQCGALYGSTRRKDRGNREYLKKCWRKNVATGEKCNNKGVNAYKVHQAIKQQLEKRMFELKNTLDNFDRTNFENMKNDIQAQIYSLEDNISVLESRNDNIRNMCENGLYTVATAKEKISKNEITIKEYQNKIEILKNKLNNISNKDIENNFEKTKEVLNILYKLNLDDEKNDELINKIYKTIIDKIEMTLSDEKKELKIYYK

SEQ ID NO: 21192 - DNA, 50 bp, Clostridium perfringens
  source 1..50: mol_type = genomic DNA
aggatataatattttactttatatcaacaaagagtaaaaaaatagaacca

SEQ ID NO: 21193 - DNA, 40 bp, Clostridium perfringens
  source 1..40: mol_type = genomic DNA
aggaacaataaccccgcagcagcaaagaatgttataacca

SEQ ID NO: 21194 - DNA, 40 bp, Clostridium perfringens
  source 1..40: mol_type = genomic DNA
aggaacaataaccccgcagatgcaaagaatgttataacca

SEQ ID NO: 21195 - DNA, 50 bp, Clostridium perfringens
  source 1..50: mol_type = genomic DNA
agtatatatatacacactttatatatatataaagtatatatatacacaca

SEQ ID NO: 21196 - protein, 470 aa, Clostridium perfringens
MRVAIYIRKSRGTEEDLLKHEEVLTNLCNANNWSYDLYKEIGSSQDNQREQYNRMKENIENYSKIVVMALDRLSREKQEQAELTKLINKYNFEIVTPTRIYTKHDNLLMDIQELLARQEYQMIRARQIQGTKTSFERGNWVGGIPTIGYKYDRNIRKLVIDEEKAKIYLFIKELALKGYNSSTIVSECYKKNYRSLTNKDFTPTAINRILKCRTYLGEVPYSGEWRKGNHEPLCTYEEYDTICDYITHRRVGIKSKAKTFPLSNLIVCGQCGALYGSTRRKDRGNREYLKTCWRKNVATGEKCNNKGVNAYKVHQAIKQQLEKRMFELKNTLDNFDRTNFENMKNDIQAQIYSLEDNISVLESRNDNIRNMCENGLYTVATAKEKISKNEITIKEYQNKIEILKNKLNNISNKDIENNFEKTKEVLNILYKLNLDDEKNDELINKIYKTIIDKIEMTLSDEKKELKIYYK

SEQ ID NO: 21197 - DNA, 50 bp, Clostridium perfringens; identical to SEQ ID NO: 21192
  source 1..50: mol_type = genomic DNA

SEQ ID NO: 21198 - DNA, 40 bp, Clostridium perfringens
  source 1..40: mol_type = genomic DNA
aggaacaataaccccacagcagcaaagaatattatagcca

SEQ ID NO: 21199 - DNA, 40 bp, Clostridium perfringens
  source 1..40: mol_type = genomic DNA
aggaacaataaccccacagatgcaaagaatattatagcca

SEQ ID NO: 21200 - DNA, 50 bp, Clostridium perfringens; identical to SEQ ID NO: 21195
  source 1..50: mol_type = genomic DNA

SEQ ID NO: 21201 - protein, 603 aa, Agrobacterium rosae
MQQPAQNRMAYSYIRMSTEKQIKGDSMRRQLEWSQTYAARHGLDLQDVTSFADIGVSAWKGLNRSKGRLGAFIELAREGTIPSSSYLLIENLDRLSRTTPLEALDLFKEILQLGITVVARGEFGDEETYTWNSLNSNSNQLISTLTSMLRANRESERKSQLIRSSMKNRRVDARLGKKTNQTPPSWITATKITKGEYEYHLNDRADVVRWIFERSAEGVGFDRIARELNAKGEPTLKPSKRGWWHANIQAIVTSRSAIGEYQPGEMIDGKYVSEGDPILDYYPAVIGHDLWLRAQKIVHRNRKGGRAGTQFSNLLDGLAECVHCRSRMYMIGNSRSDKQWKYLVCSTNFRNIMRTNEVTGETVPVCPIGRSRFRYDILERSILENVTEFGGDDLLKQGKVTAEIAEIDEELAKLSISLIDLRKREARLTEVIETEDGAQIAGLLKALRERTVEREDAEKRQETLRHDREVMAAKHAALDPASAIEAMRQAWEAADDETRYALRVRTNASMKGMIDHVEFDSEGNHYTVIIEQGRRAYRFANPKFVRKDIKIIPQVANFVQHAIDVPLGVYTSNQQSPEMSAVSESIERLKSLPVKASLTAEKE

SEQ ID NO: 21202 - DNA, 50 bp, Agrobacterium rosae
  source 1..50: mol_type = genomic DNA
aagtagtgtaaacaccaaaaaacacttaactgttagcgcaatttacacta

SEQ ID NO: 21203 - DNA, 40 bp, Agrobacterium rosae
  source 1..40: mol_type = genomic DNA
gacccgtattcggccaagccttatgtgctgttttatacca

SEQ ID NO: 21204 - DNA, 40 bp, Agrobacterium rosae
  source 1..40: mol_type = genomic DNA
gacccgtattcggccaagcggtatgtgctgttttatacca

SEQ ID NO: 21205 - DNA, 50 bp, Agrobacterium rosae
  source 1..50: mol_type = genomic DNA
aagttgtctttaaccatacaaccaggtgattgttagctcacttaacacta

SEQ ID NO: 21206 - protein, 510 aa, Yersinia frederiksenii
MVDKTEKIHKVRVAQYLRMSTNLQEFSLDNQAQFIKKYANEHNMEILYTYDDAGKSGVSTTGRHDFNKLVNDVLTKEINIDAVLVYDVSRFGRFKDPQEGIYYKYLLKMNNVDVIYCAENLPENSETETFILSSLMYAAGAFSKNLSIKVFAGHVNLVKRGYYQGGKAGYGLKRKLLDNNNKHKMILAQGERKSLQTDRIVLVPGTKKEVELVKKIFNMFIFEGLNEYLIASRLNREGYRFSDKTEWTRGRIHSVLINSRYTGKYTYNRTSQKLKTKKIKNPENEWIEYNSFFKPIISEEKFKLAKEIIDNRSVKMSNEKILDCLRKILSKHGKISGFIIDEEDSSPSSSVIANRFGGLLNAYKLIDYTPERDYQYLEINSYLRKKHCDIVKKIKNEILSSEVKILENKLITVNKALNFSIVLSRCKKIGSNRHRWIVRLDRSLNPEISIIARMNSLNTEPIDYYILPSIDFFENELKLKDNNNLLFEMYRFDDIKPFFNMLSTDDKDVI

SEQ ID NO: 21207 - DNA, 50 bp, Yersinia frederiksenii
  source 1..50: mol_type = genomic DNA
tgacaaggatctatcacaccatacgccgatgatgcagcagtacctataaa

SEQ ID NO: 21208 - DNA, 40 bp, Yersinia frederiksenii
  source 1..40: mol_type = genomic DNA
ataaactcgactcccacacgcccatgatgcagcagtatct

SEQ ID NO: 21209 - DNA, 40 bp, Yersinia frederiksenii
  source 1..40: mol_type = genomic DNA
ataaactcgactcccacactcccatgatgcagcagtatct

SEQ ID NO: 21210 - DNA, 50 bp, Yersinia frederiksenii
  source 1..50: mol_type = genomic DNA
tgacaaaaaatctgttcaccaaactcccatgacacaaatttacctatata

SEQ ID NO: 21211 - protein, 484 aa, Mycobacteroides salmoniphilum
MAGQSTAQVTQAIIYARVSSDKAAGRSVEEQERECRAECERQGWPVAHVLTDNDLSASRFATKDRPEYTRLRDLLAPGDVLVTWEASRAQRDLARYVELRDLCAERGVRWSYSGRLFDLTDGDDRFATGLDALLAEKEAEQTRVRILRAHRANLAEGKPHGRVPYGYRIIRDPDTGKAAGRVVDPVRAPLVAEAARRVLDGQSLASMVRWIATKDPDPKWNEAKLRRILVNPTTAGYRTHSITEKGKRGPQVIHGEGTWEPIITREQHADLVALFATRKSGPRGSEPRHLLSGIVTCGVCENYLWLGKGGRKKDGSHYDVYSCRDRHASRNKQALDEVITSVIEGMLSSPEALAALAAPPPDPSPSAVAELEELKRQLRGVEDQMAENKMPADVGARVATRLTERIAASEAAAAPVYTEPIVRELATAPDPLALWRSLALTQKREFIRAVMTVKIERVGRGRWHAKEAGIILSPRSKTSTVAPA

SEQ ID NO: 21212 - DNA, 50 bp, Mycobacteroides salmoniphilum
  source 1..50: mol_type = genomic DNA
catgcagggtatctagccaaataatggttatttgtcgtaaactcggcttt

SEQ ID NO: 21213 - DNA, 40 bp, Mycobacteroides salmoniphilum
  source 1..40: mol_type = genomic DNA
gtagacggtgtcgaagaagtgtttgagggcaccggacatg

SEQ ID NO: 21214 - DNA, 40 bp, Mycobacteroides salmoniphilum
  source 1..40: mol_type = genomic DNA
gtagacggtgtcgaagaagcatttgagggcaccggacatg

SEQ ID NO: 21215 - DNA, 50 bp, Mycobacteroides salmoniphilum
  source 1..50: mol_type = genomic DNA
cattcatggaaagctgccagataacagttatttaataggtacttggcatt

SEQ ID NO: 21216 - protein, 581 aa, Serratia liquefaciens
MTKEAHMTKRKLYSYVRWSSDRQSKGTSLERQTAKAKEFAHSHNLELVELLDAGLSAYRGKNTTQGALGGFIQAVESGAIPNDSYLFVENLDRLSRQDTLTANKLFSHLLELGLTVVTGMDGRIYTRQSVTANPTDLMLSILLFSRANEESATKQKRVYGNIAALVERHKAGLPTTIKTAGSHVWWVDASGDKHTAVQPHPTLWQAARKAVELFLDGYSAHAVCDYLNEHYDAPPIRVTKATNNPDNLGKWSYPLLRRMKTSRTLIGERTINAGDITYTLENYYPPLCSPTEFAQLQDLNENNKLTQGPRKTRITLLSGLGVLKCGHCGGAMTFMIGSGGKIRYMCANGKDRIGNCKAWSIGLDILERTLVPALVRGYMDYTLGGNAKGDDIKESIQSAQEALQVIESQIENITDAITLGGNLAPLVERMGALSKEKDYKLLEVERLNRLALLSESESGAIDKITDFILQIRPNVLTDLNHPLRLQLREAVRAVIESCTVHKREDRGLAIVYTIKGSPFRTVHAFVAANKGHYKETVVSIGSDGQPLPDVGDSHKFDVAITKIVDEMGLPPIDGGLMWARR

SEQ ID NO: 21217 - DNA, 50 bp, Serratia liquefaciens
  source 1..50: mol_type = genomic DNA
attgttgtgtaagttacatcaacgaaacctagtgtgatttagaaaactaa

SEQ ID NO: 21218 - DNA, 40 bp, Serratia liquefaciens
  source 1..40: mol_type = genomic DNA
gaatgcgtggctgctgggcaaaattgatgactataagttc

SEQ ID NO: 21219 - DNA, 40 bp, Serratia liquefaciens
  source 1..40: mol_type = genomic DNA
gaatgcgtggctgctgggcgcaattgatgactataagttc

SEQ ID NO: 21220 - DNA, 50 bp, Serratia liquefaciens
  source 1..50: mol_type = genomic DNA
ttttttatgtcctctacataaagtgcagctagtatgtgccagaaacctaa

SEQ ID NO: 21221 - protein, 511 aa, Clostridium botulinum
MKIAIYSRKSVETDKGESIKNQIEICKEYFLRRDNNIEFEIFEDEGFSGGNTNRPAFKLMMSKIKMFDVVACYKIDRIARNIVDFVNVYDELNKLGIKLISVTEGFDPSTPLGKLIMMILASFAEMERENIRQRVKDNMKGLAKAGRWTGGNVPFGFISERIEEGGKKATYLKLDESKKQLIKEIFQMYISTNSMHKVQKQIYNTKNIKWSLSTIKNILTSPVYVKADKDVVKYLNNFGEVFGEPNGHTGIITYNRRPYTNGKHRWNDKGMFYSISRHEGVIDSNIWLKVQSIQEKTKISPRPKNSRVSYLTGILKCTKCGSPMTISYNHKNKDGSITYVYLCTGRKSYGKEYCNCKQVKQTILDKEIENALNSYIELNIEEFKKVVGSPTDTENFNKKILCIEKKIETNTVKINNLVDKIAVLSNTASVPLLSKIEELTKLNEDLKKELLFIQQEHINNSFVSPEEKYERLKQFSTTLNTNNIDLKRELLSFSVQEIKWDSDAECIDIII

SEQ ID NO: 21222 - DNA, 50 bp, Clostridium botulinum
  source 1..50: mol_type = genomic DNA
tactgttgttctatgtggattggagtagcaacacaactacaaatacagta

SEQ ID NO: 21223 - DNA, 40 bp, Clostridium botulinum
  source 1..40: mol_type = genomic DNA
tactgttggttggattggagtggcttgtactaaacctcca

SEQ ID NO: 21224 - DNA, 40 bp, Clostridium botulinum
  source 1..40: mol_type = genomic DNA
tactgttggttggattggactggcttgtactaaacctcca

SEQ ID NO: 21225 - DNA, 50 bp, Clostridium botulinum
  source 1..50: mol_type = genomic DNA
agctgttgtaaaatgtggacttgactagcaacacaagcttcaactgggaa

SEQ ID NO: 21226 - protein, 496 aa, Hafnia alvei
MITYAYSYVRFSSKQQSTGASLKRQIEASEAFCRENNLTLAPLSFHDLGISAYKSKARASLTELLEAVNTGRISAGSYVLIEAIDRLSRKGFDDTHSMLRSILLKGVNVAFVGTDAKSLAGTILTRDSLNDTMAIIQVAISADLAHKESQRKSKLVRDAKKRAKEKVSNGEIAKRRLPFWLTLDGDKYVLNGRVDVVREIINMRQSGYGKHKIAQTLNAKGSKTALNKQWSSQTIKYLLAHPALYGAHQLTERIEDSVINAELVENVYPAVMSKKDFFLIQFDEKRVTSGRTSSNFPFKGVVRCICGSTIVYGPRKLNNKIYHYYFCAASKDGKCTQTKLIPNLSSVLKKVIDKITIQSVVRNQSDVIKQEIQQKKDKMAGIHAKLLEMNDPPLSLFELIRNMEKEIESLSAQLKDESFRSAGATNADVTKLKDISDPVEYNMQVKRIVDVITVYRPNDKQGWLRVKIKKIDGNFQSFIIVDENIRLFSDTEAIKS

SEQ ID NO: 21227 - DNA, 50 bp, Hafnia alvei
  source 1..50: mol_type = genomic DNA
ttttgtaagattcaaaagttcatcaaaaaggacttgcgaatcttacaaat

SEQ ID NO: 21228 - DNA, 40 bp, Hafnia alvei
  source 1..40: mol_type = genomic DNA
aatgcgcgatatgttcaccaaggatgattttgcgcgcatg

SEQ ID NO: 21229 - DNA, 40 bp, Hafnia alvei
  source 1..40: mol_type = genomic DNA
aatgcgcgatatgttcaccttggatgattttgcgcgcatg

SEQ ID NO: 21230 - DNA, 50 bp, Hafnia alvei
  source 1..50: mol_type = genomic DNA
ttttgtaaattacaaaattttattttaaaggaaatgaaaaattgaaaaat

SEQ ID NO: 21231 - protein, 496 aa, Hafnia alvei
MITYAYSYVRFSSKQQSTGASLKRQIEASEAFCRENNLTLAPLSFHDLGISAYKSKARASLTELLEAVNTGRISAGSYVLIEAIDRLSRKGFDDTHSMLRSILLKGVNVAFVGTDAKSLAGTILTRDSLNDTMAIIQVAISADLAHKESQRKSKLVRDAKKRAKEKVSNGEIAKRRLPFWLTLDGDKYVLNGRVDVVREIINMRQSGYGKHKIAQTLNAKGSKTALNKQWSSQTIKYLLAHPALYGAHQLTERIEDSVINAELVENVYPAVMSKKDFFLIQFDEKRVTSGRTSSNFPFKGVVRCICGSTIVYGPRKMNNKIYHYYFCAASKDGKCTQTKLIPNLSSVLKKVIDKITIQSVVRNQSDVIKQEIQQKKDKMAGIHAKLLEMNDPPLSLFELIRNMEKEIESLSAQLKDESFRSAGATNADVTKLKDISDPVEYNMQVKRIVDVITVYRPNDKQGWLRVKIKKIDGNFQSFIIVDENIRLFSDTEAIKS

SEQ ID NO: 21232 - DNA, 50 bp, Hafnia alvei; identical to SEQ ID NO: 21227
  source 1..50: mol_type = genomic DNA

SEQ ID NO: 21233 - DNA, 40 bp, Hafnia alvei
  source 1..40: mol_type = genomic DNA
gatgcgcgatatgttcaccaaggatgattttgctcgcatg

SEQ ID NO: 21234 - DNA, 40 bp, Hafnia alvei
  source 1..40: mol_type = genomic DNA
gatgcgcgatatgttcaccttggatgattttgctcgcatg

SEQ ID NO: 21235 - DNA, 50 bp, Hafnia alvei; identical to SEQ ID NO: 21230
  source 1..50: mol_type = genomic DNA

SEQ ID NO: 21236 - protein, 482 aa, Streptococcus pyogenes
MITTNKVAIYVRVSTTNQAEEGYSIEEQKDKLSSYCNIKDWSVYKVYTDGGFSGSNTKRPALEQLIRDAKKKLFDTVLVYKLDRLSRSQKDTLYLIEDVFLENKIDFVSLLENFDTSTPFGKAVVGILSVFAQLEREQIKERMQLGKLGRAKSGKSMMWARTSYGYDYHRETGTVTINPVQSLAIKFIFEQYLSGRSITKLRDDLNDKYPKEIDWNYRAVRMILANPVYCGYNQYKGQVYPGNHEPIITEEDFNKTQEELKVRQIAAARFSNNPRPFRAKYMLSGIAQCGYCGAPLTITLGTKRKDGSRNIRYQCKNRFPRTTRGVTTYNDNKKCDSHFYEKADIEENVLNQISKLQNDTSYLDELFSSTEDNGIDRDSYQKQIEELTAKLSRLNDLYIDDRITLEELQRRSTEFTLMRGMLEAELENDRALKQQERKDDMRQILNRGDVLGMDYEGQTVVVRALISKVQVTSEEIVIKWKI

SEQ ID NO: 21237 - DNA, 50 bp, Streptococcus pyogenes
  source 1..50: mol_type = genomic DNA
ctaagaattttactatccttaatttcaatgaatgatactaaaattcctag

SEQ ID NO: 21238 - DNA, 40 bp, Streptococcus pyogenes; identical to SEQ ID NO: 5248
  source 1..40: mol_type = genomic DNA

SEQ ID NO: 21239 - DNA, 40 bp, Streptococcus pyogenes
  source 1..40: mol_type = genomic DNA
atcttagacaacttgaatgaaaatgttgatgagtttctct

SEQ ID NO: 21240 - DNA, 50 bp, Streptococcus pyogenes
  source 1..50: mol_type = genomic DNA
ctaaggaattatttatccttaattaaaattcttgaaatattaattgatat

SEQ ID NO: 21241 - protein, 596 aa, Paraburkholderia steynii
MVSASFSPPETIMETTTRRAAQGSSSLPATRTTSAPSTSRPPLVYSYLRFSDPRQRAGNSIDRQTEYAATWAVKHGLQLDTSLSLRDEGLSAYHQRHVKKGALGVFLRAVEEGRVPEGSVLIVENLDRLSRAEPIIAQNQLTSIVLSGIRVVTASDDMEYSRESASANPGILFMALGSMLKANLESHDKSKRVSNALLSQCRKWDKGEWRGKLSAGRDPAWVRWDKDEKKFVLEAGQAGAVRQLISYFRQGYSPMRSLELLTESLGNVPPGLSNAARAWVVLGSRMLVGEREVEVKGEKFTLEGYYPPLLTEAEFAELQYLRSQRGRRAGKRQVPGLITGLGICVCGYCGAAMNGQNILNRGRREDGLPQNGHRRIVCGGALAVPKCEAGSCSVVPIERAIMRYCSSQFNLDRLLEGDDHSGPLADKLALARDKAAKTQRRMDNLALALAEDGSGKDGPGAVMKLLHDLEAQRDKELDAVKSLEHELAALRGAAEPAAADAWAALVEGVLQLDHEARTKARQLVADAFSKIVIYQHGYEGDEGQVMRVVLCSKRGVMRELTIDRHSGYPVGDRTFVIAEGVDLAQNFTVAERRRVA

SEQ ID NO: 21242 - DNA, 50 bp, Paraburkholderia steynii
  source 1..50: mol_type = genomic DNA
ggtatatttccagtgttgctagtagtaccttagaaagtccgatctatact

SEQ ID NO: 21243 - DNA, 40 bp, Paraburkholderia steynii
  source 1..40: mol_type = genomic DNA
cggttacgtgctgtgcgaagtgccaagcaacctgctgctc

SEQ ID NO: 21244 - DNA, 40 bp, Paraburkholderia steynii
  source 1..40: mol_type = genomic DNA
cggttacgtgctgtgcgaatcgccaagcaacctgctgctc

SEQ ID NO: 21245 - DNA, 50 bp, Paraburkholderia steynii
  source 1..50: mol_type = genomic DNA
ggtatttttttgttgttgttaatatctcattatcatggacaatgtatact

SEQ ID NO: 21246 - protein, 596 aa, Clostridium cadaveris
MERELIKVCAYCRVSTDKKEQEESFENQQIYFNRELNKEKGFELTNIYADKGLTGMEFRHRTEFNKMLQDAGLDKVENRANSGEIRNKYISTDYVINPKRKPKFKYIYVKNTSRFARNTDVSKIVKALRANGVYIFFLDLNKSTESPEEMMLLEFMFSMDARESIDKSKKVAFGAKESAKAGKIRVGKELYGYTFNKEENTLRIIKEEAEIVKLIYNLRLQGEGSRRICKYLRENNIKTRAGVDFKENVVMRILQNPYYTGRVARNRWETTHDNGRSRKLKPVEEWIVQESDRVDQIIDIETFDKVQKIIKENTSDNIKKGKYLSRTELARKIYCCSCGKYYNKNVEYRKLLNGERKKIDYYTCATKKLRGKGSCQNPNIRKEKLDNIIEFFCKYGQLKEITDNFKESVIEILENKKNILKEKVNTLSKNIDVEEKNKQIDILNNKLSRLLDIYLDEGLTKDIFNKKKEQIEEDINRLKKEIDNINIPKKNLEAILDFYTRTEYIIQNIGGEIPNEISRKDFIEKYLVRFEISKDGKVTTITKAHLIQMIGMELAGESGEYSNVRNTILEMFNNDENNPLVKAIKINDAIKNLNIF

SEQ ID NO: 21247 - DNA, 50 bp, Clostridium cadaveris
  source 1..50: mol_type = genomic DNA
atattgactatgtagatgtaaatacatatacttatagacatagtcaaggc

SEQ ID NO: 21248 - DNA, 40 bp, Clostridium cadaveris
  source 1..40: mol_type = genomic DNA
gaaatcccttccggcttttcatatagttggacttccagat

SEQ ID NO: 21249 - DNA, 40 bp, Clostridium cadaveris
  source 1..40: mol_type = genomic DNA
gaaatcccttccggctttttatatagttggacttccagat

SEQ ID NO: 21250 - DNA, 50 bp, Clostridium cadaveris
  source 1..50: mol_type = genomic DNA
atatatacttattatatataaatatatatacttatatactaatttaatta

SEQ ID NO: 21251 - protein, 498 aa, Enterobacter hormaechei
MKQNGKAYSYIRFSSKKQEQGDSVRRQIELAEQYAHANSLILSDKNFQDLGISAFKEGNRPSLGDMLEAIENGQIEQGSTIIIESLDRLSRRGIDVTQQIIKSILQNNVFIASLVDGLLLNRESVNDLVSVIRIALAADLAHKESEKKSQRLRETKAQQRKRALNGEVINKVLPFWLERKQDKFVFSERLDTVKRIIELRRKGYGTHKIAKILNNECHKPLRSTGWNHTTVGKTINSVALYGAYQTSETTKNREVILLDIVENYYPSVISKEEFMLLQADHKKNKSGYKSESNPFTGLLKHSCGGALVRKFHIASGKTYQYHVCANARDGNCNVTRNFKNIEIALYRIMKELRMEKKTNFDKSLLAEKETIKTKIQELNNMLLNLSKIPMSVIQTISNLEDKLQITEEKINQQNSIVVSEKAFNFNLLQEIKDPQELNMMLKRVIEKIIIFNSGEKWRIKVLYRNRHSQNFLWDGENISFRSDTNKLLEFTKSLANED

SEQ ID NO: 21252 - DNA, 50 bp, Enterobacter hormaechei
  source 1..50: mol_type = genomic DNA
tattagttactttgaaactatatcgtgatattgttgcaaagaagcaaaat

SEQ ID NO: 21253 - DNA, 40 bp, Enterobacter hormaechei; identical to SEQ ID NO: 4963
  source 1..40: mol_type = genomic DNA

SEQ ID NO: 21254 - DNA, 40 bp, Enterobacter hormaechei; identical to SEQ ID NO: 4964
  source 1..40: mol_type = genomic DNA

SEQ ID NO: 21255 - DNA, 50 bp, Enterobacter hormaechei
  source 1..50: mol_type = genomic DNA
taatagttaaaaataaattatatcatgcaattgtatacacatagaataat

SEQ ID NO: 21256 - protein, 493 aa, Erwinia aphidicola
MKQNGKAYSYIRFSSKKQEQGDSVRRQTELAEQYALANNLILSDKNFQDLGISAFKEGNRPSLGDMLEAIEKGQIEQGSTIIIESLDRLSRRGIDVTQQIIKSILQNNIFIASLVDGLLLNRESINDLVSVIRIALAADLAHKESEKKSQRLRETKGQQRQRALNGEIINKVLPFWLERKGDNFIFSDRLEAGKRIIELRRKGFGTNKIAKALNDEGHKPLRSSGWNHTTVGKTINSVALYGAYQTSETTKDRKVILLDIIEGYYPALISKEEFMLLQSDHKQNKPGYKSEFNAFAGLLKHECGGALVRKFHVASGKTYQYHVCANARDGKCIVTKNFKNLEVALYRIMKELKLEKKSYLDESLLIEQNNIKTKIQDLNDMLLTLTKIPVSVMHTISNLEAKLHDIEEQIKQQNSMIISEKAFNLNLLQEINDPQELNLMLKRVVDKIIVFNAGKKWRVKISYRNKHTQNFIWDGEKITFISDTKKLLEFINS

SEQ ID NO: 21257 - DNA, 50 bp, Erwinia aphidicola; identical to SEQ ID NO: 21252
  source 1..50: mol_type = genomic DNA

SEQ ID NO: 21258 - DNA, 40 bp, Erwinia aphidicola; identical to SEQ ID NO: 4973
  source 1..40: mol_type = genomic DNA

SEQ ID NO: 21259 - DNA, 40 bp, Erwinia aphidicola; identical to SEQ ID NO: 4974
  source 1..40: mol_type = genomic DNA

SEQ ID NO: 21260 - DNA, 50 bp, Erwinia aphidicola; identical to SEQ ID NO: 21255
  source 1..50: mol_type = genomic DNA

SEQ ID NO: 21261 - protein, 555 aa, Pseudomonas monteilii
MPKAYAYVRWSTAEQGEEGRDSHDRQTTPLQAFTEATGVPVVETVIDKGISAFRGANARIGQLKGLLDRIENGEIERGDYIIVESIDRLTRQKLTDSVDLIQSILKKGVRLHTVFDNKTYSYDDPTRDLETLILVGVIAKRAHEESDTKSKRLKSAWVKKRDAAESSVIGKRCPYGFRYDEKAKTFVIVEEEAAEIRHVFSLLKHVGVLECIKTINQYSKRRWTRTSVLHLINNRSPIGALRLQRRKENGGRVLDRYVPGYFPKIIEDSDFDAAIAAMKTRSTGQGKGRRTKHHFNIFRNAIQCHEHKCGMIFNLQKVSDKYYAYLVCANKAERVCECNNRIRFDLVFGTFLAFIEQLNQNRYIDERTDKKREDFTWFTHDQYKQMDTVNDEFSRFFAVRDTSAPKEEIRAKKALLSTEKNTLEMLEASLAQFDGLIPNTFIKRVAVAEARITDLESEIKKLEGALAIESESLKITTSKDILDLYETEEGRLKLNTFLVSRGIFFEVIWHKDTNRVVLIAKVKGDEKTLLQIGQGFHYTDPLSPFGIPDLSHIIK

SEQ ID NO: 21262 - DNA, 50 bp, Pseudomonas monteilii
  source 1..50: mol_type = genomic DNA
tttattagaaaaggtttaccttttgacaaaggtacgctattttctaataa

SEQ ID NO: 21263 - DNA, 40 bp, Pseudomonas monteilii
  source 1..40: mol_type = genomic DNA
gctcagcatctcaccggaggagctgggggttatcaacaac

SEQ ID NO: 21264 - DNA, 40 bp, Pseudomonas monteilii
  source 1..40: mol_type = genomic DNA
gctcagcatctcaccggagttgctgggggttatcaacaac

SEQ ID NO: 21265 - DNA, 50 bp, Pseudomonas monteilii
  source 1..50: mol_type = genomic DNA
tttacttcataaattttactttttttcaaacatttgactctttgtaataa

SEQ ID NO: 21266 - protein, 537 aa, Streptomyces albus
MATNGEKKENRPEVDLLLRKSKIVRDGEQALSLRAQEERGRRWAEENGYRVRKVWKENLSAWDDVERPKYDAAMAAVLNGEVPALWCYALDRLSRKGAEAVVPILGKARVIFDYERLDSMNERDRRWIIDRAENAREYSVRLSYNVRQTKKRQRNEGRWLSRAPFGLVADKTTRKLSPNRKLVEGKDYCPWDIVVRIFTSIAEGVSARALARRFNSEGIKTATGKGWRADAIRAIVIHPVYEGWLTVSPGGKSHKSPTLYYNDAGERVQVAADMSEMIPAELADRARRVLSGHQILPGKRRPGRPSKLLVGRLVCAHCGHRMNADGKSYNCQLRAAGGECPTPASAWCTAIEKYVAMRWLSRFTNASPDDPLVRILAERWQALTQPKRTAQYDDAVAAVKAAEAAIEQLANDRAAGLYSGAMGKHFPRLVREAEAKLETTQEQLNTLSGESRLDFAVLTNPLWARLKWRDANPELKRELVGLAIDRILVTRAPKQGARFDGWSRVNIKWADGSDDYSYPAQRKGALQDIWEGRPNAA

SEQ ID NO: 21267 - DNA, 50 bp, Streptomyces albus
  source 1..50: mol_type = genomic DNA
agttcccggggtgtagggtccaccggagtaggtccaacaccctgggatct

SEQ ID NO: 21268 - DNA, 40 bp, Streptomyces albus
  source 1..40: mol_type = genomic DNA
gccctggagggcgccgaccgggtggcggtcgtagcggaac

SEQ ID NO: 21269 - DNA, 40 bp, Streptomyces albus
  source 1..40: mol_type = genomic DNA
gccctggagggcgccgaccccgtggcggtcgtagcggaac

SEQ ID NO: 21270 - DNA, 50 bp, Streptomyces albus
  source 1..50: mol_type = genomic DNA
aatacccggtaaacaggtgcagcccctgtggctccagtcccctgggatct

SEQ ID NO: 21271 - protein, 600 aa, Rhodococcus ruber
MTAAPSFGIKPLAVHYLRVSTKDQAERGGEAEGFSIPAQREACLRKAQSLDAVTVAEFVDAGESARSANRPELKKMLDYVKAHKIQYVIVHKIDRLARNRVDDVEINLQLTAVGAQLVSCSENIDETPSGMLLHGIMSSIAEFYSRNLATESRKGMLQKAKGGGTPGMAPFGYLNSRIRTDDGREVKTVVIDPARGHWVTWMFERYATGEWTAGMIKDEFDKRGVTTVTRPNRPSRPIAHSLVTSMLQNRYYTGTVRFEGVEYPGGHPALVSEALFAEVQRVREARHQSREKPRVHNHYLKGSVYCGQCGEPLTFEKTRNRVGTPYDYFYCLGRQRLKNGCTFRAIQAPHLEDLVTAHWQTVTLAEQQTSVIRDLILDHMRVLLPDAVRTRQAASERLQQLEQNSRKLLEAFYADAIDTPELRAEQARIAIERAKAEAKLGEFDLQEAHLTTKLEGCLELLGNAHEHYVLADAKSRRDLNQSIFTHLYVHDDDIVASDLTPAYQLLMNDDLAAALAAERKQEQNSIVRTSDLIGVTEVTNQGDRGDEWTPRDLPTRARRIAPGARIPGFLALERPRGAMPWEKERTTAPEDRGSNIISLV

SEQ ID NO: 21272 - DNA, 50 bp, Rhodococcus ruber
  source 1..50: mol_type = genomic DNA
tggttctaacatcatttctttggtagtcctcgccagcgctaaggccaaca

SEQ ID NO: 21273 - DNA, 40 bp, Rhodococcus ruber
  source 1..40: mol_type = genomic DNA
agtccgggccggcggtggtagcggggacaggatttgaacc

SEQ ID NO: 21274 - DNA, 40 bp, Rhodococcus ruber
  source 1..40: mol_type = genomic DNA
agtccgggccggcggtggtcccggggacaggatttgaacc

SEQ ID NO: 21275 - DNA, 50 bp, Rhodococcus ruber
  source 1..50: mol_type = genomic DNA
tggtcctaatagggttgctttggccctgctcttcatagaagagcccaaaa

SEQ ID NO: 21276 - protein, 568 aa, Aeromonas veronii; identical to SEQ ID NO: 12906

SEQ ID NO: 21277 - DNA, 50 bp, Aeromonas veronii
  source 1..50: mol_type = genomic DNA
ctcggcttttctactaagaacagctcgcagtttttgggagaaatgccgta

SEQ ID NO: 21278 - DNA, 40 bp, Aeromonas veronii; identical to SEQ ID NO: 20238
  source 1..40: mol_type = genomic DNA

SEQ ID NO: 21279 - DNA, 40 bp, Aeromonas veronii
  source 1..40: mol_type = genomic DNA
gcgggctttcttgatggtgatgcagttcttgatgccatag

SEQ ID NO: 21280 - DNA, 50 bp, Aeromonas veronii
  source 1..50: mol_type = genomic DNA
gtcagattcatgcttaagaacagcatgttgttttcacttccaatgccgca

SEQ ID NO: 21281 - protein, 627 aa, Burkholderia gladioli
MPTAYSYIRFSTPEQKKGDSLRRQKELSERYARDHGLTLDTSLHLHDLGVSAFDGSNVTRGALGGFLRAVDEGRVVPGSYLLVESLDRLSRDRVMEALNLFLSIVNRGITIVTLSDGRVYNSDTDNTADLIVSITIMARAHEESLTKSQRLKAAWKNKRSRLDETKLTARCPLWMKLNHDRTRFEFVPERASVVREIISLAKNGMGQTIIAKTLNTRSVPSFSGNPKGWHPSYIQKILTSTALYGEYQPGIFESGRVIPHGEPVADYYPALITREEFYSLQAYRSQNAVGGGKARKGETIPNLLSGLLRCGYCGNPMVIAGAAAKRIRSADGKEVKRPPKKVLVCDGGRRGLGCYAVQWGHKDFETSFLSFCRGIEFERILTNVRSGHEENRDLTLDERIRSIDAELSTKDARIKNLVIAIEEGNAPASLVQRIRSLEEEVTELTRTKVQLSSELSLHRAAHQELTSTAKIARSLIDTMESMTNDELFRVRAALAAQFRRTIASITLHPAGRLFTHEQVEKQRASLIDAGFVADQVDRYVAETHPTEPRRQGRGNRGRYASRKDIGRFFSIETVNGGFRVVYPDFDDPSTARIVAGVEETSFFNQLVGTTTALKAKDQSEDRSSTAI

SEQ ID NO: 21282 - DNA, 50 bp, Burkholderia gladioli
  source 1..50: mol_type = genomic DNA
ttgtgtgttcttcaccacaacattgccatttcatggtgatgaacacatgt

SEQ ID NO: 21283 - DNA, 40 bp, Burkholderia gladioli
  source 1..40: mol_type = genomic DNA
gatatgcatgcccgagatcgccaccaggtggctggtgccg

SEQ ID NO: 21284 - DNA, 40 bp, Burkholderia gladioli
  source 1..40: mol_type = genomic DNA
gatatgcatgcccgagatccacaccaggtggctggtgccg

SEQ ID NO: 21285 - DNA, 50 bp, Burkholderia gladioli
  source 1..50: mol_type = genomic DNA
tggtgtcttggttcccagaaatgtcacatttaatggttgactccacatgt

SEQ ID NO: 21286 - protein, 526 aa, Flavonifractor plautii
MDEYCLYLRKSRIDLEAEANGQGDTLARHRAALLKLAQKRGFNITGCYEEVRSGESIAARPEMQRLLNDVEDGRWAGVLVMEVERLARGNTTDQGIVADTFKYSDTKIVTPNKIYDPGDEFDEEYFEFGLFMSRREYKTINRRLQRGRRASLSEGKYIAGKATYGYERYKLSGEKGYSLRIIPEQAEIVRQIYDWYVNGELLPDGTLRPLGSYTIAKRLDARGIPSPTGGKWPPCTVKDILTNPTYIGKLRWSYRPTVKRMVDGELVKTRPVDRSVHLSDGRHEPILDEVLWHRAQLMLKNRSHAPVPKSTNIRNPLAGLLICSKCGRSMERRKFKHGRDTVACPNKDCTCKSSVLEEVEAGMLDSLRIWLSDYKVKLAQSQETISHTGPTAEQEITSLQRTLGTLQAQMENLYNLVEQGVYSTDLFLQRSQALTARMAEVNQQIESTQAALTASRRIARNRFEIIPRIERVLALYPTLTDPREKNTILKEVLEKILYTKTTGSRWEASDMNLYVFPRVETDGEQL

SEQ ID NO: 21287 - DNA, 50 bp, Flavonifractor plautii
  source 1..50: mol_type = genomic DNA
tgcagggggcttatatggttttatacttatagccaaataagttatatgtg

SEQ ID NO: 21288 - DNA, 40 bp, Flavonifractor plautii
  source 1..40: mol_type = genomic DNA
gacctatgagtggggctatacctatggtccgccgatggca

SEQ ID NO: 21289 - DNA, 40 bp, Flavonifractor plautii
  source 1..40: mol_type = genomic DNA
gacctatgagtggggctataactatggtccgccgatggca

SEQ ID NO: 21290 - DNA, 50 bp, Flavonifractor plautii; identical to SEQ ID NO: 4450
  source 1..50: mol_type = genomic DNA

SEQ ID NO: 21291 - protein, 526 aa, Flavonifractor plautii
MDEYCLYLRKSRIDLEAEANGQGDTLARHRAALLKLAQKRGFNITGCYEEVRSGESIAARPEMQRLLNDVEDGRWAGVLVMEVERLARGNTTDQGIVADTFKYSDTKIVTPNKIYDPGDEFDEEYFEFGLFMSRREYKTINRRLQRGRRASLSEGKYIAGKATYGYERYKLSGEKGYSLRIIPEQAEIVRQIYNWYVNGELLPDGTLRPLGSYTIAKRLDARGIPSPTGGKWPPCTVKDILTNPTYIGKLRWSYRPTVKRMVDGELVKTRPVDRSVHLSDGRHEPILDEVLWHRAQLMLKNRSHAPVPKSTNIRNPLAGLLICSKCGRSMERRKFKHGRDTVACPNKDCTCKSSVLEEVEAGMLDSLRIWLSDYKVKLAQSQETISHTGPTAEQEITSLQRTLGTLQAQMENLYNLVEQGVYSTDLFLQRSQALTARMAEVNQQIESTQAALTASRRIARNRFEIIPRIERVLALYPTLTDPREKNTILKEVLEKILYTKTTGSRWEASDMNLYVFPRVETDGEQL

SEQ ID NO: 21292 - DNA, 50 bp, Flavonifractor plautii; identical to SEQ ID NO: 21287
  source 1..50: mol_type = genomic DNA

SEQ ID NO: 21293 - DNA, 40 bp, Flavonifractor plautii; identical to SEQ ID NO: 21288
  source 1..40: mol_type = genomic DNA

SEQ ID NO: 21294 - DNA, 40 bp, Flavonifractor plautii; identical to SEQ ID NO: 21289
  source 1..40: mol_type = genomic DNA

SEQ ID NO: 21295 - DNA, 50 bp, Flavonifractor plautii; identical to SEQ ID NO: 4450
  source 1..50: mol_type = genomic DNA

SEQ ID NO: 21296 - protein, 522 aa, Bacillus licheniformis
MKRTFDHIKHVAIYLRISQEKRGENVETLENHRQILFEFCKENGYTYEEYGEVISGGKSEIEQRKELQRLLEDIEKFDAILCFELTRLSRNGLISQTVKQYCIDYDKPILTPYQSYDLANSETDRLLYDVGSMISSHEHGTIGKRSKANKKQMSKAGLHVSGNVPFGYRRNNETKKLEIYEEEAKVVRYIFKLHSEGLGSFKIRDILNSEGYKSATGKAFELPTIKRIIKNPTYKGTIVFNDRKKVKKNGKFVYEPVETIQVENAHPAIIPPDEWDRANRERLNRAKQAAVIREKPASTTGTTMLKDLIYCGVCGRKMRIFFDDRSSTGYVIQRCYHLYNGEKCPNRGIKLELVEKEVAKALPNFKSLLKKSVQRLQQEKEAGVETDIKRKIKQQERKLKDLNDQQDKLIDLALKGIFNEEEIRNKKQGLIDEIKYTESAIADLKEKMSNIDINDHINSLMNIIELIEKLPNMEPEEVNQSLKTFISKIVYTRVLPPELLNKSTRNKQRKEYPFEIEIEFIE

SEQ ID NO: 21297 - DNA, 50 bp, Bacillus licheniformis
  source 1..50: mol_type = genomic DNA
ttacatgaaataaaaaacactgtcccgactgcattttttatttcatgtgt

SEQ ID NO: 21298 - DNA, 40 bp, Bacillus licheniformis
  source 1..40: mol_type = genomic DNA
cacgagcggctatgcagtgccgacctttgtcgttgacgcg

SEQ ID NO: 21299 - DNA, 40 bp, Bacillus licheniformis
  source 1..40: mol_type = genomic DNA
cacgagcggctatgcagtgttgacctttgtcgttgacgcg

SEQ ID NO: 21300 - DNA, 50 bp, Bacillus licheniformis
  source 1..50: mol_type = genomic DNA
ttatctgaatacctaaacactgtcttgtatcgctttggagttttatttgt

SEQ ID NO: 21301 - protein, 522 aa, Bacillus licheniformis
MKRTFDHIKHVAIYLRISQEKRGENVETLENHRQILFEFCKENGYTYEEYGEVISGGKSEIEQRKELQRLLEDIEKFDAILCFELTRLSRNGLISQTVKQYCIDYDKPILTPYQSYDLANSETDRLLYDVGSMISSHEHGTIGKRSKANKKQMSKAGLHVSGNVPFGYRRNNETKKLEIYEEEAKVVRYIFKLHSEGLGSFKIRDILNSEGYKSATGKAFELPTIKRIIKNPTYKGTIVFNDRKKVKKNGKFVYEPVETIRVENAHPAIIPPDEWDRANRERLNRAKQAAVIREKPASTTGTTMLKDLIYCGVCGRKMRIFFDDRSSTGYVIQRCYHLYNGEKCPNRGIKLELVEKEVAKALPNFKSLLKKSVQRLQQEKEAGVETDIKRKIKQQERKLKDLNDQQDKLIDLALKGIFNEEEIRNKKQGLIDEIKYTESAIADLKEKMSNIDINDHINSLMNIIELIEKLPNMEPEEVNQSLKTFISKIVYTRVLPPELLNKSTRNKQRKEYPFEIEIEFIE

SEQ ID NO: 21302 - DNA, 50 bp, Bacillus licheniformis; identical to SEQ ID NO: 21297
  source 1..50: mol_type = genomic DNA

SEQ ID NO: 21303 - DNA, 40 bp, Bacillus licheniformis; identical to SEQ ID NO: 21298
  source 1..40: mol_type = genomic DNA

SEQ ID NO: 21304 - DNA, 40 bp, Bacillus licheniformis; identical to SEQ ID NO: 21299
  source 1..40: mol_type = genomic DNA

SEQ ID NO: 21305 - DNA, 50 bp, Bacillus licheniformis; identical to SEQ ID NO: 21300
  source 1..50: mol_type = genomic DNA

SEQ ID NO: 21306 - protein, 567 aa, Gimesia panareensis
MAFGFYFVCIPFLKNLRILFYGRISKDEQRQQSIEDQLQYCKEFLSEAGVDVTSVEMIFDSGISGEVHSRPGIDQVRRGIWDRKWDLIICEDSSRLYRSISPCMDLVGAAVDNDIRVICINDRVDTANDDWQQKLEEAQRHHGQDNFFTRYRIKRTHNGLWEKGAAIGLLRAGYERYQKDPDQHNAPKYDRIDPQWVEAIRTAFEMVADGQSLDTVALHLTEQGVRKTTNAQTEEWTECNVLSLIRCPLYRGEERFRETISRKQYSTGKSKPVKNPDPDKILTRAMPHLRMVEDWLWHKANQAIDQRITRSPHPSGKDHPLSGIPRNSRSPLSNIFVCGICGSKMYMEGRNEGGFRCSAATKGKCWNKTTALRDFSYRQIGVAVSETILKSSDSILEPLTTYIESLLLSPEDVEGLKIRLKRRRSELKRKQENLLRLVMNSDEPLEFVEAKAEELQKQLDTLKLDEQQLESQLSQSRTLPSRDEIADKLQEAAGKVLSMERTSGDVLERILKGPIRAVPCQQFGSNKVVLRAKMTLQLAEFGSQGLGSVYLIVLRVILRNAILIIAR

SEQ ID NO: 21307 - DNA, 50 bp, Gimesia panareensis
  source 1..50: mol_type = genomic DNA
cattaaaaaaggcggagagagggggaaactcacctccgggtttccgcaag

SEQ ID NO: 21308 - DNA, 40 bp, Gimesia panareensis
  source 1..40: mol_type = genomic DNA
aagggagcggagagagggggattcgaacccccggtacctt

SEQ ID NO: 21309 - DNA, 40 bp, Gimesia panareensis; identical to SEQ ID NO: 21308
  source 1..40: mol_type = genomic DNA

SEQ ID NO: 21310 - DNA, 50 bp, Gimesia panareensis
  source 1..50: mol_type = genomic DNA
gataaaagaggaaaaagataatgggaaactcacccccgtgcttcagcaag

SEQ ID NO: 21311 - protein, 503 aa, Serratia marcescens
MPQRNNGIAYSYVRFSSKRQEVGDSLRRQTEMAEEYAIKNGLKLSSKNFQDLGISAFREGKRASLVDMLAAIEEGQITAGSTIIIEALDRLSRRGIDATLETVKEILRKDVQVVSLSDGLLLTKKSLNDLQSVIRIAVAADLAHKESERKALRLRETKGQQREAALSGKPINKILPFWLQRTEAGYAFSDKAGVARQIVQLKQEGKGSNMIAKTLNRLGIAGVRTAQWNHASITKMLKNPALYGAYQTGETTKDRELIKLELVEAYYPALINKEEWLLLQSDQSKSKRGRRSANNPYSGLLRCECGGALVKRQHTVKGKLYVYHGCLNARDGRCTQNISIKGLDGALTTILGRLEFKKKQTLSQSIHQERQQLEARINDLNSKLQVLDDIPLSVIKSIGTMESRLKEITDQIAKDEREQRGIEAVKSEKLSSITDGLELNLLLKRVLKSITVIRSGRGWAVKVLHLSGHKQNFLMVDDEIKFLSDTIALQKLLAGFRETTENS

SEQ ID NO: 21312 - DNA, 50 bp, Serratia marcescens
  source 1..50: mol_type = genomic DNA
ttattttacatatgaaacaatactgtgatattgttacttaatagcaaagg

SEQ ID NO: 21313 - DNA, 40 bp, Serratia marcescens; identical to SEQ ID NO: 5103
  source 1..40: mol_type = genomic DNA

SEQ ID NO: 21314 - DNA, 40 bp, Serratia marcescens
  source 1..40: mol_type = genomic DNA
cttgctgccgaactgcatggggatgttgttggtgcttaac

SEQ ID NO: 21315 - DNA, 50 bp, Serratia marcescens
  source 1..50: mol_type = genomic DNA
ttatttgccataaaaaaaaaaacagggatatagttttattttaccaaatg

SEQ ID NO: 21316 - protein, 520 aa, Salmonella enterica
MRKTVYCYARVSSKGQAKDGYGMSRQQAMLRDYVASYNDSQHSRGYELGDISWLYAEGVSAYSGKNIEDGSVLKTFIDDVLQKKITNSVLVIENLDRFSRAAPNRAAGLFLSLINAGCDIHEVETEMIHHQYSDLNIISGGLQRAHNESKRKARLSIKNWDERIKNTIEGKSVLTHRVPSWIEIKNNKYVIKKGESEKYNLIFKMYADGFGPAAIRDELKKRGMQINEREPTINHLMKIIKDQRLIGRFNSTGRKILDGMPIYPVIVDPELFESVNDLRKQRNPLGKINLKANNLFAGLCICMNCGRYVQVNSVDKKGDTYFRCGGSLAKIDKCKERGFKYKIVENALLEHLRNFDFSMLRSEDNEIQVKINYLSMELVAKEKYGNEILTDLEKEDIPDPNDRRILKNIQRRISEIRTEIAILKQSNIGYKTFDDLKDSYNDDLLDPKNTTLRLDFNVKVKRVIKNIKMKRYDDTVMLVVSYVGINEKQAMVIKIKTGEVVFMAVQNDDLKSVEYLINDK

SEQ ID NO: 21317 - DNA, 50 bp, Salmonella enterica
  source 1..50: mol_type = genomic DNA
aacagtaattcactattcatcatcaccatgatatacttctttttactgtt

SEQ ID NO: 21318 - DNA, 40 bp, Salmonella enterica
  source 1..40: mol_type = genomic DNA
ggcgatgatgccaataacgaccatcagttcgataagcgtg

SEQ ID NO: 21319 - DNA, 40 bp, Salmonella enterica
  source 1..40: mol_type = genomic DNA
ggcgatgatgccaataacgagcatcagttcgataagcgtg

SEQ ID NO: 21320 - DNA, 50 bp, Salmonella enterica
  source 1..50: mol_type = genomic DNA
aaaagtaaaatgcaattcatcgtcagtatcacacacaggcgtttacttgt

SEQ ID NO: 21321 - protein, 520 aa, Citrobacter sp FDAARGOS 156; identical to SEQ ID NO: 21316

SEQ ID NO: 21322 - DNA, 50 bp, Citrobacter sp FDAARGOS 156
  source 1..50: mol_type = genomic DNA
aacagtaattcactattcatcatcaccataatatacttctttttactgtt

SEQ ID NO: 21323 - DNA, 40 bp, Citrobacter sp FDAARGOS 156
  source 1..40: mol_type = genomic DNA
ggcaataatgccaatgaccaccatgagttcgataagcgtg

SEQ ID NO: 21324 - DNA, 40 bp, Citrobacter sp FDAARGOS 156
  source 1..40: mol_type = genomic DNA
ggcaataatgccaatgaccagcatgagttcgataagcgtg

SEQ ID NO: 21325 - DNA, 50 bp, Citrobacter sp FDAARGOS 156; identical to SEQ ID NO: 21320
  source 1..50: mol_type = genomic DNA

SEQ ID NO: 21326 - protein, 507 aa, Escherichia coli
MKRAISYIRFSSEKQSRGDSLRRQAKMVTDWLKAHPEYYLDESLTFRDLGVSGFTGKHLQGGLGDFLTAIEKGLVKAGDTLLIESLDRLSRQDVDQASELLRNILRSGVDVVTLSDGEHYTRESLKDPLALIKSILIMQRSHEESLRKSERIQAAWDAKKEAAKAGIKISRRCPAWLKLNDDRKTFSVIPEKVETVRRCFQLRLEGKSIWEIVRTLNDEGHQTLNQYKAGKFGQTSVQDLLKNRSVIGYFTPKGCEEIAGYFPPIIPETDFYKVQQLSYSRYGRKPASDKPLSVNLFKGVIRCSECGHALIITGFSDTRSGIYRCPSRNENRCNAKGLSRKQTDSTLLALLSRLDRFDSDMTNTVDTLKLHREHISNNIEKLVQLSLEIEDLSAITSKLKQLKGELSQVDADIEKETQRLKSIDVGCLSDCDLTTKAGRIEAQLIIKSAVKEVVLNTAKRRCKVTFHNGKVIDLPITENPSEDVTEAIQSLSEVTERGLIDVDEVII

SEQ ID NO: 21327 - DNA, 50 bp, Escherichia coli
  source 1..50: mol_type = genomic DNA
cagtgtatttagaccttgatgatttttattagacacgtttaaatacacca

SEQ ID NO: 21328 - DNA, 40 bp, Escherichia coli; identical to SEQ ID NO: 5188
  source 1..40: mol_type = genomic DNA

SEQ ID NO: 21329 - DNA, 40 bp, Escherichia coli; identical to SEQ ID NO: 5188
  source 1..40: mol_type = genomic DNA

SEQ ID NO: 21330 - DNA, 50 bp, Escherichia coli
  source 1..50: mol_type = genomic DNA
cagtgtattccgaagttgagtcttttgatttcccacaaccaaatatacca

SEQ ID NO: 21331 - protein, 507 aa, Escherichia coli
MKRAISYIRFSSEKQSRGDSLRRQAKMVTDWLKAHPEYYLDESLTFRDLGVSGFTGKHLQGGLGDFLTAIEKGLVKAGDTLLIESLDRLSRQDVDQASELLRNILRSGVDVVTLSDGEHYTRESLKDPLALIKSILIMQRSHEESLRKSERIQAAWDAKKEAAKAGIKISRRCPAWLKLNDDRKTFSVIPEKVETVRRCFQLRLEGKSIWEIVRTLNDEGHQTLNQYKAGKFGQTSVQDLLKNRSVIGYFTPKGCEEIAGYFPPIIPETDFYKVQQLSYSRYGRKPASDKPLSVNLFKGVIRCSECGHALIITGFSDTRSGIYRCPSRNENRCNAKGLSRKQTDSTLLALLSRLDRFDSDMTNTVDTLKLHREHISNNIEKLVQLSLEIEDLSAITSKLKQLKGELSQVDADIEKETQRLKSIDVGCLFDCDLTTKAGRIEAQLIIKSAVKEVVLNTAKRRCKVTFHNGKVIDLPITENPSEDVTEAIQSLSEVTERGLIDVDEVII

SEQ ID NO: 21332 - DNA, 50 bp, Escherichia coli; identical to SEQ ID NO: 21327
  source 1..50: mol_type = genomic DNA

SEQ ID NO: 21333 - DNA, 40 bp, Escherichia coli
  source 1..40: mol_type = genomic DNA
cggcgttaatcgggtgattttagacggccgcccggttcat

SEQ ID NO: 21334 - DNA, 40 bp, Escherichia coli; identical to SEQ ID NO: 21333
  source 1..40: mol_type = genomic DNA

SEQ ID NO: 21335 - DNA, 50 bp, Escherichia coli; identical to SEQ ID NO: 21330
  source 1..50: mol_type = genomic DNA

SEQ ID NO: 21336 - protein, 431 aa, Escherichia coli
MKRAISYIRFSSEKQSRGDSLRRQAKMVTDWLKAHPEYYLDESLTFRDLGVSGFTGKHLQGGLGDFLTAIEKGLVKAGDTLLIESLDRLSRQDVDQASELLRNILRSGVDVVTLSDGEHYTRESLKDPLALIKSILIMQRSHEESLRKSERIQAAWDAKKEAAKAGIKISRRCPAWLKLNDDRKTFSVIPEKVETVRRCFQLRLEGKSIWEIVRTLNDEGHQTLNQYKAGKFGQTSVQDLLKNRSVIGYFTPKGCEEIAGYFPPIIPETDFYKVQQLSYSRYGRKPASDKPLSVNLFKGVIRCSECGHALIITGFSDTRSGIYRCPSRNENRCNAKGLSRKQTDSTLLALLSRLDRFDSDMTNTVDTLKLHREHISNNIEKLVQLSLEIEDLSAITSKLKQLKGELSQVDADIEKETQRLKSIDVGCLIVT

SEQ ID NO: 21337 - DNA, 50 bp, Escherichia coli; identical to SEQ ID NO: 21327
  source 1..50: mol_type = genomic DNA

SEQ ID NO: 21338 - DNA, 40 bp, Escherichia coli; identical to SEQ ID NO: 5188
  source 1..40: mol_type = genomic DNA

SEQ ID NO: 21339 - DNA, 40 bp, Escherichia coli; identical to SEQ ID NO: 5188
  source 1..40: mol_type = genomic DNA

SEQ ID NO: 21340 - DNA, 50 bp, Escherichia coli; identical to SEQ ID NO: 21330
  source 1..50: mol_type = genomic DNA

SEQ ID NO: 21341 - protein, 537 aa, Vibrio vulnificus
MNTIRPLVSLRSPTAYSYIRFSSAIQAQGDSLRRQTKLAQEYCQKHSLTLSEQSFTDLGVSAFNSANTNEDNGLGQFLKALEQGVIPSGSFLLVESLDRLSRANVMTALSQLLNIIGHGITVVTLIDNRTYSSESETTDLIISLAVMERAHNESKTKSERIKAAWANKRANPTTTNRTSLAPFWLKLNKDKRTYTVIEKNAETVRRIFQMSIDGHGIVGIARRLNEEKIPSPKGGSWSNTSICRILNSKAVIGEYTPNIGRTSTNAPISDYYPSIIDEDTFYFSQSRKAERSKPESAGRKTTFPNVFNQVAKCGVCGATMYYDNKSPTLKYLTCREFKKKNCTNRPIRLELMHHFVIEQFLHPQHFERFNELVAKGTTVDSNVAVLKGKLEASKETYKQLLSLASNFSDPVIQDEIKRRSESVQSLTQQIEAAKAQTIEATNSVHMNFRESCQLVADALQTETYGYQPTSLPNEELLKARVKLNRSLKQAFKEIQVSHCPDTKKASITANDFVFEAHKSAMKTGFNDTTWWVQKKEA

SEQ ID NO: 21342 - DNA, 50 bp, Vibrio vulnificus
  source 1..50: mol_type = genomic DNA
ataaggtaaatgttgccaacaatagtaatagtcggtagcatttacctttc

SEQ ID NO: 21343 - DNA, 40 bp, Vibrio vulnificus
  source 1..40: mol_type = genomic DNA
tcaaggttattacgccaaagtgttcgtctgcaaaccagaa

SEQ ID NO: 21344 - DNA, 40 bp, Vibrio vulnificus
  source 1..40: mol_type = genomic DNA
tcaaggttattacgccaaaaagttcgtctgcaaaccagaa

SEQ ID NO: 21345 - DNA, 50 bp, Vibrio vulnificus
  source 1..50: mol_type = genomic DNA
ataacttgaaaatagtcaacaagtaaaatattcctttctatttacctttc

SEQ ID NO: 21346 - protein, 504 aa, Sinorhizobium medicae
MVSDQKLAVIYCRVSSVKQSTAGDGLKSQETRCRDFARMKGYQVHERVFTDDVSGSRVERPGMKAMLEFIRRRKRTGTVVLIDDVSRLARGLNAHLELRASIASAGGILESPSIEFGEDSDSVLVENLLASVSQHQRQKNGEQTKNRMKARVQNGYFVFQAPVGYRYERVSGRGKMLVRHEPEATVVQEALEGYASGRFETQADVMRFLRHNPLFPRKGSVLNHRVFQLLSQPVYAGFVEAPKWGVSRRVGHHEPLINAQTFARIQDRMNGHGYAPRQKNLNEDFPLRGFVVCADCSTPLTACWSSGEYAKYPYYLCPRKECVSYRKSIKRDRIQGEFEELLKVVQPTDKLFKIATSMLRKLWDHRLEQGRTQAKAMAAEIVSLDRQVAAYLDRVVEASVPSVVAAYENKIAKLEERKLLVQEQIASIGRPRSTFDDTVRTALGFLSSPWNLWSSGVLEARRTVLKLTFARRLAYSRNEGFRTANLSMPFNVLGGISGSENRMA

SEQ ID NO: 21347 - DNA, 50 bp, Sinorhizobium medicae
  source 1..50: mol_type = genomic DNA
tttcaggtagtgaaaatcgaatggcgcgccttgatggcgcgacttcgaac

SEQ ID NO: 21348 - DNA, 40 bp, Sinorhizobium medicae
  source 1..40: mol_type = genomic DNA
agggaaaaaaagaaaatggcgcacccgaagagattcgaac

SEQ ID NO: 21349 - DNA, 40 bp, Sinorhizobium medicae
  source 1..40: mol_type = genomic DNA
agggaaaaaaagaaaatggaacacccgaagagattcgaac

SEQ ID NO: 21350 - DNA, 50 bp, Sinorhizobium medicae
  source 1..50: mol_type = genomic DNA
tttcaggtaaagggaatagaatggaacacctggaagagaagatatttaag

SEQ ID NO: 21351 - protein, 521 aa, Streptococcus agalactiae; identical to SEQ ID NO: 13191

SEQ ID NO: 21352 - DNA, 50 bp, Streptococcus agalactiae; identical to SEQ ID NO: 13192
  source 1..50: mol_type = genomic DNA

SEQ ID NO: 21353 - DNA, 40 bp, Streptococcus agalactiae
  source 1..40: mol_type = genomic DNA
gataaaattagtagcaaccgatatggatggtacattctta

SEQ ID NO: 21354 - DNA, 40 bp, Streptococcus agalactiae
  source 1..40: mol_type = genomic DNA
gataaaattagtagcaaccaatatggatggtacattctta

SEQ ID NO: 21355 - DNA, 50 bp, Streptococcus agalactiae
  source 1..50: mol_type = genomic DNA
tgtatattttgatggcttgcgccaaaactaagaagtctggtattgagaca

SEQ ID NO: 21356 - protein, 521 aa, Streptococcus agalactiae; identical to SEQ ID NO: 13191

SEQ ID NO: 21357 - DNA, 50 bp, Streptococcus agalactiae; identical to SEQ ID NO: 13192
  source 1..50: mol_type = genomic DNA

SEQ ID NO: 21358 - DNA, 40 bp, Streptococcus agalactiae
  source 1..40: mol_type = genomic DNA
gataaaattagtagcaaccgatatggacggtacattctta

SEQ ID NO: 21359 - DNA, 40 bp, Streptococcus agalactiae
  source 1..40: mol_type = genomic DNA
gataaaattagtagcaaccaatatggacggtacattctta

SEQ ID NO: 21360 - DNA, 50 bp, Streptococcus agalactiae; identical to SEQ ID NO: 21355
  source 1..50: mol_type = genomic DNA

SEQ ID NO: 21361 - protein, 521 aa, Streptococcus anginosus; identical to SEQ ID NO: 13191

SEQ ID NO: 21362 - DNA, 50 bp, Streptococcus anginosus; identical to SEQ ID NO: 13192
  source 1..50: mol_type = genomic DNA

SEQ ID NO: 21363 - DNA, 40 bp, Streptococcus anginosus
  source 1..40: mol_type = genomic DNA
aattaagatggttgtgaccgatatggacggcacgctctta

SEQ ID NO: 21364 - DNA, 40 bp, Streptococcus anginosus
  source 1..40: mol_type = genomic DNA
aattaagatggttgtgaccaatatggacggcacgctctta

SEQ ID NO: 21365 - DNA, 50 bp, Streptococcus anginosus; identical to SEQ ID NO: 21355
  source 1..50: mol_type = genomic DNA

SEQ ID NO: 21366 - protein, 549 aa, Paenibacillus polymyxa
MRCTQLNAYITAIYPRVSTGMQASEGTSLEGQVEICCNKARKLGIQENTLQVYQEEGFTGEDIDRPALNRLMQDIKLGKIKSLIVTHPDRLTRDLTDKLIICRELEKHDVELIFVDTEYKNTPEGQLFFNMMSSIAQYELSLIKKRTVRGRLRAVEKDKKIMPMRVAPYGYDLVDGQLIINEEEAKFVQFIYHWYVHDSKTMKQIGENLYLMGAVPKRAESKQWSASSIGRVLTSEIYIGKYYYNRRSTKKIKGEKTATGKAKKTYTIRNKEEWISVDVPPLIDLGTFELAQKKKRTNFTRTGRNVKHHYLLRSLIKCSHCGRVWEATSYPGKAKNGEKKSYPIYRCANKYPKRYGEGVEKCDIPVIRTEILDEYIWGIIVNVLNNPEHLKNDLSKKDSHATDELMNLKNIFEKQIEEKEKEREKIKFMFRKGVIEEDELETDMTTLNKEVKRIQGELGRLEEKISLLNRQSMSEDVIKVMVSKYQEVLNNELAPEIKRRIVENLIDEIIIRYDHEKKQFNLSFYGFLNRMVDGFSKDNYFVSGTQREK

SEQ ID NO: 21367 - DNA, 50 bp, Paenibacillus polymyxa
  source 1..50: mol_type = genomic DNA
actttgtttctggaacacaacgtgaaaaagatataaatacaaaacaaagt

SEQ ID NO: 21368 - DNA, 40 bp, Paenibacillus polymyxa
  source 1..40: mol_type = genomic DNA
gctggtggcccatattgtgaaaaaattcgataacaccggc

SEQ ID NO: 21369 - DNA, 40 bp, Paenibacillus polymyxa
  source 1..40: mol_type = genomic DNA
gctggtggcccatattgtgcaaaaattcgataacaccggc

SEQ ID NO: 21370 - DNA, 50 bp, Paenibacillus polymyxa
  source 1..50: mol_type = genomic DNA
tcttggtataaaaaagacaacatgcaaaatatataattcaaaaactaata

SEQ ID NO: 21371 - protein, 552 aa, Burkholderia cepacia
MHKFTRIYAYLRFSSDGQSDGFSFERQRELAYVWTRSHGIPDSAVEFVEDAGFSAYSGAHLSKGALGKLLTRLRETSRDGNELVLFEAVDRSSRQGLFSFSSMVEAFLKTGVFIHFLGEAAPFSQDFPPDSILQLKLGIFASLAQQESARKSAFSGNNWRNKRKLAYQDGTILTRECPRWLSVIDGRFVVLHDRVASIQKVFELAKGGWGVGKIVRYANTKKLPVPGKGETWHNSLINRLFENRGLLGEYQPHVRVKGKKIAEGDPISNYYPTVIDADLFHSVRGIRATVSDFPNRRDENNYNYLQGLGKCACGGSWRRINKNSGKQVGYAQYSCSNRQRGVTKCKNVSARFFDHHFIAELCLNIPAFISNVQASSNIKEEALKSQLRDLESRLENLGDSVERHGDPAGLLSVRMKKLASEKIELMKELERVAIAFTANADSFSALDAARVYIPAFLTHYEAEQDGAEDAFKARALFRSRLLSAVDCVNVSDCRTRVDVVLKDGASLPLTLPDADELADATLYGVSPASEIYEEDIEEDRRAIDELARKFLN

SEQ ID NO: 21372 - DNA, 50 bp, Burkholderia cepacia
  source 1..50: mol_type = genomic DNA
gaatctagttgacgctcgacgtttgagatagtagaattctaactagataa

SEQ ID NO: 21373 - DNA, 40 bp, Burkholderia cepacia
  source 1..40: mol_type = genomic DNA
atcgggcaggccgacgatcgagaacgacggcagcccgttg

SEQ ID NO: 21374 - DNA, 40 bp, Burkholderia cepacia
  source 1..40: mol_type = genomic DNA
atcgggcaggccgacgatcctgaacgacggcagcccgttg

SEQ ID NO: 21375 - DNA, 50 bp, Burkholderia cepacia
  source 1..50: mol_type = genomic DNA
gaatcaaggatgaccccaaggtttctgattggagcaactggactagatta

SEQ ID NO: 21376 - protein, 518 aa, Klebsiella pneumoniae
MPKAISYIRFSTKIQSVGDSTKRQSKYINDWLKRNPDYYLDESLRFQDLGISGFSGANAKSGAFAEFLAAVDSGYIEAGSVLLVESLDRVSRQDIDTAGEQLRKILRAGVEVVTLVDNEWYTKESLKDSLSMIKAMLVMERAHEESAMKSTRLRSVWAAKRERAAKGEIMSKRCAAWLKVSEDRSHFEFIPENVKAVQRVFQLRLEGLSHVKIAKQMNDEGFSTLNQFKSVTGGWSQSSVTELLSNRSVIGFKVPSKSMAVKGVAEIPNYYPSIITDEQFYAVQQLKQGSGRRPSSEKPLLTNLFKGVLRCSECGFIMVVAGVSAKRSGIYKCSMKSEGRCNSVGFSRLQTDKALVQGLLYNTNRLLLNRDNGSAIGALQSELEQLQKQRERLIKLSMLADDTESMAKDLKALNSQIKDAEKAVSEVHQREQSSQLETISHLDLTVKKDRIEAQIIIKRIVKEIRLNTAAKKCDVFLHNGLRLLNFPLDRVVDGEIFLEVLPVLDCDEFDFDTYRMIE

SEQ ID NO: 21377 - DNA, 50 bp, Klebsiella pneumoniae
  source 1..50: mol_type = genomic DNA
gtatcattagaaaggttatttaaggaatagaccctcttatgatacacttc

SEQ ID NO: 21378 - DNA, 40 bp, Klebsiella pneumoniae
  source 1..40: mol_type = genomic DNA
ggaccgggcggctgtcgaggatcacgcggttgacgttacg

SEQ ID NO: 21379 - DNA, 40 bp, Klebsiella pneumoniae
  source 1..40: mol_type = genomic DNA
ggaccgggcggctgtcgagtttcacgcggttgacgttacg

SEQ ID NO: 21380 - DNA, 50 bp, Klebsiella pneumoniae
  source 1..50: mol_type = genomic DNA
ctaacagtccttaagttatttaagttatacaccttcactcaaaacactgg

SEQ ID NO: 21381 - protein, 518 aa, Klebsiella pneumoniae
MPKAISYIRFSTKIQSVGDSTKRQSKYINDWLKRNPDYYLDESLRFQDLGISGFSGANAKSGAFGEFLAAVDSGYIEANSVLLVESLDRVSRQDIDTAGEQLRKILRAGVEVVTLVDNEWYTKESLKDSLSMIKAMLVMERAHEESAMKSTRLRSVWAAKRERAANGEIMSKRCAAWLKVSEDRSHFEFIPENVKAVQRVFQLRLEGLSHVKIAKQMNDEGFSTLNQFKSVTGGWSQSSVTELLSNRSVIGFKVPSKSMAVKGVSEIPNYYPSIITDEQFYAVQQLKQGSGRRPSSEKPLLTNLFKGVLRCSECGFIMVVAGVTAKRSGIYKCSMKSEGRCNSVGFSRLQTDKALVQGLLYNTNRLLLNRDNGSAIGALQSELEQLQKQRERLIKLSMLTDDTESMAKDLKALNSQIKDAERAVSEVHQREQSSQLETISHLDLTVKKDRIEAQIIIKRIVKEIRLNTAAKKCDVFLHNGLKLYNFPLDRVVDGEIFLEVLPLLEADEFDFDTYRVIE

SEQ ID NO: 21382 - DNA, 50 bp, Klebsiella pneumoniae
  source 1..50: mol_type = genomic DNA
gtatcattagaaaggttatttaaggaatataccctcttatgatacacttc

SEQ ID NO: 21383 - DNA, 40 bp, Klebsiella pneumoniae; identical to SEQ ID NO: 21378
  source 1..40: mol_type = genomic DNA

SEQ ID NO: 21384 - DNA, 40 bp, Klebsiella pneumoniae; identical to SEQ ID NO: 21379
  source 1..40: mol_type = genomic DNA

SEQ ID NO: 21385 - DNA, 50 bp, Klebsiella pneumoniae; identical to SEQ ID NO: 21380
  source 1..50: mol_type = genomic DNA

SEQ ID NO: 21386 - protein, 518 aa, Enterobacter hormaechei; identical to SEQ ID NO: 21381

SEQ ID NO: 21387 - DNA, 50 bp, Enterobacter hormaechei; identical to SEQ ID NO: 21382
  source 1..50: mol_type = genomic DNA

SEQ ID NO: 21388 - DNA, 40 bp, Enterobacter hormaechei
  source 1..40: mol_type = genomic DNA
gcacggggcggctgtcgaggatcacgcggttgaccgatcg

SEQ ID NO: 21389 - DNA, 40 bp, Enterobacter hormaechei
  source 1..40: mol_type = genomic DNA
gcacggggcggctgtcgagtttcacgcggttgaccgatcg

SEQ ID NO: 21390 - DNA, 50 bp, Enterobacter hormaechei; identical to SEQ ID NO: 21380
  source 1..50: mol_type = genomic DNA

SEQ ID NO: 21391 - protein, 518 aa, Klebsiella pneumoniae; identical to SEQ ID NO: 21376

SEQ ID NO: 21392 - DNA, 50 bp, Klebsiella pneumoniae
  source 1..50: mol_type = genomic DNA
gtatcattagaaaggttatttaaggaatagaccatcttatgatacacttc

SEQ ID NO: 21393 - DNA, 40 bp, Klebsiella pneumoniae; identical to SEQ ID NO: 21378
  source 1..40: mol_type = genomic DNA

SEQ ID NO: 21394 - DNA, 40 bp, Klebsiella pneumoniae; identical to SEQ ID NO: 21379
  source 1..40: mol_type = genomic DNA

SEQ ID NO: 21395 - DNA, 50 bp, Klebsiella pneumoniae; identical to SEQ ID NO: 21380
  source 1..50: mol_type = genomic DNA

SEQ ID NO: 21396 - protein, 548 aa, Citrobacter freundii
MKLLVTYIRWSTKEQDSGDSLRRQTNLIDAFYSKHREEYYLLPAHRYVDKGKSGFHQQHKNQGSDFRRMFENVMSGGIPEGSLIVVENFDRFSRADIDTAIDDVRQILRKGVSILTLGDGELYDKSALTDPVKLIKHIIIAERAHQESLVKQKRIAQVWNHKTQLARELKKPMGKQAPGWLELSDDGSHYIVDEDKASLVNLIFDKRLSGLSMFAICKWLNEQGYPTINQRKVRISKTKKPDGNWSALSVKHILTSRSVLGYLPAKVSTEDRKTVLREEIEGFYPQIVTDSKFYAVQQLLEETGKGKTSSGEHWLYVNILKGIIRCKCGLVMTPTGIRKPVYQGTYRCNGNKESRCNYGTVSRKLLDTQLCSRLFSKLSQLHDESSDTARLDELQRRLTTVDIELEKLTETLIQLPNITQIQEALRVKQEEKDELIAQLSREKARVKSVSSLDLSGLDMESVEGRTEAQIIIKRLVKEIVVSGNEKLVDIYLHNGNMIRGFPLDGKDDHTLTLEEATDEMQPLDDMLIFGEPVTRIYPAGDMEEVDYS

SEQ ID NO: 21397 - DNA, 50 bp, Citrobacter freundii; identical to SEQ ID NO: 16632
  source 1..50: mol_type = genomic DNA

SEQ ID NO: 21398 - DNA, 40 bp, Citrobacter freundii
  source 1..40: mol_type = genomic DNA
gtacatggaataataaagcaccagaacttttgccatttta

SEQ ID NO: 21399 - DNA, 40 bp, Citrobacter freundii; identical to SEQ ID NO: 21398
  source 1..40: mol_type = genomic DNA

SEQ ID NO: 21400 - DNA, 50 bp, Citrobacter freundii
  source 1..50: mol_type = genomic DNA
atgtgaattttgacatgtaaatgcaccagtattaccatcagaacactcag

SEQ ID NO: 21401 - protein, 547 aa, Citrobacter freundii
MKLLVTYIRWSTKEQDSGDSLRRQTNLIDAFYSKHREEYYLLPAHRYVDKGKSGFHQQHKNQGSDFRRMFENVMSGGIPEGSLIVVENFDRFSRADIDTAIDDVRQILRKGVSILTLGDGELYDKSALTDPVKLIKHIIIAERAHQESLVKQKRIAQVWNHKTQLARELKKPMGKQAPGWLELSDDGSHYIVDEDKASLVNLIFDKRLSGLSMFAICKWLNEQGYPTINQRKVRISKTKKPDGNWSALSVKHILTSRSVLGYLPAKVSTEDRKTVLREEIEGFYPQIVTDSKFYAVQQLLEETGKGKTSGGEHWLYVNILKGIVRCKCGLVMTPTGIRKPVYQGTYRCNGNKESRCNYGTVSRKLLDTQLCSRLFSKLSQLHNEATDTARLDELQRRLTTVDSELEKLTETLIQLPNITQIQEALRVKQEEKDELIAKLSREKARVKSVSSLDLSGLDMESVEGRTEAQIIIKRLVKEIVVSGNEKLVDIYLHNGNMIRGFPLDGKDDHTLTLEEAIDEMQPLDDMLIFGEPVTRVYPAGDMEEVDA

SEQ ID NO: 21402 - DNA, 50 bp, Citrobacter freundii; identical to SEQ ID NO: 16632
  source 1..50: mol_type = genomic DNA

SEQ ID NO: 21403 - DNA, 40 bp, Citrobacter freundii; identical to SEQ ID NO: 21398
  source 1..40: mol_type = genomic DNA

SEQ ID NO: 21404 - DNA, 40 bp, Citrobacter freundii; identical to SEQ ID NO: 21398
  source 1..40: mol_type = genomic DNA

SEQ ID NO: 21405 - DNA, 50 bp, Citrobacter freundii; identical to SEQ ID NO: 21400
  source 1..50: mol_type = genomic DNA

SEQ ID NO: 21406 - protein, 549 aa, Vibrio parahaemolyticus
MTIAYSYLRLSSKIQLNGQGKTRQLEASRQAAIENGWQLSEMTFEDLGVSAYTGKNVTTGAFNQILRLIESGVIKAGSVLIVENPDRISREGVNESAALMLQILASGVQIYTIFDKKLYSGSKDTALIDLLMWGVQAQRAYDESKTKSKRVRDARKRAREKARAKGKSSVTVLPSWLRRVKGEDGDTYEIIEEKANLIRQLFKLKLRGYGYVQMNKELEKMGLPYVHTATIVHYLKSQSVIGIYQPITKAEGEADVRIPVGDPIENFYPPIVDRETFFKVQAMFSKPQKGRIANKHFNLWRCRIKCKCGSTMHLQRVTKSRNKNDYEYFYLRCPKTALQACPNSFGGVDYPRFTKLALMSIDCLNWDALTNDSKLNDLVAKRTTLEGEKELLEKRIESLLDQLELTPSAFISKRLASLEEEYERINKELAATNHDVEVEESLEGMLKNESKGVECILGMSLEEISTLKPIHLDIWGRLDHLVMGEHEEGCPEVQVIDRDGAVVSTIRMDKKLTRATIESNYSQLAEVAIYDVRQVKKKIVDEAELVEDN

SEQ ID NO: 21407 - DNA, 50 bp, Vibrio parahaemolyticus
  source 1..50: mol_type = genomic DNA
tgtttaagtaaatacattcctttcttcaaaggataatgttttcttaaacc

SEQ ID NO: 21408 - DNA, 40 bp, Vibrio parahaemolyticus
  source 1..40: mol_type = genomic DNA
tgtcgggaccgtccatttgtttagaggaatattgaagatt

SEQ ID NO: 21409 - DNA, 40 bp, Vibrio parahaemolyticus
  source 1..40: mol_type = genomic DNA
tgtcgggaccgtccatttgattagaggaatattgaagatt

SEQ ID NO: 21410 - DNA, 50 bp, Vibrio parahaemolyticus
  source 1..50: mol_type = genomic DNA
tgggtaacacagtgcattccttacatcacaatataaaatactctcaaacc

SEQ ID NO: 21411 - protein, 605 aa, Escherichia coli
MKKCFIYHRVSSEFQLARTGIQRQEDSLQAYVERTNLLADMEDPEPTIISDRGISAFKTNENNFSIGELGRWMDQVRDGMWDGSALVLESIDRFSRQNPFTVVAYLSELVSHNITIHDVSLSMLINRTNSAMLPIVTMSAQRAYEESKLKSDRIRDGWRRRRENAFNNGTIVTNKRPRWIDVKNDKYVLNDKVAIVREIFRLYKKGIGTSTIAKILNARGEKWLFKSGRLWRSESVHKILKNKRVTGAIFISETIRDYNSTDKSIERNTYEMDLYPIAISKEEYALVQQLLKMRRTNNGRITNIKDTGELKKSNIFNRVFRCAKCGEAMYHNVVLANRDSKKRGKFKEEYRYIRCIGERDGLCDNKALRYEVVEQFVIEHIKGMDFTKILKPNEINPEIELVRVLIEEEKAHIQEYELGIERLKKQDKKIPFDVLTELQDSRDKLRTLEERQFSFADIKVDTDYIKSVDSSVIFDQTNIAIRSMVEHELIKIIDTIKLYRMGKHYVITLKYRSVGILKHVLIVEAKKIPTLISNIVIERTGKTVEYSTPSFSLVIADGDSPRLKTSDGVPISMIDYSLLLNYVDDVDRDDIVGVWMREKFNTLTS

SEQ ID NO: 21412 - DNA, 50 bp, Escherichia coli
  source 1..50: mol_type = genomic DNA
tgtttgtttacaatagccgtcctacaaatgtatattatgctatacaaata

SEQ ID NO: 21413 - DNA, 40 bp, Escherichia coli; identical to SEQ ID NO: 1288
  source 1..40: mol_type = genomic DNA

SEQ ID NO: 21414 - DNA, 40 bp, Escherichia coli; identical to SEQ ID NO: 6524
  source 1..40: mol_type = genomic DNA

SEQ ID NO: 21415 - DNA, 50 bp, Escherichia coli
  source 1..50: mol_type = genomic DNA
tgtttttttttaacaggcagaatataaatgtatttcaattgataaaaata

SEQ ID NO: 21416 - protein, 605 aa, Escherichia coli
MKKCFIYHRVSSEFQLARTGIQRQEDSLQAYVERTNLLADMEDPEPTIISDRGISAFKTNENNFSIGELGRWMDQVRDGMWDGSALVLESIDRFSRQNPFTVVAYLSELVSHNITIHDVSLSMLINRTNSAMLPIVTMSAQRAYEESKLKSDRIRDGWRRRRENAFNNGTIVTNKRPRWIDVKNDKYVLNDKVAIVREIFRLYKKGIGTSTIAKILNARGEKWLFKSGRLWRSESVHKILKNKRVTGAIFISETIRDYNSTDKSIERNTYEMDLYPIAISKEEYALVQQLLKMRRTNNGRITNIKDTGELKKSNIFNRVFRCAKCGEAMYHNVVLANRDSKKRGKFKEEYRYIRCIGERDGLCDNKALRYEVVEQFVIEHIKGMDFKKILKPNEINPEIELVRVLIEEEKAHIQEYELGIERLKKQDKKIPFDVLTELQDSRDKLRTLEERQFSFADIKVDTDYIKSVDSSVIFDQTNIAIRSMVEHELIKIIDTIKLYRMGKHYVITLKYRSVGILKHVLIVEAKKIPTLISNIVIERTGKTVEYSTPSFSLVIADGDSPRLKTSDGVPISMIDYSLLLNYVDDVDRDDIVGVWMREKFNTLTS

SEQ ID NO: 21417 - DNA, 50 bp, Escherichia coli; identical to SEQ ID NO: 21412
  source 1..50: mol_type = genomic DNA

SEQ ID NO: 21418 - DNA, 40 bp, Escherichia coli; identical to SEQ ID NO: 1288
  source 1..40: mol_type = genomic DNA

SEQ ID NO: 21419 - DNA, 40 bp, Escherichia coli; identical to SEQ ID NO: 6524
  source 1..40: mol_type = genomic DNA

SEQ ID NO: 21420 - DNA, 50 bp, Escherichia coli; identical to SEQ ID NO: 21415
  source 1..50: mol_type = genomic DNA

SEQ ID NO: 21421 - protein, 523 aa, Enterococcus faecium
MAKVTTIPATISRFTATPINEKKKRRTAAYARVSTDSEEQLTSYSAQVDYYTNYIKSRDDWEFVSVYTDEGITGTNTKHREGFKRMVADALAGKIDLIVTKSVSRFARNTVDSLTTVRQLKEKGVEIYFEKENIWTLDSKGELLITIMSSLAQEESRSISENCTWGQRKRFADGKVTVPFKRFLGYDRGPDGNLVLNKDEAVIIRRIYSMFLQGMTPHGIAARLTADGIKSPGGKDKWNAGAVRSILTNEKYKGDALLQKSYTVDFLTKKKKVNEGEIPQYYVEGNHEAIIQPEVFELVQQELERRKSSRGRHSGVHLFSGKIRCGQCGEWYGSKVWHSNSKYRRVIWQCNHKYDGEEKCSTPHLTEDEIKAMFVSAANKLIGKKAAIISPLRNSLDVAFDTSALETEVAELQDEIMVVSDLIEKCIYENAHVALDQTEYQKRYDGLTTRFDTAKARLEEIEAALADKKSRRAAIDAFLDTLAQADPMEKFDPALWCGLIDYVTVYARDDVRFAFKDGQEIKA

SEQ ID NO: 21422 - DNA, 50 bp, Enterococcus faecium
  source 1..50: mol_type = genomic DNA
tgtattaaactcagtaagattatttctatgttcctactgattttgataca

SEQ ID NO: 21423 - DNA, 40 bp, Enterococcus faecium
  source 1..40: mol_type = genomic DNA
acctgaacccatggttggatcaaaaacactaaagaatcgt

SEQ ID NO: 21424 - DNA, 40 bp, Enterococcus faecium
  source 1..40: mol_type = genomic DNA
acctgaacccatggttggaataaaaacactaaagaatcgt

SEQ ID NO: 21425 - DNA, 50 bp, Enterococcus faecium
  source 1..50: mol_type = genomic DNA
tttctgaaaatcataaatattattattattctcctatgaactttaaaaca

SEQ ID NO: 21426 - protein, 505 aa, Enterobacter hormaechei
MELAFSYARFSTKSQSTGTSLERQLNASRLFCSERGLTLSPKGYHDLGVSGFKQVKRPELEQMLQAIQSGDIPSGSYILIEAIDRLSRKGISHTQDVLKQILQYKVKVAFVGEDAKTLAGQVLDENSLNDLSSVILVALAADLAHKESLRKSKLVKAAKSIIRKKATEGHKVRGHTMFWIDWSEQKQDFVLNDRVKDVHKIIELRQEGHGPRKIAKILNELNIPGPRGNPWNHMTVTVVLRSPVLYGAYQTHQIIDGQKVPDVLLENHYPAVITQEEFVTIQADSSKSNKGRPSKANPFSGVLRCECGQAMLFSKRTNLNKDGEPLEYEYHFCLGHAEGRCKNNKRIRDLVPLLVSLMDKLVINQAPKKNLNVELIKQKEQKIEQLNKMLIELDSPPLSVLKTIQTLEAELDILLNTHVEEPVQTDVQTLSTITDAQEYNQYLKRLVKKIVVYQKNGPKNLRIKVYKTDGHYQNFLVKNGMVLFKSDTKALKELIDGFKKERREG

SEQ ID NO: 21427 - DNA, 50 bp, Enterobacter hormaechei
  source 1..50: mol_type = genomic DNA
tatgtcaataaagtaaacttgtttcgggatatgtttccattattgacata

SEQ ID NO: 21428 - DNA, 40 bp, Enterobacter hormaechei
  source 1..40: mol_type = genomic DNA
tctgggcgccaacattttccgcgatttctttgccggcatt

SEQ ID NO: 21429 - DNA, 40 bp, Enterobacter hormaechei
  source 1..40: mol_type = genomic DNA
tctgggcgccaacattttcctcgatttctttgccggcatt

SEQ ID NO: 21430 - DNA, 50 bp, Enterobacter hormaechei
  source 1..50: mol_type = genomic DNA
tatgtaaataggataaacttgtacctggacatatctatattattaacctt

SEQ ID NO: 21431 - protein, 505 aa, Enterobacter hormaechei
MELAFSYARFSTKSQSTGTSLERQLNASRLFCSERSLTLSPKGYHDLGVSGFKQVKRPELEQMLHAIQSGDIPSGSYILIEAIDRLSRKGISHTQDVLKQILQYKVKVAFVGEDAKTLAGQVLDENSLNDLSSVILVALAADLAHKESLRKSKLVKAAKSIIRKKATEGHKVRGHTMFWIDWSEQKQDFVLNDRVKDVHKIIELRQEGHGPRKIAKILNELNIPGPRGNPWNHMTVTVVLRSPVLYGAYQTHQIIDGQKVPDVLLENHYPAVITQEEFVTIQADSSKSNKGRPSKANPFSGVLRCECGQAMLFSKRTNLNKDGEPLEYEYHFCLGHAEGRCKNNKRIRDLVPLLVSLMDKLVINQAPKKNLNVELIKQKEQKIEQLNKMLIELDSPPLSVLKTIQTLEAELDILLNTHVEEPVQTDVQTLSTITDAQEYNQYLKRLVKKIVVYQKNGPKNLRIKVYKTDGHYQNFLVKNGKVLFKSDTKALKELIDGFKKERREG

SEQ ID NO: 21432 - DNA, 50 bp, Enterobacter hormaechei; identical to SEQ ID NO: 21427
  source 1..50: mol_type = genomic DNA

SEQ ID NO: 21433 - DNA, 40 bp, Enterobacter hormaechei
  source 1..40: mol_type = genomic DNA
aatgccggcaaagaaatcgcggaaaatgtttgcgcccaga

SEQ ID NO: 21434 - DNA, 40 bp, Enterobacter hormaechei
  source 1..40: mol_type = genomic DNA
aatgccggcaaagaaatcgctgaaaatgtttgcgcccaga

SEQ ID NO: 21435 - DNA, 50 bp, Enterobacter hormaechei; identical to SEQ ID NO: 21430
  source 1..50: mol_type = genomic DNA

SEQ ID NO: 21436 - protein, 505 aa, Enterobacter hormaechei
MELAFSYARFSTKSQSTGTSLERQLNASRLFCSERGLTLSPKGYHDLGVSGFKQVKRPELEQMLQAIQSGDIPSGSYILIEAIDRLSRKGISHTQDVLKQILQYKVKVAFVGEDAKTLAGQVLDENSLNDLSSVILVALAADLAHKESLRKSKLVKAAKSIIRKKATEGHKVRGHTMFWIDWSEQKQDFVLNDRVKDVHKIIELRQEGHGPRKIAKILNELNIPGPRGNPWNHMTVTVVLRSPVLYGAYQTHQIIDGQKVPDVLLENHYPAVITQEEFVTIQADSSKSNKGRPSKANPFSGVLRCECGQAMLFSKRTNLNKDGEPLEYEYHFCLGHAEGRCKNNKRIRDLVPLLVSLMDKLVINQAPKKNLNVELIKQKEQKIEQLNKMLIELDSPPLSVLKTIQTLEAELDILLNTHVEEPVQTDVQTLSTITDAQEYNQYLKRLVKKIVVYQKNGPKNLRIKVYKTDGHYQNFLVKNGKVLFKSDTKALKELIDGFKKERREG

SEQ ID NO: 21437 - DNA, 50 bp, Enterobacter hormaechei; identical to SEQ ID NO: 21427
  source 1..50: mol_type = genomic DNA

SEQ ID NO: 21438 - DNA, 40 bp, Enterobacter hormaechei
  source 1..40: mol_type = genomic DNA
tctgggcgcaaacattttccgcgatttctttgccggcatt

SEQ ID NO: 21439 - DNA, 40 bp, Enterobacter hormaechei
  source 1..40: mol_type = genomic DNA
tctgggcgcaaacattttcctcgatttctttgccggcatt

SEQ ID NO: 21440 - DNA, 50 bp, Enterobacter hormaechei; identical to SEQ ID NO: 21430
  source 1..50: mol_type = genomic DNA

SEQ ID NO: 21441 - protein, 510 aa, Candidatus Microthrix parvicella
MSDLIVREYLRVSKDDGKTGKSPDQQHNENLLAFEREGLVPHRGQPYQDVDRSASRYAKAVREGFERLIADLESDGFDADVLAIWESSRGSRRVSEWARLIELCEERGVRIWVTTHGRMYDPSNARDRRSLHEDAVDAEYESDKTSDRIRRNVRAAAKEGKPHGKNVYGYLRVYDQATRKLLRVEPHPDQAPIVQEAARRIMSGGTFYSVAKILNERGIPPRRPPLKDHRANYGWTSAAVKQMLTMPTYAGKRQHNGEIVGDAVWPSLIDYGDWVKLQSIISPPERRRTNFGTAKHLLAGIALCGVCGAPLRVGKQNAGRKRTDKDGKTLPRVTYRTYECPGVPGRPGPDGKMGFHVGMKQKNLDTAVVEALLTRLEHPSFLATIGDRGGSNDAERQDLLAEIARNQKYLDEVREEAAAKLRFDLLLDQETRIEPKIKEAQSRLEALTEMDPLVLRLVSDGAIREAWSDLDLDEQRRGIRAVMAPRINRVGKDWRGRSGVNHDRVDPGWR

SEQ ID NO: 21442 - DNA, 50 bp, Candidatus Microthrix parvicella
  source 1..50: mol_type = genomic DNA
cacccctgactaacctggtgtccccagatatagttgacaaaggaggtgcg

SEQ ID NO: 21443 - DNA, 40 bp, Candidatus Microthrix parvicella
  source 1..40: mol_type = genomic DNA
atgagcgccacgttctgtcccgacaccaccagcaggtggg

SEQ ID NO: 21444 - DNA, 40 bp, Candidatus Microthrix parvicella
  source 1..40: mol_type = genomic DNA
atgagcgccacgttctgtctggacaccaccagcaggtggg

SEQ ID NO: 21445 - DNA, 50 bp, Candidatus Microthrix parvicella
  source 1..50: mol_type = genomic DNA
cacccctgactcagctcgtgttactgtctgcagttgtgcttggtggtggg

SEQ ID NO: 21446 - protein, 480 aa, Paenibacillus apii
MVSKADGTPIGGLRVAIYTRVSTDHQAEEGFSLEVQHEKLIEYINRNKLQLFKFYSDPGVSAKDLNRPGIKELLRDFEDDMFDIILVHKLDRLTRNIGDLHRLVEMVNAKKKKLISYTEDIDTSTPSGRMFVYFLGIISQLFRENLGEEVTKGMRKRAQKGLHNITVDLYGYKRTEDGDLLIKDEEANWVRWIFEKYASGIGSPTIAKQLNKMGIRRNKGSKWDHSKVMLTLNNKHYLGKVHSKFTRDEEPIVREGKHEAIISDELYERVQRVLERKREGLISPNSQEYIFGGIVKCGVCGATYTGITDNRSSYPLRHYKCANKSRFGTCNQGGLSEKKLTDLVFKSVNIIGKEYTRKDMPQPTKSEEDEIRSAIRASEERRERWQLAYGDGNMPYEDFAKRMKEEMNHMAELELKLSTIPKKTVSYLTPSEAVNTINELKNNWDYLEQGTRKEIMQSLFQKISILKEEETWRITEVILA

SEQ ID NO: 21447 - DNA, 50 bp, Paenibacillus apii
  source 1..50: mol_type = genomic DNA
cactatacttatgtattgaccagtactccagtatatacgtaagtatagtg

SEQ ID NO: 21448 - DNA, 40 bp, Paenibacillus apii
  source 1..40: mol_type = genomic DNA
tacgagccggctgaccggaacgccggtccagcgggagacg

SEQ ID NO: 21449 - DNA, 40 bp, Paenibacillus apii; identical to SEQ ID NO: 21448
  source 1..40: mol_type = genomic DNA

SEQ ID NO: 21450 - DNA, 50 bp, Paenibacillus apii
  source 1..50: mol_type = genomic DNA
tactacactgataaatcaaccaatacaccagtaaatcagccactatactg

SEQ ID NO: 21451 - protein, 547 aa, Pseudomonas putida
MPRLISYVRMSTSEQLKGFSLERQRNLIADFARKNGLSLEDSHILEDIGRSSFSDDTEQKELTKFFEDLEKDKFQPGDVFALENIDRLTRRGPIDALMKVNQIISKGLKLAIISDKEQRILEEIDVFSIITLSIDASRANKESQVKSDKGLQNWAFKRELAATHKIAMTAQAPAWIDTETYYIMDETKNKQVKRRRYVLNEDKAKTVRLIFELFQNGNGSLKIKNILNEQNIPTFKGIEYWEPSTISKIIRNPATYGMYQPKKQNTGKRDLVAIGEPIENYFPAVISKEIFDQCQQITATNTTRKGRRGKLFTNLFTGLLKCADCDGPIHLLNPGIDKRAKNPKPVNYLICKKGKFTKECITKRLRYEDFENVMLKAIQEINLADVLHENNPLENLIKQQRNLQADIEKKKKLLENFERNFVENDGDLPSFMIAQAKQAEIDIKSLDSEIKSIRLEISQLNVYNSNIDNAIDELKVNGTYEARSKINLILHEIIKHIVIDFELDDYGVMFKNGAKRFINNGIIQNVFRTENTKQRDDEINEILNHKN

SEQ ID NO: 21452 - DNA, 50 bp, Pseudomonas putida; identical to SEQ ID NO: 18912
  source 1..50: mol_type = genomic DNA

SEQ ID NO: 21453 - DNA, 40 bp, Pseudomonas putida
  source 1..40: mol_type = genomic DNA
ccctggcaacgcagtgctcatcaagtccgcctatccttgg

SEQ ID NO: 21454 - DNA, 40 bp, Pseudomonas putida
  source 1..40: mol_type = genomic DNA
ccctggcaacgcagtgctcgccaagtccgcctatccttgg

SEQ ID NO: 21455 - DNA, 50 bp, Pseudomonas putida; identical to SEQ ID NO: 4680
  source 1..50: mol_type = genomic DNA

SEQ ID NO: 21456 - protein, 538 aa, Pseudomonas aeruginosa
MSTSEQLKGFSLERQRNLIADFARKNGLSLEDSHILEDIGRSSFSDDTEQKELTKFFEDLEKDKFQPGDVFALENIDRLTRRGPIDALMKVNQIISKGLKLAIISDKEQRILEEIDVFSIITLSIDASRANKESQVKSDKGLQNWAFKRELAATHKIAMTAQAPAWIDTETYYIMDETKNKQVKRRRYVLNEDKAKTVRLIFELFQNGNGSLKIKNILNEQNIPTFKGIEYWEPSTISKIIRNPATYGMYQPKKQNTGKRDLVAIGEPIENYFPAVISKEIFDQCQQITATNTTRKGRRGKLFTNLFTGLLKCADCDGPIHLLNPGIDKRAKNPKPVNYLICKKGKFTKECITKRLRYEDFENVMLKAIQEINLADVLHENNPLENLIKQQRNLQADIEKKKKLLENFERNFVENDGDLPSFMIAQAKQAEIDIKSLDSEIKSIRLEISQLNVYNSNIDNAIDELKVNGTYEARSKINLILHEIIKHIVIDFELDDYGVMFKNGAKRFINNGIIQNVFRTENTKQRDDEINEILNHKN

SEQ ID NO: 21457 - DNA, 50 bp, Pseudomonas aeruginosa; identical to SEQ ID NO: 18912
  source 1..50: mol_type = genomic DNA

SEQ ID NO: 21458 - DNA, 40 bp, Pseudomonas aeruginosa; identical to SEQ ID NO: 4683
  source 1..40: mol_type = genomic DNA

SEQ ID NO: 21459 - DNA, 40 bp, Pseudomonas aeruginosa; identical to SEQ ID NO: 4684
  source 1..40: mol_type = genomic DNA

SEQ ID NO: 21460 - DNA, 50 bp, Pseudomonas aeruginosa; identical to SEQ ID NO: 4680
  source 1..50: mol_type = genomic DNA

SEQ ID NO: 21461 - protein, 538 aa, Pseudomonas aeruginosa
MSTSEQLKGFSLERQRNLIADFARKNGLSLEDSHILEDIGRSSFSDDTEQKELTKFFEDLEKDKFQPGDVFALENIDRLTRRGPIDALMKVNQIISKGLKLAIISDKEQRILEEIDVFSIITLSIDASRANKESQVKSDKGLQNWAFKRELAATHKIAMTAQAPAWIDTETYYIMDETKNKQVKRRRYVLNEDKAKTVRLIFELFQNGNGSLKIKNILNEQNIPTFKGIEYWEPSTISKIIRNPATYGMYQPKKQNTGKRDLVAIGEPIENYFPAVISKEIFDQCQQITATNTTRKGRRGKLFTNLFTGLLKCADCDGPIHLLNPGIDKRAKNPKPVNYLICKKGKFTKECITKRLRYEDFENVMLKAIQEINLADVLHENNPLENLIKQQRNLQADIEKKKKLLENFERNFIENDGDLPSFMIAQAKQAEIDIKSLDSEIKSIRLEISQLNVYNSNIDNAIDELKVNGTYEARSKINLILHEIIKHIVIDFELDDYGVMFKNGAKRFINNGIIQNVFRTENTKQRDDEINEILNHKN

SEQ ID NO: 21462 - DNA, 50 bp, Pseudomonas aeruginosa; identical to SEQ ID NO: 18912
  source 1..50: mol_type = genomic DNA

SEQ ID NO: 21463 - DNA, 40 bp, Pseudomonas aeruginosa; identical to SEQ ID NO: 4693
  source 1..40: mol_type = genomic DNA

SEQ ID NO: 21464 - DNA, 40 bp, Pseudomonas aeruginosa; identical to SEQ ID NO: 4694
  source 1..40: mol_type = genomic DNA

SEQ ID NO: 21465 - DNA, 50 bp, Pseudomonas aeruginosa; identical to SEQ ID NO: 4680
  source 1..50: mol_type = genomic DNA

SEQ ID NO: 21466 - protein, 538 aa, Pseudomonas aeruginosa; identical to SEQ ID NO: 21456

SEQ ID NO: 21467 - DNA, 50 bp, Pseudomonas aeruginosa; identical to SEQ ID NO: 18912
  source 1..50: mol_type = genomic DNA

SEQ ID NO: 21468 - DNA, 40 bp, Pseudomonas aeruginosa; identical to SEQ ID NO: 4693
  source 1..40: mol_type = genomic DNA

SEQ ID NO: 21469 - DNA, 40 bp, Pseudomonas aeruginosa; identical to SEQ ID NO: 4694
  source 1..40: mol_type = genomic DNA

SEQ ID NO: 21470 - DNA, 50 bp, Pseudomonas aeruginosa; identical to SEQ ID NO: 4680
  source 1..50: mol_type = genomic DNA

SEQ ID NO: 21471 - protein, 585 aa, Listeria monocytogenes
MKKVEVIKASSSISKSKRGKMIECLRVAAYCRVSTDSEDQLNSYKSQKTYYTDLIQKNNEWIFVGIYADEAITGTQVTNRQDFQRMINDCMNGEIDMIVTKSISRFARNTLDTLKYVRMLKEKNIAVFFEDENINTLTMDGELLLVVLSSVAQQEVENISSNVKKGLKMKMKRGELVGFQGCLGYDYHPEDKSITVNKEEAEIVRYIFNRYIEGAGGSVIGKELENLGYLTKYGNATWAPTTVLGIIKNEKYKGDILLGKTFTVDPISKRRLENMGEEDQFYIRNHHEPIISEEVFDKAHEILNRRNKNRGKIGNGNTKREKYSRKYAFSCLLECGFCKGTLTRRKWHSGSEYSKVIWQCVTATKKGKKHCPESKGIPEQAIEDAFIESYRILSDDNKDVLDEFLKIMDETLSSSSINKQVTKVDKEIEAIEKKKSKLVDMRLEDIIDSDTYESKFSNMTNKQENLLKERIKLQETATTEKDVKRRLREFKKTLENNEVLHEFDRHVFESIVEKVIVGGYDEDGNIDPAQLVFVYKTGFKNSLDGNQFKPARKNARGNRKSNKLCSQTNDDVKDLCSYTSTNTRG

SEQ ID NO: 21472 - DNA, 50 bp, Listeria monocytogenes
  source 1..50: mol_type = genomic DNA
atgttcctatactagtaccaacacatgtggagactatagtgttgctacaa

SEQ ID NO: 21473 - DNA, 40 bp, Listeria monocytogenes
  source 1..40: mol_type = genomic DNA
atgttcccgcaaacagctcacgtggaaactgtagtactct

SEQ ID NO: 21474 - DNA, 40 bp, Listeria monocytogenes
  source 1..40: mol_type = genomic DNA
atgttcccgcaaacagctcaggtggaaactgtagtactct

SEQ ID NO: 21475 - DNA, 50 bp, Listeria monocytogenes
  source 1..50: mol_type = genomic DNA
ttgcctgaagagttgtaccaacacaggtggacactataatgttgatccaa

SEQ ID NO: 21476 - protein, 499 aa, Enterobacter hormaechei
MQKQNGLAFSYIRFSSKKQEQGDSVRRQTELAEKYAQDNNLILSEKNFQDLGISAFKEGNRASLADMLQAIEQGSISPGSTIIIESLDRLSRRGIDVTQQIIKQILQHQVYIASLVDGLLLNRESVNDLVSVIRIALAADLAHKESEKKSQRLRETKGQQRQRALNGEVINKSLPFWLERKDNAYVFSDRLDAVKRIIELKKKGLGNNKIAKTLNDEEFAPLRSAGWNHTTVAKTIKSVALYGAYQTSETTKERKTILLDIVDNYYPAVISKDEFMQLQSDSKTSKSGYKSDKNAFSGLLKHECGGALVRKFHTAHGKVYEYHVCANARDGKCSVTQNFKNIETAMFKILRELKMEKKTSLDATLLQERSDVQEKIQDLNNMLLSMKKVPASVLQTIGSLEDKLQALDQAITEQNNRVMNEQSVDLNLLQEVQDPVELNMMLKRVIREITVFNLKKSWRIKVSYINGHSQSFRWNGKEISFKSDTEKLLDFMNSEREEE

SEQ ID NO: 21477 - DNA, 50 bp, Enterobacter hormaechei
  source 1..50: mol_type = genomic DNA
attttgtcactttgaaactatatagtgatattgttgcaatatatcaaaac

SEQ ID NO: 21478 - DNA, 40 bp, Enterobacter hormaechei; identical to SEQ ID NO: 4963
  source 1..40: mol_type = genomic DNA

SEQ ID NO: 21479 - DNA, 40 bp, Enterobacter hormaechei
  source 1..40: mol_type = genomic DNA
cttactgccaaactgcatacagacgttgctggtaactaac

SEQ ID NO: 21480 - DNA, 50 bp, Enterobacter hormaechei
  source 1..50: mol_type = genomic DNA
actttatcaggatttaactgtatccagatattgtaggaaattaggagaac

SEQ ID NO: 21481 - protein, 461 aa, Staphylococcus hominis
MNVAIYCRVSTLEQKEHGYSIEEQERKLKSFCEINDWNVADIFVDAGFSGAKRDRPELQRLMNDIKRFDLVLVYKLDRLTRNVRDLLDLLEIFEQNNVAFRSATEVYDTSTAMGRLFVTLVGAMAEWERETIRERTQMGKLAALKKGIMLTTPPFYYDRVDNKFVPNKYKEVVLFAYEEALKGKSAKSIARKLNNSDIPPPNNRKWEDRSITRALRSPFTRGHFEWGGVYLENNHEPIITEEMYEKVKDRLEERTNTKKIKHVSIFRSKLVCPTCHNKLTMNTHKVTLKDRVYYNKHYYCNNCKETPNLKPVYIRSEEVERVFYEYLQHQDLTQYDIVEDKEEKEVTIDINKIMQQRKRYHKLYANGLMNEDELAELIEETDAAIEEYKKQSENKEVKQYSDEDITEYKSLLLEMWEISSDEEKAEFIQMAIKNIFIEYVLGKNDNKKKRRSLKIKDIEFY

SEQ ID NO: 21482 - DNA, 50 bp, Staphylococcus hominis
  source 1..50: mol_type = genomic DNA
ttatggaagtatgcacaattaacaaatgtataatgtgcatacttccatat

SEQ ID NO: 21483 - DNA, 40 bp, Staphylococcus hominis
  source 1..40: mol_type = genomic DNA
ctatggcggtacatgcataaaccatggctgtattccatct

SEQ ID NO: 21484 - DNA, 40 bp, Staphylococcus hominis
  source 1..40: mol_type = genomic DNA
ctatggcggtacatgcatactccatggctgtattccatct

SEQ ID NO: 21485 - DNA, 50 bp, Staphylococcus hominis
  source 1..50: mol_type = genomic DNA
ttatggattcttaatgaattaagacttttataatgtattaccttcttttt

SEQ ID NO: 21486 - protein, 590 aa, Vibrio parahaemolyticus
MAHEVQLRGKITVITAYSYLRLSTKEQIKGDGVRRQMEATEAVCKENGWQLSPTTFRDLGLSAFSAENLKKGDFGIILQLIKEGSISSGSVLILENVDRMSRQNPQESVYTMLDIIRAGVRIYTIHDRRLHEKDSQDSFMNLMLWALAAERAHEESLTKSRRVREAKAKARQKAREEGKAIIGRVPSWIRKVTPKGGEPYYELDEERAEVVRLIFQLKLDGHGLGAITNELVKRGIPPMGNRNVRKDLAPKWQVSTIRKWLLSPTVYGQYQPHIRVDGKKVPEGDPIDDFYPAAVDRETFLKVQTMLGKHSRGRTAEEGENMLRGLLRCACGGNLSLHITKRGDKRYKYLRCNHDFMESCQSKRFDYDGIESLIVRAVHSIDWADVLNVQSGKNKDTIKTLKERRDVLIADLEETNKRMLNLSNQLEVMDEPSTFLLNRLSELEKGAKQKQIDLDTVESELHSVERVEEEAGSKFRSSFEIVELIGFNTTQVEKEDMVKKRVKMNAVLRREIDHILVTKVDNQDWWLWSAVTTGGVPLFDLKINAKASKGIIDSEYSTMPELSYYKIDRRKYNRVNRKQVGLVDSVELKS

SEQ ID NO: 21487 - DNA, 50 bp, Vibrio parahaemolyticus
  source 1..50: mol_type = genomic DNA
tttttactaattgttgatttcttcaagaataaatccacatttagtaaaac

SEQ ID NO: 21488 - DNA, 40 bp, Vibrio parahaemolyticus; identical to SEQ ID NO: 6988
  source 1..40: mol_type = genomic DNA

SEQ ID NO: 21489 - DNA, 40 bp, Vibrio parahaemolyticus
  source 1..40: mol_type = genomic DNA
cgtggcggttgatttcttcttcatgggcgcaatggaaaac

SEQ ID NO: 21490 - DNA, 50 bp, Vibrio parahaemolyticus
  source 1..50: mol_type = genomic DNA
ttttttggaccacatgatgtcttcttgtataaatttgaatttattaaaag

SEQ ID NO: 21491 - protein, 463 aa, Staphylococcus aureus; identical to SEQ ID NO: 14001

SEQ ID NO: 21492 - DNA, 50 bp, Staphylococcus aureus
  source 1..50: mol_type = genomic DNA
tgagtgttatgtaactagaaagaacgcaatagttacaaaacattcattaa

SEQ ID NO: 21493 - DNA, 40 bp, Staphylococcus aureus
  source 1..40: mol_type = genomic DNA
tgaatggtaccacttctaccgcacacgttcccccaatata

SEQ ID NO: 21494 - DNA, 40 bp, Staphylococcus aureus
  source 1..40: mol_type = genomic DNA
tgaatggtaccacttctaccacacacgttcccccaatata

SEQ ID NO: 21495 - DNA, 50 bp, Staphylococcus aureus
  source 1..50: mol_type = genomic DNA
tgagtgttaactttttagatataacaccaaaggcactatccattaaataa

SEQ ID NO: 21496 - protein, 520 aa, Dorea longicatena
MSNQKMLIGYYRLSLEDGSDGESNSIINQRKLVKDYISHIPELAELPFQEFYDDGYSGSSMERPGIQQVLELARNEQVQCIVVKDFSRFSRDYIEMGTYLEQIFPFLGIRFISVSDHYDSKDYKGKSSDIEVQFKGLIADFYVKDQSVKVKSAVSAKRSNGEYCCGSAPYGYRINPENKKDLLIVEEEAAIIRRVFELTNQRYSKLDICRLFNEEGVLTPLQSMSRRQKSDSKKASSRGLQWTSDMVRKILNDKNYIGCMVYGKTKIPDPGTGKEVPVPRSEWKVLEDHHEPIVSKETFEKAQSLQIRHTRKSKFNKETTLLSSYVKCGNCRRNLTGSSRVHGHILYSCAYSQGKEDTGCFAGKADDKMLEHMVLTEIKAYLRQNISQEQMQQSMRKQHEDNIEAYKAESADCGRRQEQIKAQNQQNYEKYHEGQMSREEFLSEKKQLEEERERLQRRKKELEELINGEKEILTKKNIPVEQMMEYLGYEKLTEEMLEKYVKGIYVYDDGRVDVEWKALA

SEQ ID NO: 21497 - DNA, 50 bp, Dorea longicatena
  source 1..50: mol_type = genomic DNA
tgtagcaatgacttgacatcctcgggggagaacgttataataaggtcaca

SEQ ID NO: 21498 - DNA, 40 bp, Dorea longicatena
  source 1..40: mol_type = genomic DNA
gaatgaggaagtggggtatggggccttatgtacagcacaa

SEQ ID NO: 21499 - DNA, 40 bp, Dorea longicatena
  source 1..40: mol_type = genomic DNA
gaatgaggaagtggggtatatggccttatgtacagcacaa

SEQ ID NO: 21500 - DNA, 50 bp, Dorea longicatena
  source 1..50: mol_type = genomic DNA
tgtgtcatttaagggacatcatcaatggataactttatttaaaaatcaca

SEQ ID NO: 21501 - protein, 458 aa, Clostridioides difficile
MDKIKRVALYIRVSTEEQVLHGDSIRTQTEALEQYAKDNNFIIVDKYIDEGYSATNLKRPNLQRMIEDVKNNKIDLVMITKIDRLSRGVKNYYKIMEILEKHKCDWKTILENYDSSTAAGRLHINIMLSVAENEASQTSERIKFVFNNKIRRGEVISGSTPFGYKIVDKHLVIDGEKAEIVRECFTSYEKLTSMIKVLQHINNSFNANFSYNFIYKLLKNNIYIGTYIHNNLAVENFCDAIISSEQFNTVQKLLSKNTKVYNNKYLNSLGMQYIFSSMVICKCGRKMSGTYCLSSDKKIYKYYRCHVSQTTKKCNNTKRLSEKKLEDFLLKNVRRQLEEIAFGYESNNSKSKNNNNQLKNKIKKQINKLQDLYFDDLIDKEDYKLKYQKLNTQLIKLEKNNSEEKKSIINLKNIRSFLEINFEKIYSDLSDQEKRTLWTSIIDTIVIDENKNLTINFL

SEQ ID NO: 21502 - DNA, 50 bp, Clostridioides difficile
  source 1..50: mol_type = genomic DNA
ttttgtactaacacatcattacctgatggttctagtgtattagtacaaaa

SEQ ID NO: 21503 - DNA, 40 bp, Clostridioides difficile; identical to SEQ ID NO: 5543
  source 1..40: mol_type = genomic DNA

SEQ ID NO: 21504 - DNA, 40 bp, Clostridioides difficile
  source 1..40: mol_type = genomic DNA
tgtagattttcctgcaccttgtggtcctaaaaatcctagt

SEQ ID NO: 21505 - DNA, 50 bp, Clostridioides difficile
  source 1..50: mol_type = genomic DNA
atttgtaagattccatcattaccttgtttttcatgttactgagtaataaa

SEQ ID NO: 21506 - protein, 452 aa, Clostridioides difficile; identical to SEQ ID NO: 14286

SEQ ID NO: 21507 - DNA, 50 bp, Clostridioides difficile; identical to SEQ ID NO: 14287
  source 1..50: mol_type = genomic DNA

SEQ ID NO: 21508 - DNA, 40 bp, Clostridioides difficile
  source 1..40: mol_type = genomic DNA
tgtagttttaccacatccactaggtccgagtaaacataga

SEQ ID NO: 21509 - DNA, 40 bp, Clostridioides difficile
  source 1..40: mol_type = genomic DNA
tgtagttttaccacatccaaaaggtccgagtaaacataga

SEQ ID NO: 21510 - DNA, 50 bp, Clostridioides difficile
  source 1..50: mol_type = genomic DNA
ataagtgatatgatatagtcacccaatggatattatatagcagtcaaaat

SEQ ID NO: 21511 - protein, 501 aa, Mycobacteroides abscessus
MRQQLRAIVGSRVSHLSDQVETTSKVSHLAQRAEGERWAKSRGYEVVGAFEDLGVSAGRTTPFERPDLGKWLAPERLHEWDVLVFSKIDRAFRSTSDCVDFARWAKGNRKIIAFSGDGLVLDYLNPKSDSLDQMMSELFIYIGSFFAQLELNRFKTRATDRISHLRMTDRVSHGVPPLGFRTVPHPSGQGKALERDPEGYALLHEIKGKLLHENYSLTGLVQWLNETGRQTAVAKARKGDAKWSVTSLKRTLTSERTQGLRMSGGKPVLDSQGIPIRMAEPTFTDDEWEQIQQALNQRSTSGRARYMTDNPFAGIVYCVCGYAVAQHRRKSSSGKEHTYVRCGQGCRGAWKLADVHEQLDSSFLAAYGDQEMTRLVFVPGEDRSEELAGIERSITRLRWESDNDLVDDEDLYQSRMAALLSRKREIGQIVVPARWERRGTGKTYQELWADPETDRRQVMRDARIRLVLHFIPKGSDAPFVTHAHFEDMWNPAEEAKALSGN

SEQ ID NO: 21512 - DNA, 50 bp, Mycobacteroides abscessus
  source 1..50: mol_type = genomic DNA
gatctttgttgttgtatgtgcagccttcacgttgtactgtgacatacatg

SEQ ID NO: 21513 - DNA, 40 bp, Mycobacteroides abscessus
  source 1..40: mol_type = genomic DNA
tggcgacgtggccggtggccttcacgttgtactgcgccac

SEQ ID NO: 21514 - DNA, 40 bp, Mycobacteroides abscessus
  source 1..40: mol_type = genomic DNA
tggcgacgtggccggtggcactcacgttgtactgcgccac

SEQ ID NO: 21515 - DNA, 50 bp, Mycobacteroides abscessus
  source 1..50: mol_type = genomic DNA
gatatgtgtcttcttttgtgcagaacttattttgtatctataaatacatt

SEQ ID NO: 21516 - protein, 627 aa, Klebsiella michiganensis; identical to SEQ ID NO: 15426

SEQ ID NO: 21517 - DNA, 50 bp, Klebsiella michiganensis; identical to SEQ ID NO: 15427
  source 1..50: mol_type = genomic DNA

SEQ ID NO: 21518 - DNA, 40 bp, Klebsiella michiganensis
  source 1..40: mol_type = genomic DNA
tttttgcatgataatcatacaaataagtgccattgcagca

SEQ ID NO: 21519 - DNA, 40 bp, Klebsiella michiganensis
  source 1..40: mol_type = genomic DNA
tttttgcatgataatcataccaataagtgccattgcagca

SEQ ID NO: 21520 - DNA, 50 bp, Klebsiella michiganensis
  source 1..50: mol_type = genomic DNA
tttttgtactattcttgcacttttcctgtaaattgtgcttatttcaaatt

SEQ ID NO: 21521 - protein, 478 aa, Streptococcus parauberis
MNKVAIYVRVSTTNQADEGYSIDEQIDKLKAYCEIKDWVVYKVFTDAGFTGSNIERPAMTKLISAAKKKQFDTILVYKLDRLSRSQKDTLYLIEEIFIKNGIDFLSLSENFDTSSAFGKAMIGILSVFAQLEREQIKERMMLGKVGRAKSGKTMMWAHPAYGYTYNKETSSLDIVPAEAALIKKIYELYIKGKSISKLRDYLNDNKIFVNKSVPWSHRTISYALTNPVYCGMIRYEGKLYDGLHEPIITKELFNKTQEVLAERRMEASKKNPRPFQSKYMLSGIIRCGCCNAPMKSLLGMPRKDGTRTRRYQCINRFPRKTKPVTVYNDNKKCDSGYYYMEDVEHAVLHRISTLYSDEIEASEFFEDEITFDIQKVKDEITKIESKINKLNDLYINDFISLDSLKKQSANLINEKKIIENEIEKENSKQVNNLKEDALKILATNNIHDLDYEMQSYVVKSLIDKVFVTKEDMEILFKK

SEQ ID NO: 21522 - DNA, 50 bp, Streptococcus parauberis
  source 1..50: mol_type = genomic DNA
tagagtgtttaacttacacttatctcaataaatgtccataaaacacttaa

SEQ ID NO: 21523 - DNA, 40 bp, Streptococcus parauberis
  source 1..40: mol_type = genomic DNA
aagaataaccattagcatctctaaaagagtgaatgcttgt

SEQ ID NO: 21524 - DNA, 40 bp, Streptococcus parauberis
  source 1..40: mol_type = genomic DNA
aagaataaccattagcatccataaaagagtgaatgcttgt

SEQ ID NO: 21525 - DNA, 50 bp, Streptococcus parauberis
  source 1..50: mol_type = genomic DNA
aaaatagttccttctacacatatccaaccaaatgtctagctaacaataaa

SEQ ID NO: 21526 - protein, 638 aa, Enterobacter cloacae complex sp; identical to SEQ ID NO: 15551

SEQ ID NO: 21527 - DNA, 50 bp, Enterobacter cloacae complex sp; identical to SEQ ID NO: 15552
  source 1..50: mol_type = genomic DNA

SEQ ID NO: 21528 - DNA, 40 bp, Enterobacter cloacae complex sp
  source 1..40: mol_type = genomic DNA
gcagcgggtattggcaggcttgccgtccggcatgcctgga

SEQ ID NO: 21529 - DNA, 40 bp, Enterobacter cloacae complex sp
  source 1..40: mol_type = genomic DNA
gcagcgggtattggcaggccagccgtccggcatgcctgga

SEQ ID NO: 21530 - DNA, 50 bp, Enterobacter cloacae complex sp; identical to SEQ ID NO: 4740
  source 1..50: mol_type = genomic DNA

SEQ ID NO: 21531 - protein, 638 aa, Enterobacter asburiae; identical to SEQ ID NO: 9256

SEQ ID NO: 21532 - DNA, 50 bp, Enterobacter asburiae; identical to SEQ ID NO: 9257
  source 1..50: mol_type = genomic DNA

SEQ ID NO: 21533 - DNA, 40 bp, Enterobacter asburiae
  source 1..40: mol_type = genomic DNA
acagcgcgtattagcaggcttgccatccggcatcccagga

SEQ ID NO: 21534 - DNA, 40 bp, Enterobacter asburiae
  source 1..40: mol_type = genomic DNA
acagcgcgtattagcaggccagccatccggcatcccagga

SEQ ID NO: 21535 - DNA, 50 bp, Enterobacter asburiae; identical to SEQ ID NO: 4740
  source 1..50: mol_type = genomic DNA

SEQ ID NO: 21536 - protein, 638 aa, Escherichia coli; identical to SEQ ID NO: 9256

SEQ ID NO: 21537 - DNA, 50 bp, Escherichia coli; identical to SEQ ID NO: 9257
  source 1..50: mol_type = genomic DNA

SEQ ID NO: 21538 - DNA, 40 bp, Escherichia coli; identical to SEQ ID NO: 20453
  source 1..40: mol_type = genomic DNA

SEQ ID NO: 21539 - DNA, 40 bp, Escherichia coli
  source 1..40: mol_type = genomic DNA
gcagggcgtattggcgggccagccatctggcataccggga

SEQ ID NO: 21540 - DNA, 50 bp, Escherichia coli; identical to SEQ ID NO: 4740
  source 1..50: mol_type = genomic DNA

SEQ ID NO: 21541 - protein, 638 aa, Enterobacter ludwigii; identical to SEQ ID NO: 9256

SEQ ID NO: 21542 - DNA, 50 bp, Enterobacter ludwigii; identical to SEQ ID NO: 9257
  source 1..50: mol_type = genomic DNA

SEQ ID NO: 21543 - DNA, 40 bp, Enterobacter ludwigii
  source 1..40: mol_type = genomic DNA
acagcgggtattggcaggtttgccgtccggcatgccagga

SEQ ID NO: 21544 - DNA, 40 bp, Enterobacter ludwigii
  source 1..40: mol_type = genomic DNA
acagcgggtattggcaggtcagccgtccggcatgccagga

SEQ ID NO: 21545 - DNA, 50 bp, Enterobacter ludwigii; identical to SEQ ID NO: 4740
  source 1..50: mol_type = genomic DNA

SEQ ID NO: 21546 - protein, 638 aa, Enterobacter ludwigii; identical to SEQ ID NO: 9256

SEQ ID NO: 21547 - DNA, 50 bp, Enterobacter ludwigii; identical to SEQ ID NO: 9257
  source 1..50: mol_type = genomic DNA

SEQ ID NO: 21548 - DNA, 40 bp, Enterobacter ludwigii; identical to SEQ ID NO: 4753
  source 1..40: mol_type = genomic DNA

SEQ ID NO: 21549 - DNA, 40 bp, Enterobacter ludwigii; identical to SEQ ID NO: 4754
  source 1..40: mol_type = genomic DNA

SEQ ID NO: 21550 - DNA, 50 bp, Enterobacter ludwigii; identical to SEQ ID NO: 4740
  source 1..50: mol_type = genomic DNA

SEQ ID NO: 21551 - protein, 638 aa, Klebsiella oxytoca; identical to SEQ ID NO: 9256

SEQ ID NO: 21552 - DNA, 50 bp, Klebsiella oxytoca; identical to SEQ ID NO: 9257
  source 1..50: mol_type = genomic DNA

SEQ ID NO: 21553 - DNA, 40 bp, Klebsiella oxytoca; identical to SEQ ID NO: 20468
  source 1..40: mol_type = genomic DNA

SEQ ID NO: 21554 - DNA, 40 bp, Klebsiella oxytoca
  source 1..40: mol_type = genomic DNA
gcagcgggtgtttgccggccagccttgcggcatgcccggg

SEQ ID NO: 21555 - DNA, 50 bp, Klebsiella oxytoca; identical to SEQ ID NO: 4740
  source 1..50: mol_type = genomic DNA

SEQ ID NO: 21556 - protein, 538 aa, Streptomyces ipomoeae
MAKQTGARAAGQRQYDVETEWTEADLALLEELKHAEALLPDDAPRALLSVRLSVLTDDTTSPVRQELDLRMLARERGSRVVGVASDLNVSATKVPPWKRKALGEWLNNRAPEFDEILFWKLDRFVRRLSDLSVMIDWCLKYGKNLVSKYDSIDLTTTAGKIMVTVIGGIAEIEATNTSTRVTSLWDYTKTQSAWLVGKPAYGYTTSKNKDDKTVLVIDRDAYRALHWCRKATMRERPASARRMVKVLVRAGLCGPGLTASTLLRRLRNAALLGYRVEENKSGGVRRSKVILGNDGKPIRVADPVFTEAEFESLQKALDRRGKNQPTRNPDGATKFLGVLLCEDCGTNMTVQKTSNKGRSYEYLRCGKCRSGGQGAPNPEEIYGQLVDDVLRVLGDEPVMVREYHQGAEARRELKQLEESISYYMAGLEPGGRFTKTRFTKERAEKTLDDLIKKLEAIDPESTTDRWVAVHNGKSFRAHWEEGGMEAMAADLLRVGVKCRIKRTKVKGVRAPRIHMKLMIPKDVRDRLVLKEDDFAEAF

SEQ ID NO: 21557 - DNA, 50 bp, Streptomyces ipomoeae
  source 1..50: mol_type = genomic DNA
cgtttgtggccatgtgtcgaactgcggccataaaccaacgcctccaaatc

SEQ ID NO: 21558 - DNA, 40 bp, Streptomyces ipomoeae
  source 1..40: mol_type = genomic DNA
ggatgtgcgtgtccatctgggggcacaccccgcagtcgaa

SEQ ID NO: 21559 - DNA, 40 bp, Streptomyces ipomoeae
  source 1..40: mol_type = genomic DNA
ggatgtgcgtgtccatctgtgggcacaccccgcagtcgaa

SEQ ID NO: 21560 - DNA, 50 bp, Streptomyces ipomoeae
  source 1..50: mol_type = genomic DNA
ggtttctgggaagctgtccccctgtggcctgacaccaatccctccaaacc

SEQ ID NO: 21561 - protein, 530 aa, Faecalibacterium prausnitzii
MEQYLIYLRKSRSDLEAEAHGEGETLSRHEHTLLELAKRQHLNVTDIYREVVSGDTIAARPMMQRVLSEVEQGVWSGVLVMEVERLARGDTIDQGIIAQTFKFSGTKIITPIKTYDPDNEFDEEYFEFGLFMSRREYKIINRRLQRGRLASAKEGKWPSGLAPFGYRRVKLKNEKGCSLEPIEEQAAIVRMIFDLYTVGLQDEDGSARPLSLGSIATRLNDMRIPSPSGSQWARITIRGIIKNPTYIGMVRWGSRETKKKVVDGKVVSVRGPADPEKECVFKGIHPPLIPKETFELANDKLTRSENTSTHKEKVVRNPLAGLLVCSECGRQMMRMINPVNPDMPVVRCPRRGCPNCSSYLPIVEERVIQGLSEWMKGYELEWSSAAASSSVSSVGVREKALASAEAELRKLQQQLERTHDFLEQGIYDTDTFLSRSRMLSDKIAAAKDSVTRCSRELTEEKLRETSRRDIIPKVKNLLDVYPLLETAEEKNALLKEVLEKVVYQKLNEKRKKSPDGFIIEIYPRIPKSEK

SEQ ID NO: 21562 - DNA, 50 bp, Faecalibacterium prausnitzii
  source 1..50: mol_type = genomic DNA
tatagttatcctgtttagccatactcattagaataaacaggataactata

SEQ ID NO: 21563 - DNA, 40 bp, Faecalibacterium prausnitzii
  source 1..40: mol_type = genomic DNA
gtaattgttgtggtcaaattcatagggactgcccacgatg

SEQ ID NO: 21564 - DNA, 40 bp, Faecalibacterium prausnitzii
  source 1..40: mol_type = genomic DNA
gtaattgttgtggtcaaatttatagggactgcccacgatg

SEQ ID NO: 21565 - DNA, 50 bp, Faecalibacterium prausnitzii
  source 1..50: mol_type = genomic DNA
tatccttattattattataaatccttattagaatttatattataaatata

SEQ ID NO: 21566 - protein, 516 aa, Burkholderia cepacia
MELDASLSLRDEGLSAYHQRHVRQGALGVFLRAVEDGQVPAGSVLIVEGLDRLSRAEPLQAQAQLAQIVNAGITVVTASDGREYNRERLKAQPMDLVYSLLVMIRAHEESDTKSKRVKAAIRRQCQGWIAGTWRAPIRVGKDPHWVRETEAGGFELADDRAAAVRLVIEMFKQGHGAVRIVRELADRGLKITDSGRSASSHIYRLLANRMLIGEKSVEVDGETFRLEGYYPALLTATEFADLRYLAEQRGRRKGKGEIPGVVTGLGITYCGYCGAAIVAQNIMGRRRAADGRPYPGHRRLHCVTYSQSAGCKVSGSCSVVPVERALMLYCSDQINLTRLLEGDSGTVSLVAQLASARQRVAELEAQVQRVTDALLLDNGEAPAAVLRRVRELESQLLSERRDVDSFEHQLAASAANVAPAAADAWRELVNGVEQLDYDARMLARALVADTFSKIVVFQSGFRPDDDDGTIGLLLIAKRGTIRMLHVDRKTGEWRAAQEHDLAEDTLPFGLGNTEPA

SEQ ID NO: 21567 - DNA, 50 bp, Burkholderia cepacia
  source 1..50: mol_type = genomic DNA
gtgacccatgggcaaccaagcgaaaccatacctatacgcggtgccggagc

SEQ ID NO: 21568 - DNA, 40 bp, Burkholderia cepacia
  source 1..40: mol_type = genomic DNA
tttcgggcacccgagggatacgaaccctactttgggggat

SEQ ID NO: 21569 - DNA, 40 bp, Burkholderia cepacia
  source 1..40: mol_type = genomic DNA
tttcgggcacccgagggatgagaaccctactttgggggat

SEQ ID NO: 21570 - DNA, 50 bp, Burkholderia cepacia
  source 1..50: mol_type = genomic DNA
gtgaaccatccatcaccaagccaagacttgcctagtccccattcctgaga

SEQ ID NO: 21571 - protein, 516 aa, Parageobacillus toebii
MYRPTNLDVFIYLRKSRKDIEEEKKAAEIGASYDTLQRHRDTLLAVARKENHNIIDIFEEVVSGESIAERPQIQKLLREVETGIADAVLVMDIDRLGRGDMLDQGILDRAFRYSGTKIITPTEVYDPESETWELVFGIKSLIAREELKTITKRMQRGRRTSAAEGKSISKKPPYGYLRDENLKLYPDPETSWVVVKIFEMMRDGYGRKAIATELDRLGVKPPDEKREFWAPTTITSIIKNEVYMGHIVWGKFRYVKQNGKYVRKKMSPERWYVKENAHEPLVSKELWEAANKAHASRRPSTVENKSLANPLAGILKCGICGFTMWYQPRPDRPNDYIRCVTPTCRGLQKGAILQLVEERILQSLAEFVDQFEVQENKMDKNEDKSVIPLKQKALEKKEKELQELNKQKNNLHDFLERGIYTVEVFLERQQNIVQRIKQTQEEIEQLKQEIDKEQLKEKNINEYIPTVKKVLEAYRSTDDIEKKNRLLKSVLEKATYLRKPEWTKKDQFIIELYPRI

SEQ ID NO: 21572 - DNA, 50 bp, Parageobacillus toebii
  source 1..50: mol_type = genomic DNA
agtgtagagggtgaatggttgtactgatacaaatatacaccctatacaca

SEQ ID NO: 21573 - DNA, 40 bp, Parageobacillus toebii
  source 1..40: mol_type = genomic DNA
cgtcgagtggcggttatactgatttacttctccatatcca

SEQ ID NO: 21574 - DNA, 40 bp, Parageobacillus toebii
  source 1..40: mol_type = genomic DNA
cgtcgagtggcggttatacatatttacttctccatatcca

SEQ ID NO: 21575 - DNA, 50 bp, Parageobacillus toebii
  source 1..50: mol_type = genomic DNA
atttcagaaaaaaagtgtgtgtacatatataaatattacatatatacaca

SEQ ID NO: 21576 - protein, 674 aa, Photobacterium gaetbulicola
MLTTPKIYNYARVSTTKQIHGAGLETQQQKSVLENLSQEHSLPIHDENFVDQGLSAYHGKHKEGALGVVLSRIDSGEIPEGSILVVFSLDRLSRETVNIAMEQLLRIINRGVRVYTHIDGKLFDAKSQHLAADLIISLITMQRANEESETKSKRTISASKVALKRWKETSESQRNLGRTPLWIDQSTNTFNINAEGVKKAVEMKIAGYGDLKIKQYLDANFEYKPTRKKGRVKQANTWDYTAIYQLWDRRSLFGEKTFTIEGVEYVMENYYPALIDEDTFLKLQASKKKRQGRETSSGKIPLLKSLCRCGICGGSMVFVDKGGSRVNYVCNLAMKGEHDREVYNVNMLDILTLEICKDAYLTESDNANNTFVENEKIKTEAELVEERKVLDELVARFKLKRSNAILDLIGDSENKIDELEAKLDALNNADVILSADELASLPDIFTDDVRKDYLHPERLAIRNNLYRFISSITLNRMFEPCSDAKTKFANCVDITWHFKNGQKRRLAMLPYEYTKTEGGGKGLYLPFVYMYCSKNLLKVEDGDQLLSDILTKLHKLDLTKCLYPSKGQYQWNRRTLECGKTYWVPLDEGVFLEPEALQFDFGGIHTEKSIPVNYISLMFNHLSEKVEYAHYYPLSKFSDLARGFNFVESYDFYDTLRDNTFDQELYLSRDLLMS

SEQ ID NO: 21577 - DNA, 50 bp, Photobacterium gaetbulicola
  source 1..50: mol_type = genomic DNA
agaagaaagttattttcttttggtttgctaataaaaaacagtttccctca

SEQ ID NO: 21578 - DNA, 40 bp, Photobacterium gaetbulicola
  source 1..40: mol_type = genomic DNA
gaagaatacctgttgtggtttcagaaaaaaggctttcccg

SEQ ID NO: 21579 - DNA, 40 bp, Photobacterium gaetbulicola
  source 1..40: mol_type = genomic DNA
gaagaatacctgttgtggtgtcagaaaaaaggctttcccg

SEQ ID NO: 21580 - DNA, 50 bp, Photobacterium gaetbulicola
  source 1..50: mol_type = genomic DNA
cgaagacatagatctgctcttggtgtactgataaaatcaagtttctctcg

SEQ ID NO: 21581 - protein, 512 aa, Pseudomonas putida
MVARWLVTHPEYKLSEASFEDKGKSGWSGAHLDNAFGRLLAAVEDGTIPKGSAVLIEQIDRAGRMEPMEMLPLLSRIVNAGVDLVTLDDGITYDRASVNSNHLFLLVAKVQQAHQYSDSLSRRLKAAYKTKREKAAAGEGATRRMPLWIRDGKLRDDIAPYVTQVFEDFAAGIGERRILGRLKGQHPDFETISPSTFRRWLRNPVAVGRWNDIEDVWPAVVSKELWFRVQKRLNDTHTPRPAASKYLLSGLVKCARCGKNYCVGGQKGALSMLCVSRHRFGAGVGGCTNKRSIPYAVLDFIRSQTAHAALVRASQSQNLTANEKRQIEIEGELAELRKQSENAAEGLVRWGMVKSITDALDRVTAQIAQLEAERALLETAPATLTIDDMVSIEDDMIDESDTVKLNALLQGVGYVMLVDDRTITVNEASVFSNFVVHTYEFLGTDRVLGTYRLSLNAKRIEDLPNLDSAIQQAAIAAARAEFEKTPITQELYWNGNGDVMAALGLGLDLVKE

SEQ ID NO: 21582 - DNA, 50 bp, Pseudomonas putida
  source 1..50: mol_type = genomic DNA
aatcacaaagctggaaatatcactgctatcagtggcacaatgttgggaat

SEQ ID NO: 21583 - DNA, 40 bp, Pseudomonas putida
  source 1..40: mol_type = genomic DNA
aatccgcaccccgatgaatgccgtcatcggcatgctggaa

SEQ ID NO: 21584 - DNA, 40 bp, Pseudomonas putida
  source 1..40: mol_type = genomic DNA
aatccgcaccccgatgaattacgtcatcggcatgctggaa

SEQ ID NO: 21585 - DNA, 50 bp, Pseudomonas putida
  source 1..50: mol_type = genomic DNA
aataacaaagaaaaaaatgtcatttaaatcagaagctggttgttctgaaa

SEQ ID NO: 21586 - protein, 603 aa, Citrobacter koseri
MKKVFVYHRVSSDQQLDGSGIARQAELLEGYLDRTGICSEMDDPIPVVLSDQGVSAFKGLNISEGELGAWMEEVRNGMWDSSILVVESIDRFSRQNPFDVMGYINALMAHNVAIHDVMANIVISRSNSKDLPFVMMNAQRAYDESKYKSDRIRKGWAKKREQAFNKGSIVTNKRPQWIDVEDDKYVLNHKAAVIKEIFELYKTGLGCPTIAKELQKKEGERYKFNRAWTGELVHKILTNRRVTGKIFISETIRNHDDLDNPVTQKKYQMDVYPVVVNEDEFELVQQLLKSRRPNSGRVTVKKTENEEVLIKSNLFSGIARCTECGGSMYHNVVRAKRTPKKGEPKVDEYRYIRCLNERDGLCENKAMTYETVERFVVEHIIGMNLSTVMKEQEFNPEVEVLRVQIDQVKDQITNYENGIERRKSSGKAVSFEMREELDDAKLELEELLARQASLATVHVDVPVLQDVNVTELYDVYNVDMRTRYENELNKIVSNVRLKRNGNYYSIDITYKQNELKRHVLFVEHKKKEQTLISEVIIEDVDSSTFYSTPSFMIRATKGEIRFQQTNEDLSIIDYSLMMNYVDTLEGADTVAVWMRHNMNFLFT

SEQ ID NO: 21587 - DNA, 50 bp, Citrobacter koseri
  source 1..50: mol_type = genomic DNA
ttgttgtaatagacactacatattcaaatgtgttatgtttatacaaacaa

SEQ ID NO: 21588 - DNA, 40 bp, Citrobacter koseri
  source 1..40: mol_type = genomic DNA
tttttgcttgataatcatacaagtaagtaccgttacagca

SEQ ID NO: 21589 - DNA, 40 bp, Citrobacter koseri
  source 1..40: mol_type = genomic DNA
tttttgcttgataatcataggagtaagtaccgttacagca

SEQ ID NO: 21590 - DNA, 50 bp, Citrobacter koseri; identical to SEQ ID NO: 4800
  source 1..50: mol_type = genomic DNA

SEQ ID NO: 21591 - protein, 643 aa, Vibrio parahaemolyticus
MLYAYCRVSSGKQLEGLSMSLQGDEALLSRIAKEYHTTVSDRIYIDEGVSSYKGKNLESGQLGEIVRDIEKGRIKKGDIIVMRALDRLSRQELTDSENLYNRIVGAGVNIYTTIDNHLYKPNCVHSAILKTLALNTAHEESAKKAYLTNRYALHRIEEFQRGEKPENGTAWDIGVGKHPFWIQLDNKVVQPHRLYFQAAKDIVKLIIDGKGNREIMRYLEENHPRYDKDGERIEWSYSLVASFHRKEALTGLRSVKLEDIEYKLEDYYPRVCTDLEFHQMSLRKEEKYVSNGNRARPTLLGGVRRLYCSCGRAMGGITPKDSPAFYRCLHILNPCISYISLRVVDRIVLDAIQTHVFESEKFDDTLLNELLSKADLMRIKYSKQESMLMSDPDLFTPEFKQQLRKSKLEIEQVEQEIMAERKKHAVIEDVDLKSYAEWQAAISEFQEQRDDEEIIKLRDKVQKLVRRIDIDGQLITITMVDGKKIYRHIVKDNTHDTVYCKVHVVDSETLEMVTLTNPALADVYCLESELERFKSACNINQTFITRIAIREKTDHLGIVQQAVSDYLDEHDVLRWRRSDVMKLGVTTTQWQMFKEPEHMSGTGVVIEELKYKDKNYAKKSAVVAYKRYNEQAILNLLNARSLI

SEQ ID NO: 21592 - DNA, 50 bp, Vibrio parahaemolyticus
  source 1..50: mol_type = genomic DNA
aatatctcactagttttgacttttgcatcacttaaagtaaaatagtgtga

SEQ ID NO: 21593 - DNA, 40 bp, Vibrio parahaemolyticus
  source 1..40: mol_type = genomic DNA
cgcctctacgctttctttagcgtcgccaaacagcatcgaa

SEQ ID NO: 21594 - DNA, 40 bp, Vibrio parahaemolyticus
  source 1..40: mol_type = genomic DNA
cgcctctacgctttctttagagtcgccaaacagcatcgaa

SEQ ID NO: 21595 - DNA, 50 bp, Vibrio parahaemolyticus
  source 1..50: mol_type = genomic DNA
aatatctcaatatttttcattttagaatcctttaaaaatggaattagtga

SEQ ID NO: 21596 - protein, 491 aa, Bacillus toyonensis
MGLAAIYLRLSRNEEQLNIDEILLNHRNALTKLAKQQKLTYDIYQEISSGVNTERPQLNLLLSRLDDYDVLLVMDIDRISRDNAHAEEIKKMLIIHDIKILTPQGAIDLSQESNEMLFSFQAMMANFEYKQIRKRLGRGRLAAAEQGKWTMSNRVPLGYKKNEEKRLEVVEDEAKIIRYIFQKTLERVSANEIAKQLDILGWRSRQGKVLTSAHISNMRRNVVYYGVVKAGRKVNGRVVDEVFVEDAHEPIVSKQMFLEVQKILEENTTGNFFNKLKATRKLQNLIYCNCCKRKRYIQCDGNGIDYIKSCIYKVDNNKCRDRGYKYEPIEQFVLQKVKEKKPAFEQELQMLKSLDTTELEKKLLIQRDSLEKQINRFNKRQRNLKEMRMDGEISKAEFYEMRDENEEQIKQVKQQMELIDIKLENLSNTDEEQARLQDAIKTLDKLEELKAESCNTFLKKFIKKIWFSSNTEANYDTTRPKEDATIKIEWL

SEQ ID NO: 21597 - DNA, 50 bp, Bacillus toyonensis
  source 1..50: mol_type = genomic DNA
gccaataaaaatagaaagattacaaatgttaaatttctatttttactcgg

SEQ ID NO: 21598 - DNA, 40 bp, Bacillus toyonensis; identical to SEQ ID NO: 8758
  source 1..40: mol_type = genomic DNA

SEQ ID NO: 21599 - DNA, 40 bp, Bacillus toyonensis
  source 1..40: mol_type = genomic DNA
aaccgttggtaaaatcacaattatgaaagttttagatggg

SEQ ID NO: 21600 - DNA, 50 bp, Bacillus toyonensis
  source 1..50: mol_type = genomic DNA
gacaaaaaatgtgctaaggttataattgttaaattttaaaattaattttg

SEQ ID NO: 21601 - protein, 491 aa, Bacillus wiedmannii; identical to SEQ ID NO: 21596

SEQ ID NO: 21602 - DNA, 50 bp, Bacillus wiedmannii; identical to SEQ ID NO: 21597
  source 1..50: mol_type = genomic DNA

SEQ ID NO: 21603 - DNA, 40 bp, Bacillus wiedmannii; identical to SEQ ID NO: 4258
  source 1..40: mol_type = genomic DNA

SEQ ID NO: 21604 - DNA, 40 bp, Bacillus wiedmannii
  source 1..40: mol_type = genomic DNA
aaccgttggtaaaatcacaattatgaaggttttagatgga

SEQ ID NO: 21605 - DNA, 50 bp, Bacillus wiedmannii; identical to SEQ ID NO: 21600
  source 1..50: mol_type = genomic DNA

SEQ ID NO: 21606 - protein, 512 aa, Staphylococcus capitis
MRTNEHNFHNIEEEIKHVAVYLRLSRGEDESELDNHKTRLLNRCELNNWSYELYKEIGSGSTIDDRPVMQKLLTDVEKNLYDAVLVVDLDRLSRGNGTDNDRILYSMKVSETLIVVESPYQVLDANNESDEEIILFKGFFARFEFKQINKRMREGKKLAQSRGQWVNSVTPYGYIVNKTTKKLTPSEEEAKVVIMIKDFFFEGKSTSDIAWELNKRKIKPRRATEWRSSSIANILQNEVYVGNIVYNKSVGNKKPSKSKTRVTTPYRRLPEEEWRRVYNAHQPLYSKEEFDRIKQYFECNVKSHKGSEVRTYALTGLCKTPDGKTMRVTQGKKGTDDDLYLFPKKNKHGDSSIYKGISYNVVYETLKEVILQVKDYLDSVLDQNENKDLVEELKEELMKKEDELETIQKAKNRIVQGFLIGLYDEQDSIELKVEKEKEIDEKEKEIEAIKMKIDNAKTVNNSIKKTKIERLLSDVQSAESEKEINRFYKTLIKEIIVDRTDENEAKIKVNFL

SEQ ID NO: 21607 - DNA, 50 bp, Staphylococcus capitis
  source 1..50: mol_type = genomic DNA
aatactttatttagtctatctctaggtggaactgtacttaattaagtcga

SEQ ID NO: 21608 - DNA, 40 bp, Staphylococcus capitis
  source 1..40: mol_type = genomic DNA
ggctgtgccacaggtacgtggtatcgtgctggcgaaggtt

SEQ ID NO: 21609 - DNA, 40 bp, Staphylococcus capitis
  source 1..40: mol_type = genomic DNA
ggctgtgccacaggtacgttttatcgtgctggcgaaggtt

SEQ ID NO: 21610 - DNA, 50 bp, Staphylococcus capitis
  source 1..50: mol_type = genomic DNA
aatatttcatgacttctatagctattgtaaactatattcttttaaatcga

SEQ ID NO: 21611 - protein, 495 aa, Enterobacter cloacae
MKQNGKAYSYIRFSSKKQEQGDSVRRQTELAEQYAHVHGLILSDKNFQDLGISAFKEGNRPSLGDMLEAIEKGQIEPGSTIIIESLDRLSRRGIDVTQQIIKSILQHNVFIASLVDGLLLNRESVNDLVSVIRIALAADLAHKESEKKSQRLRETKSQQRQRALSGEVINKILPFWLKRKDDKFVFSDKVDTVRRIIQLRREGFGTNKIAKVLNDEGHKPLRSAGWNHTTVRKTINSVALYGAYQTSETTKDRKVILLDIIDDYYPAVISKEEFMLLQSDQKQNKPGYKSEHNAFAGILKHECGGSLVRKFHVASGKTYQYHVCANARDGKCNITKNFKNIEIALFRIMKKLKLEKKTSFDGALLLEQETIKKKIQELNDMLLTASKIPASVIQTINNLEDKLQEVEEKIKQQNSMIISERAFDLKLLQDIKEPQELNMMLKRIIESIIVYNIGKKWRIKVQYRNEHVQSFLWDGENITFITDTKEILDLVNSWG

SEQ ID NO: 21612 - DNA, 50 bp, Enterobacter cloacae
  source 1..50: mol_type = genomic DNA
aatttccctctttgaaactacatagtaatattgttgcaaagaagcaaaat

SEQ ID NO: 21613 - DNA, 40 bp, Enterobacter cloacae; identical to SEQ ID NO: 4963
  source 1..40: mol_type = genomic DNA

SEQ ID NO: 21614 - DNA, 40 bp, Enterobacter cloacae
  source 1..40: mol_type = genomic DNA
cttactgccaaactgcatatcgacgttgctggtaactaac

SEQ ID NO: 21615 - DNA, 50 bp, Enterobacter cloacae
  source 1..50: mol_type = genomic DNA
aattttcttccctggaattccagatcaataatgtttttagaaagctaaat

SEQ ID NO: 21616 - protein, 623 aa, Bacteroides uniformis; identical to SEQ ID NO: 11671

SEQ ID NO: 21617 - DNA, 50 bp, Bacteroides uniformis; identical to SEQ ID NO: 11697
  source 1..50: mol_type = genomic DNA

SEQ ID NO: 21618 - DNA, 40 bp, Bacteroides uniformis; identical to SEQ ID NO: 9068
  source 1..40: mol_type = genomic DNA

SEQ ID NO: 21619 - DNA, 40 bp, Bacteroides uniformis
  source 1..40: mol_type = genomic DNA
gcggctgtactctggcagtagatcaagatataaaatgccg

SEQ ID NO: 21620 - DNA, 50 bp, Bacteroides uniformis
  source 1..50: mol_type = genomic DNA
taaagaaatagcaattggaatggcagcatatttcaaaacaaatgccatag

SEQ ID NO: 21621 - protein, 484 aa, Tsukamurella pulmonis
MAGARTTSARGVRSAAVYARISSDPTGQSLGVQRQLEDCRSLAESRGWDVGEEYVDNDASAYSGRSRLAYQRMLDDLRSGARDAVVVYNLDRLHRQPSELETFVEVCETAGVRDVATVTADIDLGNDDGLFMARIFAAFAAKESGRKSARIRRKALANAQAGLPHGPVRPFGYEDDKITIRESEAAVIRQVVERFLAGESMRSLSAWLTETKVPTARGAEWRPSSLGAVIRSARIAGLREHKGEIIGPAVWDGIITVEQRNQVLARFAARQASGRRAPRRYLLSGLLRCGRCGTPLYTSTQHVKSTSTGAQVRRSRRYSCMSGPDHNGCGKLTIVAEPVEQIITAAVLARLDSPQLADALAGRVAADEQLALLQEQVDADQSKLDELAGLYAEGAITAREWMAARVPVETRIKTVSRQISDQTTAPVLDGLICNGHQLAESWETLNLDRQHAIIHAVLDFATILPGKRGAQAVALERVQPQWIL

SEQ ID NO: 21622 - DNA, 50 bp, Tsukamurella pulmonis
  source 1..50: mol_type = genomic DNA
ggtgttattaagcacttgtagacaacgtgtgaaattgctatactaccttc

SEQ ID NO: 21623 - DNA, 40 bp, Tsukamurella pulmonis
  source 1..40: mol_type = genomic DNA
ggcgtcaacagccacggcaacgtgaccaccatggcctacg

SEQ ID NO: 21624 - DNA, 40 bp, Tsukamurella pulmonis
  source 1..40: mol_type = genomic DNA
ggcgtcaacagccacggcaaggtgaccaccatggcctacg

SEQ ID NO: 21625 - DNA, 50 bp, Tsukamurella pulmonis
  source 1..50: mol_type = genomic DNA
ggtgccattgaaggctggtaaaaaaggggtgaagtgctgtcacttccttc

SEQ ID NO: 21626 - protein, 551 aa, Vibrio campbellii
MNNRYSGGGKEMIADILQRVSTKKQSTDEKTGLKRQDENINNWLNQNPECTVRNEIVLKGQSAFSGKHVSNTLRLITAKHGESIDINPKTIKDFDQHLVDIYYGRIQAPNFLIVDEFSRLSRLKPSESNDLLRWIARMGISIVIAQENKVYAPEAHDQFEDVMILHLRIKVAHDESQRKSIMIREAKKSRRDKAMKEGGILKFGNMPKWLEVQNDQYALVPHRAEAIRFMFDCVVSGMSKGATARELNKKGFKGWDRNGNDTENKWDATKVARIIDSKSVTGTHVSRTWKSDTERSSSYMGKAQSMEQGLEIPNAYPRIISDEVFHNAQLKRGSAITKQKKNCKTHNDGTCIIRNAVCSLCGSSMLYKHASRGEQYSEFLCSKRKYGGSCSNSSINYQKAEKAVLTLLFEHVNLSILFEKDDSSDLLKAQLAALQDEIDALQARIKEKKGKVSSSVVLLLDDKETELEDLKQQLQAKQGEDFSDVIRTWEEIEKGEPQQRVKCSTLIEVVTSKIEIESIARGKKVVRVFGEFGCIFAIMEGKEINYFKGNW

SEQ ID NO: 21627 - DNA, 50 bp, Vibrio campbellii
  source 1..50: mol_type = genomic DNA
ttcccccattcagtcgctatgctttaatgtaagtctcaaaaaggcggttt

SEQ ID NO: 21628 - DNA, 40 bp, Vibrio campbellii
  source 1..40: mol_type = genomic DNA
ttgcgtccgcgctgcatcttcgcattacataggcggtagg

SEQ ID NO: 21629 - DNA, 40 bp, Vibrio campbellii
  source 1..40: mol_type = genomic DNA
ttgcgtccgcgctgcatctttgcattacataggcggtagg

SEQ ID NO: 21630 - DNA, 50 bp, Vibrio campbellii
  source 1..50: mol_type = genomic DNA
ttcccccattgctttgctctgcatttctttaagtatgagtgaggctgaat

SEQ ID NO: 21631 - protein, 583 aa, Oscillospiraceae bacterium
MSKTKKRIIDIVNEQKVAIYIRVSTKWQIDRDSLPLQRDELPKYAELVLGIRNYEVFEDAGYSAKNTDRPAYQRMMARVRSGEFSHILVWKIDRISRNLLDFASMYQELKDYGVTFVSKNEQFDTSTAIGEAMLKIILVFAELERNMTSERVTAVMLSRAEQGQWNGGKVPFGYDYDKEAGEFSINEAEAAVVRMIYDMYRSYRSTLKVVRELNEKGMFQRSGNPWNPTTVSHILKSPFYCGKMRYNYRNEKKGLKNWSVRDESEWIVFDDHHPAIVSEEDWHGACKQLEANQRNGPGKNRAYTRKNTHIFAGLLTCGCCGRNMSATLDKARADGWRPSIYNCESHRRFNTCNNKYVSDVTLGPFVLNYISNLMKARKSFGKTTSIKTFEKKLLRGDVFADVEAIERPGLEEMYQLVKNGKSGVILTSMTDGEESRDSSIEERALMLSERRRTERAMKRLMAAYLYDEDGMPEKDFILERKRLNDAMADMDERIAALDSRIANSFDLSDEDFMAKASLFIISQQLAERRFINYEAYIKASDPKIVRDFVTSVIQNFCILDGKIRSITFKNGIEHRFIYKQPEA

SEQ ID NO: 21632 - DNA, 50 bp, Oscillospiraceae bacterium
  source 1..50: mol_type = genomic DNA
atcctttatccaataaacatggcatcccccaatatcacgggataaaggat

SEQ ID NO: 21633 - DNA, 40 bp, Oscillospiraceae bacterium
  source 1..40: mol_type = genomic DNA
tcacgagataaacatggcgtcgccgaaggagaaaaagcgg

SEQ ID NO: 21634 - DNA, 40 bp, Oscillospiraceae bacterium
  source 1..40: mol_type = genomic DNA
tcacgagataaacatggcggtgccgaaggagaaaaagcgg

SEQ ID NO: 21635 - DNA, 50 bp, Oscillospiraceae bacterium
  source 1..50: mol_type = genomic DNA
ttccttgatatctgaaacatggtagtccatgttctcctggcataaagcat

SEQ ID NO: 21636 - protein, 484 aa, Bacillus anthracis
MKILKYAVYVRVSTDRDEQVSSVENQIDICRYWLEKNGYEWDPNAVYFDDGISGTAWLERHAMQLILEKARRNELDTVVFKSIHRLARDLRDALEIKEILIGHGIRLVTIEENYDSLYEGGNDIKFEMFAMFAAQLPKTISVSVSAAMQAKARRGEFIGKPGLGYDVIDKKLVINEKEAEIVREIFDLSYKGYGFKKIANILNDKGTYTKFGQLWSHTTVGKILKNQTYKGNLVLNSYKTVKVDGKKKRVYTPKERLTIIEDHYPTIVSKELWNAVNSDRASKKKTKQDTRNEFRGMMFCKHCGEPITAKYSGRYAKGSKKEWVYMKCSNYIRFNRCVNFDPAHYDDIREAIIYGLKQQEKELEIHFNPKMHQKRNDKSTEIKKQIKLLKVKKEKLIDLYVEGLIDKEMFSKRDLNFENEIKEQELALLKLTDQNKRNKEEKKIKEAFSMLDEEKDMHEVFKTLIKKITLSKDKYIDIEYTFSL

SEQ ID NO: 21637 - DNA, 50 bp, Bacillus anthracis
  source 1..50: mol_type = genomic DNA
agttggttattagttactgtgatatttatcacggtacccaataaccaatg

SEQ ID NO: 21638 - DNA, 40 bp, Bacillus anthracis
  source 1..40: mol_type = genomic DNA
gataggtgtaactgtcgtgtttgtaacggtacttccaaca

SEQ ID NO: 21639 - DNA, 40 bp, Bacillus anthracis; identical to SEQ ID NO: 21638
  source 1..40: mol_type = genomic DNA

SEQ ID NO: 21640 - DNA, 50 bp, Bacillus anthracis
  source 1..50: mol_type = genomic DNA
tgttgactaagttttactgtaatatttatcaaggaaatgggtatttaatg

SEQ ID NO: 21641 - protein, 546 aa, Faecalibacterium prausnitzii
MKKQYKVGIYCRLSVDDASNSAKAKNYIPGDESASIENQYEILSKFVMLNGWIEVKTYRDDGYSGGNFQRPGFLEMLEDARHGLINLILVKDLSRLGRDFVEVGRYTDVIFPSLGCRFVSVLDCLDSEGDNTDMLHFRSLMNDYHLKDLSGKIKSVLYAKKKSGQYLTAYAPYGYRKSDEDKHRLVVDEEAATVVREIYRMRCSGMAYGKIAAALNEKSILSPRWHWELHYGKKGGCKYSKLWTYATVKNILNDTVYLGIVTQNRTGSRSYKDKTMIQKPETEWICHEDAHEAIVDRKLWEAVQEKNRAVKQQAANRADPLPALFTGKLVCADCGHPLVANRETQRRKNGTVKQYVSYFCSHFATTGHSACSWHRIYEISLKTLVLNEIRAHSRAVAQDENAVLDKLRQQILSESAARQEDSKLEISRLRRRIGELEHMTSKLYEDKVSGVINGDTFAVLIQKSEQERIQKAERLEVLLAEERKARQEVENIRQWAGIVRRYLNVQELDREIVEELIDHIEIGERSVIDGQRHQDIKIFYRFVGVV

SEQ ID NO: 21642 - DNA, 50 bp, Faecalibacterium prausnitzii
  source 1..50: mol_type = genomic DNA
acccttcccaaacagcttatgttcttgaacagaggttgttgaggaaaggg

SEQ ID NO: 21643 - DNA, 40 bp, Faecalibacterium prausnitzii
  source 1..40: mol_type = genomic DNA
gtcacgggcgtaccactcgttcatgatatttcggaacgga

SEQ ID NO: 21644 - DNA, 40 bp, Faecalibacterium prausnitzii
  source 1..40: mol_type = genomic DNA
gtcacgggcgtaccactcgagcatgatatttcggaacgga

SEQ ID NO: 21645 - DNA, 50 bp, Faecalibacterium prausnitzii
  source 1..50: mol_type = genomic DNA
cccccttccccaatatttcttttcaggaacagaggtgcaggagaacaggg

SEQ ID NO: 21646 - protein, 595 aa, Flavobacterium johnsoniae
MEKKHAILLVRVSTSVQDYEAQIYDLRQYGNKFGYTDFHIIETKETAFADFDQKIGTNEMFRFIESNPHYNTIFITELSRLARRQSILHSIKELFINSRIQLYIKDSEYKLLDESGNITQQAETMFTLFGLFAEAEIKQKLERFQRKKKELMELGLSIGGKLLFGYDRFMTDNKKNTLVVNEEQALIIRTVFNWYINGLDEVKSPSVKRISIECIKRGFHPYTHSKRNLNKLLKEEAYTGEKITNNKRKNPKYKLVPNEPEYLISNNKIKYPVIIESETYNSVQEKLKSNITKGDKETKHITILSKLINCPSCGRKLSANYRSTTGASKNSYRCTSRTDTQPCGSSKSLSMNLIDSAVWGLIKADLPTLSKRINEINPDQYLLQLDSHLGNFIEREKEIENEIQENVQVVDSMGKMRNVNVIELVQKSAKKIEKLETELDKIAQEKARIASNKLLIQDKQENVESVIKDNLSTIENSKELLKKYINSFVDQINILEHNVSYTVLEIVLNDFTVSQDYTEYFGDTLPIQLELDYIVIDKRVTRDIKLAYMKSQSPSTDFTRFTKLTFEQIIPQVKKEMNTNDYDLSLPIQYSKLLF

SEQ ID NO: 21647 - DNA, 50 bp, Flavobacterium johnsoniae
  source 1..50: mol_type = genomic DNA
gtggtatttctttgctatatttttataagaatgtgttaaagaaataccac

SEQ ID NO: 21648 - DNA, 40 bp, Flavobacterium johnsoniae
  source 1..40: mol_type = genomic DNA
tccgggtggaccaatcaaaataatgttatgacctccggca

SEQ ID NO: 21649 - DNA, 40 bp, Flavobacterium johnsoniae
  source 1..40: mol_type = genomic DNA
tccgggtggaccaatcaaataaatgttatgacctccggca

SEQ ID NO: 21650 - DNA, 50 bp, Flavobacterium johnsoniae
  source 1..50: mol_type = genomic DNA
gtgatatttcctaactatattttttaaaaaatgtttgtgatatagatgtg

SEQ ID NO: 21651 - protein, 585 aa, Pseudomonas aeruginosa
MPTAYAYIRYSSKAQGEAGKDSVDRQMASIQAITKHHDVELLPENIFSDTGVSAHDGSNKKKGKLKDLIDMINDVHIKPGDYIFVESIDRLSRQRLLQAKELVNGILEKGVILITTIDGQRYEKPNETNRIDDLQQDILLSVIAKRAHEESKTKSVRRKSAWNRAKKLADDEKAIFNGHNPPYGISYNKEENRFEIVEDEAQEIRDIFESLKYVGISLTIRKINAYAKRKWTNKNIHLLFQTKYVLGSYMAQRRDENKNKVFERFIEGYYPQIVSYELFNEALEAMKLRAHRKHYGNQTVGSLNIFRHSIKCDCCNASMLFEKQTNPKGVCYGYFHCFTRKELKTNCNQPRFRFDLAYGLFLELVYQATTKEDFDVHPWQSMELEEEKRDRDYITIGESTRLYMATPEDNQIEEKIESFRELLISLLSNKKRQAADNKKLVELRNALLEQKSYKDNLLKSFAGFTNGVIPQEFLAVVSSTELKINDIEAELSKLQAEINTRKTSINIYSENDVIELYSTEEGRLKINQFFIANDIVFRFSFEKETRTLYCKINYQGMMIDKIAKQFDLHNPLKEFGINNLNEYFN

SEQ ID NO: 21652 - DNA, 50 bp, Pseudomonas aeruginosa
  source 1..50: mol_type = genomic DNA
tgtgtgagattcacccctaccattggagagcagggggtggtattctcaca

SEQ ID NO: 21653 - DNA, 40 bp, Pseudomonas aeruginosa
  source 1..40: mol_type = genomic DNA
aggtcctgcgcgagccgctggaaagcggcgagatcgtcat

SEQ ID NO: 21654 - DNA, 40 bp, Pseudomonas aeruginosa
  source 1..40: mol_type = genomic DNA
aggtcctgcgcgagccgctcaaaagcggcgagatcgtcat

SEQ ID NO: 21655 - DNA, 50 bp, Pseudomonas aeruginosa
  source 1..50: mol_type = genomic DNA
tgtgttggagacttcacttccagtcaagagcatgggttgttactcccact

SEQ ID NO: 21656 - protein, 516 aa, Bacillus cereus
MYRPESLDVFIYLRKSRKDVEEERRALEEGNSYNALERHRKRLFAIAKAENHNIIDVFEEVASGESIQERPEMQKLLRKLEGNEADGVLVIDLDRLGRGDMLDAGMIDRAFRYSSTKIITPTDVYDPDDESWELVFGIKSLISRQELKSITKRLQNGRIDSVKEGKHIGKKPPYGYLKDENLKLYPDPEKAWIVKKIFELMYNGKGRQAIAAKLDKLGIEPPVTKRGAWDASTITSIIKNEVYTGVIIWGKFKHKKRNGKYTRHKVPEEKWIVYENAHEPIVPKELFDAANKAHSGRQRTSVISDKHLTNPLAGILKCKLCGYTMLIQTRKDRPHNYIRCNNPTCRGKQKQSVFYLVEEKILEALQQVIDEFQAKKKEKVEIDETNLVSFKEKAIHLKEKELQELQGQKGNLHDLLEKGVYTVEIFLERQKNLVERISSTENDIKMLREEIESEKMKEQNKTEFIPALKTVIEAYDKTPNIELKNQLLKTILEKVTYYRNPDWKTNEFEIQVYFKI

SEQ ID NO: 21657 - DNA, 50 bp, Bacillus cereus
  source 1..50: mol_type = genomic DNA
gtacatggtggagtattaaactgatttaattctctaccatgtacacaatt

SEQ ID NO: 21658 - DNA, 40 bp, Bacillus cereus
  source 1..40: mol_type = genomic DNA
actatggcggttgtactggttcacttccccatatccaaac

SEQ ID NO: 21659 - DNA, 40 bp, Bacillus cereus
  source 1..40: mol_type = genomic DNA
actatggcggttgtactggtacacttccccatatccaaac

SEQ ID NO: 21660 - DNA, 50 bp, Bacillus cereus
  source 1..50: mol_type = genomic DNA
ttacattgtatgtgattcaacttatataatattcttaaaatgacaaaatt

SEQ ID NO: 21661 - protein, 622 aa, Phocaeicola dorei
MKAAIYIRISTKKQNTDRQYEELKSYANSMGYTIVESYEDQISGFKDEEERHDLNRLKEDAKTEKFDIILFSELSRLSRKTTNILELISYFRDDCKKSLYFQKQNLNVTTDKSDLGSELQLNILATIGSYEIELSTERQMGGKIQKVKKQCWTHGSRPYGYNIDENKYLHINEEEANIIREIYNYYLNNMTSVQIAHLLNLRNIYAPATKNKKQNLWHPNSVCQILRAKRNIGIFEATYHEPDPKNKDKIRKRKNRKIVEEIKYTNKELAIVSDDIFYSANEKIEKNIKNKDTAKKNISLLKGLLICGHCGSNFFYKKSGKDKNFSYVCYGSRYSFSIGKKKCTNPITINAPKIDGLIIYMAKSRLLMKRLIENSDINIKSKEEQLQKNEEIILLQNLSIKKINEEFNQYIKKAIKYGIDENIIEKEHQRIIKQLKQIEENIERIKKENYSLNKQIKILSKDKCITDEMYDGMQLNEMKELFEEYIEKIVLYNTTQWVIVNLCYFDGSNEFSFLRKSARANELLHYNTIVKSIINEKQYLMLLRDYYDTLEIGNKYYYYPYYNNINNDVIYDKEKEVFIKFGIKKGKETREYTISEFIKFIYPKNMKEVTAYEYYYPNQKNE

SEQ ID NO: 21662 - DNA, 50 bp, Phocaeicola dorei
  source 1..50: mol_type = genomic DNA
aagggctacttgatattgataatttgtattatctttttcaagtaaccttt

SEQ ID NO: 21663 - DNA, 40 bp, Phocaeicola dorei
  source 1..40: mol_type = genomic DNA
gaatgcatccatatcgatatgtattattttgcgttcggac

SEQ ID NO: 21664 - DNA, 40 bp, Phocaeicola dorei
  source 1..40: mol_type = genomic DNA
gaatgcatccatatcgatatctattattttgcgttcggac

SEQ ID NO: 21665 - DNA, 50 bp, Phocaeicola dorei; identical to SEQ ID NO: 745
  source 1..50: mol_type = genomic DNA

SEQ ID NO: 21666 - protein, 548 aa, Vibrio parahaemolyticus
MDKIIYPYIRFSTKKQEHGHSLTRQITRIKEYALENGYKINDSLELRDLGKSGFKGLNAKEGALSVFLKLLEDEKIPKDGSAYLCIEQFDRLSRMPTDDAYQVFRKILKQNVNIITLMDEKVYRKEDLNNMVSILNSLILMEQAHLESQRKSDLISQIFKGKVKTLKSGGKVQFTYILPGWIDNNGTKEEPDFVVNEKVEVVKMIVDMYLGGETMGHIARILNENQIPQIARKRTKNQTNSWNSAKISHLLTNQTLLGKLHIRTTGDIIEDYYPAVISKDQWDLIQAKKRTQSVTKVAGRRSINIFQGRMFCADCGNKYYFETDDKKGKNGKRYVYHMLKCSGRRFHSCDSESLKYDTMTNPDLFFFRNIKEENSEDISLIKEEIKNYNKDILLLNQEKDEIEDLLDNNEINFKAYTLAVTKITDKVETLEKKIALNKQHLSFSSNEYRMDHFDKNDSENVANAKKFISSNYAAIIISSKHHAMVILLHSGEMMVKPLPNKKANILPVHRAINEIKKNIQDQDKKGLLDGKFKEILDAFNFQDKFVGL

SEQ ID NO: 21667 - DNA, 50 bp, Vibrio parahaemolyticus
  source 1..50: mol_type = genomic DNA
ttccatgtaatagtaaaattaagggtaatgaacttgattattacagggaa

SEQ ID NO: 21668 - DNA, 40 bp, Vibrio parahaemolyticus; identical to SEQ ID NO: 8078
  source 1..40: mol_type = genomic DNA

SEQ ID NO: 21669 - DNA, 40 bp, Vibrio parahaemolyticus
  source 1..40: mol_type = genomic DNA
cgccggagccaaattgaccctaatgcgcttggctggaaac

SEQ ID NO: 21670 - DNA, 50 bp, Vibrio parahaemolyticus
  source 1..50: mol_type = genomic DNA
tttcctgtatattcaaaatgaagactaatgaagtttatttatacaagcta

SEQ ID NO: 21671 - protein, 568 aa, Clostridium perfringens
MKTVAIYSRKSRFTGKGDSIENQIEMCKEHIKKFVSPKVEFLIYEDEGFSGGNTNRPAFQRLINDIKYGNIDLLICYRLDRISRNVADFSSVLDVLQEYKVDFISIKEQFDTSSPMGRAMIYIASVFAQLERETIAERIKDNMLEMAKKGKWTGGKLPLGFTSKKIAYIDEEGKKRFKVTLEHDSKDLEFVKFLYEKYLELGSLHKLETYTHENNIRSASGKIFEKSTLKIILQNPIYVKADENVFNYFENKGWSVYGEPDGLHSLLSYNKTETAKKDGKLTKRNKDESESLVAVSDVKGFIDSSLWLKVQYQFKKNKNTFPRLGKTHNALLVGKLFCGNCGTRMIIQHGRTSTKTGIKTFYYVCSLKKTSKKKLCSAHNVKTDFLENLVLDSLEKLYYKKDFINDSLKINLKENKDNIKEINTTKKLIELNKNKINSLIEKLSLDFDNVLSDILIPQIKKIKIENDVLESKLEELKLKKQESEMNRIEIDLITSLLNKCKNIKDLTRTEQKQIIDCLVDSIYYYSNDNGNDKIKIKFINDIDSINTLLSDEEKRQFEKLSFYSHSMS

SEQ ID NO: 21672 - DNA, 50 bp, Clostridium perfringens
  source 1..50: mol_type = genomic DNA
agttgtctttttattcacacagcatgtccagcatgaataaaaagacaaca

SEQ ID NO: 21673 - DNA, 40 bp, Clostridium perfringens; identical to SEQ ID NO: 4918
  source 1..40: mol_type = genomic DNA

SEQ ID NO: 21674 - DNA, 40 bp, Clostridium perfringens
  source 1..40: mol_type = genomic DNA
agtagtcataagcttagcaaatccagtatctaataaaaca

SEQ ID NO: 21675 - DNA, 50 bp, Clostridium perfringens
  source 1..50: mol_type = genomic DNA
agttgactcatagctcacacaccaaatcaagcaaaatttggaagaacact

SEQ ID NO: 21676 - protein, 514 aa, Vibrio splendidus
MKAYLYIRFSSKQQEQGDSVRRQEKAAHEWCKVNEVELSDMTFEDLGVSAFKEGGKRPALADLIEAIEMGKISRGSYVLVENDDRLSRLGWYATQQMIRHMVIDLGVKLVVLSSSTVYDTSNIEDIAQNILLMFNADRAYKESLRKSDMIRAARQKRRDDETLTGKLPFWLDRVDGDIRLNKRADVVRLIVELKKSGKSNQATARFLNDQKIPSASGVQWNASAVRVVFSNHAIYGAKAYFITDSKRKMHLDKIVENKLPPIVTKADFDAVQVVKKNVGNKSTKTPFSNLLKCGACGGGMVQRTSTYKEKKMIYRKCIGSLEGRCEQTKQIREPDVILVEALKDIKYIDSVQQHVSKVGELNKQIDTIKQTEQRLLELGNIDALTNLYTRLTDLESKLIGAKKEDEAQEQKPMDFDYKRVFDIEDTSEQNAMLKRVIESIVIQYLGVVDRKSSSRWRVKVIQRNGHHQSFVINQTHGFGNWKIVQETNTEKFKEELEKLTSGIDELDDWQDTEI

SEQ ID NO: 21677 - DNA, 50 bp, Vibrio splendidus
  source 1..50: mol_type = genomic DNA
acatagtggaatgaacatataactaaagttctttatcgtacctgataagt

SEQ ID NO: 21678 - DNA, 40 bp, Vibrio splendidus
  source 1..40: mol_type = genomic DNA
atttggctggcatgtcgtgaaggttctttacagaacttag

SEQ ID NO: 21679 - DNA, 40 bp, Vibrio splendidus
  source 1..40: mol_type = genomic DNA
atttggctggcatgtcgtgacggttctttacagaacttag

SEQ ID NO: 21680 - DNA, 50 bp, Vibrio splendidus
  source 1..50: mol_type = genomic DNA
acacagagatacatacatatgtatacacttctttatatttactgatatat

SEQ ID NO: 21681 - protein, 452 aa, Listeria ivanovii
MKAAIYIRVSTQEQIENYSIQAQTEKLTALCRSKDWDVYDIFIDGGYSGSNMNRPALNEMLSKLHEIDAVVVYRLDRLSRSQKDTITLIEEYFLKNNVEFVSLSETLDTSSPFGRAMIGILSVFAQLERETIRDRMVMGKIKRVESGLPLTTAKGRTFGYDVVDTKLYVNKEEAQHLQLIYDIFEEEKSITFLQKRLKKLGFKVKSYSSYNKWLMNDLYIGYVSYGDKVHVKGVHEAIISEEQFYRVQEIFSRMGKNPNMNKESSSLLNNLIACEKCGLSFVHRVKDTASRGKKYRYRYYSCKTYKHTHELEKCGNKIWRADKLEEIIIDRVKNYSFATRNLDKEDELDSINAKLQVEHSKKKRLFDLYMNGSYEVAELDKMMADIDAQINYYNSQIEANEELKRNKKVQESLAELATVDFDSLEFREKQIYLKSIINKIYIDGEQVTIEWI

SEQ ID NO: 21682 - DNA, 50 bp, Listeria ivanovii
  source 1..50: mol_type = genomic DNA
tttagtccctcattttctctcactggacggagaataaacgagatactaat

SEQ ID NO: 21683 - DNA, 40 bp, Listeria ivanovii; identical to SEQ ID NO: 7843
  source 1..40: mol_type = genomic DNA

SEQ ID NO: 21684 - DNA, 40 bp, Listeria ivanovii
  source 1..40: mol_type = genomic DNA
tttcggttcgagctatgatcaacgtaaggagggcactaag

SEQ ID NO: 21685 - DNA, 50 bp, Listeria ivanovii
  source 1..50: mol_type = genomic DNA
ttcagtcctgcttgttatcttattcaaaggagaatataaggtctagtaat

SEQ ID NO: 21686 - protein, 630 aa, Enterobacter roggenkampii
MPQLYSYIRWSTDRQDKGTTRNRQLAAAKVYAAEAGLEMVEIEDPGVSAFRGKNTNTGKLGDFIDAVKQGAIASDSWLYVENLDRITRQNVTTAQKLFIELLELGLTLVTGMDKRVYTLDSVNKNPTELMISLLLFSRANEESETKSNRTIGNVVALVERHQAGLPVNIKSVGRHPFWIDDSGSQYQAVKEHPVYWSIAREAIDMFLDGNGIYTVKRYLDEKYPNGLKGKEWDYQVLKKMRDNRALIGERTINVGGATYKLDNYYPWLCKDEAEFLTLAERKQQNNYKAKKDKTEEIKLLSGLQVLRCSKCGGTMHSFMNHGSARYICTNGVHLQKNCSGWSISAQLVEHCTMISLLIGYMDKSRKDGIDTTAIEEEISRKEILITDLESRIANMAQAIAIAPDVSALAVQLNTFDLERKKTVLEVDKLKERLHSLKGKGSLEVDITDFLMLIQWSVFTNMEDADRNKIRKIISSIIESIIVEKADGCITIKIKCHHKDEWLVFGGVNRKPFWAFTIEYSTNDTKEIEGGDSSNFVSNPLFQKAVEQLDSIKQSYLKLFETANTMLGVVGYSDIRGASFWPNTGKYERANVEYEGITYNIAMNGRVSKAITAALEATGLSRKDFIERYKV

SEQ ID NO: 21687 - DNA, 50 bp, Enterobacter roggenkampii
  source 1..50: mol_type = genomic DNA
taatttattttttgattgtttgggcaccctaatgatataaatccaatctt

SEQ ID NO: 21688 - DNA, 40 bp, Enterobacter roggenkampii
  source 1..40: mol_type = genomic DNA
atccaccaggtttttcgggcagcccagggagacgaagccg

SEQ ID NO: 21689 - DNA, 40 bp, Enterobacter roggenkampii
  source 1..40: mol_type = genomic DNA
atccaccaggtttttcgggctgcccagggagacgaagccg

SEQ ID NO: 21690 - DNA, 50 bp, Enterobacter roggenkampii
  source 1..50: mol_type = genomic DNA
tacttttttttttttttgaatttgctccataatgatcattatccattctt

SEQ ID NO: 21691 - protein, 508 aa, Cryobacterium sp
MTKRAAIYARISKADKTVPKVANQILICKALAEDHGYEVAEIFEDDGIAASGKQIDDSTLSNRPGALRLLEAMRSGQFDILLAVEGERLARTYPDGMEFIKASIAGGVTWHLDTDGQLDPSTPAGEETAVSIFASGRREGRVRTARQKRRYDRERAAGMPLWGTRPFGYEEDRISLRPAEADLIRQAVKDYLEGTRSMLRIAQDWTAAGVLTDGMKRERTGRDGVVKPARQAWTATTVRQVLQRDRNAGILTHNGARMPESQIQPIIEEEELEALKARVKLGTPVGARAKSLLGGILRCECGAPMHGTVSYSQRRGGPRYEYKNYKCSQVLYDKSQRHASIGQATADDWVGGHMLRDLVTGKLDSPTSDIPVQLQMLTQRLTANAEAVEHVGGIIIDPSLKTLHAKARGQLKTLEAERSELEQERDSLLARVDDGGDLAALLTEWRDGIFSTFKTTDDWDQWTEKFNEVWGAVEIVKKQALIRARYRPTVKVGGRGSSRISLNPVEAS

SEQ ID NO: 21692 - DNA, 50 bp, Cryobacterium sp
  source 1..50: mol_type = genomic DNA
tatatgtggattgaaatgagcacccagccagtattacgatttcacctatg

SEQ ID NO: 21693 - DNA, 40 bp, Cryobacterium sp
  source 1..40: mol_type = genomic DNA
catgagggtgatgagcacccacccgggtacgtcgccgcgt

SEQ ID NO: 21694 - DNA, 40 bp, Cryobacterium sp
  source 1..40: mol_type = genomic DNA
catgagggtgatgagcaccatcccgggtacgtcgccgcgt

SEQ ID NO: 21695 - DNA, 50 bp, Cryobacterium sp
  source 1..50: mol_type = genomic DNA
tataggaggcagtaaatgacacctatgccagtattattttttaatctttg

SEQ ID NO: 21696 - protein, 457 aa, Bacillus cereus
MRCAIYRRVSTDEQAEKGFSLENQKLRLESFATSQGWEVVEDYVDDGFSGKDTNRPALQRMFSNVDKFDVILVYKLDRFTRSVKDLNEMLETIKKNEIAFKSATESIDTTTATGRMILNMMGTTAQWERETISERIKDVFGKLRENGIFSTGHPPYGYRCSGNKSIEIVEEQAEMVRYIYELSKTMGLFKISVELNRKGIKTRRNNKFGQSAVKRILHNPFYCGYMEVDNKWVPIKNEGYTPIISEEEFKTTQKILTKRTKAQTRSRSVSYYPFSGIVLCPECQRAMRGDRAKYGDYYYRYYRCVYGRENINCTNRKRIRAEQVDKAFAEYISRSFENTTIKLDSRDIKSDIEYELKHLDSKIERLSDIYIEGDITKSKYNEKMNSLLNEKEKLKKDLTSCKEHVDAEFVRNQINKLESIWNLIDDKTKSESIRSIFDTIKIKQDKNTVTIMDHTLL

SEQ ID NO: 21697 - DNA, 50 bp, Bacillus cereus
  source 1..50: mol_type = genomic DNA
ttttaggttaatggtccatttcctctagtaaatgttatattaacccaaaa

SEQ ID NO: 21698 - DNA, 40 bp, Bacillus cereus; identical to SEQ ID NO: 6793
  source 1..40: mol_type = genomic DNA

SEQ ID NO: 21699 - DNA, 40 bp, Bacillus cereus
  source 1..40: mol_type = genomic DNA
tttaggattatcaaattcagcatgatacgcccttccgaaa

SEQ ID NO: 21700 - DNA, 50 bp, Bacillus cereus
  source 1..50: mol_type = genomic DNA
ttctaggtttggtatacattttttgcattcaaagttattttaacagaaaa

SEQ ID NO: 21701 - protein, 457 aa, Bacillus thuringiensis
MRCAIYRRVSTDEQAEKGFSLENQKLRLESFATSQGWEVVEDYVDDGFSGKDTNRPALQRMFSNVDKFDVILVYKLDRFTRSVKDLNEMLETIKKNEIAFKSATESIDTTTATGRMILNMMGTTAQWERETISERIKDVFGKLRENGIFSTGHPPYGYRCSGNKSIEIVEEQAEMVRYIYELSKTMGLFKISVELNGKGIKTRRNNKFGQSAVKRILHNPFYCGYMEVDNKWVPIKNEGYTPIISEEEFKTTQKILTKRTKAQTRSRSVSYYPFSGIVLCPECQRAMRGDRAKYGDYYYRYYRCVYGRENINCTNRKRIRAEQVDKAFAEYISRSFENTTIKLDSRDIKSDIEYELKHLDSKIERLSDIYIEGDITKSKYNEKMNSLLNEKEKLKKDLTSCKEHVDAEFVRNQINKLESIWNLIDDKTKSESIRSIFDTIKIKQDKNTVTIMDHTLL

SEQ ID NO: 21702 - DNA, 50 bp, Bacillus thuringiensis
  source 1..50: mol_type = genomic DNA
ttttaggttaatggtccatttcctctagtaaatgttttattaacccaaaa

SEQ ID NO: 21703 - DNA, 40 bp, Bacillus thuringiensis; identical to SEQ ID NO: 6793
  source 1..40: mol_type = genomic DNA

SEQ ID NO: 21704 - DNA, 40 bp, Bacillus thuringiensis; identical to SEQ ID NO: 21699
  source 1..40: mol_type = genomic DNA

SEQ ID NO: 21705 - DNA, 50 bp, Bacillus thuringiensis; identical to SEQ ID NO: 21700
  source 1..50: mol_type = genomic DNA

SEQ ID NO: 21706 - protein, 457 aa, Bacillus thuringiensis; identical to SEQ ID NO: 21696

SEQ ID NO: 21707 - DNA, 50 bp, Bacillus thuringiensis; identical to SEQ ID NO: 21702
  source 1..50: mol_type = genomic DNA

SEQ ID NO: 21708 - DNA, 40 bp, Bacillus thuringiensis; identical to SEQ ID NO: 6793
  source 1..40: mol_type = genomic DNA

SEQ ID NO: 21709 - DNA, 40 bp, Bacillus thuringiensis; identical to SEQ ID NO: 21699
  source 1..40: mol_type = genomic DNA

SEQ ID NO: 21710 - DNA, 50 bp, Bacillus thuringiensis; identical to SEQ ID NO: 21700
  source 1..50: mol_type = genomic DNA

SEQ ID NO: 21711 - protein, 450 aa, Enterococcus faecium
MKRVALYMRVSTEQQAKHGDSLREQKETLYEYIEQHKDLKVVNEYVDGGISGQKINRDEFQKLLQDVKENKIDIILFTKLDRWFRNLRHYLNTQEILEKHNVSWNAVSQQYYDTTTAYGRTFIAQVMSFAELEAQIDSERIKAVMANKIAQGEVVSGKTPLGYSIENKKLVINDDAPIVIDIFNYFLSSGSLRKTVYYLGSQYGIVRDYQSVKNMLTNKKYIGELRNNKNYCPPIIDKKLFYAVQKALPKNLKTNAKRDYIFKGLLKCSDCQGSVAGQTIKARYKKKDGTESIYERTCYRCVKRRNNKLRCTNKRAFYEKNLERYIFEATKQKFEQIQINYSKKQPKIIKKKNSKKNIENKLDRLKKAYLNEVIDLEEYKKDREALMKELNEIEVEPAKIDIKNVEFILSKEFDEIYKESSKEEKNALWRSIIDNIIVFPDGNITVNFLI

SEQ ID NO: 21712 - DNA, 50 bp, Enterococcus faecium
  source 1..50: mol_type = genomic DNA
atgtgtactaacttatatattccagaaggataatataagttagtacacat

SEQ ID NO: 21713 - DNA, 40 bp, Enterococcus faecium
  source 1..40: mol_type = genomic DNA
cgatggaataacattaccagaaggatgattatgcgctaaa

SEQ ID NO: 21714 - DNA, 40 bp, Enterococcus faecium
  source 1..40: mol_type = genomic DNA
cgatggaataacattaccatcaggatgattatgcgctaaa

SEQ ID NO: 21715 - DNA, 50 bp, Enterococcus faecium; identical to SEQ ID NO: 4830
  source 1..50: mol_type = genomic DNA

SEQ ID NO: 21716 - protein, 499 aa, Hafnia alvei
MITYAYSYVRFSSKQQSTGASLKRQIEASEAFCRENNLTLAPLSFHDLGISAYKSKARASLTELLEAVNTGRISAGSYVLIEAIDRLSRKGFDDTHSMLRSILLKGVNVAFVGTDAKSLAGTILTRDSLNDTMAIIQVAISADLAHKESQRKSKLVRDAKKRAKEKVSNGEIAKRRLPFWLTLDGDKYVLNERVDVVREIIKMRQSGFGKHKIAQTLNAKGSRTALNKQWSSQTIKYLLAHPALYGAHQLTERIEDSVINAELVENVYPAVMSKKDFFLIQFDEKRVTSGRTSSNFPFKGVVRCICGSTIVYGPRKMNNKIYHYYFCAASKDGKCTQTKLIPNLSSVLKKVIDKITIQSVVRNQSDVIKQEIQQKKDKMAGIHAKLLEMNDPPLSLFELIRNMEKEIESLSAQLKDESYRRAGATNADVTKLKDISDPVEYNMQVKRIVDVITVYRPNDKQGWLRVKIKKIDGNFQSFIIVDENIRLFSDTEAIKKLAE

SEQ ID NO: 21717 - DNA, 50 bp, Hafnia alvei
  source 1..50: mol_type = genomic DNA
tatgattttgtaagattcaaaagttcacgaaaaaggacttgcgaatctta

SEQ ID NO: 21718 - DNA, 40 bp, Hafnia alvei
  source 1..40: mol_type = genomic DNA
gcgctgatgcgtgatatgttcacgaaagacgatttcgctc

SEQ ID NO: 21719 - DNA, 40 bp, Hafnia alvei
  source 1..40: mol_type = genomic DNA
gcgctgatgcgtgatatgtttacgaaagacgatttcgctc

SEQ ID NO: 21720 - DNA, 50 bp, Hafnia alvei
  source 1..50: mol_type = genomic DNA
tttgatttaaatacatttaaaagtttaagaaaaacgtgtcctaaatattt

SEQ ID NO: 21721 - protein, 527 aa, Selenomonas ruminantium
MPTVKVLPATINRLTAMPIDSQQKRRVAAYARVSSDREEQLTSYAAQVDYYTRYINGREDWEFAGMYSDEGITGTNTKNREGFKNMVEDAMAGKIDLIITKSVSRFARNTVDSLTTIRALKAHNVECYFEKENIWTFDGKGELLLTIMSSIAQEESRSISENCTWGQRKRLADGKVSLAYKNFLGYDKGPGGKLVINEKEAEVVRRIYAMFLSGLTPGAISRKLMEECVLSPTRNKTWHYTTVKRILTNEKYKGDALLQKEFTVDFLTKKRKKNEGEVPQYYVENDHEPIVSREVFDAVQREFERRRNLDNRYSGVNILSSKIVCGECGSFYGSKVWHSTDKYRKVVFRCNKKYSEKGKHCDTPTVTEAEVKELFVKAVNILLVSTNEIAEQLEKLIPIIRDTDKLEKERDENFRTMERLVQVMNDAIDENAHVPENQAEYQKLYNSLEKQYNEAKTAYEKALTELGNRQARAQSLEDFLTDLRGQNVPLDKFDERLWASLLDKIVAYSRDRIAFWFKDGSKIMVGM

SEQ ID NO: 21722 - DNA, 50 bp, Selenomonas ruminantium
  source 1..50: mol_type = genomic DNA
tgtatcaatatatatgtcccacaggaaagaggaaggtcgagattgatacc

SEQ ID NO: 21723 - DNA, 40 bp, Selenomonas ruminantium
  source 1..40: mol_type = genomic DNA
aatgactctggcggcggtggatgtgggacaaggggatgct

SEQ ID NO: 21724 - DNA, 40 bp, Selenomonas ruminantium; identical to SEQ ID NO: 21723
  source 1..40: mol_type = genomic DNA

SEQ ID NO: 21725 - DNA, 50 bp, Selenomonas ruminantium
  source 1..50: mol_type = genomic DNA
tgtatcaatctgtatgtatcaatggaaataggagggcaactattggatcc

SEQ ID NO: 21726 - protein, 541 aa, Eisenbergiella tayi
MLRQTTQQLITALYPRLSHEDELQGESNSISNQKRILETYAKQNGFSNLRWYTDDGYSGANFQRPGFQAMLADIEAGKVGTVIVKDMSRLGRNYLQVGMYTEMIFPQKGVRFIAINDGVDSAQGENDFAPLRNIFNEWLVRDTSKKIKAVKRSKGMSGKPITSKPVYGYLMDEDENFIIDEEAAPVVRQIYSLCLAGNGPTKIARMLTEQQIPTPGTLEYRRTGSTRRYHPGYECKWATNTVVHLLENREYTGCLVNFKTEKPSYKLKHSIENPPEKQAVFENHHEPIIDRETWERVQELRKQRKRPNRYDEVGLFSGILFCADCGSVMYQQRYQTDKRKQDCYICGSYKKRTADCTAHFIRTDLLTAGVLSNLRKVTSYAAKHEARFMKLLIEQNEDGDRRRNAAKKKELEAAEKRIAELSAIFKRLYEDSVTGRISDERFTELSADYEAEQKELKERAARLREELSKAQEATANAEKFMNVVRRHTTIEELTPTLLREFVEKIVVHESVALDGKRRGKLRRQEIEIYYSFVGKVELPDT

SEQ ID NO: 21727 - DNA, 50 bp, Eisenbergiella tayi
  source 1..50: mol_type = genomic DNA
ttacttctttatcacacataagcaaatgctcatgtgcggtaaagtaataa

SEQ ID NO: 21728 - DNA, 40 bp, Eisenbergiella tayi
  source 1..40: mol_type = genomic DNA
caacgacaaccccggcgccaagagccagggcatgaagcag

SEQ ID NO: 21729 - DNA, 40 bp, Eisenbergiella tayi
  source 1..40: mol_type = genomic DNA
caacgacaaccccggcgccacgagccagggcatgaagcag

SEQ ID NO: 21730 - DNA, 50 bp, Eisenbergiella tayi
  source 1..50: mol_type = genomic DNA
ttactaattaaagccttaaaagcaactggtcaagttcagagaaggaataa

SEQ ID NO: 21731 - protein, 472 aa, Enterocloster bolteae
MLADIEAGKVGTVIVKDMSRLGRNYLQVGMYTEMIFPQKGVRFIAINDGVDSAQGENDFAPLRNIFNEWLVRDTSKKIKAVKRSKGMSGKPITSKPVYGYLMDEDENFIIDEEAAPVVRQIYSLCLAGNGPTKIARMLTEQQIPTPGTLEYRRTGSTRRYHPGYECKWATNTVVHLLENREYTGCLVNFKTEKPSYKLKHSIENPPEKQAVFENHHEPIIDRETWERVQELRKQRKRPNRYDEVGLFSGILFCADCGSVMYQQRYQTDKRKQDCYICGSYKKRTADCTAHFIRTDLLTAGVLSNLRKVTSYAAKHEARFMKLLIEQNEDGDRRRNAAKKKELEAAEKRIAELSAIFKRLYEDSVTGRISDERFTELSADYEAEQKELKERAARLREELSKAQEATANAEKFMNVVRRHTTIEELTPTLLREFVEKIVVHESVALDGKRRGKLRRQEIEIYYSFVGKVELPDT

SEQ ID NO: 21732 - DNA, 50 bp, Enterocloster bolteae; identical to SEQ ID NO: 21727
  source 1..50: mol_type = genomic DNA

SEQ ID NO: 21733 - DNA, 40 bp, Enterocloster bolteae
  source 1..40: mol_type = genomic DNA
caacgacaaccctggtgcaaaatcacagggcatgaagcag

SEQ ID NO: 21734 - DNA, 40 bp, Enterocloster bolteae
  source 1..40: mol_type = genomic DNA
caacgacaaccctggtgcaacatcacagggcatgaagcag

SEQ ID NO: 21735 - DNA, 50 bp, Enterocloster bolteae; identical to SEQ ID NO: 21730
  source 1..50: mol_type = genomic DNA

SEQ ID NO: 21736 - protein, 541 aa, Blautia wexlerae; identical to SEQ ID NO: 21726

SEQ ID NO: 21737 - DNA, 50 bp, Blautia wexlerae; identical to SEQ ID NO: 21727
  source 1..50: mol_type = genomic DNA

SEQ ID NO: 21738 - DNA, 40 bp, Blautia wexlerae
  source 1..40: mol_type = genomic DNA
aaacgacaatccgggcgcaaaatcacagggcattaagcag

SEQ ID NO: 21739 - DNA, 40 bp, Blautia wexlerae
  source 1..40: mol_type = genomic DNA
aaacgacaatccgggcgcaacatcacagggcattaagcag

SEQ ID NO: 21740 - DNA, 50 bp, Blautia wexlerae; identical to SEQ ID NO: 21730
  source 1..50: mol_type = genomic DNA

SEQ ID NO: 21741 - protein, 541 aa, Lachnospira eligens; identical to SEQ ID NO: 21726

SEQ ID NO: 21742 - DNA, 50 bp, Lachnospira eligens; identical to SEQ ID NO: 21727
  source 1..50: mol_type = genomic DNA

SEQ ID NO: 21743 - DNA, 40 bp, Lachnospira eligens
  source 1..40: mol_type = genomic DNA
taaggtcatgaccggaaacaatgatgaagggacctttctt

SEQ ID NO: 21744 - DNA, 40 bp, Lachnospira eligens
  source 1..40: mol_type = genomic DNA
taaggtcatgaccggaaacactgatgaagggacctttctt

SEQ ID NO: 21745 - DNA, 50 bp, Lachnospira eligens; identical to SEQ ID NO: 21730
  source 1..50: mol_type = genomic DNA

SEQ ID NO: 21746 - protein, 536 aa, Vibrio cholerae
MRTAYSYVRLSSKKQIQGYGQERQWQAIQAAALAHGWELSEKTFSDLGVSGWKGANIETGALSQFLQCVEDGYIEKGSVLIVENVDRLSRAGVQRAVSLLMQLLASGISIYTFTDSKLYEPDSHNPLMDLMAWALSAQRAFEESERKSQMILNAKAKAREKARLTGEIITRRCPSWLRVNQDKTAFELIPERVETVRKIFDLYVNGYGTPRIGRLLTEEGRKPLTGRAWYPRSISRILQYRAVLGEYQPTLNGKPEGDAIKNYYPAIIDEDQFNEVQAVLKEGGAGKGRRGKEMRNYFAGLLRCSCGEGMHIVSSCVKGKRYYQLRCLQYRISCFGSSWNFYKLSSFVLFAFRRLPILEVMGSKDNNNIKELNAKERELTFLLEDTKRQLDNTINAIAALGLNDQLQSKFRELKTSVTNIEKQLSDVKTDLETFQGQLVIQKQDSEMLTGRFLELIDSTKGIDGRIKLNQVLRRYLSKIEIHADKKEEHRYIKIYRKDGDELVSIQCDHSLKGALFESKDGLESFELLPATEAKRK

SEQ ID NO: 21747 - DNA, 50 bp, Vibrio cholerae
  source 1..50: mol_type = genomic DNA
ttatgtctttatgaaaacacaattaaggtattgtatcggttatgacataa

SEQ ID NO: 21748 - DNA, 40 bp, Vibrio cholerae
  source 1..40: mol_type = genomic DNA
atttggttggcatgtggtgaaagtgctctatcgcacttag

SEQ ID NO: 21749 - DNA, 40 bp, Vibrio cholerae
  source 1..40: mol_type = genomic DNA
atttggttggcatgtggtgttagtgctctatcgcacttag

SEQ ID NO: 21750 - DNA, 50 bp, Vibrio cholerae; identical to SEQ ID NO: 4840
  source 1..50: mol_type = genomic DNA

SEQ ID NO: 21751 - protein, 559 aa, Pseudomonas aeruginosa
MRKVYCYVRFSSKKQQLGDSIERQQKLIEQYLTEHNAEIAEQFSDLGVSAFRGKNVKVGALSRFLERVKSGEISHGDTLIVESLDRISRQKELNTLEILISILNAGVVIYTLSDGRIYNAKTEDQANLVFQINFIISRAYDESLNKQKRSVSAWNRKHEEARKAKTVMTRKLPYWLKVVENDGEVRIEIIEDRAREVRKAFELAKYKLGAQAIASRLNKDGAQKRWTLIAVRHLLTSKSVYGSFEAFKTKSLNGTLEKNQAYEEIENYFPAVIEKSEYYNIQSILQSNKEVYATRGRTPKGFRNVFKGLIKCMDCNSYLHQNFLKRKGKEYMYLVCQKSLVHACPAGKKVIIPYRHILEPFLLFFKNYGIEELFSEPSDTQSLNQRLTAIREEKNDKKGALQRMSDDIEKNNGEIPKTILALIGKIEGQLSSLDEEENRTMAQIESLRVSKSVKEEITKSDIDELLETEEGRLKFNSLLSERKIELLVSREFEEEYSNLFIFFKEKGFSENIKFNRKEAIFPFMGVYNFNRKTYSDGFGGEPKPNEQVDYEKFRIDWSL

SEQ ID NO: 21752 - DNA, 50 bp, Pseudomonas aeruginosa
  source 1..50: mol_type = genomic DNA
gttttgataaatcgcttgttaatggcgattaactgttgtattctcaaaac

SEQ ID NO: 21753 - DNA, 40 bp, Pseudomonas aeruginosa
  source 1..40: mol_type = genomic DNA
ggtcggcctgccggaaaccgcggtgcgcgagagcaaggac

SEQ ID NO: 21754 - DNA, 40 bp, Pseudomonas aeruginosa
  source 1..40: mol_type = genomic DNA
ggtcggcctgccggaaaccttggtgcgcgagagcaaggac

SEQ ID NO: 21755 - DNA, 50 bp, Pseudomonas aeruginosa
  source 1..50: mol_type = genomic DNA
tcttagatatagcacttgttatttttaattaatggttgacatctcaaaat

SEQ ID NO: 21756 - protein, 559 aa, Pseudomonas aeruginosa
MRKVYCYVRFSSKKQQLGDSIERQQKLIEQYLTEHNAEIAEQFSDLGVSAFRGKNVKVGALSRLLERVKSGEISHGDTLIVESLDRISRQKELNTLEILISILNAGVVIYTLSDGRIYNAKTEDQANLVFQINFIISRAYDESLNKQKRSVSAWNRKHEEARKAKTVMTRKLPYWLKVVENHGEARIEIIEDRAREVRKAFELAKYKLGAQAIASRLNKDGAQKRWTLIAVRHLLTSKSVYGSFEAFKTKSLNGTLEKNQAYEEIENYFPAVIEKSEYYNIQSILQSNKEVYATRGRTPKGFRNVFKGLIKCMDCNSYLHQNFLKRKGKEYMYLVCQKSLVHACPAGKKVIIPYRHILEPFLLFFKNYGIEELFSEPSDTQSLNQRLTAIREEKSDKKGALQRMSDDIEKNSGEIPKTILALIGKIEGQLSSLDEEENRTMAQIESLRVSKSVKEEITKSDIDELLETEEGRLKFNSLLSERKIELLVSREFEEEYSNLFIFFKEKGFSENIKFNRKEAIFPFMGVYNFNRKTYSDGFGGEPKPNEKVDYEKFRIDWSL

SEQ ID NO: 21757 - DNA, 50 bp, Pseudomonas aeruginosa
  source 1..50: mol_type = genomic DNA
gttttgataaatcgcttgttaatggcagttaactgttgtattctcaaaac

SEQ ID NO: 21758 - DNA, 40 bp, Pseudomonas aeruginosa; identical to SEQ ID NO: 21753
  source 1..40: mol_type = genomic DNA

SEQ ID NO: 21759 - DNA, 40 bp, Pseudomonas aeruginosa; identical to SEQ ID NO: 21754
  source 1..40: mol_type = genomic DNA

SEQ ID NO: 21760 - DNA, 50 bp, Pseudomonas aeruginosa; identical to SEQ ID NO: 21755
  source 1..50: mol_type = genomic DNA

SEQ ID NO: 21761 - protein, 586 aa, Pseudomonas putida
MPTGYAYIRYSTRRQGTDDKDSVTRQKAGIRAIAATHGVEVPEENFFYEDGVSAYTGDNEKKGKLKDLIDQIEALTISEGDYVFVESIDRLSRQRLLQTKDLVYGILKKGVIIVTTIDGYVYRLRENQQDTLHQDIMLSVISTRAHEESLTKSTRRKSAWRKAKTEAETGIVFNKNRLPYGVIFNEVTQSLGIDEVARDEIEFILHNLKREGVTASIKKANQFAKINWTQARVKDLFETKYVLGYFMSQKKIEGKIVFDKYVEDYYPKMVEPSLFLEAKEAMRNRKVRKHSGRVTQDNINIFRHSCFCQRCGKSLVFMNNYNRKGRRYFYMTCQQNIETGACKNRFRYDLAVKIFFDTMKEFDRLNNSKTSVSPIDIKQYKVLDEATLKEIEDINKALELINEHSSGAFKLARKFLELSKAKPSADRETKKKLKDLTTRKHELEVSISNLNKSVEALTSGAIPLVIITRLSKEEQELSSIREEIEKLEVSKNQTKVHRLEFNNLKKTKEFLMTEEGRLNIINFLTSNAIKFSFDFSNDTLAASAYVGSDCIGQLSTKNENRSAPLECYGFENLGSMLTSTSKHQTI

SEQ ID NO: 21762 - DNA, 50 bp, Pseudomonas putida
  source 1..50: mol_type = genomic DNA
tgtgttagtattggtgtgttggtcttgaccgagtgacgttttctaacaca

SEQ ID NO: 21763 - DNA, 40 bp, Pseudomonas putida
  source 1..40: mol_type = genomic DNA
gatcggcatgtggttggtcttgaagtagatccccaccatc

SEQ ID NO: 21764 - DNA, 40 bp, Pseudomonas putida; identical to SEQ ID NO: 21763
  source 1..40: mol_type = genomic DNA

SEQ ID NO: 21765 - DNA, 50 bp, Pseudomonas putida
  source 1..50: mol_type = genomic DNA
tatcttattttttaagtgttggtctttacctagtaaattgctttaacaaa

SEQ ID NO: 21766 - protein, 586 aa, Pseudomonas putida
MPTGYAYIRYSTRRQGTDDKDSVTRQKAGIRAIAASHGVEVPEENFFYEDGVSAYTGDNEKKGKLKDLIDQIEALTISEGDYVFVESIDRLSRQRLLQTKDLVYGILKKGVIIVTTIDGYVYRLRENQQDTLHQDIMLSVISTRAHEESLTKSTRRKSAWRKAKTEAETGIVFNKNRLPYGVIFNEATQSLGIDEVARDEIEFILQNLKREGVTATIKKANQFAKINWTQARVKDLFETKYILGYFMSQKKIEGKIVFDKYVEDYYPKMVEPSLFLEAKEAMKNRKVRKHSGRVTQDNINIFRHSCFCQRCGKSLVFMNNYNRKGRRYFYMTCQQNIETGACKNRFRYDLAVKIFFDTMKEFDRLNNARTSVSPIDITQYKELDEATLKEIEDINKALESINENSSGAIKLARKFLELSKAKPSADRETKKKLKELTTRKHELEVSISNLNKSVEALTSGAIPLVIITRLSKEEQELSSIREEIEKLEVSKNQTKIHRLEFNNLKKTKEFLITEEGRLNIINFLTSNAIKFSFDFSNDTLAASAYVGSDCIGQLSTKNENRSAPLECYGFENLGSMLTSTSKHQTI

SEQ ID NO: 21767 - DNA, 50 bp, Pseudomonas putida; identical to SEQ ID NO: 21762
  source 1..50: mol_type = genomic DNA

SEQ ID NO: 21768 - DNA, 40 bp, Pseudomonas putida
  source 1..40: mol_type = genomic DNA
gataggcatgtggttggtcttgaaatagatcccgaccatc

SEQ ID NO: 21769 - DNA, 40 bp, Pseudomonas putida; identical to SEQ ID NO: 21768
  source 1..40: mol_type = genomic DNA

SEQ ID NO: 21770 - DNA, 50 bp, Pseudomonas putida; identical to SEQ ID NO: 21765
  source 1..50: mol_type = genomic DNA

SEQ ID NO: 21771 - protein, 545 aa, Clostridium sporogenes
MIAAIYSRKSKFTEKGESVENQIEMCKDYLKRNFTSIEDIKIYEDEGFSGKDTNRPEFKKMMEDAKNKKFSILICYRLDRISRNVADFSNTIEELQKYSIDFISLKEQFDTSSPMGRAMMNIAAVFAQLERETIAERIKDNMLELAKTGRWLGGTAPLGYKSEVIEYWNEDGKNKKMYKLATAENEIDIVKLIYKLYFKKRGFSSVATHLCKNKYKGKNGGEFSRETVRQIVINPVYCTADNKIFKWFKSKGATVYGTPDGIHGLMVYNKREGGKKEKPISEWVIAIGKHAGIISSDIWLKCQNIIEENKSKISPRSGTGEKFLLSGMIICGECGSGMSSWSHFNKKTNFMERYYRCNLRNRASNRCSNKMLNAYKAEEYISDYLKELDIDTLKEKYLKNKKSMATYDSSKQELAKLKNVLEDNNKLIKGLIRKLALLDDDIEIVTMLKNEIENIKKENNEINNNINKIKSSLEESDRENKFLKELEQSLLNFKKFYDFVDTSEKRALIKSLISTLVWYSKDEILELNPIGIKPNISQGVIKRRT

SEQ ID NO: 21772 - DNA, 50 bp, Clostridium sporogenes
  source 1..50: mol_type = genomic DNA
acttgtgtttttgtagtggttgctgataaaactattacaaatacacaagt

SEQ ID NO: 21773 - DNA, 40 bp, Clostridium sporogenes
  source 1..40: mol_type = genomic DNA
ttccactggccaaggagctgataaaaccatgcaacaagtt

SEQ ID NO: 21774 - DNA, 40 bp, Clostridium sporogenes
  source 1..40: mol_type = genomic DNA
ttccactggccaaggagctaataaaaccatgcaacaagtt

SEQ ID NO: 21775 - DNA, 50 bp, Clostridium sporogenes
  source 1..50: mol_type = genomic DNA
ccttgtgattaataagtgctcgctaataaaagtaagtcctcttcacaaga

SEQ ID NO: 21776 - protein, 490 aa, Fusobacterium nucleatum
MINVVGYARYSSDNQREESIVAQERAIREFCQKNNYNLIKMYKDEAISGTSIKDRTEFLELIEDSKKREFQCVVVHKFDRFARNRYDHAIYEKKLNDNGVKLLSVLEQLNDSPESVILKSVLTGMNEYYSLNLSREVKKGLNENALNCIHNGGIPPLGYNLDEDRKYVINEIEAETVRIIYKLYIEGIGYASIAEQLNQMGRLNKLGKPFRKTSIRDILLNEKYTGVFVYGKKDGHGKLTGNEVKIEGGIPQIISKEDFEKIQIKMKNRKTGSRATAHETYYLTGVCTCGECGGRYSGGYRSRQRDGSITYGYTCINRKTKVNDCRNKPIRKEILEEFVFKTIKKEIFTEKRIKSIASKVEKSVNEKILKKAQEVKKLESEIQKIKDKIDRLLEIFLDNKISKEVFEKKNNELERELFLLTQEKNKISASKKINRENIEAFIRNFKANFNKENIKKAIIETFVKEIKVYETYVEIVLRLFPMYIDRNGGD

SEQ ID NO: 21777 - DNA, 50 bp, Fusobacterium nucleatum
  source 1..50: mol_type = genomic DNA
atgtatattgatagaaatggtggagatgaagaaataaaaattataaccat

SEQ ID NO: 21778 - DNA, 40 bp, Fusobacterium nucleatum
  source 1..40: mol_type = genomic DNA
atattgatattttggtggagatgacgagagtcgaactcgt

SEQ ID NO: 21779 - DNA, 40 bp, Fusobacterium nucleatum
  source 1..40: mol_type = genomic DNA
atattgatattttggtggaactgacgagagtcgaactcgt

SEQ ID NO: 21780 - DNA, 50 bp, Fusobacterium nucleatum
  source 1..50: mol_type = genomic DNA
atgtttgttttggaaaatagtggaactgaataaatgtttattgaatcaat

SEQ ID NO: 21781 - protein, 502 aa, Thermoclostridium stercorarium
MIAIYARQSVDKKDSISIESQIEFCKKEFEEGQAYKTYIDKGFSGKDTNRPAFENMMNDIRAGQIEKVIVYKLDRISRSTLDFANIINTFKKYNVEFISSTEKFDTSTPIGKAMLNIIMVFAELERETIQKRIKDNYYARGKKGFFLGGRVPFGFNKVETKVDGKKTSMFEPNPEQIPYVIEMYEMYANTNTSLGKISDYLNEKNVPAPNGGNWDSNKVSRILHNPVYVRADADVYQYYKNKGCIISNDISDFIGTNGCYLFGKREANERKYTKVENHVLALALHEGIIDSHTWLLCQYKLDSNKQIKNSGKGKHTWLTGVAKCGYCKYAVSVIKSSTGNYKYFNCRGKTNLKVCKGHSRPILVDEIENIVKEHIFEKINQLRNTSIDTQVEEDRNINRIKIQLIELDKQIENLINKIAEANEVTMKYINERLAKLDKEKTALLEELQKLTIENSKVISMNEIFEKVDNWENLSLEEKKEVCSNLINKVYIKDDEINIEWKI

SEQ ID NO: 21782 - DNA, 50 bp, Thermoclostridium stercorarium
  source 1..50: mol_type = genomic DNA
tattttacttttatatctaatcctgaaacattaaatataaaagtaaaaca

SEQ ID NO: 21783 - DNA, 40 bp, Thermoclostridium stercorarium
  source 1..40: mol_type = genomic DNA
cacaatccagtggagtattgattctctggactggaagccg

SEQ ID NO: 21784 - DNA, 40 bp, Thermoclostridium stercorarium
  source 1..40: mol_type = genomic DNA
cacaatccagtggagtattcattctctggactggaagccg

SEQ ID NO: 21785 - DNA, 50 bp, Thermoclostridium stercorarium
  source 1..50: mol_type = genomic DNA
tattttactatgaaaactaaggcacagagattagatacattggtcaaaca

SEQ ID NO: 21786 - protein, 501 aa, Clostridioides difficile
MNVAIYLRKSRADEEAEHRGEFETLSRHKTTLLKLAKEKNLNVINIKEELISGESIKYRPKMIELLDEVKNNDYDAVLVMDIDRLGRGNMQDQGLILDTFKKSKTKIITPRKIYDLNDEFDEEYSEFEAFMARKELKLISRRMQRGKIKSIEEGKFIAQAPPYGYDIKYLNNKERILIINEEKATVVKIIFDMYLKGGGACKISSYLNELGYKTTTGRTWYEKGVRDIIKNKVYCGYIVWNKVERKRNSSRTRGIEEQIEVKGKHEPIISEDIWNEAQNIRKKRSNSPTSNNKITNPLAGIVKCGYCNHTLVAKSNTTSSGHEKYMVCTNCKNKATKLYILENKILSVLNKWVIDYKLSLKEEKDSFKIKDNLENTLASLNKEFNNLEKQKERLHDFLEQGIYDSDTFLERSNILTSRIENIRKAINKTNINIEIEKERKIVETQVIPQLERILSEYTEEKEPYLKNILLKTVINYAVYKKEASQKSDDFSLTLYPNISRN

SEQ ID NO: 21787 - DNA, 50 bp, Clostridioides difficile
  source 1..50: mol_type = genomic DNA
tagtgttataattagactgattaccaaaaatcagtatgtttataacataa

SEQ ID NO: 21788 - DNA, 40 bp, Clostridioides difficile; identical to SEQ ID NO: 688
  source 1..40: mol_type = genomic DNA

SEQ ID NO: 21789 - DNA, 40 bp, Clostridioides difficile
  source 1..40: mol_type = genomic DNA
taatgtaagaactgatgtataatttggtgtaatggcagga

SEQ ID NO: 21790 - DNA, 50 bp, Clostridioides difficile
  source 1..50: mol_type = genomic DNA
tagtattatcagattaatgatttttaaaaatcactatgataataatgaaa

SEQ ID NO: 21791 - protein, 528 aa, Vibrio cholerae
MYTPQSLSEHYSQITTPQSEQPLAILYSRFSSRNQVGNDSINRQLEGAQKFCEYHNLKLSEANYSDLGISAYKDNVREGLELLLNAVRDGTIPANSWILCHTTCRLSRKGFQHVLKLVSELVATGCKFCTINDNQVYDSTNINKLSSALPLIISADLAFSESEKKSLMIKHAKEQTRKNRKIVGKQPYWITLQDGKPMLNDFSTIVKTIIDLRLKGYSAQRIAKQLNADGHLSPTGKSWGAAAIRKTIDNHVLYGAKEYSEMKDGKLVPVEIVEDLYPALCSKSIWLQIKYEKGTKEVGKRSKSSPFSKLLRCACCGSAMTTRSTYQKGVKYDYRVCIRSTEGSCDQKSRFRDLDNIILGELKHLKYEVKTHATVEVDSIKVFQDKLTLLNQTKELLQSNPTALAAIYADIAKTEQELHEAKRTKELLESQPNEVNFQAIVDVEDQSQRNILLRRIIESIEVKRIDKEKLVSQVRVVVRFKNSHTQTFVVCYRYRGYDIKWLTDTEKYKEQLNAFVNDAVKQLEEWEK

SEQ ID NO: 21792 - DNA, 50 bp, Vibrio cholerae
  source 1..50: mol_type = genomic DNA
gttaatacaatatggtccatactaaaagttttgtaccgtatttaattaat

SEQ ID NO: 21793 - DNA, 40 bp, Vibrio cholerae
  source 1..40: mol_type = genomic DNA
atttggttggcatgtggttaaagtgctttatcgcacttag

SEQ ID NO: 21794 - DNA, 40 bp, Vibrio cholerae
  source 1..40: mol_type = genomic DNA
atttggttggcatgtggttagagtgctttatcgcacttag

SEQ ID NO: 21795 - DNA, 50 bp, Vibrio cholerae; identical to SEQ ID NO: 4865
  source 1..50: mol_type = genomic DNA

SEQ ID NO: 21796 - protein, 528 aa, Vibrio vulnificus
MYTPQSLSEHYSQITTPQSEQPLAILYSRFSSRNQVGNDSINRQLEGAQKFCEYHNLKLSEANYSDLGISAYKDNVREGLELLLNAVRDGTIPANSWILCHTTCRLSRKGFQHVLKLVSELVATGCKFCTINDNQVYDLTNINKLSSALPLIISADLAFSESEKKSLMIKHAKEQTRKNRKIVGKQPYWITLQDGKPMLNDFSTIVKTIIDLRLKGYSAQRIAKQLNADGHLSPTGKSWGAAAIRKTIDNHVLYGAKEYSEMKDGKLVPVEIVEDLYPALCSKSIWLQIKYEKGTKEVGKRSKSSPFSKLLRCACCGSAMTTRSTYQKGVKYDYRVCIRSTEGSCDQKSRFRDLDNIILGELKHLKYEVKTHATVEVDSIKVFQDKLTLLNQTKELLQSNPTALAAIYADIAKTEQELHEAKRTKELLESQPNEVNFQAIVDVEDQSQRNVLLRRIIESIEVKRIDKEKLVSQVRVVVRFKNSHTQTFVVCYRYRGYDIKWLTDTEKYKEQLNAFVNDAIKQLEEWEQ

SEQ ID NO: 21797 - DNA, 50 bp, Vibrio vulnificus; identical to SEQ ID NO: 21792
  source 1..50: mol_type = genomic DNA

SEQ ID NO: 21798 - DNA, 40 bp, Vibrio vulnificus
  source 1..40: mol_type = genomic DNA
gttcggttggcacgtgttgaaggtactatacagaacctaa

SEQ ID NO: 21799 - DNA, 40 bp, Vibrio vulnificus
  source 1..40: mol_type = genomic DNA
gttcggttggcacgtgttgagggtactatacagaacctaa

SEQ ID NO: 21800 - DNA, 50 bp, Vibrio vulnificus; identical to SEQ ID NO: 4865
  source 1..50: mol_type = genomic DNA

SEQ ID NO: 21801 - protein, 528 aa, Vibrio parahaemolyticus
MYTPQSLSEHYSQITTPQTEQPLAILYSRFSSRNQVGNDSINRQLEGAQKFCEYHNLKLSEANYSDLGISAYKDNVREGLELLLNAVRDGTIPANSWILCHTTCRLSRKGFQHVLKLVSELVATGCKFCTINDNQVYDSTNINKLSSALPLIISADLAFSESEKKSLMIKHAKEQTRKNRKIVGKQPYWITLQDGKPMLNDFSTIVKTIIDLRLKGYSAQRIAKQLNADGHLSPTGKSWGAAAIRKTIDNHVLYGAKEYSEMKDGKLVPVEIVEDLYPALCSKSIWLQIKYEKGTKEVGKRSKSSPFSKLLRCACCGSAMTTRSTYQKGVKYDYRVCIRSTEGSCDQKSRFRDLDNIILGELKHLKYEVKTHATVEVDSIKVFQDKLTLLNQTKELLQSNPTALAAIYADIAKTEQELHEAKRTKELLESQPNEVNFQAIVDVEDQSQRNVLLRRIIESIEVKRIDKEKLVSQVRVVVRFKNSHTQTFVVCYRYRGYDIKWLTDTEKYKEQLNAFVNDAVKQLEEWEK

SEQ ID NO: 21802 - DNA, 50 bp, Vibrio parahaemolyticus
  source 1..50: mol_type = genomic DNA
gttaatacaatatggtccatacttaaagtcttgtaccgtatttaattaat

SEQ ID NO: 21803 - DNA, 40 bp, Vibrio parahaemolyticus; identical to SEQ ID NO: 4428
  source 1..40: mol_type = genomic DNA

SEQ ID NO: 21804 - DNA, 40 bp, Vibrio parahaemolyticus
  source 1..40: mol_type = genomic DNA
atttggctggcatgtggtcagggttctctacagaacatag

SEQ ID NO: 21805 - DNA, 50 bp, Vibrio parahaemolyticus; identical to SEQ ID NO: 4865
  source 1..50: mol_type = genomic DNA

SEQ ID NO: 21806 - protein, 528 aa, Vibrio parahaemolyticus
MYTPQSLSEHYSQITTPQSEQPLAILYSRFSSRNQVGNDSINRQLEGAQKFCEYHNLKLSEANYSDLGISAYKDNVREGLELLLNAVRDGTIPANSWILCHTTCRLSRKGFQHVLKLVSELVATGCKFCTINDNQVYDSTNINKLSSALPLIISADLAFSESEKKSLMIKHAKEQTRKNRKIVGKQPYWITLQDGKPMLNDFSTIVKTIIDLRLKGYSAQRIAKQLNADGHLSPTGKSWGAAAIRKTIDNHVLYGAKEYSEMKDGKLVPVEIVEDLYPALCDKSIWLQIKYEKGTKEVGKRSKSSPFSKLLRCACCGSAMTTRSTYQKGVKYDYRVCIRSTEGSCDQKSRFRDLDNIILGELKHLKYEVRTHATVEVDSIKVFQDKLTLLNQTKELLQSNPTALAAIYADIAKTEQELHEAKRTKELLESQPNEVNFQAIVDVEDQSQRNVLLRRIIESIEVKRIDKEKLVSQVRVVVRFKNSHTQTFVVCYRYRGYDIKWLTDTEKYKEQLNAFVNDAVKQLEEWEK

SEQ ID NO: 21807 - DNA, 50 bp, Vibrio parahaemolyticus; identical to SEQ ID NO: 21792
  source 1..50: mol_type = genomic DNA

SEQ ID NO: 21808 - DNA, 40 bp, Vibrio parahaemolyticus; identical to SEQ ID NO: 4428
  source 1..40: mol_type = genomic DNA

SEQ ID NO: 21809 - DNA, 40 bp, Vibrio parahaemolyticus; identical to SEQ ID NO: 21804
  source 1..40: mol_type = genomic DNA

SEQ ID NO: 21810 - DNA, 50 bp, Vibrio parahaemolyticus; identical to SEQ ID NO: 4865
  source 1..50: mol_type = genomic DNA

SEQ ID NO: 21811 - protein, 528 aa, Vibrio parahaemolyticus
MYTPQSLSEHYSQITTPQTEQPLAILYSRFSSRNQVGNDSINRQLEGALKFCEYHNLKLSEANYSDLGISAYKDNVREGLELLLNAVRDGTIPANSWILCHTTCRLSRKGFQHVLKLVSELVATGCKFCTINDNQVYDSTNINKLSSALPLIISADLAFSESEKKSLMIKHAKEQTRKNRKIVGKQPYWITLQDGKPVLNDFSTIVKTIIDLRLKGYSAQRIAKQLNADGHLSPTGKSWGAAAIRKTIDNHVLYGAKEYSEMKDGKLVPVEIVEDLYPALCSKSIWLQIKYEKGTKEVGKRSKSSPFSKLLRCACCGSAMTTRSTYQKGVKYDYRVCIRSTEGSCDQKSRFRDLDNIILGELKHLKYEVKTHATVEVDSIKVFQDKLTLLNQTKELLQSNPTALAAIYADIAKTEQELHEAKRTKELLESQPNEVNFQAIVDVEDQSQRNVLLRRIIESIEVKRIDKEKLVSQVRVVVRFKNSHTQTFVVCYRYRGYDIKWLTDTEKYKEQLNAFVNDAVKQLEEWER

SEQ ID NO: 21812 - DNA, 50 bp, Vibrio parahaemolyticus; identical to SEQ ID NO: 21792
  source 1..50: mol_type = genomic DNA

SEQ ID NO: 21813 - DNA, 40 bp, Vibrio parahaemolyticus; identical to SEQ ID NO: 4428
  source 1..40: mol_type = genomic DNA

SEQ ID NO: 21814 - DNA, 40 bp, Vibrio parahaemolyticus; identical to SEQ ID NO: 21804
  source 1..40: mol_type = genomic DNA

SEQ ID NO: 21815 - DNA, 50 bp, Vibrio parahaemolyticus; identical to SEQ ID NO: 4865
  source 1..50: mol_type = genomic DNA

SEQ ID NO: 21816 - protein, 502 aa, Enterobacter kobei
MTLAFSYARFSTKSQATGTSLERQLNASRVFCSERSLTLSPKGYHDLGVSGFKQVKRPELEQMLQAIQSGDIPSGSYILIEAIDRLSRKGISHTQDVLKQILQYKIKVAFVGEDAKTLNGQVLDEHSLNDLSSVILVALAADLAHKESVRKSKLVKAAKLIIRKKATEGHKVRGHTMFWIDWSDKKQDFVLNDRMKDVQTIIQLRREGQGPRKIAKTMNELGIKGPRGNLWNHMSVTIILKSPVLYGAYQTHQIIDGQKVPDVLLEDHYPALLTKEEYIKIQADSSKANKGRPSKANPFSGVLRCECGQAMMFSKRTNLDKNGDPLEYEYHYCIGSTEGRCKNKKRIRDLVPLLASIMDKLVINQTPKKNLNTELIKVTEQKIEKLNNMLVELDNPPISVLKTIQKLEQELDILLNTHIEEPVQADVKTLNSISDAQEYNQHLKRLVKNIVVYQMNGPKNLRIKVHKTDGHYQNFLVKDGKILFRSDTKAMKELIDEFNKAR

SEQ ID NO: 21817 - DNA, 50 bp, Enterobacter kobei
  source 1..50: mol_type = genomic DNA
tatgtcaataatgtaaaaaaatcccgggatatgtttccattattgacatg

SEQ ID NO: 21818 - DNA, 40 bp, Enterobacter kobei
  source 1..40: mol_type = genomic DNA
gatgccagcaaaaaagtcgcggaagatattggcaccgaga

SEQ ID NO: 21819 - DNA, 40 bp, Enterobacter kobei
  source 1..40: mol_type = genomic DNA
gatgccagcaaaaaagtcgtggaagatattggcaccgaga

SEQ ID NO: 21820 - DNA, 50 bp, Enterobacter kobei
  source 1..50: mol_type = genomic DNA
tatatcattcagaaaaaaaaatgctgttatatgtttctatcaatcccaag

SEQ ID NO: 21821 - protein, 507 aa, Bacillus safensis
MHFRKESVDEIIKYDDYPYKVYTRVSTDRDEQISSKENQIDVCRYWIEQHNYEWDDRSVLLDDGISGTVLEDRAAMKYIFSLAEKKEIKMVIFKSITRLARDLKDALYIREILVSNGVRVVTLEEDYDSLYESKASMKFEMSALFAEQLPKSMSVNISGVLAAKARRGEHSGRVPYGYTKDGKHLVINESEAQVIRMIFHLYNNEGLGQKRVTYALQEKCKIGEIPPPRTTRNWQLTTVQTILKNPIYCGVHIANRHTTIKVDGRKKFIRNPPEKWNVYEDFCPPIVSREEWEKANNKPTVNKKTKFTPWNELRQLLICGKCGSNMVIIQTSRAKKNGEKTYWKYVKCSNYRRSGPEGCVNHVPITYEEVRDLVIENLIEFSRDISHDYKKNAFEQKEKQIKSIKAELKSLEAKNKRLLELYLEDQMITKTEFQMKRNDIQAKIVKLEQSLFSLQQVHDEKSSMMEMQAVLRELEDKENDLKHVFDKLIDHIVIHPNGKMNFHYRFK

SEQ ID NO: 21822 - DNA, 50 bp, Bacillus safensis
  source 1..50: mol_type = genomic DNA
catttgtaaaaggtatgcataacaaatgctaagcataccttttacaaatt

SEQ ID NO: 21823 - DNA, 40 bp, Bacillus safensis; identical to SEQ ID NO: 20513
  source 1..40: mol_type = genomic DNA

SEQ ID NO: 21824 - DNA, 40 bp, Bacillus safensis
  source 1..40: mol_type = genomic DNA
tgttcgaaatcatatttcgagtgccatgcaaaagctagga

SEQ ID NO: 21825 - DNA, 50 bp, Bacillus safensis
  source 1..50: mol_type = genomic DNA
cctttgtgaaatcatggcataaagagagataagcatattaattacaattt

SEQ ID NO: 21826 - protein, 507 aa, Bacillus safensis
MYFKKSSVEEIIKYDDYPYKIYTRVSTDRDEQISSKENQIDVCRYWIEQHNYEWDDRSVLLDDGISGTVLEDRAAMKYIFSLAEKKEIKMVIFKSITRLARDLKDALYIREILVSNGVRVVTLEEDYDSLYESKASMKFEMSALFAEQLPKSMSVNISGVLAAKARRGEHSGRVPYGYKKEGKHLVINENEAQVIRLIFHLYNNEGLGQKRVTYALQEKCKLGEIPPPKKRSNWQLTTVQTILRNPIYCGVHIANRHTTIKVDGRKKFIRNPPEKWTVYEDFCPPIVSREDWEKANNKPTVNKKTKFTPWNELRQLLICGKCGSNMVIIQTSRAKQNGKKTYWKYVKCSNYRRAGQEGCVNHVPITYEEVRDLVIENLIEFSKDISHDYRKNAIEQKEKQMKSVKVELKSLETQNKRLLELYLEDQIISKAEFQTKRNEIQSNIIKLEQSLFSLQQVHDEKSSMMEMQAVLRELEDKEKDLKHVFDKLIDHIVIHPNGKMNFHYRFK

SEQ ID NO: 21827 - DNA, 50 bp, Bacillus safensis; identical to SEQ ID NO: 21822
  source 1..50: mol_type = genomic DNA

SEQ ID NO: 21828 - DNA, 40 bp, Bacillus safensis; identical to SEQ ID NO: 20513
  source 1..40: mol_type = genomic DNA

SEQ ID NO: 21829 - DNA, 40 bp, Bacillus safensis; identical to SEQ ID NO: 21824
  source 1..40: mol_type = genomic DNA

SEQ ID NO: 21830 - DNA, 50 bp, Bacillus safensis; identical to SEQ ID NO: 21825
  source 1..50: mol_type = genomic DNA

SEQ ID NO: 21831 - protein, 507 aa, Bacillus safensis
MYFKKSSVEEIIKYDDYPYKIYTRVSTDRDEQISSKENQIDVCRYWIEQHNYEWDDRSVLLDDGISGTVLEDRAAMKYIFSLAEKKEIKMVIFKSITRLARDLKDALYIREILVSNGVRVVTLEEDYDSLYESKASMKFEMSALFAEQLPKSMSVNISGVLAAKARRGEHSGRVPYGYMKEGKHLVINENEAQVIRLIFHLYNNEGLGHKRVTYALQEKCKLGEIPPPKKRSNWQLTTVQTILRNPIYCGVHIANRHTTIKVDGRKKFIRNPPEKWTVYEDFCPPIVSREDWEKANNKLTVNKKTKFTPWNELRQLLICGKCGSNMVIIQTSRAKKNGEKTYWKYVKCSNYRRAGQEGCVNHVPITYEEVRDLVIENLIEFSKDISHDYRKNAIEQKEKQMKSVKVELKSLETQNKRLLELYLEDQIISKAEFQTKRNEIQSNIIKLEQSLFSLQQVHDEKSSMMEMQAVLRELEDKEKDLKHVFDKLIDHIVIHPNGKMNFHYRFK

SEQ ID NO: 21832 - DNA, 50 bp, Bacillus safensis; identical to SEQ ID NO: 21822
  source 1..50: mol_type = genomic DNA

SEQ ID NO: 21833 - DNA, 40 bp, Bacillus safensis
  source 1..40: mol_type = genomic DNA
tgttcgaaatcacatttcgaatgccatgcaaaagctagga

SEQ ID NO: 21834 - DNA, 40 bp, Bacillus safensis
  source 1..40: mol_type = genomic DNA
tgttcgaaatcacatttcgagtgccatgcaaaagctagga

SEQ ID NO: 21835 - DNA, 50 bp, Bacillus safensis; identical to SEQ ID NO: 21825
  source 1..50: mol_type = genomic DNA

SEQ ID NO: 21836 - protein, 498 aa, Vibrio parahaemolyticus
MRLFSYIRFSTEKQIDGDSVDRQTNSAKKYASLHGYDFQNKSFSDLGISGFKNVDRDGLTSMLEAIQSGGISRGDLIFIENVDRLTRQGFQHANDLIVKIVNSGVLLHFERESVTFKSPSDLNDMMSLMKVCMSASLAFEESQKKSERIASAKQKQRNLMKQGIAVKHKTPHWIEFDETGKCFHLGNTKIIKRVIELRRDGFSVSKIISTMNKEGFKAPYGGTLRSSTVKQWLQSPALYGAVMVEDELIKDYYPALMSYDEATKLYNKLTNNKAPENQNNHLRGLIYCSKCDSAMGLRFTTSSGKSKKKIPTFYCIKQREGGCDAPSVSNIMPLIEKMVSHMKTIEHKVDVAAITARIDEISSNLERISKSVTTDNFKMMMDMMDKFEKEKRELQASLTISDDVDTDTLLSHIDNPVEFNNIARRYIDKIKVTFKGGTRRKRTFHFKLIQRNGHIVNLTRFGSGQITIGKTEILSTFGQPESEFGEEMTYLEELELVG

SEQ ID NO: 21837 - DNA, 50 bp, Vibrio parahaemolyticus
  source 1..50: mol_type = genomic DNA
tacagttacaagaattatttcacaaaagacaaatgtttctgttgattgtt

SEQ ID NO: 21838 - DNA, 40 bp, Vibrio parahaemolyticus
  source 1..40: mol_type = genomic DNA
acgtgtcgttctttacgtcaaagacaaatgccctcactgc

SEQ ID NO: 21839 - DNA, 40 bp, Vibrio parahaemolyticus
  source 1..40: mol_type = genomic DNA
acgtgtcgttctttacgtctaagacaaatgccctcactgc

SEQ ID NO: 21840 - DNA, 50 bp, Vibrio parahaemolyticus
  source 1..50: mol_type = genomic DNA
tagatttaaggacttattttaacataagaaaaatgaatatattgagtgtt

SEQ ID NO: 21841 - protein, 498 aa, Vibrio parahaemolyticus
MRLFSYIRFSTEKQIDGDSVDRQTNSAKKYAQLHGYDFQNKSFSDLGISGFKNVDRDGLTSMLEAIQSGGISRGDLIFIENVDRLTRQGFQHANDLIVKIVNSGVLLHFERESVTFKSPSDLNDMMSLMKVCMSASLAFEESQKKSERIASAKQKQRNLMKQGIAVKHKAPHWIEFDEDGKCFHFGNTKIIKRVIELRRDGFSVSKIISTMNKEGFKAPYGGTLRSSTVKQWLQSPALYGAVMVEDELIKDYYPALMSYDEATKLYNKLTHKRAPENQNNHLRGLIYCSKCDSAMGLRFTTSSGKSKKKIPTFYCIKQREGGCDAPSVSNIMPLIEKMVSHMKTIENKVDVAAITARIDEISSNLERISKSVTTDNFKMMMDMMDKFEKEKRELQASLTVNNDVDTASLLSHIDNPVEFNNIARRYIDRIKVTFKGGTRRKRTFHFKLIQRNGHIVNLTRFGSGQITIGKTEILSTFGKPESEFGEEMTYLEELEPVG

SEQ ID NO: 21842 - DNA, 50 bp, Vibrio parahaemolyticus
  source 1..50: mol_type = genomic DNA
tacagttacaagaattatttcacaaaagataaatgtttctgttgattgtt

SEQ ID NO: 21843 - DNA, 40 bp, Vibrio parahaemolyticus; identical to SEQ ID NO: 21838
  source 1..40: mol_type = genomic DNA

SEQ ID NO: 21844 - DNA, 40 bp, Vibrio parahaemolyticus; identical to SEQ ID NO: 21839
  source 1..40: mol_type = genomic DNA

SEQ ID NO: 21845 - DNA, 50 bp, Vibrio parahaemolyticus; identical to SEQ ID NO: 21840
  source 1..50: mol_type = genomic DNA

SEQ ID NO: 21846 - protein, 499 aa, Vibrio parahaemolyticus
MRLFSYIRFSTEKQIEGDSIDRQTNSAKKYASLHGYDFQNKSFSDLGISGFKNVDRDGLTSMLEAIQSGGISRGDLIFIENVDRLTRQGFQHANDLIVKIVNSGVLLHFERESVTFKSPSDLNDMMSLMKVCMSASLAFEESQKKSERIASAKQKQRNLMKQGIAVKHKAPHWIEFDETGKCFHFGNTKIIKRVIELRRDGFSVSKIISTMNKEGFKAPYGGTLRSSTVKQWLQSPALYGAVMVEDELIKDYYPALMSYDEATKLYNKLTNNRAPENQHNHLRGLIYCSKCDSAMGLRFTTSSGKSKKKIPTFYCIKQREGGCDAPSVSNIMPLIEKMVSHMKTIENKIDVAAITARIDEISANLERISKSVTTDNFKMMMDMIDKFEKEKRELQSNLTVNDDVDTASLLSHIDNPVEFNNIARRYIDKIKVTFKGGTRRKRTFHFKLIQRNGHIVNLTRFGSGQITIGKTEILSTFGKPESEFGEEITSPEDSEMFYE

SEQ ID NO: 21847 - DNA, 50 bp, Vibrio parahaemolyticus; identical to SEQ ID NO: 21842
  source 1..50: mol_type = genomic DNA

SEQ ID NO: 21848 - DNA, 40 bp, Vibrio parahaemolyticus; identical to SEQ ID NO: 21838
  source 1..40: mol_type = genomic DNA

SEQ ID NO: 21849 - DNA, 40 bp, Vibrio parahaemolyticus; identical to SEQ ID NO: 21839
  source 1..40: mol_type = genomic DNA

SEQ ID NO: 21850 - DNA, 50 bp, Vibrio parahaemolyticus; identical to SEQ ID NO: 21840
  source 1..50: mol_type = genomic DNA

SEQ ID NO: 21851 - protein, 498 aa, Vibrio parahaemolyticus
MRLFSYIRFSTEKQIDGDSVDRQTNSAKKYASLHGYDFQNKSFSDLGISGFKNVDRDGLTSMLEAIQSGSISRGDLIFIENVDRLTRQGFQHANDLIVKIVNSGVLLHFERESVTFKSPSDLNDMMSLMKVCMSASLAFEESQKKSERIASAKQKQRNLMKQGIAVKHKTPHWIEFDETGKCFHLGNTKIIKRVIELRRDGFSVSKIISTMNKEGFKAPYGGTLRSSTVKQWLQSPALYGAVMVEDELIKDYYPALMSYDEATKLYNKLTNNKAPENQNNHLRGLIYCSKCDSAMGLRFTTSSGKSKKKIPTFYCIKQREGGCDAPSVSNIMPLIEKMVSHMKTIEHKVDVAAITARIDEISSNLERISKSVTTDNFKMMMDMMDKFEKEKRELQASLTISDDVDTDTLLSHIDNPVEFNNIARRYIDKIKVTFKGGTRRKRTFHFKLIQRNGHIVNLTRFGSGQITIGKTEILSTFGQPESEFGEEMTYLEELELVG

SEQ ID NO: 21852 - DNA, 50 bp, Vibrio parahaemolyticus; identical to SEQ ID NO: 21837
  source 1..50: mol_type = genomic DNA

SEQ ID NO: 21853 - DNA, 40 bp, Vibrio parahaemolyticus; identical to SEQ ID NO: 21838
  source 1..40: mol_type = genomic DNA

SEQ ID NO: 21854 - DNA, 40 bp, Vibrio parahaemolyticus; identical to SEQ ID NO: 21839
  source 1..40: mol_type = genomic DNA

SEQ ID NO: 21855 - DNA, 50 bp, Vibrio parahaemolyticus; identical to SEQ ID NO: 21840
  source 1..50: mol_type = genomic DNA

SEQ ID NO: 21856 - protein, 507 aa, Escherichia coli
MKRVISYIRFSSEKQAKGDSLRRQSKMVTDWLKAHPEYYLDESLTFRDLGVSGFTGKHLKGGLGDFLTAIEKGLVKAGDTLLIESLDRLSRQNVDRASELLRNILRSGVDVVTLSDGEHYTKESLRDPLSLIKSILIMQRSHEESLRKSERIQAAWNRKKELISEGIKISKRCPAWLKLNDDRKSFSVIPEKVETVKRCFQLRLEGKSIWEIVRTLNDEDRQSMNQYKPGKFGQTSVQDLLKNRSVIGYFTPKGCEEIAGYYPAIIDETTFYKVQQLSHSRYGKRSVSDKPLSVNLFKGVIRCSECGHALIITGFSDTRNGIYRCPLRNENRCSAKGLSRKQTDGTLLTLLSRLDRFNSDTTNIIDMLRLHREHISSNIEKLVQLSLEIEDLNAITSKLKQLKGELSQVDADIEKETQRLKSIDVGCLSDCDLTTKAGRIEAQLIIKSAVKEVVLNTAKRRCKVTFHNGKLIDLPITETPSDNVTEAIQSLSEVTERGLIDVDEVII

SEQ ID NO: 21857 - DNA, 50 bp, Escherichia coli
  source 1..50: mol_type = genomic DNA
tagtgtatttagaccttgatgatttttgttatacacgtttaaatacacta

SEQ ID NO: 21858 - DNA, 40 bp, Escherichia coli; identical to SEQ ID NO: 5188
  source 1..40: mol_type = genomic DNA

SEQ ID NO: 21859 - DNA, 40 bp, Escherichia coli
  source 1..40: mol_type = genomic DNA
cggcgttaatcgggtgatttgagacagccgcccggttcat

SEQ ID NO: 21860 - DNA, 50 bp, Escherichia coli
  source 1..50: mol_type = genomic DNA
tattgtaattgcttcctagtgatttgtggtatacacatacacacacacaa

SEQ ID NO: 21861 - protein, 523 aa, Listeria welshimeri
MRLSNDDEREGESNSIMNQKKMLSKYASDHNLRKTTFYIDDGVSGTTFNRKGFQAMITDIEAGIVGTVVVKDMSRFGRDYLQVGMYTDIMFPEHDIHFIAINDGVDSEQGDNEFTPFRNIINEWYAKDTSKKIRAVFKAKGMTGAPLTTNPPYGYIKAPDNPTQWLIDDYSASIVRRMFQLTMEGYGPTQIAKKFQTEKILVPTHYAVSQGRKTNTAPSQSPYYWSDRTIAKLLEKPEYLGHTVNFRTTRKSYKDKRKIEREKKDWVIFENTHEAIIEQSVFDTVQELRKHKRRLTKQKELPLFSGLLFCADCGGKLYFCRGKSIARNQENYICSSYRRRTTECTSHYIRSVVLEEVVTNNLRKTMAYIQANGKSFFVDVLKGDQQTRKKEAQNQQKQLHDAQKRITELDAIFPQLYEDMVSGRINSERFDKLSSNYEEEQVLLKQQVMDISKEIQTELDVNVYIRELRKFVHKHVNFDSLTPELLHEMIDKIIVHEDKKIEVHYKFGLGELGNLVDEHIIKK

SEQ ID NO: 21862 - DNA, 50 bp, Listeria welshimeri
  source 1..50: mol_type = genomic DNA
atacttccttatgagcatctaccattaggcagtggctcataaggaagtaa

SEQ ID NO: 21863 - DNA, 40 bp, Listeria welshimeri
  source 1..40: mol_type = genomic DNA
aatgaaaaaacgcccaacgttatgggcgttttttcatttt

SEQ ID NO: 21864 - DNA, 40 bp, Listeria welshimeri
  source 1..40: mol_type = genomic DNA
aatgaaaaaacgcccaacgctatgggcgttttttcatttt

SEQ ID NO: 21865 - DNA, 50 bp, Listeria welshimeri
  source 1..50: mol_type = genomic DNA
atacttccttaactacatctacaactagacggtggaagacaagtaaatgg

SEQ ID NO: 21866 - protein, 547 aa, Vibrio parahaemolyticus
MRTAYSYVRLSSKKQIQGYGQERQWQAIQAAALAHGWELSEKTFSDLGVSGWKGANIETGALSQFLQCVEDGYIEKGSVLIVENVDRLSRAGVQRAVSLLMQLLASGISIYTFTDSKLYEPDSHNPLMDLMAWALSAQRAFEESERKSQMILNAKAKAREKARLTGEIITRRCPSWLRVNQDKTAFELIPERVETVRKIFDLYVNGYGTPRIGRLLTEEGRKPLTGRAWYPRSISRILQYRAVLGEYQPTLNGKPEGDAIKNYYPAIIDEDQFNEVQAVLKEGGAGKGRRGKEMRNYFAGLLRCSCGEGMHIVSSCVKGKRYYQLRCLQYRISCFGSSWNFYKLSSFVLFALRRLPILEVMGSQDNNNIKELNAKERELTFLLEDTRRQLDNTINAIAALGLNDQLQSKFRELKTSVTNIEKQLSNVKTELETSQGKLVIQKQDSEMLTGRFLELIDSTKDIDGRIKLNQVLRRYLSKIEMHADKKEEYRYIKIYRKDGDELVSIQCDHSLKGALFESKDDLETFELLPANDAKRNEISNTLLCTPK

SEQ ID NO: 21867 - DNA, 50 bp, Vibrio parahaemolyticus
  source 1..50: mol_type = genomic DNA
ttatgcctttaagaaaacataactaaggtattgtatcggttatgacataa

SEQ ID NO: 21868 - DNA, 40 bp, Vibrio parahaemolyticus; identical to SEQ ID NO: 4428
  source 1..40: mol_type = genomic DNA

SEQ ID NO: 21869 - DNA, 40 bp, Vibrio parahaemolyticus; identical to SEQ ID NO: 4884
  source 1..40: mol_type = genomic DNA

SEQ ID NO: 21870 - DNA, 50 bp, Vibrio parahaemolyticus; identical to SEQ ID NO: 4885
  source 1..50: mol_type = genomic DNA

SEQ ID NO: 21871 - protein, 547 aa, Vibrio parahaemolyticus; identical to SEQ ID NO: 21866

SEQ ID NO: 21872 - DNA, 50 bp, Vibrio parahaemolyticus; identical to SEQ ID NO: 21867
  source 1..50: mol_type = genomic DNA

SEQ ID NO: 21873 - DNA, 40 bp, Vibrio parahaemolyticus; identical to SEQ ID NO: 4863
  source 1..40: mol_type = genomic DNA

SEQ ID NO: 21874 - DNA, 40 bp, Vibrio parahaemolyticus; identical to SEQ ID NO: 4894
  source 1..40: mol_type = genomic DNA

SEQ ID NO: 21875 - DNA, 50 bp, Vibrio parahaemolyticus; identical to SEQ ID NO: 4885
  source 1..50: mol_type = genomic DNA

SEQ ID NO: 21876 - protein, 547 aa, Vibrio parahaemolyticus
MRTAYSYVRLSSKKQIQGYGQERQWQAIQAAALAHGWELSEKTFSDLGVSGWKGANIETGALSQFLQCVEDGYIEKGSVLIVENVDRLSRAGVQRAVSLLMQLLASGISIYTFTDSKLYEPDSHNPLMDLMAWALSAQRAFEESERKSQMILNAKAKAREKARLTGEIITRRCPSWLRVNQDKTAFELIPERVETVRKIFDLYVNGYGTPRIGRLLTEEGRKPLTGRAWYPRSISRILQYRAVLGEYQPTLNGKPEGDAIKNYYPAIIDEDQFNEVQAVLKEGGAGKGRRGKEMRNYFAGLLRCSCGEGMHIVSSCVKGKRYYQLRCLQYRISCFGSSWNFYKLSSFVLFALRRLPILEVMGSQDNNNIKELNAKERELTFLLEDTRRQLDNTINAIAALGLNDQLQSKFRELKTSVTNIEKQLSNVKTELETSQGKLVIQKQDSEMLTGRFLELIDSTKDIDGRIKLNQVLRRYLSKIEMHADKKEEYRYIKIYRKDGDELVSIQCDHSLKGALFENKDDLETFELLPANDAKRNEISNTLLCTPK

SEQ ID NO: 21877 - DNA, 50 bp, Vibrio parahaemolyticus; identical to SEQ ID NO: 21867
  source 1..50: mol_type = genomic DNA

SEQ ID NO: 21878 - DNA, 40 bp, Vibrio parahaemolyticus; identical to SEQ ID NO: 4428
  source 1..40: mol_type = genomic DNA

SEQ ID NO: 21879 - DNA, 40 bp, Vibrio parahaemolyticus; identical to SEQ ID NO: 4884
  source 1..40: mol_type = genomic DNA

SEQ ID NO: 21880 - DNA, 50 bp, Vibrio parahaemolyticus; identical to SEQ ID NO: 4885
  source 1..50: mol_type = genomic DNA

SEQ ID NO: 21881 - protein, 599 aa, Klebsiella aerogenes; identical to SEQ ID NO: 13786

SEQ ID NO: 21882 - DNA, 50 bp, Klebsiella aerogenes; identical to SEQ ID NO: 13777
  source 1..50: mol_type = genomic DNA

SEQ ID NO: 21883 - DNA, 40 bp, Klebsiella aerogenes
  source 1..40: mol_type = genomic DNA
ttagtgtaaagcataacgtctccgatctacacctgtgcag

SEQ ID NO: 21884 - DNA, 40 bp, Klebsiella aerogenes
  source 1..40: mol_type = genomic DNA
ttagtgtaaagcataacgtttccgatctacacctgtgcag

SEQ ID NO: 21885 - DNA, 50 bp, Klebsiella aerogenes
  source 1..50: mol_type = genomic DNA
caggtgtctgttgtgccttaatttttgctattgtagaggattctactatg

SEQ ID NO: 21886 - protein, 599 aa, Klebsiella oxytoca; identical to SEQ ID NO: 13786

SEQ ID NO: 21887 - DNA, 50 bp, Klebsiella oxytoca; identical to SEQ ID NO: 13777
  source 1..50: mol_type = genomic DNA

SEQ ID NO: 21888 - DNA, 40 bp, Klebsiella oxytoca
  source 1..40: mol_type = genomic DNA
ttagtgtaaagcataacgtctccgatctacacctgtgcaa

SEQ ID NO: 21889 - DNA, 40 bp, Klebsiella oxytoca
  source 1..40: mol_type = genomic DNA
ttagtgtaaagcataacgtttccgatctacacctgtgcaa

SEQ ID NO: 21890 - DNA, 50 bp, Klebsiella oxytoca; identical to SEQ ID NO: 21885
  source 1..50: mol_type = genomic DNA

SEQ ID NO: 21891 - protein, 599 aa, Klebsiella pneumoniae; identical to SEQ ID NO: 13786

SEQ ID NO: 21892 - DNA, 50 bp, Klebsiella pneumoniae; identical to SEQ ID NO: 13777
  source 1..50: mol_type = genomic DNA

SEQ ID NO: 21893 - DNA, 40 bp, Klebsiella pneumoniae
  source 1..40: mol_type = genomic DNA
ttagtgtaaagcataatgtctctgatctacacctgtgcaa

SEQ ID NO: 21894 - DNA, 40 bp, Klebsiella pneumoniae
  source 1..40: mol_type = genomic DNA
ttagtgtaaagcataatgtttctgatctacacctgtgcaa

SEQ ID NO: 21895 - DNA, 50 bp, Klebsiella pneumoniae; identical to SEQ ID NO: 21885
  source 1..50: mol_type = genomic DNA

SEQ ID NO: 21896 - protein, 473 aa, Draconibacterium sediminis
MSKKIGVIYGRVSSEDQDYTRQVEELTKWAVALDIEVSKVFAEKISGSRTEAKERPQYMEMLRYIEENSIKHILCHEVSRLGRNNKEVVDFFESTVANKICLYIKKDNLITLDEHGKKTSIATLTINILSALGEMEAEQLSTRIQSGKLSAAKQGGDFNGKIYGYDSVDKRPQVNEVQAENVRTIFNMLAKGIGSRSIAAHLNANVGDKKWTPAAVHSIARNSFFKGERKYKDIIIPVPSIVSSELWQKANDSIDSKKQYAGNNTVNVNLLQGLIKCKKCGSTMHQVVNPSQRANLYKCSNGCKTQINRPWLYFVVRQHVEEYAKASKDADKRKQLQTDKELKQAEIVVLKADIEKVKKRLSALLDVYLDGDISKENYHEKKDSLESQINAINTKIFDYEGFIRSVDNTLSSDISHFSTDEEVFKSELASILEHVLVWEGMVEIQIKGWFKFLFRKRNGAEIGWMIRNGEFRL

SEQ ID NO: 21897 - DNA, 50 bp, Draconibacterium sediminis
  source 1..50: mol_type = genomic DNA
tgcaacatataaaataatgtaaataaagatgtgaaaaataatataaagca

SEQ ID NO: 21898 - DNA, 40 bp, Draconibacterium sediminis
  source 1..40: mol_type = genomic DNA
tgcttacgaccgtattttaaaagtttcgcgcaccattgcc

SEQ ID NO: 21899 - DNA, 40 bp, Draconibacterium sediminis; identical to SEQ ID NO: 21898
  source 1..40: mol_type = genomic DNA

SEQ ID NO: 21900 - DNA, 50 bp, Draconibacterium sediminis
  source 1..50: mol_type = genomic DNA
ttcataataaatgaaaatgtaaataaaaaattaaaatttataataaagca

SEQ ID NO: 21901 - protein, 452 aa, Listeria monocytogenes
MKAAIYIRVSTQEQIENYSIQAQTEKLTALCRSKDWDVYDIFIDGGYSGSNMNRPALNEMLSKLHEIDAVVVYRLDRLSRSQKDTITLIEEYFLKNNVEFVSLSETLDTSSPFGRAMIGILSVFAQLERETIRDRMVMGKIKRIEAGLPLTTAKGRTFGYDVIDTKLYINEEEAKQLRLIYDIFEEEQSITFLQKRLKKLGFKVRTYNRYNNWLTNDLYCGYVSYKDKVHVKGIHEPIISEEQFYRVQEIFSRMGKNPNMNKESASLLNNLVVCSKCGLGFVHRRKDTVSRGKKYHYRYYSCKTYKHTHELEKCGNKIWRADKLEELIIDRVNNYSFASRNVDKEDELDYLNEKLKIEHAKKKRLFDLYINGSYEVSELDAMMADIDAQINYYEAQIEANEELKKNKKIQENLADLATVDFDSLEFREKQLYLKSLINKIYIDDEQVTIEWL

SEQ ID NO: 21902 - DNA, 50 bp, Listeria monocytogenes
  source 1..50: mol_type = genomic DNA
tttagtttctcatttcctctcactggagggagaagaaacgggataccaaa

SEQ ID NO: 21903 - DNA, 40 bp, Listeria monocytogenes; identical to SEQ ID NO: 1298
  source 1..40: mol_type = genomic DNA

SEQ ID NO: 21904 - DNA, 40 bp, Listeria monocytogenes; identical to SEQ ID NO: 1299
  source 1..40: mol_type = genomic DNA

SEQ ID NO: 21905 - DNA, 50 bp, Listeria monocytogenes
  source 1..50: mol_type = genomic DNA
gtttgttactattttgctctctgggaagggagaagagggatgctaccata

SEQ ID NO: 21906 - protein, 452 aa, Listeria monocytogenes
MKAAIYIRVSTQEQIENYSIQAQTEKLTALCRSKDWDVYDIFIDGGYSGSNMNRPALNEMLSKLHEIDAVVVYRLDRLSRSQRDTITLIEEYFLKNNVEFVSLSETLDTSSPFGRAMIGILSVFAQLERETIRDRMVMGKIKRIEAGLPLTTAKGRTFGYDVIDTKLYINEEEAKQLQMIYDIFEEEKSITTLQKRLKKLGFKVKSYSSYNNWLTNDLYCGYVSYADKVHTKGVHEPIISEEQFYRVQEIFSRMGKNPNMNRDSASLLNNLVVCGKCGLGYVHRRKDTVSRGKKYHYRYYSCKTYKHTHELEKCGNKIWRADKLEELIIDRVNNYSFASRNVDKEDELDNLNEKLKTEHTKKKRLFDLYISGSYEVSELDAMMADIDAQINYYEAQIEANEELKKNKKIQENLADLATVDFDSLEFREKQLYLKSLINKIYIDGEQVTIEWL

SEQ ID NO: 21907 - DNA, 50 bp, Listeria monocytogenes
  source 1..50: mol_type = genomic DNA
tttagttcctcgtttcctctcgttggagggagaagaaacgggataccaaa

SEQ ID NO: 21908 - DNA, 40 bp, Listeria monocytogenes; identical to SEQ ID NO: 1298
  source 1..40: mol_type = genomic DNA

SEQ ID NO: 21909 - DNA, 40 bp, Listeria monocytogenes; identical to SEQ ID NO: 1299
  source 1..40: mol_type = genomic DNA

SEQ ID NO: 21910 - DNA, 50 bp, Listeria monocytogenes; identical to SEQ ID NO: 21905
  source 1..50: mol_type = genomic DNA

SEQ ID NO: 21911 - protein, 452 aa, Listeria monocytogenes
MKAAIYIRVSTQEQVENYSIQAQTEKLTALCRSKDWDVYDIFIDGGYSGSNMNRPALNEMLSKLHEIDAVVVYRLDRLSRSQRDTITLIEEYFLKNNVEFVSLSETLDTSSPFGRAMIGILSVFAQLERETIRDRMVMGKIKRIEAGLPLTTAKGRTFGYDVIDTKLYINEEEAKQLQLIYDIFEEEQSITFLQKRLKKLGFKVRTYNRYNNWLTNDLYCGYVSYKDKVHVKGIHEPIISEEQFYRVQEIFARMGKNPNMNRDSASLLNNLVVCGKCGLGFVHRRKDTVSRGKKYHYRYYSCKTYKHTHELEKCGNKIWRADKLEELIIDRVNNYSFASRNVDKEDELDSLSEKLKIEHVKKKRLFDLYISGSYEVSELDAMMADIDAQINYYEAQIEANEELKKNKQIQENLADLATVDFDSLEFREKQLYLKSLINKIYIDGEQVTIEWL

SEQ ID NO: 21912 - DNA, 50 bp, Listeria monocytogenes
  source 1..50: mol_type = genomic DNA
tttagttcctcgttttctctcgttggagggagaagaaacgggataccaaa

SEQ ID NO: 21913 - DNA, 40 bp, Listeria monocytogenes; identical to SEQ ID NO: 7733
  source 1..40: mol_type = genomic DNA

SEQ ID NO: 21914 - DNA, 40 bp, Listeria monocytogenes; identical to SEQ ID NO: 7734
  source 1..40: mol_type = genomic DNA

SEQ ID NO: 21915 - DNA, 50 bp, Listeria monocytogenes; identical to SEQ ID NO: 21905
  source 1..50: mol_type = genomic DNA

SEQ ID NO: 21916 - protein, 452 aa, Listeria monocytogenes
MKAAIYIRVSTQEQIENYSIQAQTEKLTALCRSKDWDVYDIFIDGGYSGSNMNRPALNEMLSKLHEIDAVVVYRLDRLSRSQRDTITLIEEYFLKNNVEFVSLSETLDTSSPFGRAMIGILSVFAQLERETIRDRMVMGKIKRIEAGLPLTTAKGRTFGYDVIDTKLYINEEEAKQLRLIYDIFEEEQSITFLQKRLKKLGFKVRTYNRYNNWLTNDLYCGYVSYKDKVHVKGIHEPIISEEQFYRVQEIFARMGKNPNMNRDSASLLNNLVVCGKCGLGFVHRRKDTVSRGKKYHYRYYSCKTYKHTHELEKCGNKIWRADKLEELIIDRVNNYSFASRNVDKEDELDSLSEKLKIEHVKKKRLFDLYISGSYEVSELDAMMADIDAQINYYEAQIEANEELKKNKQIQENLADLATVDFDSLEFREKQLYLKSLINKIYIDGEQVTIEWL

SEQ ID NO: 21917 - DNA, 50 bp, Listeria monocytogenes; identical to SEQ ID NO: 21912
  source 1..50: mol_type = genomic DNA

SEQ ID NO: 21918 - DNA, 40 bp, Listeria monocytogenes; identical to SEQ ID NO: 1298
  source 1..40: mol_type = genomic DNA

SEQ ID NO: 21919 - DNA, 40 bp, Listeria monocytogenes; identical to SEQ ID NO: 1299
  source 1..40: mol_type = genomic DNA

SEQ ID NO: 21920 - DNA, 50 bp, Listeria monocytogenes; identical to SEQ ID NO: 21905
  source 1..50: mol_type = genomic DNA

SEQ ID NO: 21921 - protein, 533 aa, Vibrio parahaemolyticus
MSAKKYLIQYHRVSDPSQLKASGMQQQKAPDELIQNLCTEYDLEVYPKVFDDRGHSAFKDAGERKGYGELLKLLEDDIHPDSVLVVLNQDRLSRQGVFDAQSELMGILRKCRIYVMHDNRLLDRNSDNIMGDLILSLANAQRAFSESDAKSKRVKAAIRIAIQKHNAGHRGKNGKPLVLPIGSLPWWFKKVGNEVYLDEPIVVAVKDAITKLIDGEAPLRVKQYLDQTYTPPARLGRGKVDGWSIDAIKKLHTYEQLIGKLVLNLQDGNQEVKDYLEPIISEKTYYQLVNARTQKRARRETKSHSVHIFTGYGKAHCRGCGGTMSSTINNGVLKIRCSNGLNKRIKCDAPVNLVGNGFKDFMVNEVLKNLGSKSVEGTDSNVPVIEAKITSARNQLNELVELFDELPSRALAEKLQGKELELDQLLEELHQEKVVAVAPHWEPITEVPTGDVELRKAFETLLNGMKFYRHSDGSVVITVTTTVDVNFSFALRRGKLVKQGYITGTSDGELSLRDDQEFHRYVLDGSFDRWLSE

SEQ ID NO: 21922 - DNA, 50 bp, Vibrio parahaemolyticus
  source 1..50: mol_type = genomic DNA
aaagtacactaagatgctaacagtgcactattaactcgtagttgcacata

SEQ ID NO: 21923 - DNA, 40 bp, Vibrio parahaemolyticus
  source 1..40: mol_type = genomic DNA
caggacagccttactactggcatccagattggctacacgt

SEQ ID NO: 21924 - DNA, 40 bp, Vibrio parahaemolyticus
  source 1..40: mol_type = genomic DNA
caggacagccttactactgtcatccagattggctacacgt

SEQ ID NO: 21925 - DNA, 50 bp, Vibrio parahaemolyticus
  source 1..50: mol_type = genomic DNA
aaagaaaaaaagaatgctgttagttcactattaactaaactttttacatc

SEQ ID NO: 21926 - protein, 506 aa, Bacillus toyonensis
MLIKTVAIYNRISRDNGESEDVLLNHRTINTRLCESKGYQYKLYEEIESGGKFEERKILLQLLRDIAQGLYDGLVVVELSRIARDNLYSQMIAKVLEDNNVPIITPNRIYNLSDESDRLMYDMESMISSKELRTITRRMRSGKLEGVRRGEWVQGIPPFGYKRGDNKKLIIVESEANLVRQIFNYAENGYGVPNIASKLKGYKTRAGNSFTDTAVYAILNNKTYMGSIIYNVKDKKGNITENIVARNAHEAIITREQFNSVQQAIKGRMSGDMETRNRSRGIVISMLKDLVYCKKCGLKIKFRKDSKQRNAVYITACKCGNRGIAEHQLLKSFMNKFYFLQGFYHKEWEKALHTPQTVSKGVLVQQVEELDKTRNKLSMRLSKAKEAYLDGVFNKEEYLTTKDATENELKKISTAIGDLLQDIESMDKESLASQFESKMKKIEQFYKIYNKEDSHQHLAECNRILKLIINKVHYERVNERITITSPLEGYMEVEQGDFVDLSIDSK

SEQ ID NO: 21927 - DNA, 50 bp, Bacillus toyonensis
  source 1..50: mol_type = genomic DNA
caacacctcataaaaaaaatcatatgtatgtatttttttacaagcggtca

SEQ ID NO: 21928 - DNA, 40 bp, Bacillus toyonensis; identical to SEQ ID NO: 858
  source 1..40: mol_type = genomic DNA

SEQ ID NO: 21929 - DNA, 40 bp, Bacillus toyonensis
  source 1..40: mol_type = genomic DNA
gacctcctctcatcccataggtatgaaaaaagagcttgta

SEQ ID NO: 21930 - DNA, 50 bp, Bacillus toyonensis
  source 1..50: mol_type = genomic DNA
caagacctttctacaaaaatcacaggcctgtacttttttcaaaagtgtca

SEQ ID NO: 21931 - protein, 665 aa, Vibrio parahaemolyticus
MIKNDESAMRIPKIHVYARVSTLGQVESGLSLGLQTDNDMINEYCQRYGAELGKVYSDHGRSAFHQKNLAGKLGDFLTDMADKNNLDVQAGDYLLVRALDRISRANLDDAFWLYLQIMRSGVSILTTMDNREYKPNDSVSQILATLSFDLAGEESRKKQAITLAAMRKRIKQYQTGERAPCGNPYNVSTGLPFYAYAKDNVCYIDDQKFQLAKDICQMALDGKGNVTCRDYLRKHGVDLNVDSVASVFKSECLYGDRKVTLLDLDATNRHPEKKKVYSTFILKDYFPAACTKDEFHRIRAIKDSYKIHDNRRVSYSILGGISRLYCKDTVAIGSRENGGIYKCSSPECACGFYARQQLLDHIVLSCLSEHQIVPVEPDKKTIESIQQQIGAYQHQLSTLKKIMFDNPLAFDLADQDRLSELSARIQELNTQLTIEEENQAHSSSFISLEDVQNWREKKEAYINGSDENKLEAREVVQRLVKEIRIVEDTVTIKTIDNKVHWYYIPTPSNRRKKAYVKLLVNDHAQNMRSINEALDKVCFTEEDIKNSKHHYPLEAYAPDLVTVAIKAPPKEKDEFELLLETVTEPFVFKRRVLLSMGLSANQYQRHASIEKAIKRGFHAVSVEYTSKNYKYPTDIIVSPREITTDDIQRLLSIRKISKIVHLSDN

SEQ ID NO: 21932 - DNA, 50 bp, Vibrio parahaemolyticus
  source 1..50: mol_type = genomic DNA
gtgatgatttaagcttgataagtattacctaactgaagtttaatcatgct

SEQ ID NO: 21933 - DNA, 40 bp, Vibrio parahaemolyticus
  source 1..40: mol_type = genomic DNA
tttagcagcgcgctcaacgttaacggcgcttccttcttcg

SEQ ID NO: 21934 - DNA, 40 bp, Vibrio parahaemolyticus
  source 1..40: mol_type = genomic DNA
tttagcagcgcgctcaacggaaacggcgcttccttcttcg

SEQ ID NO: 21935 - DNA, 50 bp, Vibrio parahaemolyticus
  source 1..50: mol_type = genomic DNA
gtgttgtttctcttgtgataactagaacataaatataaataaatcatgtt

SEQ ID NO: 21936 - protein, 648 aa, Elizabethkingia anophelis
MLGIYARISREKEEGKDRSINDQVLSGKELAAKLGLKYEVYIDEGLSGTLDIEERPGLMQLIEDILSKKITHTFAYDQSRLERNKDVWSKLYTIFQDKKVKLSFKDVLEFDFESDENYLFSHITSLMNNFYTKVASRKIKSVLSRNIQEGKAHAIPPYGYRKNNEGYLIIDEIEKDVVKQIYESSLKGNGVDSIAYALNEKSVPTRYNKINTGTYTVRNKYTGEEKKLEKSKTKWRGGTIRNIIINPIYKGSRIWKGQSYNVPAIISPEYWDKVNSNLSKNANNTGKKVLHRYLLKGVLSCGKCGRNMVGRSRTNKKDHYYQCSSKRYKGESCGNRSINIDKIEGIIWSRFFKGNDLLNLLQNDLIKDDKKIEVLNKDLQALQKKIEKQKKEKANLINAVAKGLFSDEEITTSKKQIDNKIKETEILINDIESQIDNAKNSDKLINNYITEFEHYTDNMSFLQKKEIINKYIKSISVLSHSNNTNIYTLIIRFKINLKDEHYIYGKSDNFLLSLTSMEVINSKFFSPNTSDVISATDVNVLKRIYIHPDTYEIKTPPYKYVDGNILFSLNSVVPYYTYPSNDVHWTKESICDFYEKHPDYLCKESGVSIISKDESQKYYEDMKYDYQKFKDKPLIEWLEFIENRSKSS

SEQ ID NO: 21937 - DNA, 50 bp, Elizabethkingia anophelis
  source 1..50: mol_type = genomic DNA
acccccatattcaaaataattactgatattattgtttagaatgtaaccat

SEQ ID NO: 21938 - DNA, 40 bp, Elizabethkingia anophelis
  source 1..40: mol_type = genomic DNA
tcctcaccacacaatatcagatgtcgctctggtgggcgga

SEQ ID NO: 21939 - DNA, 40 bp, Elizabethkingia anophelis
  source 1..40: mol_type = genomic DNA
tcctcaccacacaatatcaattgtcgctctggtgggcgga

SEQ ID NO: 21940 - DNA, 50 bp, Elizabethkingia anophelis
  source 1..50: mol_type = genomic DNA
agcctcataataacaattattattattattattattattattattattat

SEQ ID NO: 21941 - protein, 504 aa, Klebsiella quasipneumoniae
MTLAFSYVRFSTKHQASGTSLERQVNASKLFCSQNGLTLSNQSYHDLGISGFKNVRRPELEQMLEAIQTGDIPSGSYILIEAIDRLSRKGISHTQDILKKILQYDVKVAFVGEDAKTLQGHILNKDSLNDLSSVILVALAADLAHKESLRKSKLVKASKAIARDKAADGEILPGKSVFYLDYDKKNKKYVFNKRVDLARKIVQMRLEGKGPRKIARLLNEENIPGPTGKEWYQMSVKRLLKSPVLYGAYQTHQIIEQKYIPVSLIEGYYPALIDYQVFSQIQFDDKRASKGRPSRHKFSGVLYCECGSVLCRKVNTYETKQGPKEYQYFNCFGAMEKRCNNSKAIKDLHVYLEKAIDKLQIKTRSVKNIKNEQIIAKREKIDQLNKMLLELDTPPVSVLKTISTLEKELQELLEQPEVHAPKTEDVKTLVAITDSEQYNLYLKRLVKRITIYQLNGPKNIRIKIEKTDGHYQSFVVNNGKIMFNADTKALQEHLHKLKEGTSDE

SEQ ID NO: 21942 - DNA, 50 bp, Klebsiella quasipneumoniae; identical to SEQ ID NO: 19057
  source 1..50: mol_type = genomic DNA

SEQ ID NO: 21943 - DNA, 40 bp, Klebsiella quasipneumoniae
  source 1..40: mol_type = genomic DNA
ccctgacagaaatgtgccgcaggtaatagttctttcatat

SEQ ID NO: 21944 - DNA, 40 bp, Klebsiella quasipneumoniae
  source 1..40: mol_type = genomic DNA
ccctgacagaaatgtgccgatggtaatagttctttcatat

SEQ ID NO: 21945 - DNA, 50 bp, Klebsiella quasipneumoniae
  source 1..50: mol_type = genomic DNA
ctttttcaaaaaactacttttattatggaaatataaaatatatacaaaag

SEQ ID NO: 21946 - protein, 615 aa, Escherichia coli; identical to SEQ ID NO: 15441

SEQ ID NO: 21947 - DNA, 50 bp, Escherichia coli; identical to SEQ ID NO: 2497
  source 1..50: mol_type = genomic DNA

SEQ ID NO: 21948 - DNA, 40 bp, Escherichia coli; identical to SEQ ID NO: 1288
  source 1..40: mol_type = genomic DNA

SEQ ID NO: 21949 - DNA, 40 bp, Escherichia coli
  source 1..40: mol_type = genomic DNA
tttttgcatgataatcataacaataggtgccattacagca

SEQ ID NO: 21950 - DNA, 50 bp, Escherichia coli; identical to SEQ ID NO: 4915
  source 1..50: mol_type = genomic DNA

SEQ ID NO: 21951 - protein, 615 aa, Shigella flexneri
MLIQTKIRRSPMKKVFVYHRVSSDQQLDGSGIARQAELLEGYLERTGICAEMDDPAPVVLSDQGVSAFKGLNISEGELGAWMEQVRNGMWDSSILVVESIDRFSRQNPFDVMGYINALMAHNVAIHDVMANIVISRSNSKDLPFVMMNAQRAYDESKYKSDRIRKGWAKKREQAFNKGTIVTNKRPQWIEVENDKYVVNEKAAVVKEIFALYQTGMGCPTIAKQLQRKEGEQYKFNRPWTGELVHKILTNRRVTGKIFISEIIRNHDDIENPVTQKKYDMDVYPVVINEEEFELVQELLKSRRPNAGRVTVKKDGQEEVLIKSNLFSGIARCTECGGPMYHNVVRAKRTPKKGDPKIEEYRYIRCLNERDGLCENKAMTYETVERFVVEHLLGMDLSTVMKEQEFNPEIEVLRIQIDQVKDQITNYENGIERRKSVGKPISFDMREELDDAKSELERLLARQASLATVQVDVPVLQDVNVTELYDVNNVDIRTRYESELNKIVSNIRLKRNGTSYTIDINYKQNELKRHVLFVENKKKEQTLISEVIIEDVDGAKFYYTPSFMIMLKDSDIRFQQTNEDLSIIDYSLLLNYIDAVDRNDAVGVWMRDQFKFLTSN

SEQ ID NO: 21952 - DNA, 50 bp, Shigella flexneri; identical to SEQ ID NO: 2497
  source 1..50: mol_type = genomic DNA

SEQ ID NO: 21953 - DNA, 40 bp, Shigella flexneri; identical to SEQ ID NO: 1288
  source 1..40: mol_type = genomic DNA

SEQ ID NO: 21954 - DNA, 40 bp, Shigella flexneri; identical to SEQ ID NO: 21949
  source 1..40: mol_type = genomic DNA

SEQ ID NO: 21955 - DNA, 50 bp, Shigella flexneri; identical to SEQ ID NO: 4915
  source 1..50: mol_type = genomic DNA

SEQ ID NO: 21956 - protein, 615 aa, Cronobacter dublinensis
MLVQTKIRRSPMKKVFVYHRVSSDQQLDGSGIARQAELLEGYLERTGICAEMDDPAPVVLSDQGVSAFKGLNISEGELGAWMEQVRNGMWDSSILVVESIDRFSRQNPFDVMGYINALMAHNVAIHDVMANIVISRSNSKDLPFVMMNAQRAYDESKYKSDRIRKGWAKKREQAFNKGTIVTNKRPQWIEVENDKYVVNEKAAVVKEIFALYQTGMGCPTIAKQLQRKEGEQYKFNRPWTGELVHKILTNRRVTGKIFISEIIRNHDDIENPVTQKKYDMDVYPVVINEEEFELVQELLKSRRPNAGRVTVKKDGQEEVLIKSNLFSGIARCTECGGPMYHNVVRAKRTPKKGDPKIEEYRYIRCLNERDGLCENKAMTYETVERFVVEHLLGMDLSTVMKEQEFNPEIEVLRIQIDQVKDQITNYENGIERRKSAGKPISFDMREELDDAKSELERLLARQASLATVQVDVPVLQDVNVTELYDVNNVDIRTRYESELNKIVSNIRLKRNGTSYTIDINYKQNELKRHVLFVENKKKEQTLISEVIIEDVDGAKFYYTPSFMIMLKDSDIRFQQTNEDLSIIDYSLLLNYIDAVDRNDAVGVWMRDQFKFLTSN

SEQ ID NO: 21957 - DNA, 50 bp, Cronobacter dublinensis; identical to SEQ ID NO: 12032
  source 1..50: mol_type = genomic DNA

SEQ ID NO: 21958 - DNA, 40 bp, Cronobacter dublinensis
  source 1..40: mol_type = genomic DNA
ttttcgcttgataatcatacaaataagtgccattacaaca

SEQ ID NO: 21959 - DNA, 40 bp, Cronobacter dublinensis
  source 1..40: mol_type = genomic DNA
ttttcgcttgataatcataacaataagtgccattacaaca

SEQ ID NO: 21960 - DNA, 50 bp, Cronobacter dublinensis; identical to SEQ ID NO: 4915
  source 1..50: mol_type = genomic DNA

SEQ ID NO: 21961 - protein, 615 aa, Klebsiella variicola
MLIQTKNRRLHMKKVFVYHRVSSDQQLDGSGIARQAELLEGYLERTGICAEMDDPAPVVLSDQGVSAFKGLNISEGELGAWMEQVRNGMWDSSILVVESIDRFSRQNPFDVMGYINALMAHNVAIHDVMANIVISRSNSKDLPFVMMNAQRAYDESKYKSDRIRKGWAKKREHAFNKGTIVTNKRPQWIEVENDKYVLNHKAAVVKEIFALYQTGMGCPTIAKQLQTKEGEQYKFNRPWTGELVHKILTNRRVTGKIFISEIIRNHDDIENPVTQKKYDMDVYPVVINEEEFELVQELLRSRRPNAGRVTVKKDGQEEVLIKSNLFSGIARCTECGGPMYHNVVRAKRTPKKGDPKIEEYRYIRCLNERDGLCENKAMTYETVERFVVEHLLGMDLSTVIKEHEFNPEIEVLRIQIDQVKDQITNYENGIERRKSAGKPISFDMREELDDAKSALERLLARQASLATVQVDVPVLQDVNVTELYDVNNVDIRTRYENELNKIVSNIRLKRNGTSYTIDINYKQNELKRHVLFVENKKKEQTLISEVIIEDVDGGKFYYTPSFMIRLKDGEIRFQQTNEDLSIVDYSLLLNYVDAIDRNDAVGVWMRNQFNFLTSN

SEQ ID NO: 21962 - DNA, 50 bp, Klebsiella variicola; identical to SEQ ID NO: 2497
  source 1..50: mol_type = genomic DNA

SEQ ID NO: 21963 - DNA, 40 bp, Klebsiella variicola; identical to SEQ ID NO: 20913
  source 1..40: mol_type = genomic DNA

SEQ ID NO: 21964 - DNA, 40 bp, Klebsiella variicola
  source 1..40: mol_type = genomic DNA
cttttgcgtgataatcataacaataagtgccattacaaca

SEQ ID NO: 21965 - DNA, 50 bp, Klebsiella variicola; identical to SEQ ID NO: 4915
  source 1..50: mol_type = genomic DNA

SEQ ID NO: 21966 - protein, 478 aa, Streptococcus suis
MKTTNKVAIYVRVSTTSQAEEGYSIDEQLFSLRKYCEAMNWQVYHEYVDAGFSGGKLDRPEITQLIQDAKNKLFDTILVYKLDRLSRSVPDTLYLVRDVFGKRDIGFVSLQENIDTSSAMGNLFITLLSAIAEFEREQITERMEMGKLGRAKSGKTMAWRVTAFGYDYNKETGNLELDPVKAPLVKMVFDEYMQGTSIDNIADKMNSLDYTGKDRPWAHHGVASLLDNPVYYGMNRYKDKIYKGNHEPVITKELFDLVQKERERRRQGTPESHNTPPWQRKYFATKVCRCGLCGERMKLDRGKKRKKDGFTPMVYYCKNSRPYRNATCHNVLYQRDIVEDYIIHEVAKIQNNPNILKRGEYRTKEYELERQRKQLNETIKRNTDKLSKLNNLYLNDLITLEDLKKQSDLLIKRKRYSEERLALTYQTTEDDEREYRLKSFLAFPDLLTADYETQRKAVEMIVDRVELTKDKYIIHYNF

SEQ ID NO: 21967 - DNA, 50 bp, Streptococcus suis
  source 1..50: mol_type = genomic DNA
taaccctttttccctccgcttatctggattagtggaagcaaaaagggaag

SEQ ID NO: 21968 - DNA, 40 bp, Streptococcus suis
  source 1..40: mol_type = genomic DNA
tccgactcggcctgcaatctgaacaagacttgacactgtg

SEQ ID NO: 21969 - DNA, 40 bp, Streptococcus suis
  source 1..40: mol_type = genomic DNA
tccgactcggcctgcaatcataacaagacttgacactgtg

SEQ ID NO: 21970 - DNA, 50 bp, Streptococcus suis
  source 1..50: mol_type = genomic DNA
taaccctttttaattcttcttaaaatgattgatagaagtcaccagggaag

SEQ ID NO: 21971 - protein, 478 aa, Streptococcus suis; identical to SEQ ID NO: 21966

SEQ ID NO: 21972 - DNA, 50 bp, Streptococcus suis; identical to SEQ ID NO: 21967
  source 1..50: mol_type = genomic DNA

SEQ ID NO: 21973 - DNA, 40 bp, Streptococcus suis
  source 1..40: mol_type = genomic DNA
gccaacccggcctgcaatctgaacaagacttgacgctgtg

SEQ ID NO: 21974 - DNA, 40 bp, Streptococcus suis
  source 1..40: mol_type = genomic DNA
gccaacccggcctgcaatcataacaagacttgacgctgtg

SEQ ID NO: 21975 - DNA, 50 bp, Streptococcus suis; identical to SEQ ID NO: 21970
  source 1..50: mol_type = genomic DNA

SEQ ID NO: 21976 - protein, 548 aa, Paenibacillus ihbetae
MALRAKDLLDLGIENIINYLRRSRADEEMERRTGEDVLQAQKELMDRVLEPLGIPYDQRPEVGSGDKISTRPVFQGVIRDLQAGKYQAVAVKEISRLGRGSYTDMGVIYDLITEKRIFIITPYKIFDPNNPADLRQIRFELFMSREEFETTRERLMGGRVNRAMEGKWVSGEAPFGYDYNPDTKKLEINEGQAEQIRAIFDFYVNGVPDGENGKRRDVSFRALATYLSRHTVIRTPKGKKNWHPNYLRGILQNERFIGILKFRTTKRVNGKVEERPEDEHIIVHDAMPRIIDQETWEKAQAKINDSAHKPRTRMDFTPCELAGLCVCYKCGGRMIRQYSVQNYKKQSGEVTQYHKEFLWCSRPGCTFVKYRSVEEDLLNVIRYFSDLSEEKMHNELLAVLEKDDSQSLPINDIEGYVESRMKELKARMNFIYEKYESGRYSDEMFDERKAEIDKGYKELAELVEQHKKQSSQTSGSAIDVDVVKQNLNTVLEAYKNAEDKSDRNQILRAVFDRVVVELVESGRGRIPAKYNLYPVFKRGLTNHGFLIQ

SEQ ID NO: 21977 - DNA, 50 bp, Paenibacillus ihbetae
  source 1..50: mol_type = genomic DNA
tgatacaatgatgtcactaactattcatagtcagtgcactcattaatcta

SEQ ID NO: 21978 - DNA, 40 bp, Paenibacillus ihbetae
  source 1..40: mol_type = genomic DNA
cgtatgggccacaatcagctcatcggcgctaatcagcgca

SEQ ID NO: 21979 - DNA, 40 bp, Paenibacillus ihbetae
  source 1..40: mol_type = genomic DNA
cgtatgggccacaatcagcgaatcggcgctaatcagcgca

SEQ ID NO: 21980 - DNA, 50 bp, Paenibacillus ihbetae
  source 1..50: mol_type = genomic DNA
agatacaatgtaaagactaacaaagaatctagagtggctatattaatata

SEQ ID NO: 21981 - protein, 542 aa, Sphingobium indicum
MPMDEMNPSASPIPRRKAYSYLRFSTPEQSKGDSRRRQTDMAAKYAREHDLELDTVLTFHDEGISGFRGRNAEAGRLADFLEAVKVGLVPQGSVLLVEQLDRLSRLVPRKAMRVLEDIVEAGVSVVTLNDGREYTPASLDRDPTDLLVAVLTFMRANDESATKAKRLSAAWEAKRANVAAKPLTGIVPAWLELDKQTQQIKVIPERAAIVRRIFSMTLDGTGQHSIAATLNGEGVEPWGTGKRKGLHWHRSYIAKILTNPAVIGVLHPHRTEYADGKKRRIPLDTVPHYFPAVISPETWADAQALLTAKGAPRGRQAVAPLSNILSRLATCPKCEGTMTRVQKGSSTKAGYPSLVCATAKAGAGCEYKSVRYETIERRLLQVLPGVIQDREGIDESEDIEAQIAQLEDVLLAQRQDIDVLVDELLEGPSPALAARVREKERAVSEMQSHLAGLKEHRDIMAGPLVGSRIEKAVGALQPTEDGDLDRVAANAALRGIFKRAIINWPAGTIDLEWHVGGLCRVTFGWTEGPWPPPASTEIPPSA

SEQ ID NO: 21982 - DNA, 50 bp, Sphingobium indicum
  source 1..50: mol_type = genomic DNA
tgagggtcttgtggagataacttgagcaggttatggacataagacccctg

SEQ ID NO: 21983 - DNA, 40 bp, Sphingobium indicum
  source 1..40: mol_type = genomic DNA
gccgggcgggccgaccatcagcagattatggccgcccgcc

SEQ ID NO: 21984 - DNA, 40 bp, Sphingobium indicum
  source 1..40: mol_type = genomic DNA
gccgggcgggccgaccatcatcagattatggccgcccgcc

SEQ ID NO: 21985 - DNA, 50 bp, Sphingobium indicum
  source 1..50: mol_type = genomic DNA
ctccggtctcatgaagctaccttcatcagttgatgggaacaagacccctg

SEQ ID NO: 21986 - protein, 521 aa, Streptococcus agalactiae; identical to SEQ ID NO: 13191

SEQ ID NO: 21987 - DNA, 50 bp, Streptococcus agalactiae
  source 1..50: mol_type = genomic DNA
tgtatgattaaattgatagcaacagaaataagaagaagttaattaataca

SEQ ID NO: 21988 - DNA, 40 bp, Streptococcus agalactiae; identical to SEQ ID NO: 21358
  source 1..40: mol_type = genomic DNA

SEQ ID NO: 21989 - DNA, 40 bp, Streptococcus agalactiae
  source 1..40: mol_type = genomic DNA
gataaaattagtagcaaccattatggacggtacattctta

SEQ ID NO: 21990 - DNA, 50 bp, Streptococcus agalactiae
  source 1..50: mol_type = genomic DNA
tgtatgatggaatagaactcagcaataaaaaggagtgaactgttaataca

SEQ ID NO: 21991 - protein, 495 aa, Aeromonas veronii
MKAWLYARFSSNQQADGDSINRQVKAAQQWCDANGVELQQTSFRDLGVSGWKSIKRPMFEQLIKAMSEGKIPRGSYVLFESTDRLSRRGWRHTQELIRTITCVYDCKLVILDKGQVYTKENVNDVVQNILLMVAADMAEKESQRKSDLVAAAYKSKRQDGDVSRWPYWIDKTDKGFVLNENAETIRLIIELRLKGVGALGVASELNRRGIKSSRGGNWGHTSIRVVLSNSALYGTKDFYSMKTIKQFDEHGEEIRVTDNQLVSSVPDVFPPLCDFTTWQQIQIKGEKPGRKGQSSPFHNMLFCKCGAGLSVQLGSAGERYRKCSRAKVGACDQRAIRNFDETLIECLGRITYESSDTQKDELPELQARLAKLEGVKDALMAAGAVDALVDVYKDIAKAKDAVANAQRIAVVPTTQLKEVFSGTVDEQRVALKRVISKVVVNRMKNTASIKIHLTNGHLKVFGVNIGVKKQSGVNRLFSETDTEKFLAEIRNLNFD

SEQ ID NO: 21992 - DNA, 50 bp, Aeromonas veronii
  source 1..50: mol_type = genomic DNA
tttgtgttttattgacactgtaacttgttcatgtgtacaatctgcaagtc

SEQ ID NO: 21993 - DNA, 40 bp, Aeromonas veronii
  source 1..40: mol_type = genomic DNA
cactgtgttccagtgttgcttgttcatatgccagcccggt

SEQ ID NO: 21994 - DNA, 40 bp, Aeromonas veronii
  source 1..40: mol_type = genomic DNA
cactgtgttccagtgttgcgggttcatatgccagcccggt

SEQ ID NO: 21995 - DNA, 50 bp, Aeromonas veronii
  source 1..50: mol_type = genomic DNA
tttttttttcagtaacactctaaagggtaaatttattttgtctgcaaatc

SEQ ID NO: 21996 - protein, 551 aa, Stenotrophomonas maltophilia
MATKARVYSYLRFSDPKQAAGSSADRQLEYAKRWAAEHGMTLDAALSMQDEGLSAYHQRHVTKGALGVFLAAIDEGRIPAGSVLIVEGLDRLSRAEPIQAQAQLAQIINAGITVVTASDGREYNRAGLKAQPMDLVYSLLVMIRAHEESDTKSKRVRAAIHRQCRGWQDGSWRGVIRNGKDPSWTRLEPETKTFQLVPERAEAVKLAIRMFRDGHGAVRIMRTLAEEGLQLTNGGNPAGQLYRILRNRALIGEKVLEIDGEEYRLAGYYPSLLSAEQFADLQQATEQRAKQKGTGEIPGLITGLRISYCGYCGSAMVAQNLMNRGRREDGGPQHGHRRLICVGNSQGMGCAVAGSCSVVPIEHAIMSYCADQMNLARLFEGGDRSEALGGRLAIARARVADTTAKIERITDAMLADDAGDAPAAFMRRAREMEAALAAQQSEVEALEHEMAAIGSSPTPAVAKAWADLQEGVKALDYDARTKARQLVADTFERISIYHRGTEPEQTRSWKGTIDLVLVAKRGSARILHVDRQTGEWRGGEEVRDLPDDPVQ

SEQ ID NO: 21997 - DNA, 50 bp, Stenotrophomonas maltophilia
  source 1..50: mol_type = genomic DNA
agtatatctcaaccatccttcgggcaccccaatgaaacaaaccctatact

SEQ ID NO: 21998 - DNA, 40 bp, Stenotrophomonas maltophilia
  source 1..40: mol_type = genomic DNA
atcgacgagggccttcgggcagccaaggctgacgaagccg

SEQ ID NO: 21999 - DNA, 40 bp, Stenotrophomonas maltophilia
  source 1..40: mol_type = genomic DNA
atcgacgagggccttcgggacgccaaggctgacgaagccg

SEQ ID NO: 22000 - DNA, 50 bp, Stenotrophomonas maltophilia
  source 1..50: mol_type = genomic DNA
agcaaatcttattcatccttcaaaaccccaaatgaaatgtgacctccact

SEQ ID NO: 22001 - protein, 514 aa, Rhizobium leguminosarum
MKKKSVELAGTPQAIIYCRVSSPRQKTEGHGLESQEHRCRQFADQNDLEVVAVFPDDISGGGDFMKRPGIVALLSYLDAQPGKRYVIIFDDLKRFARDTEFHWRLRREFRTRGAEVVCLNLKLEDSPEGKFVETMFAATGELERSQNQRQVIQKMTARLERGYAVFAPPIGYKYAADREHGKILVRVEPVASILVDALESFASGHLQTKGEVKHFLDARPAFSKDTRTGKIYYSRVERLLSNIVYAGYIEMPAWGVSPRKGHHEPLISLETFELIQKRLNGNPKAPVRKDINEDFPLRGFVLCDDCGRVMTACWSKGRSKHYPYYLCDTEGCENSRKSIPRDKIEGGFAEILQSLQPTRELFGMAKTMFIDAWEMRTAEANRDKGQVENQRRSVEKQIQTLLERIIETGSASVIKAYEDKIEKLERERLLLEEKVGRIVPPPRRLGEFIEPALALLANPWNIYDNGNLTFKRAVLRLVFAEPVRYSRKSGYRTANTTFPFKVLASIASAQKEMV

SEQ ID NO: 22002 - DNA, 50 bp, Rhizobium leguminosarum
  source 1..50: mol_type = genomic DNA
aagcatcgcgagtgcacagaaggagatggtacactcgacgggagaaagtt

SEQ ID NO: 22003 - DNA, 40 bp, Rhizobium leguminosarum
  source 1..40: mol_type = genomic DNA
gacgacggcctatcatcgggatggtacgccctaggggagt

SEQ ID NO: 22004 - DNA, 40 bp, Rhizobium leguminosarum
  source 1..40: mol_type = genomic DNA
gacgacggcctatcatcggactggtacgccctaggggagt

SEQ ID NO: 22005 - DNA, 50 bp, Rhizobium leguminosarum
  source 1..50: mol_type = genomic DNA
aagcaaggctgacttacagaagttactgtttcactagggcagagaaaatt

SEQ ID NO: 22006 - protein, 500 aa, Streptomyces peucetius
MDPVNEDSQVNNDSERLRRLARIAGSQRDKRSRTDWTGEPAAIYCRISHVNDDDQTGVDRQERICRDIAQRLGVTVNQHLVFVDNNRSAWQRNRKRKGWDALLDAARSRGIRHILTYHPDRLMRQPRDLEELLQIADDHSITLHGQANQRDLADPDDRFFLRIEVAHACRSSDDTSRRLKDALIDRAQDGKPHTGKRRYGYDRSGTAIIAAEAEIVREIFSRYLDGETTTAIAVDLNRREERTALGRGWNSFNVRAILDSRHVAGIRVFRGEELGQGEWPAIIPRGTWDEAQERRSYRTAASWGQRAPKHPYILRGLVVCKGCGNRMGGSGGKYMCNRAARSDTLRCYRTASSAPLEQFVTDAALKLLERLDVTGQEEAAVLSPEDQAAIHADREELAELKDMWNSRELKTQEYRAMKKTVEERIAKVERKLVVRPAVEVLRGLVGQDARKNWAKLVEAKEYDRMNAVLRFLFNAVIIDEPSTKGRYFDFGRVDIEPNPL

SEQ ID NO: 22007 - DNA, 50 bp, Streptomyces peucetius
  source 1..50: mol_type = genomic DNA
agaggctattaagaagccttgactgtagtcatgacttcttcatagccttt

SEQ ID NO: 22008 - DNA, 40 bp, Streptomyces peucetius
  source 1..40: mol_type = genomic DNA
ctgcagcttggacttgagcgtggtcatgcggccaagtctg

SEQ ID NO: 22009 - DNA, 40 bp, Streptomyces peucetius
  source 1..40: mol_type = genomic DNA
ctgcagcttggacttgagcccggtcatgcggccaagtctg

SEQ ID NO: 22010 - DNA, 50 bp, Streptomyces peucetius
  source 1..50: mol_type = genomic DNA
agaggctctgtggtggccttttccccattcatgactgccaaatatgcttc

SEQ ID NO: 22011 - protein, 542 aa, Coprococcus comes
MTADIEEGKIGCVIVKDMSRIGRNYLEVGFYTEVLFREKGVRFIAVSNGVDSTQSESNEFAPFLNIMNEWYVRDTSRKIKTVLRNKGMEGKHLTSNAIYGYKKDPKDNNHWLVDEEAAAVVRRIFQLIIEGNGPMQVARILTNEKVERPSYYLAKQGLGTCRGKCDMTRPYSWTATTITDLVSKPEYMGHTVNFRTFKESYKDKHSQYANPEDWLIFRDTQEAIVDEDTWYMVQKIRETKHRPIAQGKANPLTGLMFCADCGAKMFNHRTKGYEKKDKDGNPTGKYTNAQNNYTCSTYSKAKGHFENKCSQHHVRTDVVRDLILTTLQYTASYVKEHEDEFLEKVRKSNVLKQEADTKALTKKITKSEKRVAELDHLIKRIYEDNVSGKLSDKRFELLSADYEKEQSELEEFLTSAREQLATAKEEASNVDKFIALVHKYTDFSELTTPMIHEFIDRIEVHEADKSTGERTQEIDIYLKYVGKLDVPMPEVTPEELAEEERKRRKRAWNRTYNRRKAEKERAEKEKAALEAATDTDKSKKGA

SEQ ID NO: 22012 - DNA, 50 bp, Coprococcus comes
  source 1..50: mol_type = genomic DNA
aaatatccctatgaaagttaaacatgagtttgactttctgagggataaaa

SEQ ID NO: 22013 - DNA, 40 bp, Coprococcus comes
  source 1..40: mol_type = genomic DNA
aatatctaacagaacatcctggctgggtattctctcacga

SEQ ID NO: 22014 - DNA, 40 bp, Coprococcus comes
  source 1..40: mol_type = genomic DNA
aatatctaacagaacatccttgctgggtattctctcacga

SEQ ID NO: 22015 - DNA, 50 bp, Coprococcus comes
  source 1..50: mol_type = genomic DNA
agaaatctaaacggaaattagaaattagtttgaattgcatggtgataaaa

SEQ ID NO: 22016 - protein, 594 aa, Butyricimonas sp
MKKAITYIRVSTKMQDVARQRMKIQEYCDRNNYEIVQEIVDYGISGARADREGYIKLQSLTDKDGEILVISELSRLSREETLITVNTIQNIIYHGLDVVFLDDASKYYKANQALNLIELITLLVSADKNAKERIEIKRKNQEGKQAILSNNPYAMVDGNIPFGFQAIYNPNGRRPKKILEENEQEVEHIKKVYELILSGYSLGEVARYFNNRNITFRGFFVTRQLLGRLIKHSIYKGVRERKLKFDREEASIISVNIKPIITPEDFDRANLLVKENHKYKSTGKNLYNPLKGIFKCRCGRSMIVKDKKPEKAVTKLTYRCSYVGTEDNPIACHFKDEISYHLTNEIIYSLFKYMNYSENINFFKGQIDNKVQNLIEEIDGLNKQIKNKELIRSNLEAENQELVQSYLEARSSTLRTAVQNKQIEIENKIEALKKEMDKLTDAKLSKEADKLRLIDTRKKEKLDNLNIQEKGELFHKHLASVTYYTVTMMQGFYVIQFRSGLEFIIAVRKTARSPLVSILPDKYTLNKDTLLITEYKETSKNTSLKNFSLNTTVTTKEITIQEYLKSEIAELRSLRIDYSYRKQYNENLKMKREE

SEQ ID NO: 22017 - DNA, 50 bp, Butyricimonas sp
  source 1..50: mol_type = genomic DNA
aggggttattacgaatttttatactcaaataacatttcggattaacccat

SEQ ID NO: 22018 - DNA, 40 bp, Butyricimonas sp
  source 1..40: mol_type = genomic DNA
cggtacttgcgcacaatattcgaaaagagcaatacaccat

SEQ ID NO: 22019 - DNA, 40 bp, Butyricimonas sp
  source 1..40: mol_type = genomic DNA
cggtacttgcgcacaatatgggaaaagagcaatacaccat

SEQ ID NO: 22020 - DNA, 50 bp, Butyricimonas sp
  source 1..50: mol_type = genomic DNA
atggagtatagagaaactctataaggaaataaccttaaatgttaacacat

SEQ ID NO: 22021 - protein, 567 aa, Clostridium perfringens
MKTVAIYSRKSRFTGKGDSIENQIEMCKEHIKKFVSPNVEFLIYEDEGFSGGNTNRPAFQRLINDIKYGNINLLICYRLDRISRNVADFSSVLDVLQEYKVDFISIKEQFDTSSPMGRAMIYIASVFAQLERETIAERIKDNMLEMAKKGKWTGGKLPLGFTSKKIAYIDEEGKKRFKVTLEHDSKDLEFVKFLYEKYLELGSLHKLETYTHENNIRSASGKIFEKSTLKIILQNPIYVKADENVFNYFENKGWSVYGEPDGLHSLLSYNKTETAKKDGKLTKRNKDESESLVAVSDVKGFIDSSLWLKVQYQFKKNKNTFPRLGKTHNALLVGKLFCGNCGTRMIIQHGRTSTKTGIKTFYYVCSLKKTSKKKLCSAHNVKTDFLENLVLDSLEKLYYKKDFINDSLKINLKENKDNIKEINTTKKLIELNKNKINSLIEKLSLDFDNILSDILIPQIKKIKIENDVLESKLEELKLKKQESEMNRIEIDLITSLLNKCKNIKELTRTEQKQIIDCLVDSIYYYSNDNGNDKIKIKFINDIDSINTLLSDEEKRQFEKLSFYSHSM

SEQ ID NO: 22022 - DNA, 50 bp, Clostridium perfringens
  source 1..50: mol_type = genomic DNA
agttgtctttttattcacacagcatgttctatatgaataaaagaacaaca

SEQ ID NO: 22023 - DNA, 40 bp, Clostridium perfringens; identical to SEQ ID NO: 4918
  source 1..40: mol_type = genomic DNA

SEQ ID NO: 22024 - DNA, 40 bp, Clostridium perfringens; identical to SEQ ID NO: 4919
  source 1..40: mol_type = genomic DNA

SEQ ID NO: 22025 - DNA, 50 bp, Clostridium perfringens; identical to SEQ ID NO: 4920
  source 1..50: mol_type = genomic DNA

SEQ ID NO: 22026 - protein, 568 aa, Clostridium perfringens
MKKVAIYSRKSRFTGKGDSIENQIEMCKEHIKKFVSTDVEFFIYEDEGFSGGNINRPAFKRLMSDIRYGNINLLICYRLDRISRNVADFSSVLDILQEYKVDFISIKEQFDTSSPMGRAMIYIASVFAQLERETIAERIKDNMLEMAKKGKWTGGKLPLGFTSKKTAYIDEEGKKRFNVALVHDTKDLEFVKFLYEKYLELGSLHKLETYTHENNIRSASGKIFEKSTLKIILQNPIYVKADENVFNYFENKGWSVYGEPDGIHSLLSYNKTETAKKDGKLTKRNKDESESLVAVSNIEGYIDSSLWLKVQYQFKKNKDTFPRLGKTHNALLVGKLFCGNCGTRMIIQHGRTSSKTGIKNFYYVCSLKKTSKKKLCKAHNVKTDFLENLVLDALEKLYNKKEYISDSLKINLKQNKNTIEEINNTKKLIELNKAKLDNLVEKLSIDFDNLLSDILIPEMKKLKLEINTLESNLEELKLKKQESEINKIEIDLITSLLNKCKNIKELDRTEQKQIIDCLIDSIYYYSNDNGNDKIKIKFINDIDSINTILSDEEKRQFEKLSFYSHSMS

SEQ ID NO: 22027 - DNA, 50 bp, Clostridium perfringens
  source 1..50: mol_type = genomic DNA
agttgtctttttattcacacagcatgtccaatatgaataaaagaacaaca

SEQ ID NO: 22028 - DNA, 40 bp, Clostridium perfringens; identical to SEQ ID NO: 4918
  source 1..40: mol_type = genomic DNA

SEQ ID NO: 22029 - DNA, 40 bp, Clostridium perfringens; identical to SEQ ID NO: 4919
  source 1..40: mol_type = genomic DNA

SEQ ID NO: 22030 - DNA, 50 bp, Clostridium perfringens; identical to SEQ ID NO: 4920
  source 1..50: mol_type = genomic DNA

SEQ ID NO: 22031 - protein, 569 aa, Clostridium perfringens
MKTVAIYSRKSRFTGKGDSIENQIEMCKEHIKKFVSPKVEFLIYEDEGFSGGNTNRPAFQRLINDIKYGNIDLLICYRLDRISRNVADFSSVLDVLQEYKVDFISIKEQFDTSSPMGRAMIYIASVFAQLERETIAERIKDNMLEMAKKGKWTGGKLPLGFTSKKIAYIDEEGKKRFKVTLEHDSKDLEFVKFLYEKYLELGSLHKLETYTHENNIRSASGKIFEKSTLKIILQNPIYVKADENVFNYFENKGWSVYGEPDGLHSLLSYNKTETSKKDGKLTKRNKDESESLVAVSDIKGFIDSSLWLKVQYQFKKNKNTFPRLGKTHNALLVGKLFCGNCGTRMIIQHGRTSTKTGIKTFYYVCSLKKTSKKKLCSAHNVKTDFLENLVLDSLEKLYYKKDFINDSLKINLKENKDNIKEINTTKKLIELNKNKINSLIEKLSLDFDNVLSDILIPQIKKIKIENDVLESKLEELKLKKQESEMNRIEIDLITSLLNKCKNIKELTRTEQKQIIDCLVDSIYYYSNDNGNDKIKIKFINDIDSINTLLSDEEKRQFEKLSFYSHSMSS

SEQ ID NO: 22032 - DNA, 50 bp, Clostridium perfringens
  source 1..50: mol_type = genomic DNA
agttgtctttttattcacacagcatgtccagtatgaataaaaaaacaaca

SEQ ID NO: 22033 - DNA, 40 bp, Clostridium perfringens; identical to SEQ ID NO: 4923
  source 1..40: mol_type = genomic DNA

SEQ ID NO: 22034 - DNA, 40 bp, Clostridium perfringens; identical to SEQ ID NO: 4924
  source 1..40: mol_type = genomic DNA

SEQ ID NO: 22035 - DNA, 50 bp, Clostridium perfringens; identical to SEQ ID NO: 4920
  source 1..50: mol_type = genomic DNA

SEQ ID NO: 22036 - protein, 569 aa, Clostridium perfringens
MKTVAIYSRKSRFTGKGDSIENQIEMCKEHIKKFVSPNVEFLIYEDEGFSGGNTNRPAFQRLINDIKYGNINLLICYRLDRISRNVADFSSVLDVLQEYKVDFISIKEQFDTSSPMGRAMIYIASVFAQLERETIAERIKDNMLEMAKKGKWTGGKLPLGFTSKKIAYIDEEGKKRFKVTLEHDSKDLEFVKFLYEKYLELGSLHKLETYTHENNIRSASGKIFEKSTLKIILQNPIYVKADENVFNYFENKGWSVYGEPDGLHSLLSYNKTETAKKDGKLTKRNKDESESLVAVSDVKGFIDSSLWLKVQYQFKKNKNTFPRLGKTHNALLVGKLFCGNCGTRMIIQHGRTSTKTGIKTFYYVCSLKKTSKKKLCSAHNVKTDFLENLVLDSLEKLYYKKDFINDSLKINLKENKDNIKEINTTKKLIELNKNKINSLIEKLSLDFDNILSDILIPQIKKIKIENDVLESKLEELKLKKQESEMNRIEIDLITSLLNKCKNIKELTRTEQKQIIDCLVDSIYYYSNDNGNDKIKIKFINDIDSINTLLSDEEKRQFEKLSFYSHSMSS

SEQ ID NO: 22037 - DNA, 50 bp, Clostridium perfringens; identical to SEQ ID NO: 22032
  source 1..50: mol_type = genomic DNA

SEQ ID NO: 22038 - DNA, 40 bp, Clostridium perfringens; identical to SEQ ID NO: 4918
  source 1..40: mol_type = genomic DNA

SEQ ID NO: 22039 - DNA, 40 bp, Clostridium perfringens; identical to SEQ ID NO: 4919
  source 1..40: mol_type = genomic DNA

SEQ ID NO: 22040 - DNA, 50 bp, Clostridium perfringens; identical to SEQ ID NO: 4920
  source 1..50: mol_type = genomic DNA

SEQ ID NO: 22041 - protein, 569 aa, Clostridium perfringens
MKTVAIYSRKSRFTGKGDSIENQIEMCKEHIKKFVSPNVEFLIYEDEGFSGGNTNRPAFQRLINDIKYGNINLLICYRLDRISRNVADFSSVLDVLQEYKVDFISIKEQFDTSSPMGRAMIYIASVFAQLERETIAERIKDNMLEMAKKGKWTGGKLPLGFTSKKIAYIDEEGKKRFKVTLEHDSKDLEFVKFLYEKYLELGSLHKLETYTHENNIRSASGKIFEKSTLKIILQNPIYVKADENVFNYFENKGWSVYGEPDGLHSLLSYNKTETAKKDGKLTKRNKDEAESLVAVSDVKGFIDSSLWLKVQYQFKKNKNTFPRLGKTHNALLVGKLFCGNCGTRMIIQHGRTSTKTGIKTFYYVCSLKKTSKKKLCSAHNVKTDFLENLVLDSLEKLYYKKDFINDSLKINLKENKDNIKEINTTKKLIELNKNKINSLIEKLSLDFDNILSDILIPQIKKIKIENDVLESNLEELKLKKQESEMNRIEIDLITSLLNKCKNIKELTRTEQKQIIDCLVDSIYYYSNDNGNDKIKIKFINDIDSINTLLSDEEKRQFEKLSFYSHSMSS

SEQ ID NO: 22042 - DNA, 50 bp, Clostridium perfringens; identical to SEQ ID NO: 22032
  source 1..50: mol_type = genomic DNA

SEQ ID NO: 22043 - DNA, 40 bp, Clostridium perfringens; identical to SEQ ID NO: 4918
  source 1..40: mol_type = genomic DNA

SEQ ID NO: 22044 - DNA, 40 bp, Clostridium perfringens; identical to SEQ ID NO: 4919
  source 1..40: mol_type = genomic DNA

SEQ ID NO: 22045 - DNA, 50 bp, Clostridium perfringens; identical to SEQ ID NO: 4920
  source 1..50: mol_type = genomic DNA

SEQ ID NO: 22046 - protein, 465 aa, Micromonospora noduli
MTRRAAKYRRISDDREGRELGIGRQDEDLDALGERADLVYVASYVDNDIGASTKSTKRRNDYERMLADAKAGHFEVIAAYTTGRLTRRPREHEDLIDLAVDHRIEFEYVRSPSFDLNTAQGRRIARTLAAQDAGETEEMSERVARDALRRAQQGLNHGGRRCYGYAANGLDVNHDEVQVIRDAAAAIIGGVPLGRIVRDLNTAGVRTVNGKLWAPGTLRDLLKRPRLAGLSVHRGEVIGKGQWPAIITADQHATITALFADPTRRTTTGNRAAYLLSGIAVCGKCGNSITSFGLKKSKPGEPPSTRHLYRCRKGACVARRRDWCDQWVTDNVLERLSRPDARDLLIDTTRPDLKGLRAESEALRVQLDEFAEDRANNLITRAQMLAGTERVRVRLTDIDAALLHVDRAPVLADLIEAPDPATVWDSLDLDRRRAVVKTLMTVTLHPGGSGKRTFDPSRVQITWTA

SEQ ID NO: 22047 - DNA, 50 bp, Micromonospora noduli
  source 1..50: mol_type = genomic DNA
agttgcactatccgtagtgcggtcttctcgacactaccaaaggtgctacg

SEQ ID NO: 22048 - DNA, 40 bp, Micromonospora noduli
  source 1..40: mol_type = genomic DNA
ggtgttgagcagtgtcgtcttgccagaaccggtgcccccg

SEQ ID NO: 22049 - DNA, 40 bp, Micromonospora noduli; identical to SEQ ID NO: 22048
  source 1..40: mol_type = genomic DNA

SEQ ID NO: 22050 - DNA, 50 bp, Micromonospora noduli
  source 1..50: mol_type = genomic DNA
agttgtagtaatactggtgtggtcttctctagactagggtgggggctgtg

SEQ ID NO: 22051 - protein, 450 aa, Enterococcus faecium
MKRVALYMRVSTEQQAKHGDSLREQKETLYEYIEQHKDLKVVNEYVDGGISGQKINRDEFQKLLQDVKENKIDIILFTKLDRWFRNLRHYLNTQEILEKHNVSWNAVSQQYYDTTTAYGRTFIAQVMSFAELEAQIDSERIKAVMANKIAQGEVVSGKTPLGYSIKNKKLVINDDAPIVIDIFNYFLSSGSLRKTVYYLGSQYGIVRDYQSVKNMLTNKKYIGELRNNKNYCPPIIDKKLFYAVQKALPKNLKTNAKRDYIFKGLLKCSDCQGSVAGQTIKARYKKKDGTESIYERTCYRCVKRRNNKLRCTNKRAFYEKNLERYIFEATKQKFEQIQINYSKKQPRIIKKKNSKKNIENKLDRLKKAYLNEVIDLEEYKKDREALMKELNEIEVEPAKIDIKNVEFILSKEFDEIYKESSKEEKNALWRSIIDNIIVFPDGNITVNFLI

SEQ ID NO: 22052 - DNA, 50 bp, Enterococcus faecium
  source 1..50: mol_type = genomic DNA
atgtgtactaacttatatattccagaaggataacataagttagtacacat

SEQ ID NO: 22053 - DNA, 40 bp, Enterococcus faecium; identical to SEQ ID NO: 21713
  source 1..40: mol_type = genomic DNA

SEQ ID NO: 22054 - DNA, 40 bp, Enterococcus faecium
  source 1..40: mol_type = genomic DNA
cgatggaataacattaccaataggatgattatgcgctaaa

SEQ ID NO: 22055 - DNA, 50 bp, Enterococcus faecium
  source 1..50: mol_type = genomic DNA
atgtgtataagacaatatctactcatagtattacatcaagcagtacacac

SEQ ID NO: 22056 - protein, 604 aa, Bacteroides thetaiotaomicron; identical to SEQ ID NO: 3306

SEQ ID NO: 22057 - DNA, 50 bp, Bacteroides thetaiotaomicron; identical to SEQ ID NO: 3312
  source 1..50: mol_type = genomic DNA

SEQ ID NO: 22058 - DNA, 40 bp, Bacteroides thetaiotaomicron
  source 1..40: mol_type = genomic DNA
aggcacctgcggctgatcttcaacatcccggaaagctccc

SEQ ID NO: 22059 - DNA, 40 bp, Bacteroides thetaiotaomicron; identical to SEQ ID NO: 22058
  source 1..40: mol_type = genomic DNA

SEQ ID NO: 22060 - DNA, 50 bp, Bacteroides thetaiotaomicron; identical to SEQ ID NO: 4930
  source 1..50: mol_type = genomic DNA

SEQ ID NO: 22061 - protein, 604 aa, Bacteroides congonensis; identical to SEQ ID NO: 15241

SEQ ID NO: 22062 - DNA, 50 bp, Bacteroides congonensis; identical to SEQ ID NO: 3302
  source 1..50: mol_type = genomic DNA

SEQ ID NO: 22063 - DNA, 40 bp, Bacteroides congonensis
  source 1..40: mol_type = genomic DNA
cggtatttgacatgagtattcaaaaaaagcaatcgcccaa

SEQ ID NO: 22064 - DNA, 40 bp, Bacteroides congonensis; identical to SEQ ID NO: 22063
  source 1..40: mol_type = genomic DNA

SEQ ID NO: 22065 - DNA, 50 bp, Bacteroides congonensis; identical to SEQ ID NO: 4930
  source 1..50: mol_type = genomic DNA

SEQ ID NO: 22066 - protein, 604 aa, Bacteroides cutis
MIKIIGYARVSTTKQDLSRQKLKIKEFCENNNYELIEIIEDFGISGVVADRKGYIELQSKTYKDADMIVISELSRLSRQEDVTETVYNIQQIINKGLSVILLDSPSKIYEANKLLDITEILILTIKAWAAAQERLDIKKKNQDGKQALFQAYPYAVVDQKIPYGYKAVPNPNGKRPKYILEEVPEEVENIKRLFALVNSGKTLGAVARYFNERNITFRGYYSTVAILSNYIHSDIYRGIRRRTQRLGREEPYTIEVRIKPIISEEDFMKAQELIKNNYKNTPTGKVNHNPLKGIIRCRCGRAMTVKDKKPAAGISKLTYRCSCVDRKSHPDFCKYNIDEVSYDLTNEILYSLFKSMHTAEYINFFRNQTDNRVTELQEEIAGIEKRLSTLYLDKENLSNESQENANKFLLTTNPTLLNIIQEKQNQLDEKIKSIDKEIIRYKKSQSKKIADIERIKDNNGKEKLQNLSIEEQGELYHKYLERVNYIPVTTMQGYYIVQFLNGIKFYIAITKVRSIAMASLLLDNWTIDEKGIITANYDTLKSSDMKNFSIEMIRKTKTITLQEYLKTDLAKERALHLDLSYRERYLEELHKAGLDGRLRPLKKE

SEQ ID NO: 22067 - DNA, 50 bp, Bacteroides cutis; identical to SEQ ID NO: 3302
  source 1..50: mol_type = genomic DNA

SEQ ID NO: 22068 - DNA, 40 bp, Bacteroides cutis
  source 1..40: mol_type = genomic DNA
cggaatttgaaaagaatactccgctaaggcaattccccat

SEQ ID NO: 22069 - DNA, 40 bp, Bacteroides cutis; identical to SEQ ID NO: 22068
  source 1..40: mol_type = genomic DNA

SEQ ID NO: 22070 - DNA, 50 bp, Bacteroides cutis; identical to SEQ ID NO: 4930
  source 1..50: mol_type = genomic DNA

SEQ ID NO: 22071 - protein, 604 aa, Phocaeicola massiliensis; identical to SEQ ID NO: 3321

SEQ ID NO: 22072 - DNA, 50 bp, Phocaeicola massiliensis; identical to SEQ ID NO: 3312
  source 1..50: mol_type = genomic DNA

SEQ ID NO: 22073 - DNA, 40 bp, Phocaeicola massiliensis
  source 1..40: mol_type = genomic DNA
aggcacctgaagacaatactcaaaaaaagcaaccgcccaa

SEQ ID NO: 22074 - DNA, 40 bp, Phocaeicola massiliensis; identical to SEQ ID NO: 22073
  source 1..40: mol_type = genomic DNA

SEQ ID NO: 22075 - DNA, 50 bp, Phocaeicola massiliensis; identical to SEQ ID NO: 4930
  source 1..50: mol_type = genomic DNA

SEQ ID NO: 22076 - protein, 604 aa, Bacteroides intestinalis; identical to SEQ ID NO: 3321

SEQ ID NO: 22077 - DNA, 50 bp, Bacteroides intestinalis; identical to SEQ ID NO: 3312
  source 1..50: mol_type = genomic DNA

SEQ ID NO: 22078 - DNA, 40 bp, Bacteroides intestinalis
  source 1..40: mol_type = genomic DNA
tggaaccaaacaaaaatattccgcaagagcgatactccat

SEQ ID NO: 22079 - DNA, 40 bp, Bacteroides intestinalis; identical to SEQ ID NO: 22078
  source 1..40: mol_type = genomic DNA

SEQ ID NO: 22080 - DNA, 50 bp, Bacteroides intestinalis; identical to SEQ ID NO: 4930
  source 1..50: mol_type = genomic DNA

SEQ ID NO: 22081 - protein, 604 aa, Bacteroides intestinalis; identical to SEQ ID NO: 10286

SEQ ID NO: 22082 - DNA, 50 bp, Bacteroides intestinalis; identical to SEQ ID NO: 10287
  source 1..50: mol_type = genomic DNA

SEQ ID NO: 22083 - DNA, 40 bp, Bacteroides intestinalis
  source 1..40: mol_type = genomic DNA
cggaaccaaacaaaaatattccgcaagggcgatgttccat

SEQ ID NO: 22084 - DNA, 40 bp, Bacteroides intestinalis; identical to SEQ ID NO: 22083
  source 1..40: mol_type = genomic DNA

SEQ ID NO: 22085 - DNA, 50 bp, Bacteroides intestinalis; identical to SEQ ID NO: 4930
  source 1..50: mol_type = genomic DNA

SEQ ID NO: 22086 - protein, 477 aa, Bacteroides stercoris
MGSSTRKMDIKKKNQDGKQALFQAYPYAVVDQKIPYGYKAVPNPNGKRPKYILEEVPEEVENIKRLFALVNSGKTLGAVARYFNERNITFRGYYSTVAILSNYIHSDIYRGIRRRTQRLGREEPYTIEVRIKPIISEEDFMKAQELIKNNYKNTPTGKVNHNPLKGIIRCRCGRAMTVKDKKPAAGISKLTYRCSCVDRKSHPDFCKYNIDEVSYDLTNEILYSLFKSMHTAEYINFFRNQTDNRVTELQEEIAGIEKRLSALYLDKENLSNESQDNANKFLLTTNPTLLNIIQEKQNQLDEKIKSIDKEIIRYKKSQSKKMADIERIKDNNGKEKLQNLSIEEQGELYHKYLERVNYIPVTTMQGYYIVQFLNGIKFYIAITKVRSIAMASLLLDNWTIDEKGIITANYDTLKSSDMKNFSIEMIRKTKTMTLQEYLKSDLAKERALHLDLSYRERYLEELHKAGLDGRLRPLKKE

SEQ ID NO: 22087 - DNA, 50 bp, Bacteroides stercoris; identical to SEQ ID NO: 3302
  source 1..50: mol_type = genomic DNA

SEQ ID NO: 22088 - DNA, 40 bp, Bacteroides stercoris
  source 1..40: mol_type = genomic DNA
aggaatctggaatgaatactccgccaacgctatcatccac

SEQ ID NO: 22089 - DNA, 40 bp, Bacteroides stercoris; identical to SEQ ID NO: 22088
  source 1..40: mol_type = genomic DNA

SEQ ID NO: 22090 - DNA, 50 bp, Bacteroides stercoris; identical to SEQ ID NO: 4930
  source 1..50: mol_type = genomic DNA

SEQ ID NO: 22091 - protein, 604 aa, Bacteroides fragilis; identical to SEQ ID NO: 3306

SEQ ID NO: 22092 - DNA, 50 bp, Bacteroides fragilis; identical to SEQ ID NO: 3302
  source 1..50: mol_type = genomic DNA

SEQ ID NO: 22093 - DNA, 40 bp, Bacteroides fragilis
  source 1..40: mol_type = genomic DNA
cggaacctgacaagaatattctgccagcgcaatgacccat

SEQ ID NO: 22094 - DNA, 40 bp, Bacteroides fragilis; identical to SEQ ID NO: 22093
  source 1..40: mol_type = genomic DNA

SEQ ID NO: 22095 - DNA, 50 bp, Bacteroides fragilis; identical to SEQ ID NO: 4930
  source 1..50: mol_type = genomic DNA

SEQ ID NO: 22096 - protein, 604 aa, Bacteroides uniformis; identical to SEQ ID NO: 10296

SEQ ID NO: 22097 - DNA, 50 bp, Bacteroides uniformis; identical to SEQ ID NO: 3312
  source 1..50: mol_type = genomic DNA

SEQ ID NO: 22098 - DNA, 40 bp, Bacteroides uniformis
  source 1..40: mol_type = genomic DNA
cggaacctgacaagaatactcagccagagctattacccaa

SEQ ID NO: 22099 - DNA, 40 bp, Bacteroides uniformis; identical to SEQ ID NO: 22098
  source 1..40: mol_type = genomic DNA

SEQ ID NO: 22100 - DNA, 50 bp, Bacteroides uniformis; identical to SEQ ID NO: 4930
  source 1..50: mol_type = genomic DNA

SEQ ID NO: 22101 - protein, 609 aa, Bacteroides uniformis
MTKIIGYARVSTTKQDLSRQKLKIKEFCENNNYELIEIIEDFGISGVVADRKGYIELQSKTYKDADMIVISELSRLSRQEDVTETVYNIQQIINKGLSVILLDSPSKIYEANKLLDITEILILTIKAWAAAQERLDIKKKNQDGKQALFQAYPYAVVDPKIPYGYKAVPNPNGKRPKYILEEVPEEVENIKRLFALVNSGKTLGAVARYFNERNITFRGYYSTVAILSNYIHSDIYRGIRRRTQRLGREEPYTIEVRIKPIISEEDFMKAQELIKNNYKNTPTGKVNHNPLKGIIRCRCGRAMTVKDKKPAAGISKLTYRCSCVDRKSHPDFCKYNIDEVSYDLTNEILYSLFKSMHTAEYINFFRNQTDNRVTELQEEIDGIEKRLSVLYLDKENLSNESQDNANKFLLTTNPTLLNIIQEKQNQLDEKIKSIDKEIIRYKKSQSKKMADIERIKDNNGKEKLQNLSIEEQGELYHKYLERVNYIPVTTMQGYYIVQFLNGIKFYIAITKVRSIAMASLLLDNWTIDEKGIITANYDTLKSSDMKNFSIEMIRKKKTMTLQEYLKSDLAKERALHLDLSYRERYLKELHKAGLDGRLRPLKKEYLHPF

SEQ ID NO: 22102 - DNA, 50 bp, Bacteroides uniformis
  source 1..50: mol_type = genomic DNA
ttgggtttttctgttttattatactcacttaactaaatagacttgcccaa

SEQ ID NO: 22103 - DNA, 40 bp, Bacteroides uniformis
  source 1..40: mol_type = genomic DNA
cggaacctggcaagaatactcagccagagctattacccaa

SEQ ID NO: 22104 - DNA, 40 bp, Bacteroides uniformis; identical to SEQ ID NO: 22103
  source 1..40: mol_type = genomic DNA

SEQ ID NO: 22105 - DNA, 50 bp, Bacteroides uniformis; identical to SEQ ID NO: 4930
  source 1..50: mol_type = genomic DNA

SEQ ID NO: 22106 - protein, 604 aa, Bacteroides uniformis; identical to SEQ ID NO: 3301

SEQ ID NO: 22107 - DNA, 50 bp, Bacteroides uniformis; identical to SEQ ID NO: 3302
  source 1..50: mol_type = genomic DNA

SEQ ID NO: 22108 - DNA, 40 bp, Bacteroides uniformis
  source 1..40: mol_type = genomic DNA
cggaacctggcaagaatactctgccaaagctattacccag

SEQ ID NO: 22109 - DNA, 40 bp, Bacteroides uniformis; identical to SEQ ID NO: 22108
  source 1..40: mol_type = genomic DNA

SEQ ID NO: 22110 - DNA, 50 bp, Bacteroides uniformis; identical to SEQ ID NO: 4930
  source 1..50: mol_type = genomic DNA

SEQ ID NO: 22111 - protein, 604 aa, Bacteroides uniformis; identical to SEQ ID NO: 3306

SEQ ID NO: 22112 - DNA, 50 bp, Bacteroides uniformis; identical to SEQ ID NO: 3302
  source 1..50: mol_type = genomic DNA

SEQ ID NO: 22113 - DNA, 40 bp, Bacteroides uniformis; identical to SEQ ID NO: 22108
  source 1..40: mol_type = genomic DNA

SEQ ID NO: 22114 - DNA, 40 bp, Bacteroides uniformis; identical to SEQ ID NO: 22108
  source 1..40: mol_type = genomic DNA

SEQ ID NO: 22115 - DNA, 50 bp, Bacteroides uniformis; identical to SEQ ID NO: 4930
  source 1..50: mol_type = genomic DNA

SEQ ID NO: 22116 - protein, 604 aa, Bacteroides uniformis; identical to SEQ ID NO: 3321

SEQ ID NO: 22117 - DNA, 50 bp, Bacteroides uniformis; identical to SEQ ID NO: 3312
  source 1..50: mol_type = genomic DNA

SEQ ID NO: 22118 - DNA, 40 bp, Bacteroides uniformis; identical to SEQ ID NO: 22108
  source 1..40: mol_type = genomic DNA

SEQ ID NO: 22119 - DNA, 40 bp, Bacteroides uniformis; identical to SEQ ID NO: 22108
  source 1..40: mol_type = genomic DNA

SEQ ID NO: 22120 - DNA, 50 bp, Bacteroides uniformis; identical to SEQ ID NO: 4930
  source 1..50: mol_type = genomic DNA

SEQ ID NO: 22121 - protein, 604 aa, Bacteroides uniformis; identical to SEQ ID NO: 3306

SEQ ID NO: 22122 - DNA, 50 bp, Bacteroides uniformis; identical to SEQ ID NO: 3302
  source 1..50: mol_type = genomic DNA

SEQ ID NO: 22123 - DNA, 40 bp, Bacteroides uniformis
  source 1..40: mol_type = genomic DNA
cggaacctggcaagaatactcagccaaagctattacccag

SEQ ID NO: 22124 - DNA, 40 bp, Bacteroides uniformis; identical to SEQ ID NO: 22123
  source 1..40: mol_type = genomic DNA

SEQ ID NO: 22125 - DNA, 50 bp, Bacteroides uniformis; identical to SEQ ID NO: 4930
  source 1..50: mol_type = genomic DNA

SEQ ID NO: 22126 - protein, 541 aa, Clostridium butyricum
MNIAIYSRKSVFKEAGDSVQNQIELCDMYIKRNFFNNEEIKIEIFEDDGFSAKNTNRPEFKRMIKKIENGEIDKLICYKLDRISRSVADFSTVLDLLQKNNCDFISISEQFDTSSPIGRAMIYIASIFAQLERESIAERVKDSMMQMAKRGMFLGGKPSLGFNVKRIKYMNEEMREKEASVLVPNLKELELVSTIYKTYLECGSVTGLEKILFDNGIKNRNNSYYKTSVLVDILRNPVYVKSNNKVHTYLCDMGMQVCGSPNGNGYLIYNKSNVNGKKKDKSEWICAISKNKGYIEPQLWLEVQKLLDKNKDKKIKRLGTGNNVSLLAGLLKCKVCGANMLPRANGGQYKQTYYICTNKKKRGEEKCTCKNIRVDYVDNAVLDSIKIYSKEVLSKSLDSYIKDNINNNSDDYIKSNIEDQIKEKEIFMNSLIEKLAVSTNERVTGILMDQIDNADTEIRKLKIKLEDNLNEEKENKSIIENIRYFVNNLSSFSKNIEIIDSIQFKRECLSKIIDKVVWDSENFKAIVSYSIDIENNESKKK

SEQ ID NO: 22127 - DNA, 50 bp, Clostridium butyricum
  source 1..50: mol_type = genomic DNA
cttcgtattctcgcagctctaccacatgctatgcttttgaaaatacgaag

SEQ ID NO: 22128 - DNA, 40 bp, Clostridium butyricum
  source 1..40: mol_type = genomic DNA
tatagcacgtgtccatgcccagccccgttgattatcattt

SEQ ID NO: 22129 - DNA, 40 bp, Clostridium butyricum
  source 1..40: mol_type = genomic DNA
tatagcacgtgtccatgcctagccccgttgattatcattt

SEQ ID NO: 22130 - DNA, 50 bp, Clostridium butyricum
  source 1..50: mol_type = genomic DNA
ggcaggatttcacaagctctgccataagttatgctgattataatacgaag

SEQ ID NO: 22131 - protein, 510 aa, Pectobacterium atrosepticum
MPQDSNGIAYSYVRFSSKKQASGDSLRRQTEMAEEYASRHMLRLSSKNFQDLGISAFREGKRPSLADMLTAIDEGQITAGSTIIIEALDRLSRRGIDVTLETVKEILSKDVQIVSLSDGLVLTKSSLNELQSVIRIALAADLAYKESERKAQRLRETKGQQRQDALNGIPINKILPFWLKRTETGYAFSDKVETARQIVTLKQEGKGSNMIAKFLNKQGIAGIRTAQWNHASITKMLKNPALYGAYQTGETNKEREMIQLEIVEGYYPALISKDEWLLLQSDQSKSTRGRRSTDNPYSGLLRCGCGGALIKRKSTVRGKLYVYHGCLNAKDGRCSQNLSIKGLDDALATMLGRLEFKKAVTSDRSAYLEKKQLEKRIANLNITLQEVDEVPSSVIKTISTMEARVKEITEQQAKIEREQRGIDAVNNAKLSSITDSLELNLMLKRVLKSITVTRSGSSWAVRIFHLSGHTQSFMLDNGKLKFVSDSIAMQRLLAEFTEDNQTSSYEPIYD

SEQ ID NO: 22132 - DNA, 50 bp, Pectobacterium atrosepticum
  source 1..50: mol_type = genomic DNA
agaaaaatattattaccacatatgaaactgcatggtgatattgttactta

SEQ ID NO: 22133 - DNA, 40 bp, Pectobacterium atrosepticum
  source 1..40: mol_type = genomic DNA
caaacaacggcttgctgccgaactgcatggtgatattgtt

SEQ ID NO: 22134 - DNA, 40 bp, Pectobacterium atrosepticum
  source 1..40: mol_type = genomic DNA
caaacaacggcttgctgccccactgcatggtgatattgtt

SEQ ID NO: 22135 - DNA, 50 bp, Pectobacterium atrosepticum
  source 1..50: mol_type = genomic DNA
acaataaaactaaaaccacagatgccactacatactcaaagtgtgactaa

SEQ ID NO: 22136 - protein, 503 aa, Bacillus wiedmannii
MAKKEDIKNVAIYLRASRDEENKGIEEALQSQRMLLTEMCETREWKYTIYEEIASSVTMQRSQLNSMLEGVEQGKYDAVVVKDIDRLSRDEFDSSDIKRILYRSDTAIATPPNTIYDWTNRQDMLLLNIKTFLSAQEYEIIRERLMYGKLSASKRGFWAHGTPPFGYKKNHETRKLEVDEDMVKHVHYIFNSIVEGKSVSEVRQELNKLGVKTKEGKKFSFNSIFRIINNEAYKGTLVYNRYKVTDEMRRDGKKKKTIELPKDEWERIEDAHPAIIDKATWEKANEIVNTYSFAKKRKSSTTYPTSRFTYCGTCGGTLTFQVAHTGKLYLKHCLKCGNRTYQYNPILEGIREKLIPFHQKLVDSITVLEQTGKDENIEYKKEQLDKRIKSVEVGIQRLLPAYQEMIITLEEFKEAKAKGEAELKQLHQELDELNKLDPTEQITNLQELKKQVEQLFGKWHRLDDEGLNDEDLNKALNIIIEKVIWTYPKGENVEPHLHVQFRM

SEQ ID NO: 22137 - DNA, 50 bp, Bacillus wiedmannii
  source 1..50: mol_type = genomic DNA
aagttgtattaagttactaaacaaacaagttgtgtaaccaaatacaactg

SEQ ID NO: 22138 - DNA, 40 bp, Bacillus wiedmannii; identical to SEQ ID NO: 5763
  source 1..40: mol_type = genomic DNA

SEQ ID NO: 22139 - DNA, 40 bp, Bacillus wiedmannii
  source 1..40: mol_type = genomic DNA
actcgtatttactggaccgattggttcggggaagacaaca

SEQ ID NO: 22140 - DNA, 50 bp, Bacillus wiedmannii
  source 1..50: mol_type = genomic DNA
cagttgtatctttgtacttaacaaatagtttgtccagggatgttcatctg

SEQ ID NO: 22141 - protein, 492 aa, Fusobacterium nucleatum
MRRAVAYCRFSSSNQREESIDAQIRAIKEYCNKNNFKLIRIYKDEAISGTSTKDREMFLEMILDCKKNLFDCVIVHKYDRFARNRYDHALYEKILNDNNVKLISVLEQLVDDSPESIILKSVLTGMNEYYSKNLSREVKKGKKENALKAIHNGGIPPLGYDLDENKKYIINKKEAEAVKLIFELALDGVGYVSIADILNKKGYKNKRGKEFRKISIRDTLLNIKYIGTYYYGLKDGHGKLQKEPIIIENSHEPIIDKDIFYKVQAKMKKNLKGPRNRNGQFYFLTGYCICGECGGPFSGGYRTVNRNGSISYGYYCQKKKRKETKCNNKAIRKELIESFIFDIIKKEVFSDDKIEKIIKDIISFSKNKNIKKEEEIKEYTKEIEKLQKMLLRLLEKNLEGHVVDEIFNIKNTELNERIQVLREKIYSIKNITEINENELREYLKKFKESANEHGKRKVVEAFVQEIRVYRDKIKIALRKFPKDLDMVKIGGD

SEQ ID NO: 22142 - DNA, 50 bp, Fusobacterium nucleatum
  source 1..50: mol_type = genomic DNA
gatatggttaagattggtggagatgaggaaacaaatattataaccattga

SEQ ID NO: 22143 - DNA, 40 bp, Fusobacterium nucleatum
  source 1..40: mol_type = genomic DNA
tgatagaaatggtggagatgacgagagtcgaactcgtgtc

SEQ ID NO: 22144 - DNA, 40 bp, Fusobacterium nucleatum
  source 1..40: mol_type = genomic DNA
tgatagaaatggtggagattacgagagtcgaactcgtgtc

SEQ ID NO: 22145 - DNA, 50 bp, Fusobacterium nucleatum
  source 1..50: mol_type = genomic DNA
gacagggtaaacttgggtggaaaataggaaacaaatgaattaccaactga

SEQ ID NO: 22146 - protein, 501 aa, Escherichia coli
MQKQNGLAYSYIRFSSKKQEQGDSVRRQTELAEKYASSNNLTLSEKNFQDLGISAFKEGNRPSLGDMLSAIEQGAIESGSTIIIESLDRLSRRGIDVTQQIIKSILQHNVFIASLTDGLLLNRESVNDLVSVIRIALAADLAHKESEKKSQRLRETKQQQRKAALEGKVINKILPFWLSREKDQFVFSDRFDAVKRIIELKKKGLGTNKIAKTLNDEGFKPLRSAGWNHTTVGKTLSSVALYGAYQTSETTKDRKVILLDIIDNYYPAVISKEDWMLLQSDAKQNKPGYKSDKNAFTGLLKHSCGGALVRKFHVVTGKTYQYHVCANARDGKCTVTQNFKNMEIALYKILKHLKMEKKTSVDATIAQERAQLKEQIDNLNGMLLTMKKVPMSVLETIGNLEEKLQELDQQFKQQSDMVLAEQSVDFNLLSEIKDPIELNMMLKRVIKEITVFNLKKSWRIKVQYLNGHSQSFRWDGYSMSFVSDSKKLLEYMNAEKEQLDN

SEQ ID NO: 22147 - DNA, 50 bp, Escherichia coli
  source 1..50: mol_type = genomic DNA
aaatcgttgctttgaaaaagcatagtgatattgttgctaagaagcaaaat

SEQ ID NO: 22148 - DNA, 40 bp, Escherichia coli; identical to SEQ ID NO: 4473
  source 1..40: mol_type = genomic DNA

SEQ ID NO: 22149 - DNA, 40 bp, Escherichia coli
  source 1..40: mol_type = genomic DNA
cttactgccgaactgcatggagacgttactggaaactaac

SEQ ID NO: 22150 - DNA, 50 bp, Escherichia coli
  source 1..50: mol_type = genomic DNA
aaattgttgaaaaccaaaagaaaagagaatatgttgataaaaagaaaagt

SEQ ID NO: 22151 - protein, 501 aa, Escherichia coli
MQKQNGLAYSYIRFSSKKQEQGDSVRRQTELAEKYASSNNLTLSEKNFQDLGISAFKEGNRPSLGDMLSAIEQGAIESGSTIIIESLDRLSRRGIDVTQQIIKSILQHNVFIASLTDGLLLNRESVNDLVSVIRIALAADLAHKESEKKSQRLRETKQQQRKAALEGKVINKILPFWLSREKDQFVFSDRLDAVKRIIELKKKGLGTNKIAKTLNDEGFKPLRSAGWNHTTVGKTLSSVALYGAYQTSETTKDRKVILLDIIDNYYPAVISKEDWMLLQSDAKQNKPGYKSDKNAFTGLLKHSCGGALVRKFHVVTGKTYQYHVCANARDGKCTVTQNFKNMEIALYKILKHLKMEKKTSVDTTIAQERAQLKEQIDNLNGMLLTMKKVPMSVLETIGNLEEKLQELDQQFKQQSDMVLAEQSVDFNLLSEIKDPIELNMMLKRVIKEITVFNLKKSWRIKVQYLNGHSQSFRWDGYSMSFVSDSKKLLEYMNAEKEQLDN

SEQ ID NO: 22152 - DNA, 50 bp, Escherichia coli; identical to SEQ ID NO: 22147
  source 1..50: mol_type = genomic DNA

SEQ ID NO: 22153 - DNA, 40 bp, Escherichia coli; identical to SEQ ID NO: 4473
  source 1..40: mol_type = genomic DNA

SEQ ID NO: 22154 - DNA, 40 bp, Escherichia coli; identical to SEQ ID NO: 22149
  source 1..40: mol_type = genomic DNA

SEQ ID NO: 22155 - DNA, 50 bp, Escherichia coli; identical to SEQ ID NO: 22150
  source 1..50: mol_type = genomic DNA

SEQ ID NO: 22156 - protein, 566 aa, Vibrio scophthalmi
MSKIIYPYIRFSSDKQAAGSSFQRQMERITDYANENGYIVNNSLKLQDLGLSAFTAKHIEKGALGAFLDGVKAGKIEQDGSAYLCIEQLDRLSRENVDDAYQVFRKILKSNVNIITLMDNKIYTKESLTDLMSIMYSLMLMAQANQESAKKSYRVLRAFDKKLDKLNDGKTVQYVGMFPGWIDNKGTKEETNFVINKKSEIVQRAFSLYINGTSMGDIARIFNDERVPQVAKKRQKNYTNSWSSAKINHLLKNRCVLGELLIRKTGDSFENYYPAIISVDDWDVVQSMMKTKKIAKSSGRRSINIFTGKMFCACCGQKYYFETDDKNTKTGKKLYYMLKCSGRRSLGCKSKSIKYDDFLDSTPNLFGMITQSKKDNSKEIDKIKLKIKEINEITKKLRDKLITLENLNDSNKLDFTIYLKESSKIQKQVRENDARVASFKLKISRLSSDNKLDYFDKTDPNSVVKAKKFISDNFAAFVISSDSRFCIALYNDGQVLQFKIKNSKIEKKESQVKNIDNFESFNEFYKLKEQVLETYKNGTMDGRFIEILSATNFWGVETSEKDYSLD

SEQ ID NO: 22157 - DNA, 50 bp, Vibrio scophthalmi
  source 1..50: mol_type = genomic DNA
ttcctgtaaactttacacagcatagtaaagctatgtatgattaacaggaa

SEQ ID NO: 22158 - DNA, 40 bp, Vibrio scophthalmi
  source 1..40: mol_type = genomic DNA
ggctggcgctaaattgaccgtaatccgcttggccggaaac

SEQ ID NO: 22159 - DNA, 40 bp, Vibrio scophthalmi
  source 1..40: mol_type = genomic DNA
ggctggcgctaaattgacctgaatccgcttggccggaaac

SEQ ID NO: 22160 - DNA, 50 bp, Vibrio scophthalmi
  source 1..50: mol_type = genomic DNA
ttcctgtcagatactcacatcatttgaaaactattaataagtgacaggag

SEQ ID NO: 22161 - protein, 566 aa, Vibrio gigantis
MSKIIYPYIRFSSDKQAAGSSFQRQMERITAYANENGYIVNNSLKLQDLGLSAFTAKHIEKGALGAFLDGVKAGKIEQDGSAYLCIEQLDRLSRENVDDAYQVFRKILKSNVNIITLMDNKIYTKESLTDLMSIMYSLMLMAQANQESAKKSYRVLRAFDKKLDKLNDGKTVQYVGMFPGWIDNKGTKEETNFVINKKSEIVQRAFSLYINGTSMGDIARIFNDERVPQVAKKRQKNYTNSWSSAKINHLLKNRCVLGELLIRKTGDIFENYYPAIISVDDWDVVQSMMKTKKIAKSSGRRSINIFTGKMFCACCGQKYYFETDDKNTKTGKKLYYMLKCSGRRSLSCKSKSIKYDDFLDSTPNLFGMITQSKKDNSKEIDEIKLKIKEINEITKKLRDKLITLENLNDSNKLDFTIYLKESSKIQKQVRENDARVASFKLKISRLSSDNKLDYFDKTDPNSVVKAKKFISDNFAAFVISSDSRFCIALYNDGQVLQFKIKNSKIEKKESQIKNIDNFESFNEFYKLKEQVLETYKNGTMDGRFIEILSATNFWGVETSEKDYSLD

SEQ ID NO: 22162 - DNA, 50 bp, Vibrio gigantis; identical to SEQ ID NO: 22157
  source 1..50: mol_type = genomic DNA

SEQ ID NO: 22163 - DNA, 40 bp, Vibrio gigantis
  source 1..40: mol_type = genomic DNA
tgctggagcgagattgaccgtgattcttttcgatggaaac

SEQ ID NO: 22164 - DNA, 40 bp, Vibrio gigantis
  source 1..40: mol_type = genomic DNA
tgctggagcgagattgacctggattcttttcgatggaaac

SEQ ID NO: 22165 - DNA, 50 bp, Vibrio gigantis; identical to SEQ ID NO: 22160
  source 1..50: mol_type = genomic DNA

SEQ ID NO: 22166 - protein, 521 aa, Vibrio owensii
MQPKIYSYQRISSKKQATGTGIDQQKESKVLQELAEKYQLPVSTEVFQDIGKSAFKGDHLDHAFGAIKERINDGRIAKGSILVISSLDRLSRQTVNVAQELMLSIVNAGVSIYTTIDQKMYNPDDDNLPASLIVSVIYLERAHNESKTKSARTRGNALSIYQSITRGDTGAFDADGHTKAIRSIGKTNWWLDTSSGFVKPHSYYFPIAQEIVQLILKGNSIAQVHRHLEATYTPPATRSKHGQRWSMDMMRRFHKSRVLIGEQTFKVDGTELKIENYAPPVCTEEDLTKMQAIRRKANTTGSGTKRNQYTGLLNGLNILKCKHCGGGMAIVQPSRRDGKQRNMRYVCSTGVNYKDQCKHWSFSHVDIDKWLLERLKLKRWNDQTKQDDRIPALIKDKTETQTKLDALSQSFNTFAEQALPIPETMVLKMHEYETAIKELNHQIDEIKIESSTAFNPIWREMMSLPTSHLLDIDSTDDRLRLKELMPTFIKSIHVHREDGKQRSPVLVEVLYSDDTTDSTKV

SEQ ID NO: 22167 - DNA, 50 bp, Vibrio owensii
  source 1..50: mol_type = genomic DNA
cagttcacataatcagaattaagcccgcccatttctgaatatgtgaactg

SEQ ID NO: 22168 - DNA, 40 bp, Vibrio owensii
  source 1..40: mol_type = genomic DNA
gtcgataagcgcattgggcccacccatttcagtacgcacc

SEQ ID NO: 22169 - DNA, 40 bp, Vibrio owensii
  source 1..40: mol_type = genomic DNA
gtcgataagcgcattgggccaacccatttcagtacgcacc

SEQ ID NO: 22170 - DNA, 50 bp, Vibrio owensii
  source 1..50: mol_type = genomic DNA
gagttcatactgccagagtttagacagcccatttcttttcttcttgacta

SEQ ID NO: 22171 - protein, 549 aa, Pectobacterium odoriferum
MKKVAYCYCRVSQRTQRTENGGYGMTRQQNLLLRYIGEYTDTERLGYVLNPENVVYLNAEGVSGFSGKNIENGSVLMDFINDVENGRIKNAVLCIENIDRFSRTNPQKAAMLFLRLIDAGCNIHEAENEIVHHPSSDLNLISSGLIRSNRESLRKQKLSLKNWDRRFDETIKSQVALTARCPYWLDVNDGQYIAVEEHIRAIRFVFEKYNNGYGQASIRDELNKRGWLCNGQKWSAWSVHRSLNDIRLTGRHKSAREQYDGMMMYPVIISDIEFQTAQQRLKSKNRGQKINKRANNIFAGLLICGLCKKSYIGVRFDTKSKRRYARCIQAVDGHCSGTGFSYEALENAILEYVRNVEVKTSTDNSNEIIKLEQELVYAINYRNEIQSDIDKQDIPDPSDRRILKNLQAKVSDIELQINHLKNSESIGYEIKNISDEINEDLLNVENVELRNEFNTRLRKVIQNIYITRYSNNILNIGVHYFSNAGNDTQWLLANAHDGTVYKNMFIEGKRVVCCVGDDIVEYDGYRELYLLNDQIVSKDVVIEALSKYS

SEQ ID NO: 22172 - DNA, 50 bp, Pectobacterium odoriferum
  source 1..50: mol_type = genomic DNA
aactttattttagcattgataagcatcattagtcatgctaaaataaagta

SEQ ID NO: 22173 - DNA, 40 bp, Pectobacterium odoriferum
  source 1..40: mol_type = genomic DNA
ggcgacgatcgcaatgacgatcatcagctcaatcagcgta

SEQ ID NO: 22174 - DNA, 40 bp, Pectobacterium odoriferum
  source 1..40: mol_type = genomic DNA
ggcgacgatcgcaatgacgcacatcagctcaatcagcgta

SEQ ID NO: 22175 - DNA, 50 bp, Pectobacterium odoriferum; identical to SEQ ID NO: 4950
  source 1..50: mol_type = genomic DNA

SEQ ID NO: 22176 - protein, 549 aa, Pectobacterium odoriferum
MKKVAYCYCRVSQRTQRTENGGYGMTRQQNLLLRYIGEYTDTERLGYVLNPENVVYLNAEGVSGFSGKNIENGSVLMDFINDVENGRIKNAVLCIENIDRFSRTNPQKAAMLFLRLIDAGCNIHEAENEIVHHPSSDLNLISSGLIRSNRESLRKQKLSLKNWDRRFDETIKSQVALTARCPYWLDVNDGQYIAVEEHIRAIRFVFEKYNNGYGQASIRDELNKRGWLCNGHKWSAWSVHRSLNDIRLTGRHKSAREQYDGMMMYPVIISDIEFQTAQQRLKSKNRGQKINKRANNIFAGLLICGLCKKSYIGVRFDTKSKRRYARCIQAVDGHCSGIGFSYEALENAILEYVRNVEVKTSTDNSNEIIKLEKELVYAINYRNEIQSDIDKQDIPDPSDRRILKNLQAKVSDIELQINHLKNSESIGYEIKNISDEINEDLLNVENVELRNEFNTRLRKVIQNIYITRYSNNILNIGVHYFSNAGSDTQWLLANAHDGTVYKNMFIEGKRVVCCVGDDIVEYDGYRELYLLNDQIVPKDVVIEALSKYS

SEQ ID NO: 22177 - DNA, 50 bp, Pectobacterium odoriferum
  source 1..50: mol_type = genomic DNA
aactttattttggcattgataagcatcattagtcatgctaaaataaagta

SEQ ID NO: 22178 - DNA, 40 bp, Pectobacterium odoriferum; identical to SEQ ID NO: 4958
  source 1..40: mol_type = genomic DNA

SEQ ID NO: 22179 - DNA, 40 bp, Pectobacterium odoriferum; identical to SEQ ID NO: 4959
  source 1..40: mol_type = genomic DNA

SEQ ID NO: 22180 - DNA, 50 bp, Pectobacterium odoriferum; identical to SEQ ID NO: 4950
  source 1..50: mol_type = genomic DNA

SEQ ID NO: 22181 - protein, 546 aa, Brevibacillus laterosporus
MSLKREYLIELGIENIINYLRRSRQDEERERRTGEDVLKEQKEIMDRILEPLGIPFTQKAEVGSGDKISTRPVFQNVIEELRAKKYQAIAVKEISRMGRGSYTDMGIIYDLIVDNRIFIITPYKTYDPRNSSDLRQIRFELFMSREEFETTRERLFGGRVNNAMAGRWVAGAAPFGFNYNKTTKKLEINEEQAAVVRMIFNHYVYGIPQENGTRRDVSFRALATYFSKKTPIKTPQGKSEWTYMQLRQLITNERYIGTMKFRMHQTINGKRVARPEEEHIIVPNAIPAIINMETWELAQQKVKDSSHKPRTKMDFSPCELAGLCICIQCGKRMVRQYSVQNYKTKEGTITTYHKEFLWCTTSGCTFVKYRAIEDDLLETLRYFEAMEDNLLKEEISTMITQDNKTNSNDLIEDIAGYIEQRTKELKNRLSFIYDKYENGIYTDEMFLERKAEIDMEMEKLKDIKENQPAENNEQNFDAQIIKKNIGSILEAYKTYTNKTDRNGVLRSVFDHVVIEVVEKGRGRKPAKHVIYPVLKHNLLQVDFLVP

SEQ ID NO: 22182 - DNA, 50 bp, Brevibacillus laterosporus
  source 1..50: mol_type = genomic DNA
tggtaccatgagataataaccgattcatccgttattatctcatacaccta

SEQ ID NO: 22183 - DNA, 40 bp, Brevibacillus laterosporus
  source 1..40: mol_type = genomic DNA
tgtatgagcaattatcagctcatcggctgaaattagggcg

SEQ ID NO: 22184 - DNA, 40 bp, Brevibacillus laterosporus
  source 1..40: mol_type = genomic DNA
tgtatgagcaattatcagcttatcggctgaaattagggcg

SEQ ID NO: 22185 - DNA, 50 bp, Brevibacillus laterosporus
  source 1..50: mol_type = genomic DNA
tgctactatagtgaatgaacccatttatttgttattctgttatacatcaa

SEQ ID NO: 22186 - protein, 537 aa, Mycobacteroides abscessus
MKDQAKRALVVVRLSRVTDATTSPERQREACLELCKQRGYEVIGTAEDLDVSAGKTTPFDRPQLGEWLTNRHHEFDVLVVFRMDRIVRRLLDLADLIRWCQTHSVALVSATEAFLDLTAPFGDVVALLVAKVAEMELAAISERNRSAAQHNMRAGKYRGGPPPWGYMPEKIDGEWRFVQDDEQVEVINEVVRRVLDGEPLRQVAADLTGRAVLTPRDRVNQLKGRETKGYSWHSAKLREMLTSKSLLGHAVTANGSIRNDDGSPVIRATPILEREIFEQVQVELAGRENRKEPTKRSSALLLQIIHCGVCGRPAYKLKGGKGRNPRYRCSSVQKRRKCENKTIALDYADNVVQKLVLGILGESERLERVWDSGSDNSAELAELDATLADLADQLGSGAFRKGTPQRRVLDSRIIALAARRDELATQAVNPAGWAWEPTGVQFADWWTQQDVNQRNVWLRSMNIRLTYRSSALPNGRTEVDNVTLDLGDLQTLTEQLRATGAVGNWQHVFTAMANKDIQGMHVRGDGDVELVPLGALC

SEQ ID NO: 22187 - DNA, 50 bp, Mycobacteroides abscessus
  source 1..50: mol_type = genomic DNA
tgtaaagacttgctttcgcatattcgatagtctatctttacatcaatgaa

SEQ ID NO: 22188 - DNA, 40 bp, Mycobacteroides abscessus
  source 1..40: mol_type = genomic DNA
atagtcccgatcgcgtactcgaccgtggacatgccatcct

SEQ ID NO: 22189 - DNA, 40 bp, Mycobacteroides abscessus
  source 1..40: mol_type = genomic DNA
atagtcccgatcgcgtactaaaccgtggacatgccatcct

SEQ ID NO: 22190 - DNA, 50 bp, Mycobacteroides abscessus
  source 1..50: mol_type = genomic DNA
tttatagattgattttggcataaaaaatagtctttcaatttaacattgaa

SEQ ID NO: 22191 - protein, 520 aa, Anoxybacillus caldiproteolyticus
MNRPTNLNVFIYLRKSRRDIEEEQKAATQGRSYDTLDRHRKQLFNLAKEEKHTILNVYEEVVSGEYLDQRPKMQEMLRDLQHQPVDAVLVMDLDRLGRGDMADQGTIYRILKYTETLIITPLEVIDPADETQELTFSIKSIIAREELKQINKRLIRGRNQSAREGKFIAAKPPYGYLKDENLKLIPDPKTAWVVQMIFDMFVREGKLRAEIAEHLNRLNIPSPRGKKWTDNGIMKILKREAYAGDIVYRKSVLKKGNERASRTYTDKNALIIAKDAHEPLVSREVFERAQEIMSQRFRPPKNKTKPLANPLAGILKCEVCGHSMERNYSPQRNGDIYHYYRCISTQCRTQKTQKSAKMEYVEEAVITGLRELMKQLKIASKQTKKEPVMIQNFEKILEEKRKELYELEKQKENLHDLLEKEVYDIHTFMSRQQHLGNRIREKQQEIFAIEEQINQEKEKNNKDLNAYVKQVEHVIDAYLSTDDVQKKNHLLKSVLEKVTYRRLPESTDPRDFIIQLYPKI

SEQ ID NO: 22192 - DNA, 50 bp, Anoxybacillus caldiproteolyticus
  source 1..50: mol_type = genomic DNA
atttaggagcatatatcttcacattcatatgaagatctatgcttctaaaa

SEQ ID NO: 22193 - DNA, 40 bp, Anoxybacillus caldiproteolyticus
  source 1..40: mol_type = genomic DNA
aacaggcgaatcctcatcttcatgaagggggtcttctaag

SEQ ID NO: 22194 - DNA, 40 bp, Anoxybacillus caldiproteolyticus
  source 1..40: mol_type = genomic DNA
aacaggcgaatcctcatctacatgaagggggtcttctaag

SEQ ID NO: 22195 - DNA, 50 bp, Anoxybacillus caldiproteolyticus
  source 1..50: mol_type = genomic DNA
atttaggaagaaaaatatttacatacatttgaagctcttagatcataaat

SEQ ID NO: 22196 - protein, 638 aa, Enterobacter roggenkampii
MKPKLYSYVRFSSVKQREGNSLERQQDTALKIAARYNLELDTTAFHDLGMSAFKGRNAHEGKLSEFIKQIGVKVPVGSWLVVENLDRISRDDAWTALDIFKSILSKGIVVVTGMDEKVYKYADVKNNPTDLIISLLMFTRAHDESLTKKNRVEAQARSLIRYNLTRKAGTPAKAIESVGQNVWWVDTKSGYVTPHPMYFSAAQKIIELKQNGETLLGIQRYLNEHYTAPKKRVYKDKTGQALTPKTKQWGKHLIRTFLNPTVHGQKIFTLDKRDESGAIIYDSESDEPLKETFIIPDYYPALMSEVDYLTLSKLDRHRAVTRSSSTYPGGNPEPEIPLLSGIGILFCGKCGSFMFKSGSSENKYRYICGSKIVQGKPCGKKGFTSYQLEHTVLQLIADHVWNNHQEDKTAWYESEIEKASEAVKKLLKLATLTDNIEELADQINANKQKKITLEKEFQQYKISRSEIQTTGWDQFRHFDVHDTKNPERKRIRLKVKQAIKRIDCYDIDGRHSHFEVTFADETKQRIVIKFNRNRSPGISYVEAQTVNDHDLLKMQGLVLHSFIDELISPEKFAQHIKDKHEVSILNPTFITELEDGVTRDEDSGIAIRVDGITSKSYATVNGIKYEINSLEDLEKLSQ

SEQ ID NO: 22197 - DNA, 50 bp, Enterobacter roggenkampii
  source 1..50: mol_type = genomic DNA
actgtgaataattgactattaggcttgcctaacatataattattcactat

SEQ ID NO: 22198 - DNA, 40 bp, Enterobacter roggenkampii
  source 1..40: mol_type = genomic DNA
gcagcgggtattggcaggcttgccctcgggcattcctgga

SEQ ID NO: 22199 - DNA, 40 bp, Enterobacter roggenkampii
  source 1..40: mol_type = genomic DNA
gcagcgggtattggcaggcgagccctcgggcattcctgga

SEQ ID NO: 22200 - DNA, 50 bp, Enterobacter roggenkampii
  source 1..50: mol_type = genomic DNA
actgtgaaccttggataattacgcgataccaacatagtttcattgattat

SEQ ID NO: 22201 - protein, 458 aa, Enterococcus casseliflavus
MKKAGIYIRVSTPEQEKNGYSLNAQEEKLKSFALAKDYEVKKVYRDGGFSGAKLERPAMLEMIDDIENNRLDLVLVYKLDRLSRSQKNTMYLIEDVFLKNNVDFISMQESFDTTTSFGRAMIGILSVFAQLERDNIRERMTLGRMERIKRGFYMGGGKVSFGYRYNQESNVLEIDEGEATAVRRMFELFLGGNSIYSLINTLKKEFPHYEKTFYDASVRRRLANEHYIGNSQYDGKIYVNTHEPIIDDLTFNQAQLMLSTRSHGNAFKHKYLFSGMITCKKCGKSYNGFESVCGKYSNKYYRCSSTTYKFKKKNGWECSGKRFRCEDVDKYILDKIKSIATDQVVSKKSKSTSLPIKKEIDKLKAQQAKLLDLYLDDRIDTNVLDEKSKHIKDLLEKLNKQLKEKPAIEKKVFDESVDKLANNFESLSFEQQRILIGNVIEKIEVVGGDMNVYFFDTK

SEQ ID NO: 22202 - DNA, 50 bp, Enterococcus casseliflavus
  source 1..50: mol_type = genomic DNA
tttgacaccaaataaacattggttagtaccaacgtaaaaatggacacaaa

SEQ ID NO: 22203 - DNA, 40 bp, Enterococcus casseliflavus
  source 1..40: mol_type = genomic DNA
cttagaacctgatttggttagtaccaacgtagggaagtgg

SEQ ID NO: 22204 - DNA, 40 bp, Enterococcus casseliflavus; identical to SEQ ID NO: 22203
  source 1..40: mol_type = genomic DNA

SEQ ID NO: 22205 - DNA, 50 bp, Enterococcus casseliflavus
  source 1..50: mol_type = genomic DNA
tttgaggccgctataagattggttagtatggacgtagtaactgacaaaac

SEQ ID NO: 22206 - protein, 511 aa, Vibrio parahaemolyticus
MESIAYLYARFSTKRQEDGDSLERQTLAAQEWCARNSVKLSDKTFEDLGVSAFKEGTRPALSEFIQATQTGRVHRGSFLLVEDDDRLSRRGWKVTQDLMHELVNLGITVVLLKTGRKYDADNIHDIGDNIILMVNADRAYKESERKSHLIRAQRKRARENRKVTGKLPAWIVRADTETGFDFNDKISVIRELIEVRSQGHSFQYVAKQLNAKNYTTGTGAKWSASGVRSIIQNHALYGAKAYFDTDKSSGRMNKHPIDIALDVFPLVINFEQWLSLQQKSKTGKGGRTSKRGAYSQLLRCGNCGSGMVQRTTTYKDQKRLYRKCISAVEGKCTQVEAVREPEIYLDKVLKDLTYKVIESGFVSKTPELKQQLETLEKTQDILIQNGMAEQLADLYVKMNEIKSLIDKSMEADRKSAEPVETSFSKILDIHDSTKRNIELRKLLDSVTFVLHAKVKTRSQWHVIIKQMNGYETSFLLDQKHGFGNTKIKFVANQEKLAKLESLIPEMEPWEQ

SEQ ID NO: 22207 - DNA, 50 bp, Vibrio parahaemolyticus
  source 1..50: mol_type = genomic DNA
ttgtattagaataaccttattactaaggttctttaccgaatctaatataa

SEQ ID NO: 22208 - DNA, 40 bp, Vibrio parahaemolyticus; identical to SEQ ID NO: 4428
  source 1..40: mol_type = genomic DNA

SEQ ID NO: 22209 - DNA, 40 bp, Vibrio parahaemolyticus; identical to SEQ ID NO: 4429
  source 1..40: mol_type = genomic DNA

SEQ ID NO: 22210 - DNA, 50 bp, Vibrio parahaemolyticus
  source 1..50: mol_type = genomic DNA
gtttatttttaagctcttatttctttggttctttactcattttattatag

SEQ ID NO: 22211 - protein, 511 aa, Vibrio parahaemolyticus
MESIAYLYARFSTKRQEDGDSLERQTLAAQEWCARNSVKLSDKTFEDLGVSAFKEGTRPALSEFIQVTQTGRVHRGSFLLVEDDDRLSRRGWKVTQDLMHELVNLGITVVLLKTGRKYDADNIHDIGDNIILMVNADRAYKESERKSHLIRAQRKRARENRKVTGKLPAWIVRADTETGFDFNDKISVIRELIEVRSQGHSFQYVAKQLNAKNYTTGTGAKWSASGVRSIIQNHALYGAKAYFDTDKSSGRMNKHPIDIALDVFPLVINFEQWLSLQQKSKTGKGGRTSKRGAYSQLLRCGNCGSGMVQRTTTYKDQKRLYRKCISAVEGKCTQVEAVREPEIYLDKVLKDLTYKVIESGFVSKTPELKQQLETLEKTQDILIQNGMAEQLADLYVKMNEIKSLIDKSMEADRKSAEPVETSFSKILDIHDSTKRNIELRKLLDSVTFVLHAKVKTRSQWHVIIKQMNGYETSFLLDQKHGFGNTKIKFVANQEKLAKLESLIPEMEPWEQ

SEQ ID NO: 22212 - DNA, 50 bp, Vibrio parahaemolyticus; identical to SEQ ID NO: 22207
  source 1..50: mol_type = genomic DNA

SEQ ID NO: 22213 - DNA, 40 bp, Vibrio parahaemolyticus; identical to SEQ ID NO: 4863
  source 1..40: mol_type = genomic DNA

SEQ ID NO: 22214 - DNA, 40 bp, Vibrio parahaemolyticus; identical to SEQ ID NO: 5164
  source 1..40: mol_type = genomic DNA

SEQ ID NO: 22215 - DNA, 50 bp, Vibrio parahaemolyticus; identical to SEQ ID NO: 22210
  source 1..50: mol_type = genomic DNA

SEQ ID NO: 22216 - protein, 511 aa, Vibrio parahaemolyticus; identical to SEQ ID NO: 22206

SEQ ID NO: 22217 - DNA, 50 bp, Vibrio parahaemolyticus; identical to SEQ ID NO: 22207
  source 1..50: mol_type = genomic DNA

SEQ ID NO: 22218 - DNA, 40 bp, Vibrio parahaemolyticus; identical to SEQ ID NO: 4863
  source 1..40: mol_type = genomic DNA

SEQ ID NO: 22219 - DNA, 40 bp, Vibrio parahaemolyticus; identical to SEQ ID NO: 5164
  source 1..40: mol_type = genomic DNA

SEQ ID NO: 22220 - DNA, 50 bp, Vibrio parahaemolyticus; identical to SEQ ID NO: 22210
  source 1..50: mol_type = genomic DNA

SEQ ID NO: 22221 - protein, 556 aa, Streptococcus mitis
MTHSTLTKQIPDWTKVEFEGLSEISVLYCRLSSEDANEGESNSISNQRLILSKLAERENLSNPIVFYDDGYSGSNAQRPAFQQALALVENNQVSNFVVKDLSRVSRDYLLSGNLLEVVFPSKNIRFISLQENIDSNKKSSQDAYLTPLVSLFNNWYSMQCSEKIKLSKHTKAKNGEKIGWITPYGYLNNPENRKEWLVDEYASEIVKRIFSEYISGRTPTEIAQGLRRDKVLTPARYKKKLGVSNYRILESDPCYWKTQMIWQILEKEEYIGSTINLKTAKISYKQRNCRLRPREDWLIFPDSHEAIISKEDFEIARKMMNHKRVVQRHNWKNKTGHENLFAGLLYCENEHKLSFCPQEKDGVNLDHYKCYHFKRAGDTCSGGHYLRKEVLENLILNELQELINSFQINEADLLQRLKDKFEIKETKKFSELKKQLTKNEQRMVELDTIIQRLYEKQLLGEIADDRFKKLCDSYEAEQAELKEKVQTATATLGVKMKSAHNIEEFMTTIRKYTQLENLTSKIVNELIDKIIIHQPIGRGKNRQIKLEIHYRFIGDI

SEQ ID NO: 22222 - DNA, 50 bp, Streptococcus mitis
  source 1..50: mol_type = genomic DNA
ggactgctgagtgaagtgtggtataatatccacacctcgcccagcagtcc

SEQ ID NO: 22223 - DNA, 40 bp, Streptococcus mitis
  source 1..40: mol_type = genomic DNA
agacggggttttgtgttataatagaggcatgaaaacaaat

SEQ ID NO: 22224 - DNA, 40 bp, Streptococcus mitis
  source 1..40: mol_type = genomic DNA
agacggggttttgtgttattctagaggcatgaaaacaaat

SEQ ID NO: 22225 - DNA, 50 bp, Streptococcus mitis
  source 1..50: mol_type = genomic DNA
ggaatgctgtggttagtttggtcttctatccagaccactcacactttttc

SEQ ID NO: 22226 - protein, 566 aa, Enterocloster asparagiformis
  REGION 418..476: note = misc_feature - Xaa can be any naturally occurring amino acid
MELKKDGLYFAYLRKSREDRDAEQHGEGETLERHRKILCDMASRYGITVATWYKEVVSGETIAARPEMLKMLEAIEDMRPDGVLVVELERLARGDTRDQGLIMETFKYSGTRIITPMKIYNPNDEFDEEYAEFGLFMSRREYKTINRRLQRGRKSSISEGKWIGNKSPYGYERVKIPNDKGFTLQAIPEEAAVVRLIYNMYVHGTPESGNIPVGTATIGHILDDMGVKPPNGSYWPACTVRRIVENPVYIGKLQHGYRPQQKRTVNGKITTSRPISKEYQIYNGLHTPIIDQELFDLAGQKRKESYRKPFFHGIKNPLAGLIYCTECGKSMYRRPASPTCRDDMIMCATRGCKTSASYYYLIEDRLLQALNQWLDEYRVQIEDTSLELNRAQLERYKTQLASAQEAETTAQKQLEKAXXXXXXXXXXXXXXXXXXXXXXXXXXXXXXXXXXXXXXXXXXXXXXXXXXXXXXXXXXXALNEKIALARREAKELSEKIRKLEKLTADKQTVIARWEHVLEEYPNVDSPVVKNTMLKEIIERVEYSKPYKGNRKSGGMDKFTLKIFPRL

SEQ ID NO: 22227 - DNA, 50 bp, Enterocloster asparagiformis
  source 1..50: mol_type = genomic DNA
tatgtataaagattgtgtactggcgaataggtacataaactctatacata

SEQ ID NO: 22228 - DNA, 40 bp, Enterocloster asparagiformis
  source 1..40: mol_type = genomic DNA
caccgatatcggaacggaggaactggcgcatcttgaaatc

SEQ ID NO: 22229 - DNA, 40 bp, Enterocloster asparagiformis
  source 1..40: mol_type = genomic DNA
caccgatatcggaacggagacactggcgcatcttgaaatc

SEQ ID NO: 22230 - DNA, 50 bp, Enterocloster asparagiformis
  source 1..50: mol_type = genomic DNA
aatgtatacccacaggctagtgggacatagggacatttagattatacaaa

SEQ ID NO: 22231 - protein, 628 aa, Eisenbergiella tayi; identical to SEQ ID NO: 14891

SEQ ID NO: 22232 - DNA, 50 bp, Eisenbergiella tayi; identical to SEQ ID NO: 262
  source 1..50: mol_type = genomic DNA

SEQ ID NO: 22233 - DNA, 40 bp, Eisenbergiella tayi
  source 1..40: mol_type = genomic DNA
aaaaatacaaactggcggcgggcaagaccgcaaaaagcat

SEQ ID NO: 22234 - DNA, 40 bp, Eisenbergiella tayi
  source 1..40: mol_type = genomic DNA
aaaaatacaaactggcggccagcaagaccgcaaaaagcat

SEQ ID NO: 22235 - DNA, 50 bp, Eisenbergiella tayi
  source 1..50: mol_type = genomic DNA
agaaattccattatatttcctttccagttttctttgtttacaaagacttt

SEQ ID NO: 22236 - protein, 628 aa, Fusicatenibacter saccharivorans; identical to SEQ ID NO: 14891

SEQ ID NO: 22237 - DNA, 50 bp, Fusicatenibacter saccharivorans; identical to SEQ ID NO: 262
  source 1..50: mol_type = genomic DNA

SEQ ID NO: 22238 - DNA, 40 bp, Fusicatenibacter saccharivorans
  source 1..40: mol_type = genomic DNA
gcaaattcaagatggcggcgggcaagaccttaaagtccat

SEQ ID NO: 22239 - DNA, 40 bp, Fusicatenibacter saccharivorans
  source 1..40: mol_type = genomic DNA
gcaaattcaagatggcggccagcaagaccttaaagtccat

SEQ ID NO: 22240 - DNA, 50 bp, Fusicatenibacter saccharivorans; identical to SEQ ID NO: 22235
  source 1..50: mol_type = genomic DNA

SEQ ID NO: 22241 - protein, 628 aa, Hungatella hathewayi
MRKNEKITALYERLSRDDFGKDDDQQRESNSISNQKAMLEEFAARQGFTNLVHFTDDGISGTCFDRPGFLAMMKEVEAGNVEYLCIKDMSRMGRDYLKVGQIMEILRQRGVRLIAINDGVDSARGDDDFTPFRNIMNEYYARDTSRKIRSTFQSKGKSGKHLTGTVIYGYLWNEARDQWLVDPEAADVVKRIFAMTIEGYGPYQIASKLKEEKVLIPSAYLAQHGEGVNKNKTFKDVYGWGSSTICNILEKREYLGHTINFKTRKHFKDKKSHYVPEDEWTIFENTHEPIIDQQTFDLVQKIRGNVRRYPDGWGEAAPLTGLLYCADCGGKMYVHRTNNGKRISQYTCSQYSKVPVGKLCTTQHRINEDVVLSLVSEMLKAIAEYAKHDRAEFVRVVQEAQSSQQTAEVKKQRIRLATAKQRVSELEVLLCKIYEDNILGKLSDSRYATLDAQYEKEQSELTAEISALEKAVKSYEKHEKDADRFIALIDKYENFDKLTIAMLNEFIEKILVHERDRKGSIQTTQEVEIYFNFVGRFVPPAFGEAELTPEELEEIRKREERKDRLHQNYLKRKASGAQKRYEDKIKGRKKAEIEAKKAAIRAEDIAKGVFVPVSSLPQREPMKGVQTA

SEQ ID NO: 22242 - DNA, 50 bp, Hungatella hathewayi; identical to SEQ ID NO: 262
  source 1..50: mol_type = genomic DNA

SEQ ID NO: 22243 - DNA, 40 bp, Hungatella hathewayi
  source 1..40: mol_type = genomic DNA
gtaaactcaatgaggcggacggccctgccgccttttgcgt

SEQ ID NO: 22244 - DNA, 40 bp, Hungatella hathewayi
  source 1..40: mol_type = genomic DNA
gtaaactcaatgaggcggacagccctgccgccttttgcgt

SEQ ID NO: 22245 - DNA, 50 bp, Hungatella hathewayi; identical to SEQ ID NO: 22235
  source 1..50: mol_type = genomic DNA

SEQ ID NO: 22246 - protein, 628 aa, Eisenbergiella massiliensis
MRKNEKITALYERLSRDDFGKDDDQQRESNSISNQKAMLEEFAARQGFTNIVHFTDDGISGTCFDRPGFLAMMKEVEAGNVEYLCIKDMSRMGRDYLKVGQIMEILRQRGVRLIAINDGVDSARGDDDFTPFRNIMNEYYARDTSRKIRSTFQSKGKSGKHLTGTVIYGYLWNEARDQWLVDPEAAEVVKRIFAMTIEGYGPYQIARKLKSEKVLIPSAYLAQHGEGVNKNKTFKDVYGWGSSTICNILEKREYLGHTINFKTRKHFKDKKSHYVPEDEWTIFENTHEAIIDQQTFDLVQKIRGNVRRYPDGWGEAAPLTGLLYCADCGGKMYVHRTNNGKRISQYTCSQYTKVPCGTLCKTQHRINEDVVLSLVSEMLKAIAEYAKHDRAEFVRVVQEAQSSQQTAEVKKQRTRLATAKQRVSELEVLLCKIYEDNILGKLSDSRYATLDAQYAKEQAELTAEISALEKAVKSYETHEKDADRFIALIDKYENFDKLTIAMFNEFIEKILVHERDRKGSIQTTQEVEIYFNFVGRFVPPAFGEAELTPEELEEIRKREERKDRLHQNYLKRKASGAQKRYEDKIKKRKKAEIEAKKAAIRAEDIAKGVFVPVSSLPQREPMKGVQTA

SEQ ID NO: 22247 - DNA, 50 bp, Eisenbergiella massiliensis; identical to SEQ ID NO: 262
  source 1..50: mol_type = genomic DNA

SEQ ID NO: 22248 - DNA, 40 bp, Eisenbergiella massiliensis; identical to SEQ ID NO: 22233
  source 1..40: mol_type = genomic DNA

SEQ ID NO: 22249 - DNA, 40 bp, Eisenbergiella massiliensis; identical to SEQ ID NO: 22234
  source 1..40: mol_type = genomic DNA

SEQ ID NO: 22250 - DNA, 50 bp, Eisenbergiella massiliensis; identical to SEQ ID NO: 22235
  source 1..50: mol_type = genomic DNA

SEQ ID NO: 22251 - protein, 628 aa, Agathobaculum butyriciproducens
MRKNEKITALYERLSRDDFGKDDDQQRESNSISNQKAMLEDFAARQGFTNIVHFTDDGISGTCFDRPGFLAMMKEVEAGNVEYLCIKDMSRMGRDYLKVGQIMEILRQRGVRLIAINDGVDSARGDDDFTPFRNIMNEYYARDTSRKIRSTFQSKGKSGKHLTGTVIYGYLWNEARDQWLVDPEAAEVVKRIFAMTIEGYGPYQIASKLKEEKVLIPSAYLAQHGEGVNKNKTFKDVYGWGSSTICNILEKREYLGHTINFKTRKHFKDKKSHYVPEDEWAIFENTHEPIIDQQTFDLVQKIRGNVRRYPDGWGEAAPLTGLLYCADCGGKMYVHRTNNGKRISQYTCSQYSKVPVGKLCMTQHRINEDVVLSLVSEMLKAIAEYAKHDRAEFVRVVQEAQSSQQTAEVKKQRSRLATAKQRVSELEVLLCKIYEDNILGKLSDSRYATLDAQYEKEQSELTAEISVLEKAVKSYEKHEKDADRFIALIDKYENFDKLTIAMLNEFIEKILVHERDRKGSIQTTQEVEIYFNFVGRFVPPAFGEVELTLEELEEIRKREERKDRLHQNYLKRKASGAQKRYEDKIKERKKTEIEAKKAAIRAEDIAKGVFVPVSSLPQREPMKGVQTA

SEQ ID NO: 22252 - DNA, 50 bp, Agathobaculum butyriciproducens; identical to SEQ ID NO: 262
  source 1..50: mol_type = genomic DNA

SEQ ID NO: 22253 - DNA, 40 bp, Agathobaculum butyriciproducens
  source 1..40: mol_type = genomic DNA
ccaaattcaagctggcagcgggcaagaccttaaagtcgat

SEQ ID NO: 22254 - DNA, 40 bp, Agathobaculum butyriciproducens
  source 1..40: mol_type = genomic DNA
ccaaattcaagctggcagccagcaagaccttaaagtcgat

SEQ ID NO: 22255 - DNA, 50 bp, Agathobaculum butyriciproducens; identical to SEQ ID NO: 22235
  source 1..50: mol_type = genomic DNA

SEQ ID NO: 22256 - protein, 628 aa, Akkermansia muciniphila; identical to SEQ ID NO: 19961

SEQ ID NO: 22257 - DNA, 50 bp, Akkermansia muciniphila; identical to SEQ ID NO: 262
  source 1..50: mol_type = genomic DNA

SEQ ID NO: 22258 - DNA, 40 bp, Akkermansia muciniphila
  source 1..40: mol_type = genomic DNA
gcacggattttctggtgttgggagagatggggtaatccgt

SEQ ID NO: 22259 - DNA, 40 bp, Akkermansia muciniphila
  source 1..40: mol_type = genomic DNA
gcacggattttctggtgttcagagagatggggtaatccgt

SEQ ID NO: 22260 - DNA, 50 bp, Akkermansia muciniphila; identical to SEQ ID NO: 22235
  source 1..50: mol_type = genomic DNA

SEQ ID NO: 22261 - protein, 625 aa, Flavonifractor plautii
MRKNEKITALYERLSRDDFGKDDDQQRESNSISNQKAMLEEFAARQGFTNIVHFTDDGISGTCFDRPGFLAMMKEVEAGNVEYLCIKDMSRMGRDYLKVGQIMEILRQRGVRLIAINDGVDSARGDDDFTPFRNIMNEYYARDTSRKIRSTFQSKGKSGKHLTGTVIYGYLWNEARDQWLVDPEAAEVVKRIFAMTIDGYGPYQIASKLKEEKVLIPSAYLARHGEGVNKNKTFKDVYGWGSSTICNILEKREYLGHTINFKTRKHFKDKKSHYVPEDEWTIFENTHEPIIDQQTFDLVQKIRGNVRRYPDGWGEAAPLTGLLYCADCGGKMYVHRTNNGKRISQYTCSQYSKVPVGKLCTTQHRINEDVVLSLVSEMLKAIAEYAKHDRAEFVRVVQEAQSSQQTAEVKKQRTRLATAKQRVSELEVLLCKIYEDNILGKLSDSRYATLDAQYEKEQSELTVEISDLEKAIKSYEKHEKDADRFIALIDKYENFDKLTIAMLNEFIEKILVHERDRKGSIQTTQEVEIYFNFVGRFVPPAFGEVELTPEELEEIRKREARKDRLHQNYLKRKANGKQKEYEERTKAKKKAEIEARKQAIRTEDIARGVFIPVSSLPQLGPRKGA

SEQ ID NO: 22262 - DNA, 50 bp, Flavonifractor plautii; identical to SEQ ID NO: 262
  source 1..50: mol_type = genomic DNA

SEQ ID NO: 22263 - DNA, 40 bp, Flavonifractor plautii
  source 1..40: mol_type = genomic DNA
ccaaatataagctggcggcgggcaaaactgccaagagcat

SEQ ID NO: 22264 - DNA, 40 bp, Flavonifractor plautii
  source 1..40: mol_type = genomic DNA
ccaaatataagctggcggccagcaaaactgccaagagcat

SEQ ID NO: 22265 - DNA, 50 bp, Flavonifractor plautii; identical to SEQ ID NO: 22235
  source 1..50: mol_type = genomic DNA

SEQ ID NO: 22266 - protein, 628 aa, Flavonifractor plautii
MRKNEKITALYERLSRDDFGKDDDQQRESNSISNQKAMLEEFAARQGFTNIVHFTDDGISGTCFDRPGFLAMMKEVEAGNVEYLCIKDMSRMGRDYLKVGQIMEILRQRGVRLIAINDGVDSARGDDDFTPFRNIMNEYYARDTSRKIRSTFQSKGKSGKHLTGTVIYGYLWNEARDQWLVDPEAADVVKRIFAMTIEGYGPYQIASKLKEEKILIPSAYLAQHGEGVNKNKTFKDVYGWGSSTICNILEKREYLGHTINFKTRKHFKDKKSHYVPEDEWTIFENTHEAIIDQQTFDLVQKIRGNVRRYPDGWGEAAPLTGLLYCADCGGKMYVHRTNNGKRISQYTCSQYTKVPCGTLCKTQHRINEDVVLSLVSEMLKAIADYAKHDRAEFVRVVQEAQSSQQTAEVRKQRTRLATAKQRVSELEVLLCKIYEDNILGKLSDSRYATLDAQYEKEQSELTAEISVLEKAVKSYEKHEKDADRFIALIDKYENFDKLTIAMLNEFIEKILVHERDRKGSIQTTQEVEIYFNFVGRFVPPAFGEVELTPEELEEIRKREERKDRLHQNYLKRKASGAQKRYEDKIKKRKKAEIEAKKAAIRAEDIAKGVFVPVSSLPQREPMKGVQTA

SEQ ID NO: 22267 - DNA, 50 bp, Flavonifractor plautii; identical to SEQ ID NO: 262
  source 1..50: mol_type = genomic DNA

SEQ ID NO: 22268 - DNA, 40 bp, Flavonifractor plautii; identical to SEQ ID NO: 22263
  source 1..40: mol_type = genomic DNA

SEQ ID NO: 22269 - DNA, 40 bp, Flavonifractor plautii; identical to SEQ ID NO: 22264
  source 1..40: mol_type = genomic DNA

SEQ ID NO: 22270 - DNA, 50 bp, Flavonifractor plautii; identical to SEQ ID NO: 22235
  source 1..50: mol_type = genomic DNA

SEQ ID NO: 22271 - protein, 628 aa, Flavonifractor plautii
MRKNEKITALYERLSRDDFGKDDDQQRESNSISNQKAMLEEFAARQGFTNIVHFTDDGISGTCFDRPGFLAMMKEVEAGNVEYLCIKDMSRMGRDYLKVGQIMEILRQRGVRLIAINDGVDSARGDDDFTPFRNIMNEYYARDTSRKIRSTFQSKGKSGKHLTGTVIYGYLWNEARDQWLVDPEAADVVKRIFAMTIDGYGPYQIASKLKSEKVLIPSAYLAQHGEGVNKNKTFKDVYGWGSSTICNLLEKREYLGHTINFKTRKHFKDKKSHYVPEDEWTIFENTHEAIIDQQTFDLVQKIRGNVRRYPDGWGEAAPLTGLLYCADCGGKMYVHRTNNGKRISQYTCSQYSKVPVGKLCTTQHRINEDVVLSLVSEMLKAIAEYAKHDRAEFVRVVQEAQSSQQTAEVRKQRTRLATAKQRVSELEVLLCKIYEDNILGKLSDSRYATLDAQYEKEQSELTAEISALEKAVKSYEKHEKDADRFIALIDKYENFDKLTIAMLNEFIEKILVHERDRKGSIQTTQEVEIYFNFVGRFVPPAFGEVELTPEELEEIRKREERKDRLHQNYLKRKASGAQKRYEDKIKGRKKAEIEAKKAAIRAEDIAKGVFVPVSSLPQREPMKGVQTA

SEQ ID NO: 22272 - DNA, 50 bp, Flavonifractor plautii; identical to SEQ ID NO: 262
  source 1..50: mol_type = genomic DNA

SEQ ID NO: 22273 - DNA, 40 bp, Flavonifractor plautii; identical to SEQ ID NO: 22263
  source 1..40: mol_type = genomic DNA

SEQ ID NO: 22274 - DNA, 40 bp, Flavonifractor plautii; identical to SEQ ID NO: 22264
  source 1..40: mol_type = genomic DNA

SEQ ID NO: 22275 - DNA, 50 bp, Flavonifractor plautii; identical to SEQ ID NO: 22235
  source 1..50: mol_type = genomic DNA

SEQ ID NO: 22276 - protein, 628 aa, Blautia obeum; identical to SEQ ID NO: 22266

SEQ ID NO: 22277 - DNA, 50 bp, Blautia obeum; identical to SEQ ID NO: 262
  source 1..50: mol_type = genomic DNA

SEQ ID NO: 22278 - DNA, 40 bp, Blautia obeum
  source 1..40: mol_type = genomic DNA
aaaaatacaaaatggcggctggcaaaactgccaaaagtat

SEQ ID NO: 22279 - DNA, 40 bp, Blautia obeum
  source 1..40: mol_type = genomic DNA
aaaaatacaaaatggcggccagcaaaactgccaaaagtat

SEQ ID NO: 22280 - DNA, 50 bp, Blautia obeum; identical to SEQ ID NO: 22235
  source 1..50: mol_type = genomic DNA

SEQ ID NO: 22281 - protein, 628 aa, Ruminococcus gnavus
MRKNEKITALYERLSRDDFGKDDDQQRESNSISNQKAMLEEFAARQGFTNIVHFTDDGISGTCFDRPGFLAMMKEVEAGNVEYLCIKDMSRMGRDYLKVGQIMEILRQRGVRLIAINDGVDSARGDDDFTPFRNIMNEYYARDTSRKIRSTFQSKGKSGKHLTGTVIYGYLWNEARDQWLVDPEAAEVVKRIFAMTIEGYGPYQIASKLKEEKILIPSAYLAQHGEGVNKNKTFKDVYGWGSSTICNLLEKREYLGHTINFKTRKHFKDKKSHYVPEDEWTIFENTHEAIIDQQTFDLVQKIRGNVRRYPDGWGEAAPLTGLLYCADCGGKMYVHRTNNGKRISQYTCSQYSKIPVGKLCATQHRINEDVVLSLVSEMLKAIAEYAKHDRAEFVRVVQEAQSSQQTTEVRKQRTRLAAAKQRVSDLEVLLCKIYEDNILGKLSDSRYATLDAQYAKEQAELTDEISALEKAIRSYEKHEKDADRFIALIDKYENFDKLTIAMLNEFIEKILVHERDRKGSIQTTQEVEIYFNFVGRFVPPAFGEAELTPEELEEIRKREERKDRLHQNYLKRKASGAQKRYEDKIKGRKKAEIEAKKAAIRAEDIAKGVFVPVSSLPQREPMKGVQTA

SEQ ID NO: 22282 - DNA, 50 bp, Ruminococcus gnavus; identical to SEQ ID NO: 262
  source 1..50: mol_type = genomic DNA

SEQ ID NO: 22283 - DNA, 40 bp, Ruminococcus gnavus; identical to SEQ ID NO: 22233
  source 1..40: mol_type = genomic DNA

SEQ ID NO: 22284 - DNA, 40 bp, Ruminococcus gnavus; identical to SEQ ID NO: 22234
  source 1..40: mol_type = genomic DNA

SEQ ID NO: 22285 - DNA, 50 bp, Ruminococcus gnavus; identical to SEQ ID NO: 22235
  source 1..50: mol_type = genomic DNA

SEQ ID NO: 22286 - protein, 628 aa, Ruminococcus gnavus; identical to SEQ ID NO: 22266

SEQ ID NO: 22287 - DNA, 50 bp, Ruminococcus gnavus; identical to SEQ ID NO: 262
  source 1..50: mol_type = genomic DNA

SEQ ID NO: 22288 - DNA, 40 bp, Ruminococcus gnavus
  source 1..40: mol_type = genomic DNA
aaaaatacaaacttgcggcgggcaagaccgcaaaaagcat

SEQ ID NO: 22289 - DNA, 40 bp, Ruminococcus gnavus
  source 1..40: mol_type = genomic DNA
aaaaatacaaacttgcggccagcaagaccgcaaaaagcat

SEQ ID NO: 22290 - DNA, 50 bp, Ruminococcus gnavus; identical to SEQ ID NO: 22235
  source 1..50: mol_type = genomic DNA

SEQ ID NO: 22291 - protein, 628 aa, Dorea longicatena
MRKNEKITALYERLSRDDFGKDDDQQRESNSISNQKAMLEEFAARQGFTNIVHFTDDGISGTCFDRPGFLAMMKEVEAGNVEYLCIKDMSRMGRDYLKVGQIMEILRQRGVRLIAINDGVDSARGDDDFTPFRNIMNEYYARDTSRKIRSTFQSKGKSGKHLTGTVIYGYLWNEARDQWLVDPEAADVVKRIFAMTIDGYGPYQIASKLKSEKVLIPSAYLAQHGEGVNKNKTFKDVYGWGSSTICNILEKREYLGHTINFKTRKHFKDKKSHYVPEDEWTIFENTHEAIIDQQTFDLVQKIRGNVRRYPDGWGEAAPLTGLLYCADCGGKMYVHRTNNGKRISQYTCSQYSKVPVGKLCTTQHRINEDVVLSLVSEMLKAIAEYAKHDRAEFVRVVQEAQSSQQTAEVKKQRIRLATAKQRVSELEVLLCKIYEDNILGKLSDSRYATLDAQYEKEQSELTAEISALEKAVKSYEKHEKDADRFIALIDKYENFDKLTIAMLNEFIEKILVHERDRKGSIQTTQEVEIYFNFVGRFVPPAFGEVELTPEELEEIRKREERKDRLHQNYLKRKASGAQKRYEDKIKERKKAEIEAKKAAIRAEDIARGVFVPVSSLPQREPMKGVQSA

SEQ ID NO: 22292 - DNA, 50 bp, Dorea longicatena; identical to SEQ ID NO: 262
  source 1..50: mol_type = genomic DNA

SEQ ID NO: 22293 - DNA, 40 bp, Dorea longicatena; identical to SEQ ID NO: 22278
  source 1..40: mol_type = genomic DNA

SEQ ID NO: 22294 - DNA, 40 bp, Dorea longicatena; identical to SEQ ID NO: 22279
  source 1..40: mol_type = genomic DNA

SEQ ID NO: 22295 - DNA, 50 bp, Dorea longicatena; identical to SEQ ID NO: 22235
  source 1..50: mol_type = genomic DNA

SEQ ID NO: 22296 - protein, 489 aa, Clostridium perfringens; identical to SEQ ID NO: 6046

SEQ ID NO: 22297 - DNA, 50 bp, Clostridium perfringens
  source 1..50: mol_type = genomic DNA
agacctatatagttatataaaacaactgcaatatatatctatataggtcc

SEQ ID NO: 22298 - DNA, 40 bp, Clostridium perfringens; identical to SEQ ID NO: 6113
  source 1..40: mol_type = genomic DNA

SEQ ID NO: 22299 - DNA, 40 bp, Clostridium perfringens
  source 1..40: mol_type = genomic DNA
tgaacctgctaataaagaatttgcaacctgtataggtctt

SEQ ID NO: 22300 - DNA, 50 bp, Clostridium perfringens
  source 1..50: mol_type = genomic DNA
atacatatatatatatatataatatttaaaatatatttatatatatttca

SEQ ID NO: 22301 - protein, 510 aa, Bacteroides clarus
MNVIIYCRVSSDEQTLGASLDVQEERLRKYCNQMGYNIINNIPYREDESAKTFEKRPVIQGIMNYIRKNKGRVNKLLFLRWDRYSRDIISASENLKELLKLGVEPNAIEAPLDFNSDTWPLLLGVHIGSAQCDNIKRSKATMDGIHGTLAKGKCANKAPRGYKNVRISKHETHVEIDTNTAPFIQAMFKEVAKGIETPCYIRRKFARKGYNIPESSFLEMLRNKFYIGKIRVPAYKGEPEYYVNGEHEAIIDEETFYKVQEILDGKRKKTPKLSKAINPDLYLRKFLICPVCGCALTGATSSGNGGKYTYYFCCNNQKHIRMRAENVNEEFARYTAQLKPNKTVLNLYNEILKDLQNERKGESKKEVVALQNELSTVQKRINSIEDKYLDGDLTKEEYNRMLERYTKEASTIQQQVEMRENPNRSNIEPKLNYSINLINNIDSYIRNASVGVKIKLISSMFPEKIEFDGKTYRTNSYNKVLDLIYQQTNELRGVEKKNGESFSTFSASVP

SEQ ID NO: 22302 - DNA, 50 bp, Bacteroides clarus
  source 1..50: mol_type = genomic DNA
tttttcaactttctccgcctcagtacccttaaccgttctgttctcgaacc

SEQ ID NO: 22303 - DNA, 40 bp, Bacteroides clarus
  source 1..40: mol_type = genomic DNA
attatcagggtttattcgtacccagacccggggtcgaacc

SEQ ID NO: 22304 - DNA, 40 bp, Bacteroides clarus
  source 1..40: mol_type = genomic DNA
attatcagggtttattcgtcaccagacccggggtcgaacc

SEQ ID NO: 22305 - DNA, 50 bp, Bacteroides clarus
  source 1..50: mol_type = genomic DNA
ttttcctacttgagctccctcagtcaccttgactgacaacatctggaagc

SEQ ID NO: 22306 - protein, 471 aa, Listeria monocytogenes; identical to SEQ ID NO: 1821

SEQ ID NO: 22307 - DNA, 50 bp, Listeria monocytogenes; identical to SEQ ID NO: 1822
  source 1..50: mol_type = genomic DNA

SEQ ID NO: 22308 - DNA, 40 bp, Listeria monocytogenes; identical to SEQ ID NO: 7183
  source 1..40: mol_type = genomic DNA

SEQ ID NO: 22309 - DNA, 40 bp, Listeria monocytogenes
  source 1..40: mol_type = genomic DNA
ttcaatgttactgtatcctagtgtgtacctatagcccatc

SEQ ID NO: 22310 - DNA, 50 bp, Listeria monocytogenes
  source 1..50: mol_type = genomic DNA
tgtatgcttaattacaaatatcttagtgattattttataacaaaactatt

SEQ ID NO: 22311 - protein, 471 aa, Listeria monocytogenes; identical to SEQ ID NO: 14526

SEQ ID NO: 22312 - DNA, 50 bp, Listeria monocytogenes; identical to SEQ ID NO: 14527
  source 1..50: mol_type = genomic DNA

SEQ ID NO: 22313 - DNA, 40 bp, Listeria monocytogenes; identical to SEQ ID NO: 7183
  source 1..40: mol_type = genomic DNA

SEQ ID NO: 22314 - DNA, 40 bp, Listeria monocytogenes; identical to SEQ ID NO: 22309
  source 1..40: mol_type = genomic DNA

SEQ ID NO: 22315 - DNA, 50 bp, Listeria monocytogenes; identical to SEQ ID NO: 22310
  source 1..50: mol_type = genomic DNA

SEQ ID NO: 22316 - protein, 467 aa, Cupriavidus taiwanensis
MRSAAVYARISADVEGAGLGVARQLEDCRKLAADRGWLVGDEYVDNDVSAFSGKPRREYVRMLADLKSGARDGVIVYNLDRLHRRPVELEEFVALCELVGVRDVATVTADIDLGNDDGLFMARIFAAFAAKESGRKSARIRRKMLQNAERGLPHGSVRPFGYEPDKVAVRCDEAAVVCEMVDRYLAGASIRSLTMWLNDSGVPPAASKAWRTSTVRQILCSGRIAGLREHHGQVIGAAAWPAIITPAQRDQVLARMTARALTKTRAPRTYLLSGLLRCGRCGNRLYSQARHVNPDNRVRRYVCLSGPDQGGCGRLTVVARPVEELLTDAVLTRLDSPQLADALAGKASVDADVAALSAQLDADTTRLDELAALYANATVTAREWIAARDPITARIAETRRAIAAATDTTDVQELVGTGRLLREQWDSLDIDRQQAVIKSVLDHAVIAPGTAGSRSLDIDRVRPLWRV

SEQ ID NO: 22317 - DNA, 50 bp, Cupriavidus taiwanensis
  source 1..50: mol_type = genomic DNA
ggggtagtttagcgacttgcaacaaagctgaaatgttgctaatataccct

SEQ ID NO: 22318 - DNA, 40 bp, Cupriavidus taiwanensis
  source 1..40: mol_type = genomic DNA
cggtcccacccatgcgggcaacctcaagtgctactgccgc

SEQ ID NO: 22319 - DNA, 40 bp, Cupriavidus taiwanensis
  source 1..40: mol_type = genomic DNA
cggtcccacccatgcgggcttcctcaagtgctactgccgc

SEQ ID NO: 22320 - DNA, 50 bp, Cupriavidus taiwanensis
  source 1..50: mol_type = genomic DNA
ggagtggttttaagacttgctatattcctgtaatgttctacatacccctt

SEQ ID NO: 22321 - protein, 540 aa, Roseburia inulinivorans; identical to SEQ ID NO: 296

SEQ ID NO: 22322 - DNA, 50 bp, Roseburia inulinivorans
  source 1..50: mol_type = genomic DNA
aatatctttaactaagggaaacggggagtttcccaaagttaaagatacca

SEQ ID NO: 22323 - DNA, 40 bp, Roseburia inulinivorans
  source 1..40: mol_type = genomic DNA
tgtttcacggtgggaaactgggcggggagtaccagatatt

SEQ ID NO: 22324 - DNA, 40 bp, Roseburia inulinivorans
  source 1..40: mol_type = genomic DNA
tgtttcacggtgggaaactgagcggggagtaccagatatt

SEQ ID NO: 22325 - DNA, 50 bp, Roseburia inulinivorans
  source 1..50: mol_type = genomic DNA
attatctttctcaaagagaaacaggaaatttccaccaagggaagaaatca

SEQ ID NO: 22326 - protein, 496 aa, Bacillus cereus
MIANENIKNVAIYLRLSRDEENKGIESILENHRNKLTELCQQNKWKYEIFQEIASSRTIELREQLVDMLEHVKRNQYDAVVVMDVDRLSRNEFDAPQIFKILSDSNTVIVTPTKIYDWSRDEDNLLLGIQSLVAAQEYKQIKKRMTAGKRSASEKGLWVHGIPPLGYDKDLETKKLVPNEDAKHVEFIFNSIVNGKTVSDVYHELNMMKVKTRTNSTFAFNSVVRIINNEAYKGTIVSNKYLDKNTMRPKDEWHYVSDVHPAIVDEATWEKANKIVNTYSFSAPRSRNKIYPTTKLIFCGNCGKVQGAQMAGTGKMYLKVCQRCKNRTFLYEPILRAIKDKVRARIPKILEQITTIEQNDNSSEIEYKKQQIQKQMKAIKRAIEKIKEAYELDEYTIAEFKDRKAKRENELKQLKAELDHVEQQNPQDKIADLNEIKQRIEYLLQTWQCLDGEGLTDEEVNRNLHFIIERIEWTYGKDGKEPNLNFVWKTDESYAQ

SEQ ID NO: 22327 - DNA, 50 bp, Bacillus cereus
  source 1..50: mol_type = genomic DNA
aagtaatccctaaattcgtaacaaactggttgagaacttagggactacgt

SEQ ID NO: 22328 - DNA, 40 bp, Bacillus cereus
  source 1..40: mol_type = genomic DNA
actcgtgtttactggaccgactggatctgggaagacgacg

SEQ ID NO: 22329 - DNA, 40 bp, Bacillus cereus
  source 1..40: mol_type = genomic DNA
actcgtgtttactggaccgcgtggatctgggaagacgacg

SEQ ID NO: 22330 - DNA, 50 bp, Bacillus cereus
  source 1..50: mol_type = genomic DNA
aggaaatcctatcatttgtaacaacgtggatgagatggaaggcattatgc

SEQ ID NO: 22331 - protein, 584 aa, Intestinimonas butyriciproducens
MRTDVFNLAFAYLRLSDDEKEGKSESASISNQRMMIQKYCEQHGIILVDEFVDDGWSGGNFDRPAFQRMLQQLKLGKANMVITKDLSRLGRDMRESSYYAEQYFPEHGIRYLTISDNFDTENENIMAPFLFAMNEVYLRDGSRKVKDVLRSKREHGQYCACPPYGYRKDTNDNNKLVPDESTAPVVQRIFDQAANHGDSARKIASDLNADGVIPPLKYRVLYRDKFTPKGAARASDLWNYTTVKRILKSKVYLGHTILGKSRKVSLKSKKKVPVPKDDWAVTMNTHPPLVSVETYEKAQRNLGRGAKNYLQYEHVRKSIFGGIAVCAKCGYSLCSSGTVYKGEREKYWFLSCTHQRQDIANPCSGVRIRYADLVEIVKRDLNELLNMTDEGIDELVKAALESSGNADMLKAKKAQLQAAEARLLTIDKMVGKLYADNAEGRIDDDRLRRMVSDLEKESVTLKSTIAQLNHLTKPDAIKKDYERFFDMAKQYTHIEELTRDTLLTFVDRIEIGPKILPDGTSKVTHRNQPYRQSVRIFYRFIGEVKSEATRDLPIGATGAAPSTQVGVSILNGTEVVDSAQNHAS

SEQ ID NO: 22332 - DNA, 50 bp, Intestinimonas butyriciproducens
  source 1..50: mol_type = genomic DNA
taataaggagaaagaacatcaagggactttgatgtatctacatcatattg

SEQ ID NO: 22333 - DNA, 40 bp, Intestinimonas butyriciproducens
  source 1..40: mol_type = genomic DNA
taagatggaggccgctcaggaagtcggcgtgaacctgaag

SEQ ID NO: 22334 - DNA, 40 bp, Intestinimonas butyriciproducens
  source 1..40: mol_type = genomic DNA
taagatggaggccgctcagagagtcggcgtgaacctgaag

SEQ ID NO: 22335 - DNA, 50 bp, Intestinimonas butyriciproducens
  source 1..50: mol_type = genomic DNA
taaaaaggtagttacacataaaggagttttgaaatatttggttcaaattg

SEQ ID NO: 22336 - protein, 533 aa, Pseudomonas fluorescens
MTEQKALPRAFSDVFRDDERINVYSYIRFSSKAQALGFGEVRQLEQISRFFEQYPIARLVEKFEDLGVSAFKGKNLKSGQLAKFVERIKAKEILPNSLLLVESFDRISRMGGYDALELIISIIQSDCAIYTLFDNRLYSKRKKDSSIDINLIQNILERANDESRAKSERILDAKKRNRDKGENGGIITKQCPFWISFVDDKFALNEHSNAVKRMTELCYDFGFQSIAQQLNNENHARKYTSSTVSKVLHKHAIYGSFLALKLDENGVRNVFNKEIKNYYPSIISEAEFHRISAKLQERLDPKFSGRKAEEFRNIFRGLAFCKCGSTLRFHKQKNHYIDLVCHASTVDNCEFAKEKKGTRYRYALIEMLFMMYHRQIPFEQIMVKSDDIKSLEKEQKENDGLIIAKEKALANNFSILEKSSENAQKYILQRIDEVSFELDELKKIQHELSLKINNLHIANKTSVSAFDVNKLLITEKGRIKLNNFLHSQKIRLVITPEKKKFFSVEIFHADKLIDTIEVENNEISSRQKSHLQF

SEQ ID NO: 22337 - DNA, 50 bp, Pseudomonas fluorescens
  source 1..50: mol_type = genomic DNA
tttctacaatctgcgccggtgattgcaatcatagacgtggattgtagaaa

SEQ ID NO: 22338 - DNA, 40 bp, Pseudomonas fluorescens
  source 1..40: mol_type = genomic DNA
gattcgcacccccatgactgccatcattggcttgctcgaa

SEQ ID NO: 22339 - DNA, 40 bp, Pseudomonas fluorescens
  source 1..40: mol_type = genomic DNA
gattcgcacccccatgactaacatcattggcttgctcgaa

SEQ ID NO: 22340 - DNA, 50 bp, Pseudomonas fluorescens
  source 1..50: mol_type = genomic DNA
tttttaataacatttctgattataaaaatcatagatattcattgtagaaa

SEQ ID NO: 22341 - protein, 667 aa, Phocaeicola dorei
MEKIAKQEKSKSKCCILLVRVSTEKQDYSPQLRELKKYAQSLGYSKFKEIATKESGFLNFEKKDGFKQVVEYINQNPDFNTIIIAEMSRLSRQKVVLEQIKIYLTINRIQLIIKDINFTLFDSDGKISLNTDVLFSLFASFAESEMKTKIERFGRTKKYLSAQGVSLSGKRLFGYDRKRLETGKNTYVINKKESECIKTLYDWYLNGVNGDKTKCSVRKLTLECIAHNFPTYLHSTRNVNKTLKEEAYTGYKITNNRRKNSAYWKFGDDNAPKYIACSTEMKYPQILDIDLFNAVQKKMENNNCVTDKSSKHITLLSKLILCDCEHYYNGEYQIKDGFKRAKYLCKQAKQPVRKCYVNKGTFSMYMADSVIWSFCLQHIDKILEYKSREEAKINTDSLKDEIKNLNREIKEIEKKIDIENTIFRKTGNSKEYEKRINDLDIEKSKLIVQIDKRSSIIDSIENKKEENLKREIVEHIEEIESRKDLLSLYIHKLITKIKVLYNSRLYIVFQVYYNIDTNEDYSFSNYIVVKRSTRDNYKIYYFQDELFSFEDEYFTFKFNDIRSKFHISDIFLEYHPEMVEMAKWMQNIYNLSFLFNSIGQLNDKEKLEIFERNGVKSVDELIEKNNLIKSDSIHNIEEKLSTLPIWITEMKMLKYRKLKIYDEDFKK

SEQ ID NO: 22342 - DNA, 50 bp, Phocaeicola dorei
  source 1..50: mol_type = genomic DNA
tcatggttttttgcacataatttcatgaaattgtgagcgaaaagctatca

SEQ ID NO: 22343 - DNA, 40 bp, Phocaeicola dorei
  source 1..40: mol_type = genomic DNA
gtctggaggacacaacttgattatgatcggttcacccgga

SEQ ID NO: 22344 - DNA, 40 bp, Phocaeicola dorei
  source 1..40: mol_type = genomic DNA
gtctggaggacacaacttgaatatgatcggttcacccgga

SEQ ID NO: 22345 - DNA, 50 bp, Phocaeicola dorei
  source 1..50: mol_type = genomic DNA
tcatagtttccaatatatgtgttcaagaaattgtggccaattatctctca

SEQ ID NO: 22346 - protein, 667 aa, Bacteroides thetaiotaomicron; identical to SEQ ID NO: 22341

SEQ ID NO: 22347 - DNA, 50 bp, Bacteroides thetaiotaomicron; identical to SEQ ID NO: 22342
  source 1..50: mol_type = genomic DNA

SEQ ID NO: 22348 - DNA, 40 bp, Bacteroides thetaiotaomicron
  source 1..40: mol_type = genomic DNA
cgccggaggacataatctcatcatgatcggcgctcccggc

SEQ ID NO: 22349 - DNA, 40 bp, Bacteroides thetaiotaomicron
  source 1..40: mol_type = genomic DNA
cgccggaggacataatctcaacatgatcggcgctcccggc

SEQ ID NO: 22350 - DNA, 50 bp, Bacteroides thetaiotaomicron; identical to SEQ ID NO: 22345
  source 1..50: mol_type = genomic DNA

SEQ ID NO: 22351 - protein, 503 aa, Serratia marcescens
MPQRNNGIAYSYVRFSSKRQELGDSLRRQTEMAEEYAIKNGLKLSSKNFQDLGISAFREGKRASLVDMLAAIEEGQITAGSTIIIEALDRLSRRGIDATLETVKEILRKDVQVVSLSDGLLLTKNSLNDLQSVIRIAVAADLAHKESERKALRLRETKGQQREAALSGKPINKILPFWLQRTEAGYAFSDKAGVARQIVQLKQEGKGSNMIAKTLNRLGIAGVRTAQWNHASITKMLKNPALYGAYQTGETTKDRELIKLELVEAYYPALINKEEWLLLQSDQSKSKRGRRSANNPYSGLLRCECGGALVKRQHTVKGKLYVYHGCLNAKDGRCKQNISIKGLDGALTTILGRLEFKKKQTLSQSIHQERQQLEARINDLNSKLQVLDDIPLSVIKSIGTMESRLKEITDQIAKDEREQRGIEAVKSEKLSSITDGLELNLLLKRVLKSITVIRSGRGWAVKVLHLSGHKQNFLMVDGEIKFLSDTIALQKLLAGFRETTENS

SEQ ID NO: 22352 - DNA, 50 bp, Serratia marcescens
  source 1..50: mol_type = genomic DNA
taattttacatatgatacaacattgtgatattgttacttaatagcaaagg

SEQ ID NO: 22353 - DNA, 40 bp, Serratia marcescens; identical to SEQ ID NO: 5103
  source 1..40: mol_type = genomic DNA

SEQ ID NO: 22354 - DNA, 40 bp, Serratia marcescens; identical to SEQ ID NO: 5104
  source 1..40: mol_type = genomic DNA

SEQ ID NO: 22355 - DNA, 50 bp, Serratia marcescens; identical to SEQ ID NO: 5100
  source 1..50: mol_type = genomic DNA

SEQ ID NO: 22356 - protein, 481 aa, Streptococcus agalactiae; identical to SEQ ID NO: 391

SEQ ID NO: 22357 - DNA, 50 bp, Streptococcus agalactiae
  source 1..50: mol_type = genomic DNA
taaagaaatttactatccttgatttcattcagcgttacagtaatgagttc

SEQ ID NO: 22358 - DNA, 40 bp, Streptococcus agalactiae
  source 1..40: mol_type = genomic DNA
aaccaatgctaccaaacattctaaaagtgtaaatgcttta

SEQ ID NO: 22359 - DNA, 40 bp, Streptococcus agalactiae
  source 1..40: mol_type = genomic DNA
aaccaatgctaccaaacatcttaaaagtgtaaatgcttta

SEQ ID NO: 22360 - DNA, 50 bp, Streptococcus agalactiae
  source 1..50: mol_type = genomic DNA
ataagaaataaagtatccaggtatctattttgccttgctagaatgagttc

SEQ ID NO: 22361 - protein, 525 aa, Clostridium butyricum
MKKVAIYSRKSKFTGKGESIENQILKCKQFIQFKFDIDTKNTEIFIDEGFSGKNENRPRYQDMIKKVKNKEIDHIIIYQLNRLGRNARDIHNTMQMCEDLGCVIYSATEGFDSSTSFGRALIGILASLAQLEREQLAERVKDNMYTLAKMGRWLGGQSPLGFDGTREYYIDESGKERSVTRLKANNEELKIVKLIYEKYLEEKSISQVSKWTLTNNFKGKNGGNIDKSAINVILKNPVYVKSDTDVFKFLENNGYEVYGEANGNGLLRYGKNNKDNSTGIIATGNHKGVIDSSNWLKIQEILQENTEKAPALGKSKACLLTGLLKCSCGSNMQMRYGPKRKDGTRPYYYVCTMKINSGGTRCNSKNLNGQLFEEKLINHFKKYSEERLIKQLESTLNASKNLEKNINIESIDRDIESAEKSVKSLLNNLKQTTDTNIVNIIFSEISELQNTIKDLKYKKDTLLEDQSEIVLSQSEIISMINTFNDFISLYDTLSIDEKQKRLKTLFKEILYDGNKIHVKFNLKKN

SEQ ID NO: 22362 - DNA, 50 bp, Clostridium butyricum
  source 1..50: mol_type = genomic DNA
catgtcaaattaacacaacacgcttctgtataatgtttgaatttgacatg

SEQ ID NO: 22363 - DNA, 40 bp, Clostridium butyricum
  source 1..40: mol_type = genomic DNA
tgttcctgtacatattgcttctgtatgaccaacaaataag

SEQ ID NO: 22364 - DNA, 40 bp, Clostridium butyricum
  source 1..40: mol_type = genomic DNA
tgttcctgtacatattgctactgtatgaccaacaaataag

SEQ ID NO: 22365 - DNA, 50 bp, Clostridium butyricum
  source 1..50: mol_type = genomic DNA
catggcaaatcaaaaggacagactactgtatattgtggtctcttcagatg

SEQ ID NO: 22366 - protein, 467 aa, Staphylococcus sciuri
MKVAIYCRVSTLEQSREGHSIDEQRKRLKAFCEVQDWEIYDEYIDPGFSGGNTSRPGLDKLMNDLDKIDLILVYKLDRLTRSVKDLMNLLEIFEKNDVSFRSATEVFDTTNAFGKLFITLVGAMAEWERSTIAERTKMGRQAATQKGIYTTGPPFYYDKVDGKLVPNEKREIADYIVKRALDGISIRGITEELTLSKYSPPKGKIWDRTTVSYVLTSPVSRGHTKIGDVLVKNTHEPIMNEETYQLIMEKTRSRTRTKKRSHTTIFRNKLVCHQCGKKLTLNTWRRKKKDGSYRYNASYICEKCQKNKEVSSFSLQKELVEKAFISYLSKADFKEDELDINKKTEHIDIIDGDKILKQREKYQQAFSLDLITLEEFTRRMNETQKAYKLYEEQLEELNKRKSKDIKIEEVIELRDTIISSWQLLSETDKESLVRSSIKNIYYTFIEGSGYGKNRIPNDLIVNHIDFY

SEQ ID NO: 22367 - DNA, 50 bp, Staphylococcus sciuri; identical to SEQ ID NO: 19747
  source 1..50: mol_type = genomic DNA

SEQ ID NO: 22368 - DNA, 40 bp, Staphylococcus sciuri
  source 1..40: mol_type = genomic DNA
tatgggaggaggaacgtttggaaattggacccctactgct

SEQ ID NO: 22369 - DNA, 40 bp, Staphylococcus sciuri
  source 1..40: mol_type = genomic DNA
tatgggaggaggaacgtttaaaaattggacccctactgct

SEQ ID NO: 22370 - DNA, 50 bp, Staphylococcus sciuri
  source 1..50: mol_type = genomic DNA
attgtgggtatgtgtctaacttttaagaaactgacaaagtttttcccacc

SEQ ID NO: 22371 - protein, 511 aa, Ruminococcus callidus
MTKKERPANRPAGRLLFMEMIEMETYCIYLRKSRADAEAEARGEGETLARHEKTLLDLAKRQGLTIVKIYREIVSGDSIAARPQMQHLLHDIADSKYTGVLVMEIERLARGDTIDQGIVAQAFRESETKIVTPVKTYDPNSEFDEEYLEFSLFMSRREYKTIKRRMNAGRIASVKEGNYIGTNPPYGYRKISPEPKVHTLDIVPEEAEAVKMMFEMYINGDGARAIAARLNQLQIPPRKSNAWEPVSVRKILHSPIYSGKVEWRTKKDGIILANGLHPAIITPEQFQQATERHKRTAPQVPTGYTTQNYYHGILFCANCGHQMKRRPTPNGTAHMLCRRNECRGKVVSSAVEKIDEVVLAAIRYRMQEIALQKDAMELEEAQKNETAKKKREKLKKALEKLHRQKEKLHTLLETDVYTVETFLDRSKALESQIAELEAELNTIQQEDEAPHLPPGQALVQMQHVLDSFREADPERKNQMLCKIIRRIEYKKTEKMCYRKQKSDLSLCIDFL

SEQ ID NO: 22372 - DNA, 50 bp, Ruminococcus callidus
  source 1..50: mol_type = genomic DNA
tatgtacaacataaacacgatgtcaagttatcgcatttatgttatacaca

SEQ ID NO: 22373 - DNA, 40 bp, Ruminococcus callidus
  source 1..40: mol_type = genomic DNA
gatgtggacctatgaaaaaaagctgcaataccccgttcgg

SEQ ID NO: 22374 - DNA, 40 bp, Ruminococcus callidus
  source 1..40: mol_type = genomic DNA
gatgtggacctatgaaaaagtgctgcaataccccgttcgg

SEQ ID NO: 22375 - DNA, 50 bp, Ruminococcus callidus
  source 1..50: mol_type = genomic DNA
tatgtaaaactgctacacaacggtgttttaccgcaagattctcatacaca

SEQ ID NO: 22376 - protein, 531 aa, Pseudomonas helleri
MTSAHPLPRAFAEVFQGDDRINVYSYIRFSSKAQKLGFSEMRQIDQLNRFFEQYPQARQVERYEDLGVSAFKGKNLKSGQLARFVERIKAKEIQPNSLLLVESFDRISRMGGYDALELIISIIQADCAIYTLFDNRLYSRRKTDSSADISLIQNILERANDESRSKSDRISDAKARNLLKGENGGIITKRCPFWISFTDGKFVLNEHAHAIARAVELCFDMGFQAIAKKLNDEIHPKKYTESIVGKFLRQPAIYGSFIAMEWDESGKPVQLKKEIKGYYPAVITEAEFHRISVKLQERQDPKLAGRKTSEFKNILRGLVYCACGSGFRYHAQKSGYVDLVCSASLTGRCSSAKPGKGVRYRYARLEEIFLAYQAKIPFHRIIAKTEDIQTLEKAHGEISGLLIQKEKALQNNFSILEKGSESAQKYILDRINEVSKELDQLKAQEQELSRRINTLHLASKSTLNVMEIYKLLLTEHGRMRVNNFLQGQYVKLIVTPIQKKYFYMDIFLGDEHVDRVHVTPDGYTAENKPSG

SEQ ID NO: 22377 - DNA, 50 bp, Pseudomonas helleri
  source 1..50: mol_type = genomic DNA
tttctacctattgatctactcattgcaatcacaggtagatttggtagaaa

SEQ ID NO: 22378 - DNA, 40 bp, Pseudomonas helleri
  source 1..40: mol_type = genomic DNA
ttcaagcatgccgatgacggcgttcatcggtgtgcggatt

SEQ ID NO: 22379 - DNA, 40 bp, Pseudomonas helleri
  source 1..40: mol_type = genomic DNA
ttcaagcatgccgatgacggagttcatcggtgtgcggatt

SEQ ID NO: 22380 - DNA, 50 bp, Pseudomonas helleri
  source 1..50: mol_type = genomic DNA
tttctaactcctgctccactcattgaaatcacaattttcccactgaaaaa

SEQ ID NO: 22381 - protein, 565 aa, Streptococcus mitis
MNRTLTISDYKQVDTSKLSDITVIYCRLSQDDGLDGDSNSITNQKNILLDVVAREKLPNPVLFVDDGFSGTNFDRPAISEALRLVENRQVSNFVVKDLSRLGRSYIKVGQLTEITFPSFDVRFIALNDGVDSNKPNETNSIFLPINSLMDEMYAADTSKKIRAVVQAKAKAGERVTTTPPYGYLKDSNNPKNWIIDPVASEVVKRIFQEAKSGKSLSEIAKGLENDKIFKPDRHRIEIGLKPISSSSNVETLPYFWTRETLSAILSREEYLGHTVNLRTRTKSYKDKRKVDNPKEGWLVFKNTHEAIIDQETFDIVQKMRSHKRSNQRYKNRSGHENLFAGLVFCGTCGRKHYFCPQEKNGLNHDHYKCSGYRKPIDGCENPHYIQKSALIEIISGKLRQTIQEVHFNQEAFLKKLEQQSQAQFCKDSKRQQLQKDEYRSKEIDSIIQKLYEDNLLGKISDERFVKLSQSYEEEQKQLQTSISDLTEKLAKQQEDSLNISKFMARISKYTELPELTVEIVNELIDKIVIHKPTGTKRNRIIQIDIYYNFIGKLNNEKSEPNNLAR

SEQ ID NO: 22382 - DNA, 50 bp, Streptococcus mitis
  source 1..50: mol_type = genomic DNA
aaactgctgggtgtcaggttagctatagatagtatgacactcagcagttt

SEQ ID NO: 22383 - DNA, 40 bp, Streptococcus mitis
  source 1..40: mol_type = genomic DNA
tgtacgctaaagacaggggatatcctgtctttttctcggt

SEQ ID NO: 22384 - DNA, 40 bp, Streptococcus mitis
  source 1..40: mol_type = genomic DNA
tgtacgctaaagacaggggccatcctgtctttttctcggt

SEQ ID NO: 22385 - DNA, 50 bp, Streptococcus mitis
  source 1..50: mol_type = genomic DNA
agactgctgttaaactggctcactccatatactctgtgctacagcaattt

SEQ ID NO: 22386 - protein, 452 aa, Listeria monocytogenes; identical to SEQ ID NO: 5116

SEQ ID NO: 22387 - DNA, 50 bp, Listeria monocytogenes
  source 1..50: mol_type = genomic DNA
tttagtacctcgttttctctcgttggaagaagaagaaacgagataccaaa

SEQ ID NO: 22388 - DNA, 40 bp, Listeria monocytogenes; identical to SEQ ID NO: 7733
  source 1..40: mol_type = genomic DNA

SEQ ID NO: 22389 - DNA, 40 bp, Listeria monocytogenes
  source 1..40: mol_type = genomic DNA
tttcggttcaagctatgagctacgcaaagagggaactaaa

SEQ ID NO: 22390 - DNA, 50 bp, Listeria monocytogenes; identical to SEQ ID NO: 5120
  source 1..50: mol_type = genomic DNA

SEQ ID NO: 22391 - protein, 452 aa, Listeria monocytogenes
MKAAIYIRVSTQEQVENYSIQAQTEKLTALCRSKDWDVYDIFIDGGYSGSNMNRPALNEMLSKLHEIDAVVVYRLDRLSRSQRDTITLIEEYFLKNNVEFVSLSETLDTSSPFGRAMIGILSVFAQLERETIRDRMVMGKIKRIEAGLPLTTAKGRTFGYDVIDTKLYINEEEAKQLQLIYDIFEEEQSITFLQKRLKKLGFKVRTYNRYNNWLTNDLYCGYVSYKDKVHVKGIHEPIISEEQFYRVQEIFARMGKNPNMNRDSASLLNNLVVCGKCGLGFVHRRKDTVSRGKKYHYRYYSCKTYKHTHELEKCGNKIWRADKLEELIIDRVNNYSFASRNVDKEDELDSLSEKLKIEHVKKKRLFDLYISGSYEVSELDAMMADIDAQINYYEAQIEANEELKKNKKIQENLADLATVDFDSLEFREKQLYLKSLINKIYIDGEQVTIEWL

SEQ ID NO: 22392 - DNA, 50 bp, Listeria monocytogenes
  source 1..50: mol_type = genomic DNA
tttagtgcctcatttcctctcgttggaagaagaagaaacgagataccaaa

SEQ ID NO: 22393 - DNA, 40 bp, Listeria monocytogenes; identical to SEQ ID NO: 1298
  source 1..40: mol_type = genomic DNA

SEQ ID NO: 22394 - DNA, 40 bp, Listeria monocytogenes
  source 1..40: mol_type = genomic DNA
tttcggatcaagctatgagctacgcaaagagggaactaaa

SEQ ID NO: 22395 - DNA, 50 bp, Listeria monocytogenes; identical to SEQ ID NO: 5120
  source 1..50: mol_type = genomic DNA

SEQ ID NO: 22396 - protein, 452 aa, Listeria monocytogenes
MKAAIYIRVSTQEQIENYSIQAQTEKLTALCRSKDWDVYDIFIDGGYSGSNMNRPALNEMLSKLHEIDAVVVYRLDRLSRSQRDTITLIEEYFLKNNVEFVSLSETLDTSSPFGRAMIGILSVFAQLERETIRDRMVMGKIKRIEAGLPLTTAKGRTFGYDVIDTKLYINEEEAKQLQMIYDIFEEEKSITTLQKRLKKLGFKVKSYSSYNNWLTNDLYCGYVSYADKVHTKGVHEPIISEEQFYRVQEIFSRMGKNPNMNRDSASLLNNLVVCGKCGLGFVHRRKDTVSRGKKYHYRYYSCKTYKHTHELEKCGNKIWRADKLEELIIGRVNNYSFASRNVDKEDELDSLNEKLKTEHAKKKRLFDLYISGSYEVSELDGMMADIDAQINYYEAQIEANEELKKNKKIQENLADLATVDFDSLEFREKQLYLKSLINKIYIDGEQVTIEWL

SEQ ID NO: 22397 - DNA, 50 bp, Listeria monocytogenes; identical to SEQ ID NO: 22387
  source 1..50: mol_type = genomic DNA

SEQ ID NO: 22398 - DNA, 40 bp, Listeria monocytogenes; identical to SEQ ID NO: 1298
  source 1..40: mol_type = genomic DNA

SEQ ID NO: 22399 - DNA, 40 bp, Listeria monocytogenes; identical to SEQ ID NO: 22394
  source 1..40: mol_type = genomic DNA

SEQ ID NO: 22400 - DNA, 50 bp, Listeria monocytogenes; identical to SEQ ID NO: 5120
  source 1..50: mol_type = genomic DNA

SEQ ID NO: 22401 - protein, 452 aa, Listeria monocytogenes
MKAAIYIRVSTQEQIENYSIQAQTEKLTALCRSKDWDVYDIFIDGGYSGSNMNRPALNEMLSKLHEIDAVVVYRLDRLSRSQRDTITLIEEYFLKNNVEFVSLSETLDTSSPFGRAMIGILSVFAQLERETIRDRMVMGKIKRIEAGLPLTTAKGRTFGYDVIDTKLYINEEEAKQLQMIYDIFEEEKSITTLQKRLKKLGFKVKSYSSYNNWLTNDLYCGYVSYADKVHTNGVHEPIISEEQFYRVQEIFSRMGKNPNMNRDSASLLNNLVVCGKCGLGYVHRRKDTVSRGKKYHYRYYSCKTYKHTHELEKCGNKIWRADKLEELIIDRVNNYSFASRNVDKEDELDSLNEKLKTEHAKKKRLFDLYISGSYEVSELDGMMADIDAQINYYEAQIEANEELKKNKKIQENLADLATVDFDSLEFREKQLYLKSLINKIYIDGEQVTIEWL

SEQ ID NO: 22402 - DNA, 50 bp, Listeria monocytogenes; identical to SEQ ID NO: 22387
  source 1..50: mol_type = genomic DNA

SEQ ID NO: 22403 - DNA, 40 bp, Listeria monocytogenes; identical to SEQ ID NO: 1298
  source 1..40: mol_type = genomic DNA

SEQ ID NO: 22404 - DNA, 40 bp, Listeria monocytogenes; identical to SEQ ID NO: 22394
  source 1..40: mol_type = genomic DNA

SEQ ID NO: 22405 - DNA, 50 bp, Listeria monocytogenes; identical to SEQ ID NO: 5120
  source 1..50: mol_type = genomic DNA

SEQ ID NO: 22406 - protein, 452 aa, Listeria monocytogenes
MKAAIYIRVSTQEQVENYSIQAQTEKLTALCRSKDWDVYDTFIDGGYSGSNMNRPALNEMLSKLHEIDAVVVYRLDRLSRSQKDTITLIEEYFLKNNVEFVSLSETLDTSSPFGRAMIGILSVFAQLERETIRDRMVMGKIKRIEAGLPLTTAKGRTFGYDVIDTKLYINEEEAKQLQMIYDIFEEEKSITTLQKRLKKLGFKVKSYSSYNNWLTNDLYCGYVSYADKVHTNGVHEPIISEEQFYRVQEIFSRMGKNPNMNRDSASLLNNLVVCGKCGLGYVHRRKDTVSRGKKYHYRYYSCKTYKHTHELEKCGNKIWRADKLEELIIDRVNNYSFASRNVDKEDELDSLNEKLKTEHAKKKRLFDLYISGSYEVSELDGMMADIDAQINYYEAQIEANEELKKNKKIQENLADLATVDFDSLEFREKQLYLKSLINKIYIDGEQVTIEWL

SEQ ID NO: 22407 - DNA, 50 bp, Listeria monocytogenes; identical to SEQ ID NO: 22387
  source 1..50: mol_type = genomic DNA

SEQ ID NO: 22408 - DNA, 40 bp, Listeria monocytogenes; identical to SEQ ID NO: 1298
  source 1..40: mol_type = genomic DNA

SEQ ID NO: 22409 - DNA, 40 bp, Listeria monocytogenes; identical to SEQ ID NO: 22394
  source 1..40: mol_type = genomic DNA

SEQ ID NO: 22410 - DNA, 50 bp, Listeria monocytogenes; identical to SEQ ID NO: 5120
  source 1..50: mol_type = genomic DNA

SEQ ID NO: 22411 - protein, 452 aa, Listeria monocytogenes
MKAAIYIRVSTQEQIENYSIQAQTEKLTALCRSKDWDVYDIFIDGGYSGSNMNRPALNEMLSKLHEIDAVVVYRLDRLSRSQRDTITLIEEYFLKNNVEFVSLSETLDTSSPFGRAMIGILSVFAQLERETIRDRMVMGKIKRIEAGLPLTTAKGRTFGYDVIDTKLYINEEEAKQLQMIYDIFEEEKSITTLQKRLKKLGFKVKSYSSYNNWLTNDLYCGYVSYADKVHTKGVHEPIISEEQFYRVQEIFSHMGKNPNMNRDSASLLNNLVVCGKCGLGYVHRRKDTVSRGKKYHYRYYSCKTYKHTHELEKCGNKIWRADKLEELIIDRVNNYSFASRNVDKEDELDSLNEKLKTEHAKKKRLFDLYISGSYEVSELDGMMADIDARINYYEAQIEANEELKKNKKIQENLADLATVDFDSLEFREKQLYLKSLINKIYIDGEQVTIEWL

SEQ ID NO: 22412 - DNA, 50 bp, Listeria monocytogenes; identical to SEQ ID NO: 22387
  source 1..50: mol_type = genomic DNA

SEQ ID NO: 22413 - DNA, 40 bp, Listeria monocytogenes; identical to SEQ ID NO: 5118
  source 1..40: mol_type = genomic DNA

SEQ ID NO: 22414 - DNA, 40 bp, Listeria monocytogenes; identical to SEQ ID NO: 5119
  source 1..40: mol_type = genomic DNA

SEQ ID NO: 22415 - DNA, 50 bp, Listeria monocytogenes; identical to SEQ ID NO: 5120
  source 1..50: mol_type = genomic DNA

SEQ ID NO: 22416 - protein, 452 aa, Listeria monocytogenes
MKAAIYIRVSTQEQIENYSIQAQTEKLTALCRSKDWDVYDIFIDGGYSGSNMNRPALNEMLSKLHEIDAVVVYRLDRLSRSQRDTITLIEEYFLKNNVEFVSLSETLDTSSPFGRAMIGILSVFAQLERETIRDRMVMGKIKRVESGLPLTTAKGRTFGYNVVDTKLYINEEEAKHLQLIYDIFEEEKSITFLQKRLKELGFKVKSYSSYNKWLMNDLYIGYVSYSDKVHVKGVHEAIISEEQFYRVQEIFSRMGKNPNMNKESSSLLNNLIVCEKCGLGYVHRAKDTVSRGKKYHYRYYSCKTYKHTHELEKCGNKIWRADKLEELIIDRVNNYSFASRNLDKEDELDSITEKLKTEHSKKKRLFDLYINGSYEVAELDKMMADIDAQINYYNSQIEANKELKRNKKVQESLAELATVDFDSLEFREKQIYLKSIINKIYIDGEQVTIEWI

SEQ ID NO: 22417 - DNA, 50 bp, Listeria monocytogenes
  source 1..50: mol_type = genomic DNA
tttagtacctcaatttctctctctggaagaagaagaaacgagataccaaa

SEQ ID NO: 22418 - DNA, 40 bp, Listeria monocytogenes; identical to SEQ ID NO: 1298
  source 1..40: mol_type = genomic DNA

SEQ ID NO: 22419 - DNA, 40 bp, Listeria monocytogenes; identical to SEQ ID NO: 22394
  source 1..40: mol_type = genomic DNA

SEQ ID NO: 22420 - DNA, 50 bp, Listeria monocytogenes; identical to SEQ ID NO: 5120
  source 1..50: mol_type = genomic DNA

SEQ ID NO: 22421 - protein, 452 aa, Listeria monocytogenes; identical to SEQ ID NO: 7756

SEQ ID NO: 22422 - DNA, 50 bp, Listeria monocytogenes; identical to SEQ ID NO: 22392
  source 1..50: mol_type = genomic DNA

SEQ ID NO: 22423 - DNA, 40 bp, Listeria monocytogenes; identical to SEQ ID NO: 1298
  source 1..40: mol_type = genomic DNA

SEQ ID NO: 22424 - DNA, 40 bp, Listeria monocytogenes; identical to SEQ ID NO: 22394
  source 1..40: mol_type = genomic DNA

SEQ ID NO: 22425 - DNA, 50 bp, Listeria monocytogenes; identical to SEQ ID NO: 5120
  source 1..50: mol_type = genomic DNA

SEQ ID NO: 22426 - protein, 452 aa, Listeria monocytogenes; identical to SEQ ID NO: 22396

SEQ ID NO: 22427 - DNA, 50 bp, Listeria monocytogenes; identical to SEQ ID NO: 22387
  source 1..50: mol_type = genomic DNA

SEQ ID NO: 22428 - DNA, 40 bp, Listeria monocytogenes; identical to SEQ ID NO: 7733
  source 1..40: mol_type = genomic DNA

SEQ ID NO: 22429 - DNA, 40 bp, Listeria monocytogenes; identical to SEQ ID NO: 22389
  source 1..40: mol_type = genomic DNA

SEQ ID NO: 22430 - DNA, 50 bp, Listeria monocytogenes; identical to SEQ ID NO: 5120
  source 1..50: mol_type = genomic DNA

SEQ ID NO: 22431 - protein, 452 aa, Listeria monocytogenes
MKAAIYIRVSTQEQIENYSIQAQTEKLTALCRSKDWDVYDIFIDGGYSGSNMNRPALNEMLSKLHEIDAVVVYRLDRLSRSQRDTITLIEEYFLKNNVEFVSLSETLDTSSPFGRAMIGILSVFAQLERETIRDRMVMGKIKRIEAGLPLTTAKGRTFGYDVIDTKLYINEEEAKQLQMIYDIFEKEKSITTLQKRLKKLGFKVKSYSSYNNWLTNDLYCGYVSYADKVHTKGVHEPIISEEQFYRVQEIFSRMGKNPNMNRDSASLLNNLVVCGKCGLGYVHRRKDTVSRGKKYHYRYYSCKTYKHTHELEKCGNKIWRADKLEELIIDRVNNYSFASRNVDKEDELDSLNEKLKTEHAKKKRLFDLYISGSYEVSELDVMMADIDAQINYYEAQIEANEELKKNKKIQKNLADLATVDFDSLEFREKQLYLKSLINKIYIDGEQVTIEWL

SEQ ID NO: 22432 - DNA, 50 bp, Listeria monocytogenes; identical to SEQ ID NO: 22387
  source 1..50: mol_type = genomic DNA

SEQ ID NO: 22433 - DNA, 40 bp, Listeria monocytogenes; identical to SEQ ID NO: 1298
  source 1..40: mol_type = genomic DNA

SEQ ID NO: 22434 - DNA, 40 bp, Listeria monocytogenes; identical to SEQ ID NO: 22394
  source 1..40: mol_type = genomic DNA

SEQ ID NO: 22435 - DNA, 50 bp, Listeria monocytogenes; identical to SEQ ID NO: 5120
  source 1..50: mol_type = genomic DNA

SEQ ID NO: 22436 - protein, 452 aa, Listeria monocytogenes
MKAAIYIRVSTQEQIENYSIQAQTEKLTALCRSKDWDVYDIFIDGGYSGSNMKRPALNEMLSKLHEIDAVVVYRLDRLSRSQRDTITLIEEYFLKNNVEFVSLSETLDTSSPFGRAMIGILSVFAQLERETIRDRMVMGKIKRIEAGLPLTTAKGRTFGYDVIDTKLYINEEEAKQLRLIYDIFEEEQSITFLQKRLKKLGFKVRTYNRYNNWLTNDLYCGYVSYKDKVHVKGIHEPIISEEQFYRVQEIFSRMGKNPNMNKESASLLNNLVVCSKCGLGFVHRRKDTVSRGKKYHYRYYSCKTYKHTHELEKCGNKIWRADKLEELIIDRVNNYSFASRNIDKEDELDSLNEKLKIEHAKKKRLFDLYINGSYEVSELDSMMNDIDAQINYYESQIEANEELKKNKKIQENLADLATVDFNSLEFREKQLYLKSLINKIYIDDEQVTIEWL

SEQ ID NO: 22437 - DNA, 50 bp, Listeria monocytogenes; identical to SEQ ID NO: 22392
  source 1..50: mol_type = genomic DNA

SEQ ID NO: 22438 - DNA, 40 bp, Listeria monocytogenes; identical to SEQ ID NO: 1298
  source 1..40: mol_type = genomic DNA

SEQ ID NO: 22439 - DNA, 40 bp, Listeria monocytogenes; identical to SEQ ID NO: 22394
  source 1..40: mol_type = genomic DNA

SEQ ID NO: 22440 - DNA, 50 bp, Listeria monocytogenes; identical to SEQ ID NO: 5120
  source 1..50: mol_type = genomic DNA

SEQ ID NO: 22441 - protein, 452 aa, Listeria monocytogenes; identical to SEQ ID NO: 5116

SEQ ID NO: 22442 - DNA, 50 bp, Listeria monocytogenes; identical to SEQ ID NO: 22387
  source 1..50: mol_type = genomic DNA

SEQ ID NO: 22443 - DNA, 40 bp, Listeria monocytogenes; identical to SEQ ID NO: 1298
  source 1..40: mol_type = genomic DNA

SEQ ID NO: 22444 - DNA, 40 bp, Listeria monocytogenes; identical to SEQ ID NO: 22394
  source 1..40: mol_type = genomic DNA

SEQ ID NO: 22445 - DNA, 50 bp, Listeria monocytogenes; identical to SEQ ID NO: 5120
  source 1..50: mol_type = genomic DNA

SEQ ID NO: 22446 - protein, 452 aa, Listeria innocua; identical to SEQ ID NO: 5116

SEQ ID NO: 22447 - DNA, 50 bp, Listeria innocua; identical to SEQ ID NO: 22387
  source 1..50: mol_type = genomic DNA

SEQ ID NO: 22448 - DNA, 40 bp, Listeria innocua; identical to SEQ ID NO: 7873
  source 1..40: mol_type = genomic DNA

SEQ ID NO: 22449 - DNA, 40 bp, Listeria innocua
  source 1..40: mol_type = genomic DNA
tttcggatcgagttatgatctacgtaaagagggaacaaag

SEQ ID NO: 22450 - DNA, 50 bp, Listeria innocua; identical to SEQ ID NO: 5120
  source 1..50: mol_type = genomic DNA

SEQ ID NO: 22451 - protein, 452 aa, Listeria monocytogenes
MKAAIYIRVSTQEQIENYSIQAQTEKLTALCRSKDWDVYDTFIDGGYSGSNMNRPALNEMLSKLHEIDAVVVYRLDRLSRSQRDTITLIEEYFLKNNVEFVSLSETLDTSSPFGRAMIGILSVFAQLERETIRDRMVMGKIKRVESGLPLTTAKGRTYGYDVVDTKLYINEEEAQHLQLIYDIFEEEKSITFLQKRLKKLGFKVKSYSSYNKWLMNDLYIGYVSYSDKVHAKGIHEPIISEDQFYRVQEIFSRMGKNPNMNKESSSLLNNLIVCEKCGLGYVHRAKDTVSRGKKYHYRYYSCKTYKHTHELEKCGNKIWRADKLEEIIISRVKNYSFATRNLDKEDELDSITEKLKTEHSKKKRLFDLYINGSYEVAELDKMMADIDAQINYYDSQIEANKELKRNKKVQESLAELATVDFDSLEFREKQIYLKSIINKIYIDGEQVTIEWI

SEQ ID NO: 22452 - DNA, 50 bp, Listeria monocytogenes; identical to SEQ ID NO: 22417
  source 1..50: mol_type = genomic DNA

SEQ ID NO: 22453 - DNA, 40 bp, Listeria monocytogenes; identical to SEQ ID NO: 1298
  source 1..40: mol_type = genomic DNA

SEQ ID NO: 22454 - DNA, 40 bp, Listeria monocytogenes; identical to SEQ ID NO: 22394
  source 1..40: mol_type = genomic DNA

SEQ ID NO: 22455 - DNA, 50 bp, Listeria monocytogenes; identical to SEQ ID NO: 5120
  source 1..50: mol_type = genomic DNA

SEQ ID NO: 22456 - protein, 452 aa, Listeria monocytogenes
MKAAIYIRVSTQEQIENYSIQAQTEKLTALCRSKDWDVYDIFIDGGYSGSNMNRPALNEMLSKLHEIDAVVVYRLDRLSRSQRDTITLIEEYFLKNNVEFVSLSETLDTSSPFGRAMIGILSVFAQLERETIRDRMVMGKIKRIEAGLPLTTAKGRTFGYDVIDTKLYINEEEAKQLQMIYDIFEEEKSITTLQKRLKKLGFKVKSYSSYNNWLTNDLYCGYVSYADKVHTKGVHEPIISEEQFYRVQEIFSRMGKNPNMNRDSASLLNNLVVCGKCGLGYVHRRKDTVSRGKKYHYRYYSCKTYKHTHELEKCGNKIWRADKLEELIIDRVNNYSFASRNVDKEDELDSLNEKLKTEHTKKKRLFDLYISGSYEVSELDAMMSDIDAQINYYEAQIEANEELKKNKQIQENLADLATVDFDSLEFREKQLYLKSLINKIYIDGEQVTIEWL

SEQ ID NO: 22457 - DNA, 50 bp, Listeria monocytogenes; identical to SEQ ID NO: 22387
  source 1..50: mol_type = genomic DNA

SEQ ID NO: 22458 - DNA, 40 bp, Listeria monocytogenes; identical to SEQ ID NO: 1298
  source 1..40: mol_type = genomic DNA

SEQ ID NO: 22459 - DNA, 40 bp, Listeria monocytogenes; identical to SEQ ID NO: 22394
  source 1..40: mol_type = genomic DNA

SEQ ID NO: 22460 - DNA, 50 bp, Listeria monocytogenes; identical to SEQ ID NO: 5120
  source 1..50: mol_type = genomic DNA

SEQ ID NO: 22461 - protein, 452 aa, Listeria monocytogenes
MKAAIYIRVSTQEQIENYSIQAQTEKLTALCRSKDWDVYDIFIDGGYSGSNMNRPALNEMLSKLHEIDAVVVYRLDRLSRSQRDTITLIEEYFLKNNVEFVSLSETLDTSSPFGRAMIGILSVFAQLERETIRDRMVMGKIKRIEAGLPLTTAKGRTFGYDVIDTKLYINEEEAKQLRLIYDIFEEEQSITFLQKRLKKLGFKVRTYNRYNNWLTNDLYCGYVSYKDKVHVKGIHEPIISEEQFYRVQEIFSRMGKNPNMNKESASLLNNLVVCSKCGLGFVHRRKDTVSRGKKYHYRYYSCKTYKHTHELEKCGNKIWRADKLEELIIDRVNNYSFASRNVDKEDELDYLNEKLKIEHAKKKRLFDLYINGSYEVSELDAMMADIDAQINYYEAQIEANEELKKNKKIQENLADLATVDFDSLEFREKQLYLKSLINKIYIDDEQVTIEWL

SEQ ID NO: 22462 - DNA, 50 bp, Listeria monocytogenes
  source 1..50: mol_type = genomic DNA
tttagtttctcatttcctctcgttggaagaagaagaaacgagataccaaa

SEQ ID NO: 22463 - DNA, 40 bp, Listeria monocytogenes; identical to SEQ ID NO: 1298
  source 1..40: mol_type = genomic DNA

SEQ ID NO: 22464 - DNA, 40 bp, Listeria monocytogenes; identical to SEQ ID NO: 22394
  source 1..40: mol_type = genomic DNA

SEQ ID NO: 22465 - DNA, 50 bp, Listeria monocytogenes; identical to SEQ ID NO: 5120
  source 1..50: mol_type = genomic DNA

SEQ ID NO: 22466 - protein, 577 aa, Pseudomonas proteolytica
MQRKCYSYIRFSHKKQELGTSFARQSDIQHFVDKHNLIVDTTLEDLGVSAFRGKNAKQGQLGDFIDLVEQGLIDQNSILLIENFDRLSRQKVIKSTQIFLNLLNRGIDIAVLDTGKIYSKDTLLSSDFFIAIIEFERANAESSRKSDFTSSAWNIHRDEMRKTKAVKTRKTPSWIGVSGVVKARPGDESAKFFIIENEARKIRKIFDLALSKGLSETARAVNEWLGPDEPKYSIHQIQYLLKNRKVIGEHQPMKFYESETSGQMKLMPEGPTIYGYYPAIIDKAIFEEVQEKISGRKPFSGKFNKSRLNIFQGFITCYHCAGTIRYMDKSSSERSNKHYFVCTNSMTGKCVLGKRLTYNASEAMQFFFEKTDRLNLSEIFENDENILRLNNSIKDVERALKNTNHQLEQLKKQIREMLRTGKNISDTLNEMLIEFETLQREQTKALKTLKEEKETSIAQIEVSRNFNQENIFELLNDKSDEATRKRININNHLKQIIENIQFFCRGYSKKNHDTGVEDKRSTLTPTMIVKFKNGAVRVIVENEMIKDIGESSGGAELYLNILEDMHQQMILKKALTV

SEQ ID NO: 22467 - DNA, 50 bp, Pseudomonas proteolytica; identical to SEQ ID NO: 17307
  source 1..50: mol_type = genomic DNA

SEQ ID NO: 22468 - DNA, 40 bp, Pseudomonas proteolytica
  source 1..40: mol_type = genomic DNA
ccgcgcataacaataaatacaaccatgctcacagccccgg

SEQ ID NO: 22469 - DNA, 40 bp, Pseudomonas proteolytica
  source 1..40: mol_type = genomic DNA
ccgcgcataacaataaatataaccatgctcacagccccgg

SEQ ID NO: 22470 - DNA, 50 bp, Pseudomonas proteolytica
  source 1..50: mol_type = genomic DNA
ctgagtctgcaaaagtaggagatataactgtggcaaccatgaagacactc

SEQ ID NO: 22471 - protein, 589 aa, Hydrogeniiclostidium mannosilyticum
MKNTISFQQIAAPKVLSAEVREAISNNVLQFYVRDQQQNTQDEGITALYERLSQEDKLEGESNSIANQKKILERYCREHGITAYRHYDEDDGYSGTNFNRPGFQRMLADIKAGKIKRVIVKDMSRFGRDYLQVGFYTDMLFPDFGVHFIAVNDGVDSTRGENEFTAIRNVFNEMYARDTSKKIRATWQSKGKSGEHLTTIPPYGYMKNPDNKKKWIIDEEAAAVVQQIFALCVSGMGPTQIAKWLEKSEILNPTFYWLSKGMKVGNKPKPGANPYKWTNETVSRMLEKIEYLGHTVNFKTRKQSYKSKKKLWNDPSEWVIFENTQPPIVEESVFLIVQNIRRSRRRPTKMGDMGIFSGLLYCAECGGKMYQCRATNFTEEQKYFICSTYRKGKDLCTTHSIRNVVLHEIVLRNLREAIEYVTQYEAEFVKEAADSRLRERDAEFSRKREALSKAESRIAELDNLFKHLYEDNVTGKLSDERFIKMSRDYELEQENLKSMAEVLREEIKQQEKQKTNVKAFISVVKKYTDMQELDASILREFIDRIEVSHIDKKSKTREITIVYNFIGAFDFDRAKEKAQNTTQKQQRTA

SEQ ID NO: 22472 - DNA, 50 bp, Hydrogeniiclostidium mannosilyticum
  source 1..50: mol_type = genomic DNA
atgttttcttaattcaccgccctattaagcgcggtgagataagaaaacaa

SEQ ID NO: 22473 - DNA, 40 bp, Hydrogeniiclostidium mannosilyticum
  source 1..40: mol_type = genomic DNA
gattttttcgccgtctcctttaccgcggttctttttacct

SEQ ID NO: 22474 - DNA, 40 bp, Hydrogeniiclostidium mannosilyticum
  source 1..40: mol_type = genomic DNA
gattttttcgccgtctcctataccgcggttctttttacct

SEQ ID NO: 22475 - DNA, 50 bp, Hydrogeniiclostidium mannosilyticum
  source 1..50: mol_type = genomic DNA
ttgtattttacagttacagctctaataagctcggtgtattaacaaaaaaa

SEQ ID NO: 22476 - protein, 550 aa, Streptomyces sp 769
MEGTVTPDIPATFRGSPTDEDGEPWLGYIRVSTWKEEKISPELQKTAVEAWAARTGKRIIGWIEDLDATGRNFKRKIVNGIARVERREAIGIACWKYSRFGRTRDGVAVNLKRLEDAGGQLASATEEVDARTATGRLQRGILFEFAAYESDVRGEQWRETHDHRRDKLHLPATGRQRFGYIWHPRRLPDPERPGYWLLQEERYEANQHTGPVMADRYRQFIDGDAFYALVGELNTGGHRTTRGGLWTEQTLIRYMDSGFCAGLLRVHNPKCNTCNPEKRGHCPNTIFIPGAQEELISAEIWQTYLEHRAERRATPPRARRGTYEGSGLMRHGSCRGTLVPNNAQRLVDGQMAKIRGYAYRCGRRATTGPLGCEGVWATRHEVEGEVFKWLKREAASGIDAAPSTPEDLAAPRNQRAAAARDRARLEAEADKLSTALTNLRIDRAANPDDYKPGEYEAARDKIRRKQEATTAAMERLAVVESTPHRSDYEQLIIGTAAEWRTLEARERNGMLRQLARRVVVDRQDGNITVTVHPVWEPDPWEVEQSDVRAG

SEQ ID NO: 22477 - DNA, 50 bp, Streptomyces sp 769
  source 1..50: mol_type = genomic DNA
gagagtgttttgctaactgtgacctcggtcaatgtgtgctaaacaccctc

SEQ ID NO: 22478 - DNA, 40 bp, Streptomyces sp 769
  source 1..40: mol_type = genomic DNA
cgggatgctgaccgtgacctctgtgaacgtgaacgggctg

SEQ ID NO: 22479 - DNA, 40 bp, Streptomyces sp 769
  source 1..40: mol_type = genomic DNA
cgggatgctgaccgtgacctatgtgaacgtgaacgggctg

SEQ ID NO: 22480 - DNA, 50 bp, Streptomyces sp 769
  source 1..50: mol_type = genomic DNA
aagattgattaaggaactgtgacctaggccaatcagcacaggacattctc

SEQ ID NO: 22481 - protein, 554 aa, Burkholderia stagnalis
MAAKSRVYSYLRFSDPKQAAGGSIDRQLEYAARWAADHEMELDASLSLRDEGLSAYHQRHVRQGALGVFLRAIEDSQVPAGSVLIVEGLDRLSRAEPLQAQAQLAQIVNAGITVVTASDGREYNRERLKAQPMDLVYSLLVMIRAHEESDTKSKRVKAAIRRQCQGWIAGTWRAPIRVGRDPHWVREIEGGGFELIPERASAVQLAIQMFKQGHGAVQVVRELAARGLKISETGRTHSSNIYKILANRMLIGEKTVEVEGETFRLEGYYPALLTPAEFADLRYLAEQRGRRKGKGEIPGVVTGLGITYCGYCGAAIVAQNLMGRKRLPDGRPYPGHRRLHCVTYSQGAGCKISGSCSVVPVERALMLYCSDQMNLTRLLEGDASTASVSAQLASARQRVAELEAQVRRVTDALLLDDGEAPAAVLKRLRELESQLAGERREVDSLEHHLAASASVVAPAAADAWRELVHGVEQLDYDARMMARQLVADTFSRIVIYQSGFRPGVDSGAIGVVLIGKRGNTRMLNVDRRSGEWRAAEDLAISETTSIPLPTIAHP

SEQ ID NO: 22482 - DNA, 50 bp, Burkholderia stagnalis
  source 1..50: mol_type = genomic DNA
gcatctttcgggcaaccaagcgaaactatacctatacggggattgtgaga

SEQ ID NO: 22483 - DNA, 40 bp, Burkholderia stagnalis
  source 1..40: mol_type = genomic DNA
tttcgggcacccgagcgatacgaaccctactttgggggat

SEQ ID NO: 22484 - DNA, 40 bp, Burkholderia stagnalis
  source 1..40: mol_type = genomic DNA
tttcgggcacccgagcgatatgaaccctactttgggggat

SEQ ID NO: 22485 - DNA, 50 bp, Burkholderia stagnalis
  source 1..50: mol_type = genomic DNA
tcatctttcagtagaccaagtgaaattttatctgcggtagtattataaga

SEQ ID NO: 22486 - protein, 555 aa, Bacillus amyloliquefaciens
MELKNIVHSYNITNILGYLRRSRQDMEREKRTGEDTLTEQKELMNKILKSIEIPYELKMEIGSGESIEGRPVFKECLKDLEEGKYQAIAVKEITRLSRGSYSDAGQIVNLLQSKRLIIITPYKVYDPRNPADMRQIRFELFMAREEFEMTRERMTGAKYTYAAQGKWISGLAPYGYRLNKKTSKLVPVEEKAKVVQFIFNIFLNGLNGKDYSYTAIASHLTKLQIPTPSGKKRWNQYTIKAILQNEAYIGTVKYKVREKTKDGKRTIRPEKEQIVVSDAHAPIIDQEQFQQSQDKIANKVPLLPNKNALELSELAGVCTCSKCGEPLSKYETRRTRENKNGTESVYHVKSLTCKKNKCTYVRYNDVEYAILDYLSSLSNLDNKTLTKHITSMISKYEDVNSNVKTKKQMSEHLSQKEQELKNKENFIFEKYESGIYTDELFLKRKAVLDEEFKELQIAKHELNGTQEAQSEIDSNTVRNNINKIIDQYHIESSTEKKNALLRMVFKEVIVTMTQKRKGPIPAQFEITPILRFNFSFSTSPSLIVPQNAVNILKNR

SEQ ID NO: 22487 - DNA, 50 bp, Bacillus amyloliquefaciens
  source 1..50: mol_type = genomic DNA
cagtaaatatcttaaaaaaccgataaagctgtttattaagatacttacta

SEQ ID NO: 22488 - DNA, 40 bp, Bacillus amyloliquefaciens
  source 1..40: mol_type = genomic DNA
gattaatatcagtaccgataaagctgtttccccggtaaac

SEQ ID NO: 22489 - DNA, 40 bp, Bacillus amyloliquefaciens
  source 1..40: mol_type = genomic DNA
gattaatatcagtaccgatccagctgtttccccggtaaac

SEQ ID NO: 22490 - DNA, 50 bp, Bacillus amyloliquefaciens
  source 1..50: mol_type = genomic DNA
gaataaatcagaggaaaaaaagacccatctgtttatggcagtacttctta

SEQ ID NO: 22491 - protein, 552 aa, Bacteroides ovatus
MKCILLVRVSTEAQSYDEQEKELYDLAHFYGYKDKDISSIATKESAIKLDEEERFGLNRMKELLETGEYDCVFAWEISRIARRKKILFSILEYLTSKGIQLIIKEPRIRLLKDDKTIDEGAETIFTLYAQLAESEMRNKIARFARAKKEGFNKGKYMGGKITLGYKVSEDGYWEIDEEGSKLVRLIFDMYISGEYSLTGLGKELKSRGYFKNLSVTSIKVEMSHLLKNPIYRGIRTSNNIYPQIIDDDTWEQCCKKRKENRTRSKTKTPHLLTPLIRCICNASYSVNLMDGTYSCRVKHNAVEKGLTHSPDVNVNMIESLAWYVALQELHEDMVCKRSDAKKTYEEEIKVYNQKIAHSRELLESTMKRRSDLDENYFVHGRFTKEKYEELTQKQNDIIKTEQSNIRKFETAINSLQQQIQADITFDDMLDALGNSYEHLKNGTTPETMRKIIHRYITEINVEPVEGRRTVFWKKVIIHTPHDAEKQAEINRLHEQGLSDVAITLTNVFYVDTYHKKAYWDKDMQNCVPMVYMERIFRKRKVREENRTTTDNL

SEQ ID NO: 22492 - DNA, 50 bp, Bacteroides ovatus
  source 1..50: mol_type = genomic DNA
gtcacctaatggttaattagtactacgatattagtttactatttggtgga

SEQ ID NO: 22493 - DNA, 40 bp, Bacteroides ovatus
  source 1..40: mol_type = genomic DNA
acctccaccaaccatcgccacttgggaaattgtgtggtgt

SEQ ID NO: 22494 - DNA, 40 bp, Bacteroides ovatus
  source 1..40: mol_type = genomic DNA
acctccaccaaccatcgccaattgggaaattgtgtggtgt

SEQ ID NO: 22495 - DNA, 50 bp, Bacteroides ovatus
  source 1..50: mol_type = genomic DNA
gtcatctaatcgactactaggactaagatatttctagaattttgggtgaa

SEQ ID NO: 22496 - protein, 623 aa, Bacteroides uniformis
MKAAFLIRCSTKNQDLDRQTRDLTRLAKSLGYEYDIENLVFGEKITGKDDVTIKNRESIDKLLRAAKEQKFDVVLVAEVSRMSRDPASGRVYVRQLINMSIPVYFRDIDTWTINPDNGKRVRDAEQVIGAAFDAAWKYLRSLKTQVASGRRNELDNNQISVGQPFFGYTRYGGKDKSKKNCWIVDEVAAEGVVFVFNEYIKDGSTLKSTALATTAKYGELLGRKFSVGSIEHILTYESYHTGIKKISLTDPDTEEIEVFDVKVPILVDTELFEKATAKRKNNRVKSEPYPKQTTYILSKLLKCPYCGYTMTPRAKGNDSRGKTTNERYRIINGKKALSWLCMSGINNATSCNNRISVANEKAEPIIWELIKKELIVFANLNNEERELKVEELTEKITHLASNIDNYNAHKSSLQKQLSKAYTVATMADESVLAMAMTEFNKTARNIRKEMSDCDSAIEQIKGEIDNLVNLKIFYSQPNLPSDIIEKAETDEAEKRKLVKELINKIVPYKITTFKKQHRDRGLVTLNFGVVLLEVYTVNGIYYVFYNANDRGDIRQAYYISGVFAKFQNSINKFDAYKEGEYFVISNADMVMETEEIDELITVNQMVEIAINNGWVLSYCYKQK

SEQ ID NO: 22497 - DNA, 50 bp, Bacteroides uniformis; identical to SEQ ID NO: 11692
  source 1..50: mol_type = genomic DNA

SEQ ID NO: 22498 - DNA, 40 bp, Bacteroides uniformis; identical to SEQ ID NO: 6148
  source 1..40: mol_type = genomic DNA

SEQ ID NO: 22499 - DNA, 40 bp, Bacteroides uniformis
  source 1..40: mol_type = genomic DNA
acggctgtactctggcagtatatcaagatataaaattccg

SEQ ID NO: 22500 - DNA, 50 bp, Bacteroides uniformis
  source 1..50: mol_type = genomic DNA
cattgaaattttggtggggattgcattgaatctgtacaccatttgcatag

SEQ ID NO: 22501 - protein, 404 aa, Mycobacterium marinum
MMDRVDAGEFDVIVARHMDRLLRRLSELESTLERCQRAGAVIITASDGVDTSGDGGRLVARILSSVAQGEVERKGARQRSAAVQAAKQGRWVGGRRAFGYEADGVTIRESEAALIKQGYADVLAGESLSEVARRWDASGISPAQSDKRWYRGTVKDVLTNPRQAGLRRYRPAEERPRIRQNPELGIVGKAQWPGIVDEATWRAAVRILCDPDRRRAPVGGKGLLTGVAICGVCGQAVHRGGASHRKPMYRCRSGRHVSRMSEPVDDFVTAVTLERLQQPDAAMLWSAELPDAKALMAEADVLRKRRDDIAIDYADGVMSREQFRTANARVLGRLGEIEAQISASGSASPLSIVAAADVEGTWEALSVAQRRNIIAALMTPVLHLVGAGTRTFRPETVEIRWKVT

SEQ ID NO: 22502 - DNA, 50 bp, Mycobacterium marinum
  source 1..50: mol_type = genomic DNA
gcgaaattgatggtcttgttgtcgcgtggattcaaaactagcagaactct

SEQ ID NO: 22503 - DNA, 40 bp, Mycobacterium marinum
  source 1..40: mol_type = genomic DNA
gatcgaactctgcgagtcgcgtggagtctggcggacttgg

SEQ ID NO: 22504 - DNA, 40 bp, Mycobacterium marinum
  source 1..40: mol_type = genomic DNA
gatcgaactctgcgagtcgtctggagtctggcggacttgg

SEQ ID NO: 22505 - DNA, 50 bp, Mycobacterium marinum
  source 1..50: mol_type = genomic DNA
gcgatatttgctttattgctgtggtctggaatcaaatccacaatatctct

SEQ ID NO: 22506 - protein, 490 aa, Bacillus toyonensis
MLFNNDNIKHVAIYLRLSRDEENLGIEQILDNHRQTLIALCNENKWSYEIFEEVASSSTIINREQMVKLLDRIKQDYFDAVVVMDIDRLSRNEYDASYIKRILFETETYIITPNRMFDLSRDDDSLLLGITNLIASGEYKQILKRMRRGKEYAQKQGLWTDGIAPLGYSKDPKTRKLVPNERSKDVQFIFSEIVKGTTIPELIRQLNNMGIKTRQGYDFKYNSIQRIINNDAYKGTIVSNKTIGQYKPRPKEEWIIVHNAHPPIVDEATWETATKIVNEYSFKAPRSKNRTYPTSNLIYCANCGRSQGCNLKPNINKIYIKHCKCGNRGFYYNPVLALIKEEVLGYKKNILEALATLEEGQQEDNIQYKKDKLISRLNKVKNALKRINILFEEEEMDIVEYRERKAERQEEERRVEEEIMALEKEDKSVKIDTLKEQLEAVENLVGKWHLLDSEGYSDEKINRLLHGFVSGILWSLKKGTESPTIDIIYK

SEQ ID NO: 22507 - DNA, 50 bp, Bacillus toyonensis
  source 1..50: mol_type = genomic DNA
aatttctacccaaaaacggaacaaacttgttgagtacgtgggtagcacat

SEQ ID NO: 22508 - DNA, 40 bp, Bacillus toyonensis; identical to SEQ ID NO: 21043
  source 1..40: mol_type = genomic DNA

SEQ ID NO: 22509 - DNA, 40 bp, Bacillus toyonensis
  source 1..40: mol_type = genomic DNA
actcgtatttactggaccgaatggttctgggaagacaacg

SEQ ID NO: 22510 - DNA, 50 bp, Bacillus toyonensis
  source 1..50: mol_type = genomic DNA
aaattttactatcaaatggaaaaaaatagttgaataatacagtaaaacaa

SEQ ID NO: 22511 - protein, 452 aa, Listeria innocua
MKAAIYIRVSTQEQVENYSIQAQTEKLTALCRSKDWDVYDTFIDGGYSGSNMNRPALNEMLSKLHEIDAVVVYRLDRLSRSQKDTITLIEEYFLKNNVEFVSLSETLDTSSPFGRAMIGILSVFAQLERETIRDRMVMGKIKRIEAGLPLTTAKGRTFGYDVIDTKLYINEEEAKQLRLIYDIFEEEQSITFLQKRLKKLGFKVRTYNRYNNWLTNDLYCGYVSYKDKVHVKGIHEPIISEEQFYRVQEIFSRMGKNPNMNRDSASLLNNLVVCGKCGLGFVHRRKDTVSRGKKYHYRYYSCKTYKHTHELEKCGNKIWRADKLEELIIDRVNNYSFVSRNIDKEDELDSLNEKLKIEHAKKKRLFDLYINGSYEVSELDSMMNDIDAQINYYEAQIEANEELKKNKKIQENLADLATVDFNSLEFREKQLYLKSLINKIYIDGEQVTIEWL

SEQ ID NO: 22512 - DNA, 50 bp, Listeria innocua
  source 1..50: mol_type = genomic DNA
tttagtacctcgttatctctctctggaagaagaagaaacgagaaactaaa

SEQ ID NO: 22513 - DNA, 40 bp, Listeria innocua; identical to SEQ ID NO: 7873
  source 1..40: mol_type = genomic DNA

SEQ ID NO: 22514 - DNA, 40 bp, Listeria innocua
  source 1..40: mol_type = genomic DNA
tttcggatcgagttatgatgtacgtaaagagggaacaaag

SEQ ID NO: 22515 - DNA, 50 bp, Listeria innocua
  source 1..50: mol_type = genomic DNA
ttttgtgcctcagtttctttatctgtaagaaaaaaagactagtaactaat

SEQ ID NO: 22516 - protein, 495 aa, Enterobacter ludwigii
MKQNGKAYSYIRFSSKKQEQGDSVRRQTELAEQYAHMHGLILSDKNFQDLGISAFKEGNRPSLGDMLEAIEKGQIEPGSTIIIESLDRLSRRGIDVTQQIIKSILQHNVFIASLVDGLLLNRESVNDLVSVIRIALAADLAHKESEKKSQRLRETKSQQRQRALSGEVINKILPFWLKRKEDKFVFSDKVDTVRRIIQLRREGFGTNKIAKVLNDEGHKPLRSAGWNHTTVRKTINSVALYGAYQTSETTKDRKVILLDIIDDYYPAVISKEEFMLLQSDQKQNKPGYKSEHNAFAGILKHECGGSLVRKFHVASGKTYQYHVCANARDGKCNITKNFKNIEIALFRIMKKLKLEKNTSFDGALLLEQETIKKKIQELNDMLLTAPKIPTSVIQTINNLEDKLQEVEEKIKQQNSMIISERAFDLKLLQDIKDPQELNMMLKRIIESIIVYNIGKKWRIKVQYRNEHVQSFLWDGENITFITDTKEILDLVNSWG

SEQ ID NO: 22517 - DNA, 50 bp, Enterobacter ludwigii
  source 1..50: mol_type = genomic DNA
aatttcccactttgaaactacatggtaatattgttgcaaagaagcaaaat

SEQ ID NO: 22518 - DNA, 40 bp, Enterobacter ludwigii; identical to SEQ ID NO: 4963
  source 1..40: mol_type = genomic DNA

SEQ ID NO: 22519 - DNA, 40 bp, Enterobacter ludwigii; identical to SEQ ID NO: 6099
  source 1..40: mol_type = genomic DNA

SEQ ID NO: 22520 - DNA, 50 bp, Enterobacter ludwigii
  source 1..50: mol_type = genomic DNA
aatttaccagtactaaataccaacaaaatatagttttaacaatgcaaaat

SEQ ID NO: 22521 - protein, 570 aa, Serratia plymuthica
MTTRRPHVYTRISKTTQTEGSGLDEQTARIEQYLKDKRHLFEGDVTYWQDIGVSAYRDMNIQHGQLSEFIKQVDEGRIGQGDALIIYSLDRLSRRSSWDETTIQHLVKKGVEIHDVSTPVVLNREDSMSKIIMELIVTRGNNESKIKSERSTAGWEKRLNDTLKDGRVFTNKLPRWLGSNDDQYVVLKNEAEIIKRIFREYTNGMSSPMIARRLNEEGTGKSLWRPNTITKLIKDERLRGNLVREKITLIPNVFPKVIDDELFVLANRILSTNAVCKKGRPRENNKTREVNNIITGLVRCGKCGSKVTTTKNGRGMRYITCLNRLNYKICGQKSIRLEEVERIVITHVKQVDLSKVLSISNADTSNEALLQAELIELKIEEQSCRVKIDERKRLKQRASLPLANALTDIQDRIEEIQSEILNLQVQEPLPDISSDSISALLDASNVELRMSLRKYLVQVVDKLTFINIGDYNIIEVQYNNNVYCHALITDKKLKVLHEVDITVSGDNTTYNSGGFSIVESESEGVCTFEGIDNVSYTDYFLLANYIGSLPEKQWIVDVIYLQQNMDAVLK

SEQ ID NO: 22522 - DNA, 50 bp, Serratia plymuthica
  source 1..50: mol_type = genomic DNA
atgtttgcaatactagctaataccgtggtgttctgatattattcacacat

SEQ ID NO: 22523 - DNA, 40 bp, Serratia plymuthica
  source 1..40: mol_type = genomic DNA
atggcgcaacgccgaaaccgtggtcattggccagtcacaa

SEQ ID NO: 22524 - DNA, 40 bp, Serratia plymuthica
  source 1..40: mol_type = genomic DNA
atggcgcaacgccgaaaccatggtcattggccagtcacaa

SEQ ID NO: 22525 - DNA, 50 bp, Serratia plymuthica
  source 1..50: mol_type = genomic DNA
aagcttgcataacaagctaacatcatgatgacaggatcacattcacacat

SEQ ID NO: 22526 - protein, 580 aa, Paenibacillus odorifer
MVKIAAYARVSTSSEFTNQKNSLKTQIEYYQSYANDKEEMELYKIYHDSLSGTGWEKRKGFREMLYDAGLNIGVTEAGTEVLELSNRRPLFNRIVTKDISRFTRNVADDRIFKLLKDKGVYVDFTNAQLSTEKSSEEMMLQILATFSQRESKDRSEKVMFGLTESAKKGHIRMKDNLYGYRLNKELNTLITLPDGTKALTNTLEIIHKEAEVVRKIYQLYIEGNGLRKILQYLETSNILRDGKHFSQSTINRILCNPMYKGTLVRNKLAAPLVFSNKKSATLKDEKEWNTFEDRFPAIVDEETFEKAQHARLGRLNQNRKGIKTQYGKYSGKVICKNCGKSYVQNTDKFGKLFMNCATKKAKGSKACSAKNIKNDWLDEAVNAFLGTSIENSILLFKNSYIYELKNFKLELYGGIDNQKLEEAEKLKLKIEEVAERKIRLGTLYVMGNFDEITLKEMATQLDIEHRILTEKYQHCILSNEGIEEAIKEIDDTINNIKRFSLLNELTDENDLMSQISKIYIEETHGTIYLKDDMSSDSDSKHKLHFLFEFKLFERLNKIVEKYKAIGKIHTDNIITVSREL

SEQ ID NO: 22527 - DNA, 50 bp, Paenibacillus odorifer
  source 1..50: mol_type = genomic DNA
gttatgtaatcgcagacgaatatcattgtaaaataatcctattataaaaa

SEQ ID NO: 22528 - DNA, 40 bp, Paenibacillus odorifer
  source 1..40: mol_type = genomic DNA
actgccgcagacgaatatcattggcttaccagattcagcg

SEQ ID NO: 22529 - DNA, 40 bp, Paenibacillus odorifer
  source 1..40: mol_type = genomic DNA
actgccgcagacgaatatctatggcttaccagattcagcg

SEQ ID NO: 22530 - DNA, 50 bp, Paenibacillus odorifer
  source 1..50: mol_type = genomic DNA
tatatgtaaagatagactaaaatatatgtaaaagatagtctatatataaa

SEQ ID NO: 22531 - protein, 530 aa, Flavonifractor plautii
MTDTPAAYLRTSLEDFNRAHGLADQSQSISNQRKVILEYVQHNPEFSEVQIREFIDDGLTGTNTDRPQFQAMIEAARRGEVKCIIVKDLSRFGRNYLDVGDYLEHIFPFLGVRVIAVNDGYDSKQYEGKTGGMDIAFRNFMYENYSRDLSIKVRSAMHSRMKKGRFVNHVPYGYQKAPGDKHLMVPDPNTAPIVREIFQSIIRGKSTSQIAKELNTRGVLTPLAYKQHRLKPACQNRELMWSHITVLNILKNDKYTGVMTNHTRESRYMRDKNQRRVPREEWIITENTHEALVTKEEFDAAHAMIREVKRPERKSPPACDTVFYCGHCGRKLRKSHGLDTYFACDTQLYQENATCSNIRWSKTDLEAVMLPVYKAQLYLLGERAKELALQGDGHPNENWPEMVGKIDREIAACQAQKVQYYEAYRNGDLDRGAFVEQKAALAIRIEHLQGERTEIELKRQAQRTQIEARESAKRELSQYLYATHLDGALLTESMYQAIDRVKVFSNERIEIRWKFEDLFAGQGYRERKAV

SEQ ID NO: 22532 - DNA, 50 bp, Flavonifractor plautii
  source 1..50: mol_type = genomic DNA
tttatgttttacttgacacattaggacgaatgagatataatagggcaaag

SEQ ID NO: 22533 - DNA, 40 bp, Flavonifractor plautii
  source 1..40: mol_type = genomic DNA
cggtatcgtgaggaaagtggacgaactgggccgggtcgta

SEQ ID NO: 22534 - DNA, 40 bp, Flavonifractor plautii
  source 1..40: mol_type = genomic DNA
cggtatcgtgaggaaagtgtccgaactgggccgggtcgta

SEQ ID NO: 22535 - DNA, 50 bp, Flavonifractor plautii
  source 1..50: mol_type = genomic DNA
tttgtgttttatctgtcttctttgtcagactaagattcatgagggcaaag

SEQ ID NO: 22536 - protein, 537 aa, Blautia obeum
MTKQQARLRVRLYARLSKDDGDADKESNSITNQLQMLRYYSKEKGFEIIDEYVDDGYSGTTFNRPDLNRMIEDAMEDTQPSGIMVKDMSRFGRNNAMFMYYVEEIFPNNDILFIALNDDVDTRYEDNEMMPFKSIMNEYYARDTSKKIRSVKKTTALSGGFCGSFAPYGYRVDPNNKRKLLIDPETAPIVKRIFEMSKQGNSVHQIARTLCEEKILIPRAYRAMKNGTLETSTGFRFPTDWVGKNVKMILENQVYLGHMVSHKTQTKSFKNRKLVAVPKEDWIVVKNTHEAIIDEETFELVQKFISVKKRPNKTGRPNMFVGLVKCPDCGRNMAFSNPNGREPRFRCRTYARNSNLCTTHAISYDALVKIVMDDIQKHIKNMETLGDQFIEEMRVLSESGGGKKIKQFKQELELAEKRIAEIDSIIMKLFEQNVAGKISDGRFEKMSVTYENEQRELEERRKALKEKIEAEDYKTKNTNQFLETIRKYENVTELNRSMLVELIDSIYVYQAEGTGKERTQKVEINYRFLCESQCGIA

SEQ ID NO: 22537 - DNA, 50 bp, Blautia obeum
  source 1..50: mol_type = genomic DNA
aatgtggtattgcatgacggaaatgtaccattgagataccaacaacaaat

SEQ ID NO: 22538 - DNA, 40 bp, Blautia obeum
  source 1..40: mol_type = genomic DNA
tcctttcaatgatggaaatggtaggatgagccgtttgctc

SEQ ID NO: 22539 - DNA, 40 bp, Blautia obeum
  source 1..40: mol_type = genomic DNA
tcctttcaatgatggaaattgtaggatgagccgtttgctc

SEQ ID NO: 22540 - DNA, 50 bp, Blautia obeum
  source 1..50: mol_type = genomic DNA
aatgtgatacaaactgaagaaaattggccttacagaaaatacaaacaaat

SEQ ID NO: 22541 - protein, 532 aa, Pseudomonas syringae
MTITSPLPRAFSDVFQSDEIINVYSYIRFSSKAQKMGFGEIRQLEQLNRFFDQYPQARQVERYEDLGVSAFKGKNLKTGQLAKFVERIKFKEILSNALLLVESFDRISRMGGYDALELIISIIQADCAIYTLFDNRLYSKRKKDSSVDISLIQNILERANDESRAKSERISDAKARNLEKGINGGIVTKRCPFWIDYVDGKFVLNENAAAVKKATQLCFDFGFQLIAQELNKENHPKKYSASSVGKFLHSHALYGSFLALKLDENGERTVFNKEIKSYYPALITEAEYHRISAKLKERLDPRLAGRKSDDFKNILRGLVFCKCGSTFRYHAQKSQYVDLVCSASMIGKCEFAKQGKGVRYRYALVEQLFLTFHAQIPFHKIIVKSEDIKALEKEHSEVLGLIILKEKALSNNFSILEKSSESAQKYIMSRIDEVSLELDKLKSAEHQLSVKINSLHIASKSDLKVIEVYRLLVTEKGRIRINNFLHSQNVRLIITPVKKKYFSLEILHEENHIDTIDVTPERYTARLNSHLK

SEQ ID NO: 22542 - DNA, 50 bp, Pseudomonas syringae
  source 1..50: mol_type = genomic DNA
tttctacgaataaggctggtcattgcaatgatgtcttctattcgtagaaa

SEQ ID NO: 22543 - DNA, 40 bp, Pseudomonas syringae
  source 1..40: mol_type = genomic DNA
aatccgtacgcccatgaatgcggtgatcggcatgctcgag

SEQ ID NO: 22544 - DNA, 40 bp, Pseudomonas syringae
  source 1..40: mol_type = genomic DNA
aatccgtacgcccatgaattgggtgatcggcatgctcgag

SEQ ID NO: 22545 - DNA, 50 bp, Pseudomonas syringae
  source 1..50: mol_type = genomic DNA
tttttaatatttctgctggtcatttgtatgctttttttttttcccagaaa

SEQ ID NO: 22546 - protein, 557 aa, Haematobacter massiliensis
MKVAIYARYSSDNQRDASIADQLRMCRLHAEKQGWHVVEEYTDHAISGASLIRPGIQALMTDAMAGRFDVILSEAMDRLSRDQEDIAGIFKRMSYADVKMFTLSEGEVSHLHVGLKGTMNALFLKDLADKTRRGQRGRVEAGKSGGGNSYGYDVVKKLDANGEPIRGDRTINENQAAVVRRIFHDYAAGKSAKTIAFALNKDGIPSPSGGDWGFSTINGNPKRGNGILNNEMYVGKIVWNRQRFVKDPNTGKRQARPNPESEWVIQETPELRILDDDLWNAVKARQEKNKLTRDDNGSTDVRTVNHRRRPKYLFSGLTKCSCCGGGYSAISATLIGCSTARNKGTCDNRVNIRRDELESRVLNALRTRLVDPELFAHFCEVFTQEMNRLRMEGRVGIASAEAEIAKIDRELETLLNLILKGGAADALNAKMVSLEKRKKELELFLAEADEPPPLLHPSMALQYRKRIQQLYESLQDEEEGKRVEAADTIRSLVDQIVLTPVEGKVEIDVQGDLAGILTISTQTKNPAGERGGSQVKMVAGAGSNLHLLPEQVKMVAG

SEQ ID NO: 22547 - DNA, 50 bp, Haematobacter massiliensis
  source 1..50: mol_type = genomic DNA
cgagcaagtaaagatggttgcggggaccggcatcgatcacaacttgcaat

SEQ ID NO: 22548 - DNA, 40 bp, Haematobacter massiliensis
  source 1..40: mol_type = genomic DNA
tgtgtattttggttgcggggacaggatttgaacctgtgac

SEQ ID NO: 22549 - DNA, 40 bp, Haematobacter massiliensis
  source 1..40: mol_type = genomic DNA
tgtgtattttggttgcgggaacaggatttgaacctgtgac

SEQ ID NO: 22550 - DNA, 50 bp, Haematobacter massiliensis
  source 1..50: mol_type = genomic DNA
aaagcaagtgggactggttccttgaacaggaatcgaacttagcctgcaat

SEQ ID NO: 22551 - protein, 546 aa, Agrobacterium tumefaciens
MQDDFPGDQHSSGPVRAYSYVRMSTRKQLRGDSLRRQLERSKAFADEHSLLLDDSLQDLGVSAWRGRNFKTGALGRFLAMVESGQIPKGSYLLIESLDRLSREAVPDALTLFMAIINAGIVIVTLGEDRQIYSRDRLNGDWTKLIIGLAVMSRGHEESQTKSERISAVAKRKREQAREGKGHITSITPAWIDAKRIDANRYEFTLNDHAETVRAIYEMATRGLGATVIARKLNADGVPAFKSKDGWYQSIIKALLTRHDVIGIFQPHRMQNGKRVPDGDPIEGYFPAAIDKDLFLRVQTMRSNPGRPGRKGDTFANLFTGLCHCAHCGGPMTMKMSRVRGNENGRYLVCANYVRGHRCTEGTRHFRYEPFEMAILDHVKELNLADALQTVRIDHAINDINETIAGMTIRLDELRRKEQRLALAVEDDSQPLETILDLLKARQAERHAVEAELRHHQNERQRLSARNNDPELAGDHIRVLRTAWETAEDADARYALRSEAYAAIRELVSEISFDSATHEAIIVVANGVIAYSVRDGRISGYFQAFAA

SEQ ID NO: 22552 - DNA, 50 bp, Agrobacterium tumefaciens
  source 1..50: mol_type = genomic DNA
attgctgtaatgcaatgtttgcataaaatggaaatttgtattacagcatt

SEQ ID NO: 22553 - DNA, 40 bp, Agrobacterium tumefaciens
  source 1..40: mol_type = genomic DNA
aaatggttaagtcccgattaaccacgatcattcactatat

SEQ ID NO: 22554 - DNA, 40 bp, Agrobacterium tumefaciens
  source 1..40: mol_type = genomic DNA
aaatggttaagtcccgatttgccacgatcattcactatat

SEQ ID NO: 22555 - DNA, 50 bp, Agrobacterium tumefaciens
  source 1..50: mol_type = genomic DNA
tttgctgaagataaaattttgcattgaattaaaaaaattgtttcagcatt

SEQ ID NO: 22556 - protein, 606 aa, Agrobacterium tumefaciens
MKQSEIRQTAYSYIRMSSQQQMKGDSLRRQLELSRQYAAENNLVLDESLTDIGISAWTGANVQDGALGRFLQLIQSGLIKRGSYLLVESLDRLSRQQVRNAIGPFIDIINAGVTIVTLADKQVYSETTVDENWTQLMMSLAIMSRAHEESQTKSKRLKEAHANKKKLAAQGIGRYSHNMWGWIDQIEVAANKFEYQLNQHAAAVRKIYEMADAGLGQLVITRKLNDEGIATFRMSKKGWQQPNVGSILRNEAVIGTYQPTHAINGKATPNGPPIKNYLPAAISEELFWRVQRNKQRRVSSGRKGKQLTNLFTSLCLCRHCNGPIRVRLAGTGGETHRHLHCDNRYRAAGCPSVGGGFRYDIMEATILDKIKEFDFEIGTGRQTADREVLVHEIMTKEIQLDEMEKRKNKLLRALELSADDAAMSDILSQLSERRTTVEQLTTQIAEMKGDLARIDTEAGALATAVERLQLERLIWPTGPDDEVYASRSRVSAIMHSYIDVIAFDFNRKTYRVSIGGHLLLYEFYRDGRLLQKIDNRKLMRKHGVPVIWKDTDETGHAVDGTGEKVIPMGWNSETLTTTIPQSRQDPNAHLVDKRKRIVRTLINKKH

SEQ ID NO: 22557 - DNA, 50 bp, Agrobacterium tumefaciens; identical to SEQ ID NO: 22552
  source 1..50: mol_type = genomic DNA

SEQ ID NO: 22558 - DNA, 40 bp, Agrobacterium tumefaciens; identical to SEQ ID NO: 22553
  source 1..40: mol_type = genomic DNA

SEQ ID NO: 22559 - DNA, 40 bp, Agrobacterium tumefaciens; identical to SEQ ID NO: 22554
  source 1..40: mol_type = genomic DNA

SEQ ID NO: 22560 - DNA, 50 bp, Agrobacterium tumefaciens; identical to SEQ ID NO: 22555
  source 1..50: mol_type = genomic DNA

SEQ ID NO: 22561 - protein, 556 aa, Vibrio metoecus
MDNRKVLYPYIRFSKDEQKHGTSYERQMDKIEKYAADNDFVIDDTLNLKDLGLSAFKGKHKDKGALGGSIKAIEKKSIPVDGSSYLCIEQFDRLSREDVDTAYQLFRSILKANVNIITLMDKRIYTKESLNDMMSIIYSIMLMSQANVESQKKSERITASYRTKLDKVKSGENILFAARYPEWIDNQGSIKDRQFVLNDKAEIVRRIFQLYLDGVSMNGIARIFNDEGIAPFMRTKNSINQWSSGNVSSILRNRCVVGDLCVSRTGDIIKGYYPPVISVDDFEATEGLRDKKRTLKTAGKPSINVFTGKVFCVECGRKFYFEKESFTYKGQKNIYHFLKCSGKRNNGGCHSLNIKYEDFLDATKAPLKMKMKKDPKKVGEIEDHISKIRGVVKELDGELAQLDLMLDSGEINATIYAKTASKLEDKLVVERKRIASYKQKIAQMNNDLDFDSFDIHDPKSINKVKKYINDNYAAFIVSSYNKTILSLSHTGGVIITPFKHKKSLAKDSESVKDFYTLQADILDQYKRGEMDNKFTEILEATNFWGIETPETDYSFE

SEQ ID NO: 22562 - DNA, 50 bp, Vibrio metoecus
  source 1..50: mol_type = genomic DNA
atgcagggaattgtaaaaatatcctttgataactgtataattatcggtat

SEQ ID NO: 22563 - DNA, 40 bp, Vibrio metoecus
  source 1..40: mol_type = genomic DNA
gatccctgcaaacaggtctttaaaaatattggccccgagg

SEQ ID NO: 22564 - DNA, 40 bp, Vibrio metoecus
  source 1..40: mol_type = genomic DNA
gatccctgcaaacaggtcttcaaaaatattggccccgagg

SEQ ID NO: 22565 - DNA, 50 bp, Vibrio metoecus
  source 1..50: mol_type = genomic DNA
atgctgggaacattcaaattattctctattaactgttttgaaatgggtaa

SEQ ID NO: 22566 - protein, 494 aa, Bacillus safensis
MRQKKSAIYLRKSRSDEGIEALRKHKEMLIRLADSKGLHYDIYEEIGSSISLDVRDELNRLFANIDQYENVIVMDIDRLSRSLADMEQIKNLFIDKEIKIITPSQVIDLSVDSQELMVDFQSVIANAEYKQIKKRMRRGRIEGARAGNWVAGITPLGYNIDKKSKKLVPNKDELPLVREIFRMALTNQTPADIADHLNKRGYKTRKGNKFTAYAIQTILSNMAYIGYVVYRENPDIKGRKPEEVVTPNAHTAIISELDYLEVQKLLKARRTNHGRNSALYRTYLQGLVFCAECGRQMTIQFTSADKDGRNVDSINFQACRTEGCKTQGISCKEVEEAVRAELYSLKSKVFHQFQQLKGQDNRGKEVEYSTLIAKHQSEIKRGEGKLDNLLDLQLDGAIDKDTYSKKKAEIQYDIQELRQEIKRLELSIQKLDKDSQSNMLLHTMRMIDKIDIMDKEEANRWLKTIIARIEYSRPKPNSLRRSAKGEPVINIIAM

SEQ ID NO: 22567 - DNA, 50 bp, Bacillus safensis
  source 1..50: mol_type = genomic DNA
caataatgctgagattaattagatcaattaaatttagttgggcattatag

SEQ ID NO: 22568 - DNA, 40 bp, Bacillus safensis
  source 1..40: mol_type = genomic DNA
ggctagagcggttgaaaatcagatttataccgttatctca

SEQ ID NO: 22569 - DNA, 40 bp, Bacillus safensis
  source 1..40: mol_type = genomic DNA
ggctagagcggttgaaaattagatttataccgttatctca

SEQ ID NO: 22570 - DNA, 50 bp, Bacillus safensis
  source 1..50: mol_type = genomic DNA
aaattaaattaattttaattagattaattaaatttaaaaaacctttatta

SEQ ID NO: 22571 - protein, 615 aa, Clostridium scindens
MNNNLAFDTDIQTPFHIFQDKNRKRHMVFYGRVSTEHEAQLSALENQIQWYDDQAERHPNWVVVDKYIDEGITGTQAKKRPAFLRMIEDAKAGKFDLIVTREVCRFARNTVDTLVATRELKNLGVEVYFVEDNIWTMDGDGELRLTIMATLAQEESRKVSERVKAGQHISRNNGVIYGNGNILGYDRINDTYVINKEQAETVRMIYDMYLHDGVGATKIANELSIRRRVAASGKVKWTPSNVSRVLRNPTYMGCMAYGKSFNNNYLEQKRINNHNSDTYKYVKANFEPIVTEEEWRECERIRKRRRRELSIPMVRKTPFGEESVTKPVRESHDKWNRKLRCSCGYTFRKNRWHKNKNKDWSYGYQCYNQLNNGSAKKRREQGLDTTGYCDMPMIADWKLEIMCKMLLEKVWSERTGAIQEAERILKLCYQMDNAVQSEAVAIKRKIEKIKLKLDNLIDMRAEGDISIEEFRKRKESLNMELASYEVELQEQKRMKHATKEKEMNWDAVHKSLEETIDFSKSTVDNEVVDKFIAKIIPQGNNRFLWFVNLSSLRSEEIEMVVEGRRNHSTVFIYDEEKGEESEEDDSSVHSNILYISDIASELEAKKYSPEGAQHR

SEQ ID NO: 22572 - DNA, 50 bp, Clostridium scindens
  source 1..50: mol_type = genomic DNA
aaaatactcccccgaaggggcacagcacaggcagctatcgctagtaggta

SEQ ID NO: 22573 - DNA, 40 bp, Clostridium scindens
  source 1..40: mol_type = genomic DNA
gatcgcaagactggctgcagcacaggcagcaatcgcagaa

SEQ ID NO: 22574 - DNA, 40 bp, Clostridium scindens
  source 1..40: mol_type = genomic DNA
gatcgcaagactggctgcattacaggcagcaatcgcagaa

SEQ ID NO: 22575 - DNA, 50 bp, Clostridium scindens
  source 1..50: mol_type = genomic DNA
aaaatactcttgggaaggggaacatttcaagcagctattagtgatttatg

SEQ ID NO: 22576 - protein, 546 aa, Anaerotignum lactatifermentans
MKKQYKVGIYCRLSVDDASNSAKAKNYIPGDESASIENQYEILSKFVMLNGWIEVKTYRDDGYSGGNFQRPGFLEMLEDARHGLINLILVKDLSRLGRDFVKVGRYTDVIFPSLGCRFVSVLDCLDSEGDNTDMLHFRSLMNDYHLKDLSGKIKSVLYAKKKSGQYLTAYAPYGYRKSDEDKHRLVVDEEAAAVVREIYRMRCSGMAYGKIAAALNEKSILSPRWHWELHYGKKGSCKYSKLWTYATVKNILNDTVYLGIVTQNRTGSHSYKDKTMIQKPETEWICHEDAHEAIVDRELWEAVQEKNRAVKQQVANHAAPLPALFTGKLVCADCGHPLAATRETQRRKNGTSKRYVSYICSHFATTGRSACSWHRIYEISLKTLVLNEIRAHSRAVAQDENAVLDKLKQQILSESAARQEDSKLEISRLRRRIGELEHMTAKLYEDKVSGIINNDTFAVLIQKSEQERIQKAERLEVLLAEERKARQEVENIRQWAGIVRRYLNVQELDREIVEELIDHIEIGERSVIDGQRRQDIKIFYRFVGVV

SEQ ID NO: 22577 - DNA, 50 bp, Anaerotignum lactatifermentans
  source 1..50: mol_type = genomic DNA
cttcccaaacagcttatgttcttaaacagaggttattcgggaaagggaaa

SEQ ID NO: 22578 - DNA, 40 bp, Anaerotignum lactatifermentans
  source 1..40: mol_type = genomic DNA
tttcgcaaaccattcattgaacaggtttttgaacgggaca

SEQ ID NO: 22579 - DNA, 40 bp, Anaerotignum lactatifermentans
  source 1..40: mol_type = genomic DNA
tttcgcaaaccattcattgcacaggtttttgaacgggaca

SEQ ID NO: 22580 - DNA, 50 bp, Anaerotignum lactatifermentans
  source 1..50: mol_type = genomic DNA
cttcccaaatgtcaaatattatttcatagaagttaatctctaaagagaga

SEQ ID NO: 22581 - protein, 526 aa, Pseudomonas sp UW4
MNNAYSYIRFSTAKQLKGDSYERQQAMLDKWAEDNPAYTLNRDLTFKDLGISGRSGKHLKHGFGKLLEAITNGDIGAGDVVLIENIDRAGRMEPGIMSGILLDILNAGVTLITLDDRQVYTQESLRGGSFYILVGKVQAAFNYSEVLSGRMKASYKTRNKLAIEGKTPKRNTPVWLKSDGTLIEEIAPFIKQVFEDYAAGLGERRIYERILENGGSKHSCFVRMAPSTVKRWMTNRTVLGEWQGVPNVYPVVVEPELFYRVQKRMEEKFTPRSAPTKHKYTGLVVCGECGKNFNTKAYSVRKNGIAPPAVMECSGRARRGSTACSNSKGIPESVIALVYFQSFSKGALRALQGQVLSASQKREVEIDGEVAELTKKISRAEKVILDTDNDDEADEMITTRRGLRERRKELLAEKEGLTASAVSVYDKIVDVTKFNLDPAKANAMLQSVGYRIVCNQDSTVVSESGTYKYEGWGRAEDVHKVITPEGKLMKLPIHRLGVERKPMKDTGAADKIRARLAKMITKAQGA

SEQ ID NO: 22582 - DNA, 50 bp, Pseudomonas sp UW4
  source 1..50: mol_type = genomic DNA
aatcaccgtattgcaaattgttgggtccaacatgctgcaatgtgtagatc

SEQ ID NO: 22583 - DNA, 40 bp, Pseudomonas sp UW4
  source 1..40: mol_type = genomic DNA
ttcgtagtacaccggttgagtgaagatcatgtcgtagatc

SEQ ID NO: 22584 - DNA, 40 bp, Pseudomonas sp UW4
  source 1..40: mol_type = genomic DNA
ttcgtagtacaccggttgaaagaagatcatgtcgtagatc

SEQ ID NO: 22585 - DNA, 50 bp, Pseudomonas sp UW4
  source 1..50: mol_type = genomic DNA
tatcaatttaatttaaattgtttcaaggaacatggtgaattgtgtagatc

SEQ ID NO: 22586 - protein, 434 aa, Mycobacteroides abscessus
MNDHQIVGWAEDLDVSGSVDPFDTPSLGPWFREDKRVQWDILVAWKLDRIGRRAIPLNKVFGWMLEHEKTLVCVSDNIDLSTWVGRLVANVIAGVAEGELEAIKERTRASRRKLLTSGRWPGGQVPFGFIAVELPEGGWVLATDHAKARVVTRIVEEVIRGSAIEAVANRLNDDGIPAPKGGEWLPSSIWKIVTGKYLLGHATYGGETVRGPDGLPVLNAEPLVTREQWGRLQEAIKERRAGSRTKTTSPLLGVVVCAVCGKPLFHKIYRRNYGKGLYRYYHCRDKSHGKQMDAEPIEYLLADSFIREVGWVPLQEARYIPAEDHQIELEEAIRAVEELTSVLGTITSATVRSSITGQLTALDSRIAALESLPKSNARWEYRDLEQTYADEWNLDEDVQRRRALLVKSGITAEASPGHFHFHIPPDLIERMRSI

SEQ ID NO: 22587 - DNA, 50 bp, Mycobacteroides abscessus
  source 1..50: mol_type = genomic DNA
tatctacagtgggtagtcggcgacaagtcgtggtccacccagtgtagact

SEQ ID NO: 22588 - DNA, 40 bp, Mycobacteroides abscessus
  source 1..40: mol_type = genomic DNA
catctacatcgtcggcgacaagtcgtggtcaatcgacatg

SEQ ID NO: 22589 - DNA, 40 bp, Mycobacteroides abscessus
  source 1..40: mol_type = genomic DNA
catctacatcgtcggcgacttgtcgtggtcaatcgacatg

SEQ ID NO: 22590 - DNA, 50 bp, Mycobacteroides abscessus
  source 1..50: mol_type = genomic DNA
tatcttctggtaacagtgggcaatttgtggtgttcccttgcctgtagaca

SEQ ID NO: 22591 - protein, 455 aa, Anaerococcus lactolyticus
MEMVRAALYIRVSTEEQVREGYSVDAQKENLIRYAKFKGYTVVDIYADEGITARKKYTNRKEFMRLLDDVEADKIDIILFIKLDRWFRNVGDYYKVQEILERNGVGWTATTENYDTTTANGRLYVNIRLAVAQDESDRTSERIKFVFDKKIKDGEAIWGKPPFGYKIKNKILVKDEEVEGFINECFESYKVLRSINAVAKTMNQKHNKKISYTTYSRFLRKNLDFYKGKYKDNENYFPPYLSEEDYEEILAINKARSGRFGGKTYNYIFVGLLACACCGYNMGSAGYTTNRRTNQKYRYYKCGRSTVKVCENNLRIQEKKIENYLLENIEDEIRKYKVVYKIEKSEPISRPVAAKNNIKNKINRLRKLYLEEVIELEDYKKEYEVLQKQLDQVEEEIKTHKRFQKKDFSALDKLLQSDFEEMYNNLDNLQKRALWQSVISKIYVKGSEIVKIEFK

SEQ ID NO: 22592 - DNA, 50 bp, Anaerococcus lactolyticus
  source 1..50: mol_type = genomic DNA
atttgtagttatttatacactccgttagggataaattaataactacatat

SEQ ID NO: 22593 - DNA, 40 bp, Anaerococcus lactolyticus
  source 1..40: mol_type = genomic DNA
gtaggtctgcaaaagagcatttggcccagctgaaacaaac

SEQ ID NO: 22594 - DNA, 40 bp, Anaerococcus lactolyticus
  source 1..40: mol_type = genomic DNA
gtaggtctgcaaaagagcaaatggcccagctgaaacaaac

SEQ ID NO: 22595 - DNA, 50 bp, Anaerococcus lactolyticus
  source 1..50: mol_type = genomic DNA
atctgtggttttagatacacacagaaaggtagaaatatacagctatagat

SEQ ID NO: 22596 - protein, 556 aa, Criibacterium bergeronii
MSNMKRTGQTALYERLSRDDEMQGESNSITNQKQLLESYAKRNGFINIYHYTDDGVSGTTFDREGFQKMIKAVEKNKVSTVIVKDMSRFGRDYLKVGFYTEILFKEKGVRFIAINNGIDSEKQAESDFTPFLNIMNEWYARDTSRKIQSIFRARMEDGKRVSPSVPYGYYRNPKNKQELLVDKESSKVVKRIYRLVIEGYGVTQIAEILTKDKVLIPSAYAEIHYPENNHSFKKRGIDDPYFWTPTTVGYILEKREYMGHTVLGKTICLDYKTKKRRKAKEDELIIFKNTHEAIIDEETWNNAQRLRKTVRRSPKYGTTSNPLTGLLICADCGGKLSYREPAEHKEKKYDCDYCFVCQHYRHRKGTCSIHYIKLKTVNEILLKSIKEITNFAKEDKQEFLKVMNKLSDEKREETYQGDKEKLEKLSSRNAELTTLITKLYEDHALGKIPVKHFDRLFNVYDTEQQDLEKQIQYFEQEIESYHRRKIDTDKFLKMIEKYTDIEELTVPMINEYIEKVVVHEATGGRKGKDRKQQVDVYFNFIGNCQVPQKADIEKMA

SEQ ID NO: 22597 - DNA, 50 bp, Criibacterium bergeronii
  source 1..50: mol_type = genomic DNA
ttatgtccttgacaaatcttccctaaaggattaacatcttaaggacagag

SEQ ID NO: 22598 - DNA, 40 bp, Criibacterium bergeronii
  source 1..40: mol_type = genomic DNA
atattgtgttacagatccaaaaggaacgatagtcattgag

SEQ ID NO: 22599 - DNA, 40 bp, Criibacterium bergeronii
  source 1..40: mol_type = genomic DNA
atattgtgttacagatccatgaggaacgatagtcattgag

SEQ ID NO: 22600 - DNA, 50 bp, Criibacterium bergeronii
  source 1..50: mol_type = genomic DNA
ctttctcctagtgaattattcccttgaggataaacttctagaagacagat

SEQ ID NO: 22601 - protein, 528 aa, Vibrio harveyi
METTTRRRAVTYQRFSSVRQVGNSSLERQNEETKNWLLRNPDVEVIDSFVDQAMSGWSGKHLKDGSLGQLMKAVDDGIITSGTLILVEHFSRLSRQNITDAEKLMHRIWDAGITLVTVRDGTEYTPAAANDMVLRIRLLVEMEQAFKESEWRSAKVKASYTNRENKAKEGIVPKMRKPFWLNSDGTLNELHEAVKDMFSLYKDGNGQQRIVVALREKYSDTAIQKLNPSTVMRWIQADITRGYWRGNRIYEAAIDDETFFEVQTIHKNRLYENVKPDRNWPLSGLMKCGVCGRGMSIQKSGTSNPVVRCSSKQRDKSCNRKTTFPYFIVHQYMMSIVKKYALRKYTNVTSNKELRHELLVVERDLLKARQELSELKAFYKQQKAEGKKTLATLEILEEEYENVENLQNKEKELKSSLEAFANGGASIESRKLVLDGRNFNLEMHKLNFKIVVGEEEVSAEGFDEKLPTLKYLGYSRKTRSYEWTQGSHRLIQRWPSSSITDEILMLDDYRQNLYAKNFIEKQLSRHES

SEQ ID NO: 22602 - DNA, 50 bp, Vibrio harveyi
  source 1..50: mol_type = genomic DNA
aatatgcacacctcagccttacgtgagcaattagcataggtgtgcatatt

SEQ ID NO: 22603 - DNA, 40 bp, Vibrio harveyi
  source 1..40: mol_type = genomic DNA
attagaccatctactgtgtgagctgaaagcgggtcagtct

SEQ ID NO: 22604 - DNA, 40 bp, Vibrio harveyi
  source 1..40: mol_type = genomic DNA
attagaccatctactgtgtaggctgaaagcgggtcagtct

SEQ ID NO: 22605 - DNA, 50 bp, Vibrio harveyi
  source 1..50: mol_type = genomic DNA
attcaacactcctaagccttaaataggcaattagaagtatactgcatttt

SEQ ID NO: 22606 - protein, 539 aa, Pseudomonas syringae group genomosp 3
MAKIGARVYSYLRFSDPRQGSGSSADRQLQYAQRWAADKGLSLDESLSMRDEGLSAYHQRHVTQGALGVFLRAIEDGRIASGSVLVVEGLDRLSRAEPIQAQAQLAQIINAGITVVTASDGKEYNRAGLKAQPMDLVYSLLVMIRAHEESDTKSKRVKASIIRLCQAWQAGTYRGLIRNGKDPQWLTWTGSTWDMIPERVRTVRRSLELYQEGMGAARAARILHAEGLDYAAAGITKQQIYRLIKLQALRGAKSLSVDGENFLLEDYYPRLLSESEWADLQHLAGQRLRRRGHGEIPGIITGIGLTYCGYCGTALVAQNMMTRRKDDGTIADGSRRLHCVSYGVNAGCTAGGSCSVVPIERALLTFCSDQLNLQRLMKVGDEGQGVRQQLAVARSAAEKLAVQLGKITDALLADESGAAPTSFIRRARELEAEQTEALKTVRQLEYELAALSGASKPAQADRWVELADLVRAGDYPAREKMRQLVMDTFERIVVFMRGMGSEDRSSKFIDVQLLSRTGQHRLLQINRKTGAWVASEDWD

SEQ ID NO: 22607 - DNA, 50 bp, Pseudomonas syringae group genomosp 3
  source 1..50: mol_type = genomic DNA
aatataccttcgacatcgttaggacaccctaacgatatcattcctacacg

SEQ ID NO: 22608 - DNA, 40 bp, Pseudomonas syringae group genomosp 3
  source 1..40: mol_type = genomic DNA
gtcaacgagcgccttggggcaacccagagaaacgaatccg

SEQ ID NO: 22609 - DNA, 40 bp, Pseudomonas syringae group genomosp 3
  source 1..40: mol_type = genomic DNA
gtcaacgagcgccttggggacacccagagaaacgaatccg

SEQ ID NO: 22610 - DNA, 50 bp, Pseudomonas syringae group genomosp 3
  source 1..50: mol_type = genomic DNA
aatatacctagggcatcgttagcaaccactcaggattccagctttacaat

SEQ ID NO: 22611 - protein, 451 aa, Rhodococcus erythropolis
MRAAIYTRISVDQTGEGLGVERQLSDCDKLAESLNWTVVQRYSDNDVSAFSGKLRPGYETLLTAMQAGEVDALIAWHSDRLHRSPIELERFIEIADEAGVEIRTVHGGTLDLSTSAGRMVARILGSVARQESEHSSERRKRANDQKAASGAWQASRRPFGYTLAGEPLEPEAGAIKAAVADVLAGKSIRQVAREWNKQGLRTTHGGTLWSATSVRRVLKNPRYAALRVHRGVVVGEGIWEPLIEPDAHYGLLAYVSDPARAQKVSFERKWQGSGVYACGVCGSKLIVHVSEKKRAYKCPQNHVRRQGEALDAFVDAVTLARLSESDVRLSVESPGVDVSTLQIGRDTLQGRLDQLAAMFAEGAIDASQLRRGSEDLREQLAQVDAELGAARQGSPLVDLVLAGEALGERWAELSADMRGKVVEALMSVTVIRSPKGLRRFDPEYINIEWNV

SEQ ID NO: 22612 - DNA, 50 bp, Rhodococcus erythropolis
  source 1..50: mol_type = genomic DNA
cggtgtgtgactcttgcattcgttggtatggaatgtcaattcatgcacgc

SEQ ID NO: 22613 - DNA, 40 bp, Rhodococcus erythropolis
  source 1..40: mol_type = genomic DNA
aggtggtgcaacctttctcggcctggaggaggcgccgcac

SEQ ID NO: 22614 - DNA, 40 bp, Rhodococcus erythropolis
  source 1..40: mol_type = genomic DNA
aggtggtgcaacctttctccacctggaggaggcgccgcac

SEQ ID NO: 22615 - DNA, 50 bp, Rhodococcus erythropolis
  source 1..50: mol_type = genomic DNA
aagtgtgtggtgtgtgtatttgtgcatatggtatgtgtatgcatgtgtgc

SEQ ID NO: 22616 - protein, 500 aa, Vibrio vulnificus
MAIAYSYIRFSTRKQADGDSLRRQSRLALEYCKANDLELSEQSFKDLGVSALHSANANEDKGLGQFLSALQQGVIPKGSFLLVESLDRLSRAKVMIALRQFLHIIEYDITVVTLIDGRKYNSESDTSDLIISLTVMERAHNESITKSKRILAIKATQRKLVREGKVVNKRLPFWITNSDGYQLNDKAQIVRDIIKQRTSGVGFHRIAMNLNGVYEAPKAKHWSDTTIRDIVKSRALYGSMVDKDGEVESVFPALIDFTEWQAIQSEHVSSAGGYTKHNHLARLVKCECGAAMSKKIQKSKTKTKTHEYNTWKCVAATSGGCEHKGVIRDLDVDIFKSLNHLKINKTKSDTQLNKISKQIEKKSVRQQELEQALLEDDAPIAALTKAIKKTTEELKQLRSERDLLSVRTDSKLLIELQDNAVEFNIELRKLVEKIVVTPISSNRFQIKIHQHNGHIVNCLKGRKSQRSEWTRLFGKTEEMLRIATEDDGMPYVDWAETDEL

SEQ ID NO: 22617 - DNA, 50 bp, Vibrio vulnificus
  source 1..50: mol_type = genomic DNA
gtttactacgtaaaacgatttacagtaatatagtaatataggtagtgaac

SEQ ID NO: 22618 - DNA, 40 bp, Vibrio vulnificus
  source 1..40: mol_type = genomic DNA
ggcaggtgccaagttgacggtgatccgcttggcaggaaat

SEQ ID NO: 22619 - DNA, 40 bp, Vibrio vulnificus
  source 1..40: mol_type = genomic DNA
ggcaggtgccaagttgacggagatccgcttggcaggaaat

SEQ ID NO: 22620 - DNA, 50 bp, Vibrio vulnificus
  source 1..50: mol_type = genomic DNA
gtttagaacagttttagatttacagaaaaaccgtgacggtagtagtgagc

SEQ ID NO: 22621 - protein, 499 aa, Vibrio vulnificus
MAIAYSYIRFSSKAQAEGDSLRRQLQKTKEWCRNNDVELSDKNFQDLGISAFKEKTRPSLDDLFTAIQTGSIIEGDYIILENLDRLSRQGIDHTQEMLRKILRSGVNVVDLTNGLELNKTSLNDLVSVIRIALAADLAYQESKKKSERVLAAKATQRKLVREGKVINKRLPFWVTNSDGYQLNDKAQIVRDIIKQRTSGVGFHRIAMNLNNVYEAPKAKHWSDTTIRDIVKSRALYGSMVDKDGEVENVFPALISFTEWQAIQAEHVSSAGGYTQHNHLARLVKCECGSAMSKKIQKSKTKTKTHEYNTWKCIAATSGGCGHKGVIRDLDLDVFKSLNHLKINKSKSSSLLNKINQQIEKKTLRQQELEQALLEDDAPIAALTKAIKKTNEELKQLRSERDLLSVRTDSKLLIELQNNAVEFNIELRKLIEKIVVIPVSSNQFRIKIHQHNGHIVNCVKTRTSQRSEWTRLFGKTEEILKIATEDDGIPYTDWGETDEL

SEQ ID NO: 22622 - DNA, 50 bp, Vibrio vulnificus; identical to SEQ ID NO: 22617
  source 1..50: mol_type = genomic DNA

SEQ ID NO: 22623 - DNA, 40 bp, Vibrio vulnificus
  source 1..40: mol_type = genomic DNA
ggcgggcgccaagttgacggtgatccgcttagcaggaaat

SEQ ID NO: 22624 - DNA, 40 bp, Vibrio vulnificus
  source 1..40: mol_type = genomic DNA
ggcgggcgccaagttgacggagatccgcttagcaggaaat

SEQ ID NO: 22625 - DNA, 50 bp, Vibrio vulnificus; identical to SEQ ID NO: 22620
  source 1..50: mol_type = genomic DNA

SEQ ID NO: 22626 - protein, 539 aa, Salmonella enterica; identical to SEQ ID NO: 11021

SEQ ID NO: 22627 - DNA, 50 bp, Salmonella enterica; identical to SEQ ID NO: 11022
  source 1..50: mol_type = genomic DNA

SEQ ID NO: 22628 - DNA, 40 bp, Salmonella enterica
  source 1..40: mol_type = genomic DNA
gtgattcgtaccgcgcgcgaaatctgggggcttagcgccc

SEQ ID NO: 22629 - DNA, 40 bp, Salmonella enterica
  source 1..40: mol_type = genomic DNA
gtgattcgtaccgcgcgcggcatctgggggcttagcgccc

SEQ ID NO: 22630 - DNA, 50 bp, Salmonella enterica
  source 1..50: mol_type = genomic DNA
tgccctctttcccctacctcagcagctgctggtgtaggactaggaaggta

SEQ ID NO: 22631 - protein, 539 aa, Salmonella enterica; identical to SEQ ID NO: 11021

SEQ ID NO: 22632 - DNA, 50 bp, Salmonella enterica; identical to SEQ ID NO: 11022
  source 1..50: mol_type = genomic DNA

SEQ ID NO: 22633 - DNA, 40 bp, Salmonella enterica
  source 1..40: mol_type = genomic DNA
aggcgacaagcggtggaataatacgcagcggttcaagcaa

SEQ ID NO: 22634 - DNA, 40 bp, Salmonella enterica
  source 1..40: mol_type = genomic DNA
aggcgacaagcggtggaatgctacgcagcggttcaagcaa

SEQ ID NO: 22635 - DNA, 50 bp, Salmonella enterica; identical to SEQ ID NO: 22630
  source 1..50: mol_type = genomic DNA

SEQ ID NO: 22636 - protein, 547 aa, Vibrio parahaemolyticus
MRTAYSYVRLSSKKQIQGYGQERQWQAIQAAALAHGWELSEKTFSDLGVSGWKGANIEIGALSQFLQCVEDGYIEKGSVLIVENVDRLSRAGVQRAVSLLMQLLASGISIYTFTDSKLYEPDSHNPLMDLMAWALSAQRAFEESERKSQMILNAKAKAREKARLTGEIITRRCPSWLRVNQDKTAFELIPERVETVRKIFDLYVNGYGTPRIGRLLTEEGRKPLTGRAWYPRSISRILQYRAVLGEYQPTLNGKPEGDAIKNYYPAIIDEDRFNEVQAVLKEGGAGKGRRGKEMRNYFAGLLRCSCGEGMHIVSSCVKGKRYYQLRCLQYRISCFGSSWNFYKLSSFVLFALRRLPILEVMGSQDNNNIKELNAKERELTFLLEDTRRQLDNTINAIAALGLNDQLQSKFRELKTSVTNIEKQLSNVKTELETSQGKLVIQKQDSEMLTGRFLELIDSTKDIDGRIKLNQVLRRYLSKIEMHADKKEEYRYIKIYRKDGDELVSIQCDHSLKGALFESKDGLETFELLPATDAKRNEISNTLLCTPK

SEQ ID NO: 22637 - DNA, 50 bp, Vibrio parahaemolyticus
  source 1..50: mol_type = genomic DNA
ttatgcctttaaggaaacctaactaaggtattgtatcggttatgacataa

SEQ ID NO: 22638 - DNA, 40 bp, Vibrio parahaemolyticus; identical to SEQ ID NO: 4428
  source 1..40: mol_type = genomic DNA

SEQ ID NO: 22639 - DNA, 40 bp, Vibrio parahaemolyticus; identical to SEQ ID NO: 4429
  source 1..40: mol_type = genomic DNA

SEQ ID NO: 22640 - DNA, 50 bp, Vibrio parahaemolyticus; identical to SEQ ID NO: 5165
  source 1..50: mol_type = genomic DNA

SEQ ID NO: 22641 - protein, 547 aa, Vibrio parahaemolyticus; identical to SEQ ID NO: 4886

SEQ ID NO: 22642 - DNA, 50 bp, Vibrio parahaemolyticus; identical to SEQ ID NO: 22637
  source 1..50: mol_type = genomic DNA

SEQ ID NO: 22643 - DNA, 40 bp, Vibrio parahaemolyticus; identical to SEQ ID NO: 4863
  source 1..40: mol_type = genomic DNA

SEQ ID NO: 22644 - DNA, 40 bp, Vibrio parahaemolyticus; identical to SEQ ID NO: 5164
  source 1..40: mol_type = genomic DNA

SEQ ID NO: 22645 - DNA, 50 bp, Vibrio parahaemolyticus; identical to SEQ ID NO: 5165
  source 1..50: mol_type = genomic DNA

SEQ ID NO: 22646 - protein, 547 aa, Vibrio parahaemolyticus
MRTAYSYVRLSSKKQIQGYGQERQWQAIQAAALAHGWELSEKTFSDLGVSGWKGANIETGALSQFLQCVEDGYIEKGSVLIVENVDRLSRAGVQRAVSLLMQLLASGISIYTFTDSKLYEPDSHNPLMDLMAWALSAQRAFEESERKSQMILNAKAKAREKARLTGEIITRRCPSWLRVNQDKTAFELIPERVETVRKIFDLYVNGYGTPRIGRLLTEEGRKPLTGRAWYPRSISRILQYRAVLGEYQPTLNGKPEGDAIKNYYPAIIDEDRFNEVQAVLKEGGAGKGRRGKEMRNYFAGLLRCSCGEGMHIVSSCVKGKRYYQLRCLQYRISCFGSSWNFYKLSSFVLFALRRLPILEVMGSQDNNNIKELNAKERELTFLLEDTRRQLDNTINAIAALGLNDLLQSKFRELKTSVTNIEKQLSNVKTELETSQGKLVIQKQDSEMLTGRFLELIDSTKDIDGRIKLNQVLRRYLSKIEMHADKKEEYRYIKIYRKDGDELVSIQCDHSLKGALFESKDGLETFELLPATDAKRNEISNTLLCTPK

SEQ ID NO: 22647 - DNA, 50 bp, Vibrio parahaemolyticus; identical to SEQ ID NO: 22637
  source 1..50: mol_type = genomic DNA

SEQ ID NO: 22648 - DNA, 40 bp, Vibrio parahaemolyticus; identical to SEQ ID NO: 4428
  source 1..40: mol_type = genomic DNA

SEQ ID NO: 22649 - DNA, 40 bp, Vibrio parahaemolyticus; identical to SEQ ID NO: 4429
  source 1..40: mol_type = genomic DNA

SEQ ID NO: 22650 - DNA, 50 bp, Vibrio parahaemolyticus; identical to SEQ ID NO: 5165
  source 1..50: mol_type = genomic DNA

SEQ ID NO: 22651 - protein, 547 aa, Vibrio parahaemolyticus; identical to SEQ ID NO: 4886

SEQ ID NO: 22652 - DNA, 50 bp, Vibrio parahaemolyticus; identical to SEQ ID NO: 22637
  source 1..50: mol_type = genomic DNA

SEQ ID NO: 22653 - DNA, 40 bp, Vibrio parahaemolyticus
  source 1..40: mol_type = genomic DNA
atttggctggcatgtggtcaaggttctttacagaacatag

SEQ ID NO: 22654 - DNA, 40 bp, Vibrio parahaemolyticus
  source 1..40: mol_type = genomic DNA
atttggctggcatgtggtcttggttctttacagaacatag

SEQ ID NO: 22655 - DNA, 50 bp, Vibrio parahaemolyticus; identical to SEQ ID NO: 5165
  source 1..50: mol_type = genomic DNA

SEQ ID NO: 22656 - protein, 547 aa, Vibrio parahaemolyticus; identical to SEQ ID NO: 4886

SEQ ID NO: 22657 - DNA, 50 bp, Vibrio parahaemolyticus; identical to SEQ ID NO: 22637
  source 1..50: mol_type = genomic DNA

SEQ ID NO: 22658 - DNA, 40 bp, Vibrio parahaemolyticus; identical to SEQ ID NO: 4428
  source 1..40: mol_type = genomic DNA

SEQ ID NO: 22659 - DNA, 40 bp, Vibrio parahaemolyticus; identical to SEQ ID NO: 4429
  source 1..40: mol_type = genomic DNA

SEQ ID NO: 22660 - DNA, 50 bp, Vibrio parahaemolyticus; identical to SEQ ID NO: 5165
  source 1..50: mol_type = genomic DNA

SEQ ID NO: 22661 - protein, 546 aa, Pseudomonas helleri
MARLISYLRMSTSEQLKGFSLERQRKLIADFALRYGLSLDESHSIEDIGRSSFSDDAEQRQLARFFTDLDAGKFSPGDVFALENIDRLTRRGPIDAILKVNAIISKGLKLAIISNNEQKIIEDVNDVFTIINLSIDAARSHGESKNKSDKGLSNWEEKRKLAASHGVAMTAQAPAWLDTETFYLMDETKGKQIKRRRYVLNPEKAETVRLIFELFQNGNGSLKIKNILNERNIPTFKGAEYWEPSIISKILRNLATFGFYQPQKQGIGKRDLIPAGDPIHDYFPAIVSVETFEQCQRITAANTTRKGRKGKLFTNLFTGLLKCSICGGPVHLLNSGIDKRAKVPKSTNYLVCKKAKFTKECLLTRWRYDDFEAVMLKTIQEINLADVLNENNPLEQLIKQIRAIETKIEKNQKLLENFQKSFVETGDLPAFMIEAAKNAETANKALEIERTELHAQISQLNVYNTNIDNAIEELKDNGTYETRAKINLVLHEIINSMHIHFFNTTVRIEFKNGITRQMMKDAGVYDYNMDEMNKIMYAAAKEYTPK

SEQ ID NO: 22662 - DNA, 50 bp, Pseudomonas helleri; identical to SEQ ID NO: 17527
  source 1..50: mol_type = genomic DNA

SEQ ID NO: 22663 - DNA, 40 bp, Pseudomonas helleri
  source 1..40: mol_type = genomic DNA
ccccggcaacgccgtgctgatcaaatcggcctacccgtgg

SEQ ID NO: 22664 - DNA, 40 bp, Pseudomonas helleri
  source 1..40: mol_type = genomic DNA
ccccggcaacgccgtgctgtacaaatcggcctacccgtgg

SEQ ID NO: 22665 - DNA, 50 bp, Pseudomonas helleri
  source 1..50: mol_type = genomic DNA
tacaggttatttgtgatggtcttgtacaactctgacctaaaataccatct

SEQ ID NO: 22666 - protein, 552 aa, Pseudomonas gessardii
MARLISYLRMSTSEQLKGFSLERQRKLIADFALRYGLSLDESHSIEDIGRSSFSDDAEQRQLARFFTDLDAGKFSPGDVFALENIDRLTRRGPIDAILKVNAIISKGLKLAIISTNEQKIIEDVNDVFTIINLSIDAARSHGESKNKSDKGLSNWEEKRKLAASHGVAMTAQAPAWLDTEIFYLMDETKGKQIKRRRYVLNPEKAETVRLIFELFQNGNGSLKIKNILNERNIPTFKGAEYWEPSIISKMLRNPATFGFYQPQKQGTGKRDLIPAGEPIEGYFPAIVSRETFEQCQRITAANSTRKGRKGKLFTNLFTGLLKCVDCGGPVHLLNPGIDKRAKVPKSVNYIVCKKGKFTRECILKRLRYDDFEAVMLNAIQEINLADVLNENNPLEQLIKQIRAIETKIEKNQKLLENFQKSFVETGDLPAFMIEAAKNAETANKALEIERIELQVQISQLNVYNANIENAIEELKNNGTYETRAKINLLLHEIIKSINIDFELVDFAIIFKNGVKRFVNDGIIQNVFIAKSFSEQSFRELEEILNYKPPEKI

SEQ ID NO: 22667 - DNA, 50 bp, Pseudomonas gessardii; identical to SEQ ID NO: 17527
  source 1..50: mol_type = genomic DNA

SEQ ID NO: 22668 - DNA, 40 bp, Pseudomonas gessardii
  source 1..40: mol_type = genomic DNA
gccgggcaatgccgtgctgatcaagtcggcctacccctgg

SEQ ID NO: 22669 - DNA, 40 bp, Pseudomonas gessardii
  source 1..40: mol_type = genomic DNA
gccgggcaatgccgtgctgtacaagtcggcctacccctgg

SEQ ID NO: 22670 - DNA, 50 bp, Pseudomonas gessardii; identical to SEQ ID NO: 22665
  source 1..50: mol_type = genomic DNA

SEQ ID NO: 22671 - protein, 595 aa, Vibrio cholerae
MNQPYIYSYSRISSKKQQRGRGLEIQRERESIERLKEEFGLQESPMVLSDAGKSAFHGLHVKEGKLGWFLKAVENGDVAPGSILVVQGFDRFSREDIISATNQLTNITARGVMIYSAMERIHLGHPEDGNQTRADKIKEAMGAFTRAYSESQAKSYRVNELTELAIAEFKQGVRDEKTGRVKAIKVVGNDVWWIDNSDGTIRKRDGYFQLAKEIIERRTRGESVHKLCQWLNDKDRPGYLPCPTSRSDKRGDKGRWAREIVHRISEPRRSKVEGSSVTARPILGEKLIRDEVLVGYYPALVTEEQYYALMDTVKNRARPKRHDCRGESLLSGSSVYCSHCGSRVTRTMESGGILNYRCGHIICKNHWSKRGELLESALLKTCMDKVWRPDRKQNRLDPCRVIEGELSIVQSEIKELERDLTEEGYSKVLARAIRDCEAKEQELMIKLEEAKTVNAVTLRSEPNELAERWKQVTSDTLDMNNDLGRRNVRELIYQSCEYIKIGRPSVEVAADDDLPEKRRFILDIDIKFKDGVHRFIRLGAKSIIHVSGTDFVSVEGRTAERLSDIEADNNMYQYEQDMDSGWLENEFSSFNPDEE

SEQ ID NO: 22672 - DNA, 50 bp, Vibrio cholerae
  source 1..50: mol_type = genomic DNA
aacccgcatagtgtgattttacgctgaccatatatcacactatgcaggtt

SEQ ID NO: 22673 - DNA, 40 bp, Vibrio cholerae
  source 1..40: mol_type = genomic DNA
gtcttccaaagcgcccggttggccataagctccgttatta

SEQ ID NO: 22674 - DNA, 40 bp, Vibrio cholerae
  source 1..40: mol_type = genomic DNA
gtcttccaaagcgcccggtaggccataagctccgttatta

SEQ ID NO: 22675 - DNA, 50 bp, Vibrio cholerae
  source 1..50: mol_type = genomic DNA
aaccagcattggaacatttgacttagatcatctagctttcaatgcagttt

SEQ ID NO: 22676 - protein, 598 aa, Pseudomonas aeruginosa
MVFSHLQTHRRTLEMPTAYAYIRYSSKAQGEAGKDSVDRQMASIQAITKHHDVELLPENIFSDTGVSAHDGSNKKKGKLKDLIDMINDVHIKPGDYIFVESIDRLSRQRLLQAKELVNSILEKGVILITTIDGQRYEKPNETNRIDDLQQDILLSVIAKRAHEESKTKSVRRKSAWNRAKKLADDEKAIFNGHNPPYGISYNKEENRFEIVEEEAQEIRDIFESLKFVGVSLTIRKINAYSKRKWTNKNIHLLFQTKYVLGSYMAQRRDENKNKVFERFIEGYYPQIVSYELFNEALEAMKLRAHRKHYGNQTVGSLNIFRHSIKCDCCNASMLFEKQTNPKGVCYGYFHCFTRKELKTNCNQPRFRFDLAYGLFLELVYQATTKEDFDVHPWQTLELEEEKQDREHYIKNGVRYSFATQHDVEIEEKIESFRELLISLLSNKKRQASDNKKLVELRNALLEQKSYKDNLLKSFAGFTNGVIPQEFLAVVSSTEFKINDIEGELSKLQAEMNTRKTSINIYSENDIIDLYNTEEGRLKINQFFITNDIVFKFNFEKETRTLYCKIHYQGIMIDKIAKQFSLHNPLSEFGIKNLNEYFN

SEQ ID NO: 22677 - DNA, 50 bp, Pseudomonas aeruginosa
  source 1..50: mol_type = genomic DNA
gtgtgagaatgcactctaccattggagagcaggggatggtattctcacat

SEQ ID NO: 22678 - DNA, 40 bp, Pseudomonas aeruginosa
  source 1..40: mol_type = genomic DNA
ggtcctgcgcgagccgctggaaagcggcgagatcgtcatt

SEQ ID NO: 22679 - DNA, 40 bp, Pseudomonas aeruginosa
  source 1..40: mol_type = genomic DNA
ggtcctgcgcgagccgctgtaaagcggcgagatcgtcatt

SEQ ID NO: 22680 - DNA, 50 bp, Pseudomonas aeruginosa
  source 1..50: mol_type = genomic DNA
gtgttagagaccaatgtaccaaagtagagtaggaaaagaacttctcatat

SEQ ID NO: 22681 - protein, 495 aa, Bacillus tianshenii
MIILLFNNENIKHVAVYLRLSRDEENQGIEQVLANHRQALISLCKENNWSYELFEEVASSRNIEDREEMVKLLLKLQEKHFDAVVVMDIDRLSRNEFDSSVIKKILFETETYIVTPYRLYDLTRDDDSLLLGITSLIASGEYKQILKRMQRGKKFAQQQGLWTDGIAPLGYTKDPKTRKLFPNERAKDVQFIFSEIVKGTTIPKLLKTLSSMGIKTRQGYEFKYNSIQRIINNDAYKGTIASNKTIGRYQLRPKEEWIIVHNAHPPIVDEDTWEKANKIVNEYSFKAPRSKNRIYPTSNLVFCANCGKVQGNNYHSHIDKFYIKHCKCGNRGFYYNPVLAMIKEEVLAYKEPLLKALETLEDTQQEDTTQFKKDKLIRQLNKAKKALEKILIMFEEDEINIVTYRERKAIRQEEIKLIEEEIVRVENEDKSVKINDLKEQIAAIDSLVGKWHFLDGEGYSDEKINRLLHGLISGIFWSYKKGAESPKLIIRFKEE

SEQ ID NO: 22682 - DNA, 50 bp, Bacillus tianshenii
  source 1..50: mol_type = genomic DNA
aaattatccccaaaaactgaacatactggttgagaacgtgggggtaacat

SEQ ID NO: 22683 - DNA, 40 bp, Bacillus tianshenii
  source 1..40: mol_type = genomic DNA
gatcatttttactggtccaaccggatcgggcaagaccacc

SEQ ID NO: 22684 - DNA, 40 bp, Bacillus tianshenii
  source 1..40: mol_type = genomic DNA
gatcatttttactggtccaaacggatcgggcaagaccacc

SEQ ID NO: 22685 - DNA, 50 bp, Bacillus tianshenii
  source 1..50: mol_type = genomic DNA
aaattaactagggaatcagaacataatggtagaaaataggatggaaccat

SEQ ID NO: 22686 - protein, 482 aa, Lactococcus garvieae
MKKVAVYARVSTTVQAEEGYSISEQTDKLSKYCEIMGWTVYNTYTDAGFTGSNIERPAMQQLIKDAKESKFDTVLVYKLDRLSRSQKDTLFLIEDVFNKIGIGFVSLQEKFDTTTPFGKAMIGILSVFAQLEREQIKERMALGYAGRIKSGKTAAHSIQPFGYDYNKEKGILSANPLQASIVKRIFEMYLDGVSIVKIVRILNDEGHIGKEKLWAPTTVRRTLANPVYIGSQLFKGDLYKTDNDVIIDEKVYWAVQDELAKRNKKVKEANNNPKPFQSKYMLSGILKCGKCGKPLIIVVGNKKKDGTTNNRYQCYYRKTGGGSRPVDFNENNACDSGYFRQDALEKYVIDSISELQINDQLLETAVSTTEDSNKVDTMSLKKELDRLEKELAKYKNMYMIDAISLEELQEQTKQNTLRKKSIINQLNQDKTEVNNLRISRAKKLLSSKNISELPYGEQKIMVNTIINKIICTNAEYSIIWNF

SEQ ID NO: 22687 - DNA, 50 bp, Lactococcus garvieae
  source 1..50: mol_type = genomic DNA
tcaaagtatgcactctcagcaacagaagtcgttgtgactaaatacattaa

SEQ ID NO: 22688 - DNA, 40 bp, Lactococcus garvieae
  source 1..40: mol_type = genomic DNA
atatgctatgacagcaacagaagttatggaagttattcct

SEQ ID NO: 22689 - DNA, 40 bp, Lactococcus garvieae
  source 1..40: mol_type = genomic DNA
atatgctatgacagcaacagcagttatggaagttattcct

SEQ ID NO: 22690 - DNA, 50 bp, Lactococcus garvieae
  source 1..50: mol_type = genomic DNA
tcaaagtatctcctcacaccaacagcagtcatagtaaagatattgagaaa

SEQ ID NO: 22691 - protein, 507 aa, Salmonella enterica; identical to SEQ ID NO: 5201

SEQ ID NO: 22692 - DNA, 50 bp, Salmonella enterica
  source 1..50: mol_type = genomic DNA
aggtgtatttagaccttgctaatcctcatcagacacgtttaaatacacca

SEQ ID NO: 22693 - DNA, 40 bp, Salmonella enterica
  source 1..40: mol_type = genomic DNA
cggcgtaaaccgcgtgatcctggatagtcgtccggtacat

SEQ ID NO: 22694 - DNA, 40 bp, Salmonella enterica
  source 1..40: mol_type = genomic DNA
cggcgtaaaccgcgtgatcagggatagtcgtccggtacat

SEQ ID NO: 22695 - DNA, 50 bp, Salmonella enterica; identical to SEQ ID NO: 5190
  source 1..50: mol_type = genomic DNA

SEQ ID NO: 22696 - protein, 507 aa, Escherichia coli
MKRVISYIRFSSERQAKGDSLRRQSKMVNDWLKAHPEYYLDQDLSFRDLGVSGFTGKHLKGGLGDFLTAIEKGLVKAGDTLLIESLDRLSRQDVDQASELLRNILRSGVDVVTLSDGEHYTRESLKDPLALIKSILIMQRSHEESLRKSERIQAAWNRKKELISEGIKISKRCPAWLKLNDDRKSFSVIPEKVETVKRCFQLRLEGKSIWEIVRTLNDEGHQTLNQYKAGSFGQTSVQDLLKNRSVIGYFTPKGCEEIAGYYPAIIDETTFYKVQQLSYSRYGRKPASDKPMAVNLFKGVIRCSECGHALIITGFSDTRSGIYRCPLRNENRCSAKGLSRKQTDGTLLTLLSRLDRFDSDMTNTIDTLKLHREHISSNIEKLVQLSLEIEDLSAITIKLKQLKGELSQVDADIEKETQRLKSIDVGCLSDCDLTTKAGRIEAQLIIKSAVKEVVLNTAKRRCKVSFHNGKVIDLSITENPSEDVTEAIQSLSEVTERGLIDVDEVII

SEQ ID NO: 22697 - DNA, 50 bp, Escherichia coli
  source 1..50: mol_type = genomic DNA
aggtgtatttagaccttgctaatcttcatcagacacgtttaaatacacca

SEQ ID NO: 22698 - DNA, 40 bp, Escherichia coli; identical to SEQ ID NO: 5188
  source 1..40: mol_type = genomic DNA

SEQ ID NO: 22699 - DNA, 40 bp, Escherichia coli; identical to SEQ ID NO: 5189
  source 1..40: mol_type = genomic DNA

SEQ ID NO: 22700 - DNA, 50 bp, Escherichia coli; identical to SEQ ID NO: 5190
  source 1..50: mol_type = genomic DNA

SEQ ID NO: 22701 - protein, 507 aa, Escherichia coli
MKRVISYIRFSSERQAKGDSLRRQSKMVNDWLKAHPEYYLDQDLSFRDLGVSGFTGKHLKGGLGDFLTAIEKGLVKAGDTLLIESLDRLSRQNVDRASELLRNILRSGVDVVTLSDGEHYTRESLRDPLALIKSILIMQRSHEESLRKSERIQAAWNRKKELISEGIKISKRCPAWLKLNDDRKSFSVIPDKVETVKRCFQLRLEGKSIWEIVRTLNAEGHRSMNQYKPGKFGQTSVQDLLKNRSVIGYFTPKGCEEIAGYYPSVIDETTFYKVQQLSHSRYGRKPASDKPLSVNLFKGVIRCSECGHALIITGFSDTRSGIYRCPLRNENRCSAKGLSRKQTDGTLLTLLSRLDRFDSDTTNTIDTLKLHREHISNNIEKLVQLSLEIEDLSAITSKLKQLKGELSQVDADIEKETQRLKSIDVGCLSDCDLTTKAGRIEAQLIIKSAVKEVVLNTAKRRCKVTFHNGRAITLPITENPSKDVTEAIQSLSEVTERGLIDVDEVII

SEQ ID NO: 22702 - DNA, 50 bp, Escherichia coli; identical to SEQ ID NO: 22697
  source 1..50: mol_type = genomic DNA

SEQ ID NO: 22703 - DNA, 40 bp, Escherichia coli; identical to SEQ ID NO: 5188
  source 1..40: mol_type = genomic DNA

SEQ ID NO: 22704 - DNA, 40 bp, Escherichia coli; identical to SEQ ID NO: 5189
  source 1..40: mol_type = genomic DNA

SEQ ID NO: 22705 - DNA, 50 bp, Escherichia coli; identical to SEQ ID NO: 5190
  source 1..50: mol_type = genomic DNA

SEQ ID NO: 22706 - protein, 507 aa, Escherichia coli
MKRVISYIRFSSERQAKGDSLRRQSKMVNDWLKAHPEYYLDQDLSFRDLGVSGFTGKHLKGGLGDFLTAIEKGLVKAGDTLLIESLDRLSRQAVDKASELLRNILRSGVDVVTLSDGEHYTRESLKDPLSLIKSILIMQRSHEESLRKSERIQAAWNRKKELISEGIKISKRCPAWLKLNDDRKSFSVIPEKVETVKRCFQLRLEGKSIWEIVRTLNAEGRQTLHQHKAGSFGQTSVQDLLKNRSVIGYFTPKGCEEISGYYPAIIDETTFYKVQQLSYSRYGRKPASDKPMAVNLFKGVIRCSECGHALIITGFSDTRNGIYRCPLRNENRCSAKGLSRKQTDGTLLTLLSRLDRFDSDTTNTVDTLKLHREHISSNIEKLVQLSLEIEDLSAITIKLKQLKGELSQVDADIEKETQRLKSIDVGCLSDCDLTTKAGRIEAQLIIKSAVKEVVLNTAKRRCKVTFHNGKVIDLPITENPSEDVTEAIQSLSEVTERGLIDVDVVEI

SEQ ID NO: 22707 - DNA, 50 bp, Escherichia coli; identical to SEQ ID NO: 22697
  source 1..50: mol_type = genomic DNA

SEQ ID NO: 22708 - DNA, 40 bp, Escherichia coli; identical to SEQ ID NO: 5188
  source 1..40: mol_type = genomic DNA

SEQ ID NO: 22709 - DNA, 40 bp, Escherichia coli; identical to SEQ ID NO: 5189
  source 1..40: mol_type = genomic DNA

SEQ ID NO: 22710 - DNA, 50 bp, Escherichia coli; identical to SEQ ID NO: 5190
  source 1..50: mol_type = genomic DNA

SEQ ID NO: 22711 - protein, 507 aa, Escherichia coli
MKRVISYIRFSSERQAKGDSLRRQSKMVNDWLKAHPEYYLDQDLSFRDLGVSGFTGKHLKGGLGDFLTAIEKGLVKAGDTLLIESLDRLSRQDVDQASELLRNILRSGVDVVTLSDGEHYTRESLKDPLALIKSILIMQRSHEESLRKSERIQAAWDAKKEAAKAGIKISRRCPAWLKLNDDRKSFSVIPEKVETVRRCFQLRLEGKSIWEIVRILNDEGHQTLNQYKAGKFGQTSVQDLLKNRSVIGYFTPKGCEEIAGYFPPIIPETDFYKVQQLSYSRYGRKPASDKPLSVNLFKGVIRCSECGHALIITGFSDTRSGIYRCPSRNENRCNAKGLSRKQTDGTLLALLSRIDRFDSDMTNTIDTLKLHREHISSNIEKLVQLSLEIEDLSAITSKLKQLKGELSQVDADIEKETQRLKSIDVGCLSDCDLTTKAGRIEAQLIIKSAVKEVVLNTAKRRCKVTFHNGKVIDLPITEDPSEDVTEAIQSLSEVTERGLIDVDEVII

SEQ ID NO: 22712 - DNA, 50 bp, Escherichia coli; identical to SEQ ID NO: 22697
  source 1..50: mol_type = genomic DNA

SEQ ID NO: 22713 - DNA, 40 bp, Escherichia coli; identical to SEQ ID NO: 5188
  source 1..40: mol_type = genomic DNA

SEQ ID NO: 22714 - DNA, 40 bp, Escherichia coli; identical to SEQ ID NO: 5189
  source 1..40: mol_type = genomic DNA

SEQ ID NO: 22715 - DNA, 50 bp, Escherichia coli; identical to SEQ ID NO: 5190
  source 1..50: mol_type = genomic DNA

SEQ ID NO: 22716 - protein, 507 aa, Escherichia coli
MKRVISYIRFSSERQAKGDSLRRQSKMVNDWLKAHPEYYLDQDLSFRDLGVSGFTGKHLKGGLGDFLTAIEKGLVKAGDTLLIESLDRLSRQDIDIASELLRRILRAGVDIVTLSDGEHYTRESLKDPLALIKSILIMQRAHEESLRKAERIQAAWDAKKEAAKAGIKISKRCPAWLKLNDDRKTFSVIPEKVETVRRCFQLRLEGKSIWEIVRTLNDEGHQTLNQYKAGKFGQTSVQDLLKNRSVIGYFTPKGCEEIAGYFPPIIPETDFYKVQQLSYSRYGRKPASDKPLSVNLFKGVIRCSECGHALIITGFSDTRSGIYRCPSRNENRCNAKGLSRKQTDGTLLALLSRLDRFDSDMTNTIDTLKLHREHISSNIEKLVQLSLEIEDLSAITSKLRQLKNELSQVDADIEKETQRLKSIDVGCLSDCDLTTKAGRIEAQLIIKSAVKEVVLNTAKRRCKVTFHNGKAITLPITETPSDNVTEAIQSLSEVTERGLIDVDEVII

SEQ ID NO: 22717 - DNA, 50 bp, Escherichia coli; identical to SEQ ID NO: 22697
  source 1..50: mol_type = genomic DNA

SEQ ID NO: 22718 - DNA, 40 bp, Escherichia coli; identical to SEQ ID NO: 5188
  source 1..40: mol_type = genomic DNA

SEQ ID NO: 22719 - DNA, 40 bp, Escherichia coli; identical to SEQ ID NO: 5189
  source 1..40: mol_type = genomic DNA

SEQ ID NO: 22720 - DNA, 50 bp, Escherichia coli; identical to SEQ ID NO: 5190
  source 1..50: mol_type = genomic DNA

SEQ ID NO: 22721 - protein, 507 aa, Escherichia coli
MKRVISYIRFSSERQAKGDSLRRQSKMVNDWLKAHPEYYLDQDLSFRDLGVSGFTGKHLKGGLGDFLTAIEKGLVKAGDTLLIESLDRLSRQDIDIASELLRRILRAGVDIVTLSDGEHYTRESLKDPLALIKSILIMQRAHEESLRKAERIQAAWDAKKEAAKAGIKISKRCPAWLKLNDDRKTFSVIPEKVETVRRCFQLRLEGKSIWEIVRTLNDEGHQTLNQYKAGKFGQTSVQDLLKNRSVIGYFTPKGCEEIAGYFPPIIPETDFYKVQQLSYSRYGRKPASDKPLSVNLFKGVIRCSECGHALIITGFSDTRNGIYRCPLRNENRCSAKGLSRKQTDGTLLALLSRIDRFDSDMTNTIDTLKLHREHISSNIEKLVQLSLEIEDLSAITSKLKQLKGELSQVNADIEKETQRLKSIDVGCLSDCDLTTKAGRIEAQLIIKSAVKEVILNTAKRRCKVTFHNGKVIDLPITEDPSENVTEAIQSLSEVTERGLIDVDEVII

SEQ ID NO: 22722 - DNA, 50 bp, Escherichia coli; identical to SEQ ID NO: 22697
  source 1..50: mol_type = genomic DNA

SEQ ID NO: 22723 - DNA, 40 bp, Escherichia coli; identical to SEQ ID NO: 5188
  source 1..40: mol_type = genomic DNA

SEQ ID NO: 22724 - DNA, 40 bp, Escherichia coli; identical to SEQ ID NO: 5189
  source 1..40: mol_type = genomic DNA

SEQ ID NO: 22725 - DNA, 50 bp, Escherichia coli; identical to SEQ ID NO: 5190
  source 1..50: mol_type = genomic DNA

SEQ ID NO: 22726 - protein, 507 aa, Escherichia coli
MKRVISYIRFSSERQAKGDSLRRQSKMVNDWLKAHPEYYLDQDLSFRDLGVSGFTGKHLKGGLGDFLTAIEKGLVKAGDTLLIESLDRLSRQDVDQASELLRNILRSGVDVVTLSDGEHYTRESLKDPLALIKSILIMQRSHEESLRKSERIQAAWNRKKELISEGIKISKRCPAWLKLNDDRKSFSVIPEKVETVKRCFQLRLEGKSIWEIVRTLNDEGHQTLNQYKAGSFGQTSVQDLLKNRSVIGYFTPKGCEEISGYYPAIIDETTFYKVQQLSYARYGRKPASDKPMAVNLFKGVIRCSECGHALIITGFSDTRNGIYRCPLRNENRCSAKGLSRKQTDGTLLALLSRLDRFDSDMTNTIDTLKLHREHISSNIEKLVQLSLEIEDLSAITSKLKQLKGELSQVDADIEKETQRLKSIDVGCLSDCDLTTKAGRIEAQLIIKSAVKEVVLNTAKRRCKVTFHNGKVIDLSITENPSDNVTEAIQSLSEVTERGLIDVDEVII

SEQ ID NO: 22727 - DNA, 50 bp, Escherichia coli; identical to SEQ ID NO: 22697
  source 1..50: mol_type = genomic DNA

SEQ ID NO: 22728 - DNA, 40 bp, Escherichia coli; identical to SEQ ID NO: 5188
  source 1..40: mol_type = genomic DNA

SEQ ID NO: 22729 - DNA, 40 bp, Escherichia coli; identical to SEQ ID NO: 5189
  source 1..40: mol_type = genomic DNA

SEQ ID NO: 22730 - DNA, 50 bp, Escherichia coli; identical to SEQ ID NO: 5190
  source 1..50: mol_type = genomic DNA

SEQ ID NO: 22731 - protein, 507 aa, Escherichia coli
MKRVISYIRFSSERQAKGDSLRRQSKMVNDWLKAHPEYYLDQDLSFRDLGVSGFTGKHLKGGLGDFLTAIEKGLVKAGDTLLIESLDRLSRQDVDQASELLRNILRSGVDVVTLSDGEHYTRESLKDPLALIKSILIMQRSHEESLRKSERIQAAWDAKKEAAKAGIKISRRCPAWLKLNDDRKSFSIIPEKVETVKRCFQLRLEGKSIWEIVRTLNDEGHQTLNQYKAGKFGQTSVQDLLKNRSVIGYFTPKGREEIAGYFPPIIPETDFYKVQQLSYSRYGRKPASDKPMAVNLFKGVIRCSECGHALIITGFSDTRNGIYRCPLRNENRCSAKGLSRKQTDGTLLALLSRLDRFDSDTTNTIDTLKLHREHISSNIEKLVQLSLEIEDLSAITSKLKQLKGELSQVDADIEKETQRLKSIDVGCLSDCDLTTKAGRIEAQLIIKSAVKEVVLNTAKRRCKVTFHNGKAITLPITENPSDNVTEAIQSLSEVTERGLIDVDEVII

SEQ ID NO: 22732 - DNA, 50 bp, Escherichia coli; identical to SEQ ID NO: 22697
  source 1..50: mol_type = genomic DNA

SEQ ID NO: 22733 - DNA, 40 bp, Escherichia coli; identical to SEQ ID NO: 5188
  source 1..40: mol_type = genomic DNA

SEQ ID NO: 22734 - DNA, 40 bp, Escherichia coli; identical to SEQ ID NO: 5189
  source 1..40: mol_type = genomic DNA

SEQ ID NO: 22735 - DNA, 50 bp, Escherichia coli; identical to SEQ ID NO: 5190
  source 1..50: mol_type = genomic DNA

SEQ ID NO: 22736 - protein, 507 aa, Escherichia coli
MKRVISYIRFSSERQAKGDSLRRQSKMVNDWLKAHPEYYLDQDLSFRDLGVSGFTGKHLKGGLGDFLTAIEKGLVKAGDTLLIESLDRLSRQDVDQASELLRNILRSGVDVVTLSDGEHYTRESLKDPLALIKSILIMQRSHEESLRKSERIQAAWDAKKEAAKAGIKISRRCPAWLKLNDDRKSFSVIPEKVETVRRCFQLRLEGKSIWEIVRILNDEGHQTLNQYKAGKFGQTSVQDLLKNRSVIGYFTPKGCEEIVGYFPPIIPETDFYKVQQLSYSRYGRKPASDKPLSVNLFKGVIRCSECGHALIITGFSDTRSGIYRCPSRNENRCNAKGLSRKQTDGTLLALLSRIDRFDSDMTNTIDTLKLHREHISSNIEKLVQLSLEIEDLSAITSKLKQLKGELSQVDADIEKETQRLKSIDVGCLSDCDLTTKAGRIEAQLIIKSAVKEVVLNTAKRRCKVTFHNGKVIDLPITEDPSEDVTEAIQSLSEVTERGLIDVDEVII

SEQ ID NO: 22737 - DNA, 50 bp, Escherichia coli; identical to SEQ ID NO: 22697
  source 1..50: mol_type = genomic DNA

SEQ ID NO: 22738 - DNA, 40 bp, Escherichia coli; identical to SEQ ID NO: 5188
  source 1..40: mol_type = genomic DNA

SEQ ID NO: 22739 - DNA, 40 bp, Escherichia coli; identical to SEQ ID NO: 5189
  source 1..40: mol_type = genomic DNA

SEQ ID NO: 22740 - DNA, 50 bp, Escherichia coli; identical to SEQ ID NO: 5190
  source 1..50: mol_type = genomic DNA

SEQ ID NO: 22741 - protein, 507 aa, Escherichia coli
MKRVISYIRFSSERQAKGDSLRRQSKMVNDWLKAHPEYYLDQDLSFRDLGVSGFTGKHLKGGLGDFLTAIEKGLVKAGDTLLIESLDRLSRQDVDQASELLRNILRSGVDVVTLSDGEHYTRESLKDPLALIKSILIMQRSHEESLRKSERIQAAWNRKKELISEGIKISKRCPAWLKLNDDRKSFSVIPEKVETVKRCFQLRLEGKSIWEIVRTLNDEGHQTLNQYKAGSFGQTSVQDLLKNRSVIGYFTPKGCEEIADYYPAIIDETTFYKVQQLSYARYGRKPASDKPMAVNLFKGVIRCSECGHALIITGFSDTRNGIYRCPLRNENRCSAKGLSRKQTDGTLLTLLSRLDRFDSDTTNTIDTLKLHREHISSNIEKLVQLSLEIEDLSAITSKLKQLKNELSQVDADIEKETQRLKSIDVGCLSDCDLTTKAGRIEAQLIIKSAVKEVVLNTAKRRCKVTFHNGKVIDLPITENPSDNVTEAIQSLSEVTERGLIDVDEVII

SEQ ID NO: 22742 - DNA, 50 bp, Escherichia coli; identical to SEQ ID NO: 22697
  source 1..50: mol_type = genomic DNA

SEQ ID NO: 22743 - DNA, 40 bp, Escherichia coli; identical to SEQ ID NO: 5188
  source 1..40: mol_type = genomic DNA

SEQ ID NO: 22744 - DNA, 40 bp, Escherichia coli; identical to SEQ ID NO: 5189
  source 1..40: mol_type = genomic DNA

SEQ ID NO: 22745 - DNA, 50 bp, Escherichia coli; identical to SEQ ID NO: 5190
  source 1..50: mol_type = genomic DNA

SEQ ID NO: 22746 - protein, 507 aa, Escherichia coli
MKRVISYIRFSSERQAKGDSLRRQSKMVNDWLKAHPEYYLDQDLSFRDLGVSGFTGKHLKGGLGDFLTAIEKGLVKAGDTLLIESLDRLSRQDIDIASELLRRILRAGVDIVTLSDGEHYTRESLKDPLALIKSILIMQRAHEESLRKAERIQAAWDAKKEAAKAGIKISKRCPAWLKLNDDRKTFSVIPEKVETVRRCFQLRLEGKSIWEIVRTLNDEGHQTLNQYKAGKFGQTSVQDLLKNRSVIGYFTPKGCEEIAGYFPPIIPETDFYKVQQLSYSRYGRKPASDKPMAVNLFKGVIRCSECGHALIITGFSDTRNGIYRCPLRNENRCSAKGLSRKQTDGTLLALLSRLDRFDSDTTNTIDTLKLHREHISSNIEKLVQLSLEIEDLSAITSKLKQLKGELSQVDADIEKETQRLKSIDVGCLSDCDLTTKAGRIEAQLIIKSAVKEVVLNTAKRRCKVTFHNGKAITLPITENPSDNVTEAIQSLSEVTERGLIDVDEVII

SEQ ID NO: 22747 - DNA, 50 bp, Escherichia coli; identical to SEQ ID NO: 22697
  source 1..50: mol_type = genomic DNA

SEQ ID NO: 22748 - DNA, 40 bp, Escherichia coli; identical to SEQ ID NO: 5188
  source 1..40: mol_type = genomic DNA

SEQ ID NO: 22749 - DNA, 40 bp, Escherichia coli; identical to SEQ ID NO: 5189
  source 1..40: mol_type = genomic DNA

SEQ ID NO: 22750 - DNA, 50 bp, Escherichia coli; identical to SEQ ID NO: 5190
  source 1..50: mol_type = genomic DNA

SEQ ID NO: 22751 - protein, 507 aa, Escherichia coli
MKRVISYIRFSSERQAKGDSLRRQSKMVNDWLKAHPEYYLDQDLSFRDLGVSGFTGKHLKGGLGDFLTAIEKGLVKAGDTLLIESLDRLSRQDVGQASELLRNILRSGVDVVTLSDGEHYTRESLKDPLALIKSILIMQRSHEESLRKSERIQAAWDAKKEAAKAGIKVSKRCPAWLKLNDDRKSFSVIPEKVETVKRCFQLRLEGKSIWEIVRTLNDEGHQTLNQYKAGKFGQTSVQDLLKNRSVIGYFTPKGCEEIAGYFPPIIPETDFYKVQQLSYSRYGRKPASDKPLSVNLFKGVIRCSECGHALIITGFSDTRSGIYRCPSRNENRCNAKGLSRKQTDGTLLALLSRIDRFDSDMTNTIDTLKLHREHISSNIEKLVQLSLEIEDLSAITSKLKQLKGELSQVDADIEKETQRLKSIDVGCLSDCDLTTKAGRIEAQLIIKSAVKEVVLNTAKRRCKVTFHNGKVIDLPITETPSEDVTEAIQSLSEVTERGLIDVDEVII

SEQ ID NO: 22752 - DNA, 50 bp, Escherichia coli; identical to SEQ ID NO: 22697
  source 1..50: mol_type = genomic DNA

SEQ ID NO: 22753 - DNA, 40 bp, Escherichia coli; identical to SEQ ID NO: 5188
  source 1..40: mol_type = genomic DNA

SEQ ID NO: 22754 - DNA, 40 bp, Escherichia coli; identical to SEQ ID NO: 5189
  source 1..40: mol_type = genomic DNA

SEQ ID NO: 22755 - DNA, 50 bp, Escherichia coli; identical to SEQ ID NO: 5190
  source 1..50: mol_type = genomic DNA

SEQ ID NO: 22756 - protein, 507 aa, Escherichia coli; identical to SEQ ID NO: 22696

SEQ ID NO: 22757 - DNA, 50 bp, Escherichia coli
  source 1..50: mol_type = genomic DNA
aggtgtatttagaccttgctaatcttcatcagacacgtttaaatatacca

SEQ ID NO: 22758 - DNA, 40 bp, Escherichia coli; identical to SEQ ID NO: 5188
  source 1..40: mol_type = genomic DNA

SEQ ID NO: 22759 - DNA, 40 bp, Escherichia coli; identical to SEQ ID NO: 5189
  source 1..40: mol_type = genomic DNA

SEQ ID NO: 22760 - DNA, 50 bp, Escherichia coli; identical to SEQ ID NO: 5190
  source 1..50: mol_type = genomic DNA

SEQ ID NO: 22761 - protein, 507 aa, Escherichia coli; identical to SEQ ID NO: 22746

SEQ ID NO: 22762 - DNA, 50 bp, Escherichia coli; identical to SEQ ID NO: 22697
  source 1..50: mol_type = genomic DNA

SEQ ID NO: 22763 - DNA, 40 bp, Escherichia coli
  source 1..40: mol_type = genomic DNA
cggcgttaatcgggtgattttagacagccgctcggttcat

SEQ ID NO: 22764 - DNA, 40 bp, Escherichia coli
  source 1..40: mol_type = genomic DNA
cggcgttaatcgggtgattagagacagccgctcggttcat

SEQ ID NO: 22765 - DNA, 50 bp, Escherichia coli; identical to SEQ ID NO: 5190
  source 1..50: mol_type = genomic DNA

SEQ ID NO: 22766 - protein, 507 aa, Escherichia coli
MKRVISYIRFSSERQAKGDSLRRQSKMVNDWLKAHPEYYLDQDLSFRDLGVSGFTGKHLKGGLGDFLTAIEKGLVKAGDTLLIESLDRLSRQDVDRASELLRNILRSGVDVVTLSDGEHYTKESLKDPLSLIKSILIMQRAHEESLRKSERIQAAWDAKKEAAKAGIKVSKRCPAWLKLNDDRKSFSVIPDKVETVKRCFQLRLEGKSIWEIVRTMNAEGRQTLNQHKAGSFGQTSVQDLLKNRSVIGYFTPKGCEEISGYYPAIIDETTFYKVQQLSYARYGRKPASDKPMAVNLFKGVIRCSECGHALIITGFSDTRSGIYRCPLRNENRCSAKGLSRKQTDGTLLALLSRLDRFDSDTTNTVDTLKLRREHIASNIEKLVQLSLEIEDLSAITSKLKQLKGELSQVDADIEKETQRLKSIDVGCLSDCDLTTKAGRIEAQLIIKSAVKEVVLNTAKRRCKVTFHNGKEIDLPITETPSEDVTEAIQSLSEVTERGLIDVDEVIV

SEQ ID NO: 22767 - DNA, 50 bp, Escherichia coli; identical to SEQ ID NO: 22697
  source 1..50: mol_type = genomic DNA

SEQ ID NO: 22768 - DNA, 40 bp, Escherichia coli; identical to SEQ ID NO: 5188
  source 1..40: mol_type = genomic DNA

SEQ ID NO: 22769 - DNA, 40 bp, Escherichia coli; identical to SEQ ID NO: 5189
  source 1..40: mol_type = genomic DNA

SEQ ID NO: 22770 - DNA, 50 bp, Escherichia coli; identical to SEQ ID NO: 5190
  source 1..50: mol_type = genomic DNA

SEQ ID NO: 22771 - protein, 507 aa, Escherichia coli
MKRVISYIRFSSERQAKGDSLRRQSKMVNDWLKAHPEYYLDQDLSFRDLGVSGFTGKHLKGGLGDFLTAIEKGLVKAGDTLLIESLDRLSRQDVDQASELLRNILRSGVDVVTLSDGEHYTKESLRDPLSLIKSILIMQRSHEESLRKSERIQAAWNRKKELISEGIKISKRCPAWLKLNDDRKSFSVIPEKVETVKRCFQLRLEGKSIWEIVRTLNAEGHQTLNQYKAGSFGQTSVQDLLKNRSVIGYFTPKGCEEISGYYPSIIHETDFYKVQQLSYSRYGRKPASDKPMAVNLFKGVIRCSECGHALIITGFSDTRSGIYRCPLRNENRCSAKGLSRKQTDGTLLALLSRLDRFDSDMTNTIDTLKLHREHISSNIEKLVQLSLEIEDLSAITSKLKQLKNELSQVDADIEKETQRLKSIDVGCLSDCDLTTKAGRIEAQLIIKSAVKEVILNTAKRRCKVTFHNGKVIDLPITENPSDNVTEAIQSLSEVTERGLIDVDEVII

SEQ ID NO: 22772 - DNA, 50 bp, Escherichia coli; identical to SEQ ID NO: 22697
  source 1..50: mol_type = genomic DNA

SEQ ID NO: 22773 - DNA, 40 bp, Escherichia coli; identical to SEQ ID NO: 5188
  source 1..40: mol_type = genomic DNA

SEQ ID NO: 22774 - DNA, 40 bp, Escherichia coli; identical to SEQ ID NO: 5189
  source 1..40: mol_type = genomic DNA

SEQ ID NO: 22775 - DNA, 50 bp, Escherichia coli; identical to SEQ ID NO: 5190
  source 1..50: mol_type = genomic DNA

SEQ ID NO: 22776 - protein, 507 aa, Escherichia coli; identical to SEQ ID NO: 5201

SEQ ID NO: 22777 - DNA, 50 bp, Escherichia coli; identical to SEQ ID NO: 22697
  source 1..50: mol_type = genomic DNA

SEQ ID NO: 22778 - DNA, 40 bp, Escherichia coli; identical to SEQ ID NO: 5188
  source 1..40: mol_type = genomic DNA

SEQ ID NO: 22779 - DNA, 40 bp, Escherichia coli; identical to SEQ ID NO: 5189
  source 1..40: mol_type = genomic DNA

SEQ ID NO: 22780 - DNA, 50 bp, Escherichia coli; identical to SEQ ID NO: 5190
  source 1..50: mol_type = genomic DNA

SEQ ID NO: 22781 - protein, 507 aa, Escherichia coli; identical to SEQ ID NO: 22721

SEQ ID NO: 22782 - DNA, 50 bp, Escherichia coli; identical to SEQ ID NO: 22697
  source 1..50: mol_type = genomic DNA

SEQ ID NO: 22783 - DNA, 40 bp, Escherichia coli
  source 1..40: mol_type = genomic DNA
cggcgttaatcgggtgattttagacagccgaccggttcat

SEQ ID NO: 22784 - DNA, 40 bp, Escherichia coli
  source 1..40: mol_type = genomic DNA
cggcgttaatcgggtgattagagacagccgaccggttcat

SEQ ID NO: 22785 - DNA, 50 bp, Escherichia coli; identical to SEQ ID NO: 5190
  source 1..50: mol_type = genomic DNA

SEQ ID NO: 22786 - protein, 507 aa, Escherichia coli
MKRVISYIRFSSERQAKGDSLRRQSKMVNDWLKAHPEYYLDQDLSFRDLGVSGFTGKHLKGGLGDFLTAIEKGLVKAGDTLLIESLDRLSRQDIDIASELLRRILRAGVDIVTLSDGEHYTRESLKDPLALIKSILIMQRAHEESLRKAERIQAAWDAKKEAAKAGIKISKRCPAWLKLNDDRKTFSVIPEKVETVRRCFQLRLEGKSIWEIVRTLNDEGHQTLNQYKAGKFGQTSVQDLLKNRSVIGYFTPKGCEEIAGYFPPIIPETDFYKVQQLSYSRYGRKPASDKPLSVNLFKGVIRCSECGHALIITGFSDTRNGIYRCPLRNENRCSAKGLSRKQTDGTLLALLSRIDRFDSDMTNTIDTLKLHREHISSNIEKLVQLSLEIEDLSAITSKLKQLKGELSQVNADIEKETQRLKSIDVGCLSDCDLTTKAGRIEAQLIIKSAVKEVVLNTAKRRCKVTFHNGKVIDLPITENPSEDVTEAIQSLSEVTERGLIDVDEVII

SEQ ID NO: 22787 - DNA, 50 bp, Escherichia coli; identical to SEQ ID NO: 22697
  source 1..50: mol_type = genomic DNA

SEQ ID NO: 22788 - DNA, 40 bp, Escherichia coli; identical to SEQ ID NO: 5188
  source 1..40: mol_type = genomic DNA

SEQ ID NO: 22789 - DNA, 40 bp, Escherichia coli; identical to SEQ ID NO: 5189
  source 1..40: mol_type = genomic DNA

SEQ ID NO: 22790 - DNA, 50 bp, Escherichia coli; identical to SEQ ID NO: 5190
  source 1..50: mol_type = genomic DNA

SEQ ID NO: 22791 - protein, 507 aa, Escherichia coli; identical to SEQ ID NO: 5186

SEQ ID NO: 22792 - DNA, 50 bp, Escherichia coli; identical to SEQ ID NO: 22697
  source 1..50: mol_type = genomic DNA

SEQ ID NO: 22793 - DNA, 40 bp, Escherichia coli; identical to SEQ ID NO: 5188
  source 1..40: mol_type = genomic DNA

SEQ ID NO: 22794 - DNA, 40 bp, Escherichia coli; identical to SEQ ID NO: 5189
  source 1..40: mol_type = genomic DNA

SEQ ID NO: 22795 - DNA, 50 bp, Escherichia coli; identical to SEQ ID NO: 5190
  source 1..50: mol_type = genomic DNA

SEQ ID NO: 22796 - protein, 507 aa, Escherichia coli; identical to SEQ ID NO: 22721

SEQ ID NO: 22797 - DNA, 50 bp, Escherichia coli; identical to SEQ ID NO: 22697
  source 1..50: mol_type = genomic DNA

SEQ ID NO: 22798 - DNA, 40 bp, Escherichia coli; identical to SEQ ID NO: 21333
  source 1..40: mol_type = genomic DNA

SEQ ID NO: 22799 - DNA, 40 bp, Escherichia coli
  source 1..40: mol_type = genomic DNA
cggcgttaatcgggtgattagagacggccgcccggttcat

SEQ ID NO: 22800 - DNA, 50 bp, Escherichia coli; identical to SEQ ID NO: 5190
  source 1..50: mol_type = genomic DNA

SEQ ID NO: 22801 - protein, 507 aa, Escherichia coli
MKRVISYIRFSSERQAKGDSLRRQSKMVTDWLKAHPEYYLDQDLSFRDLGVSGFTGKHLKGGLGDFLTAIEKGLVKAGDTLLIESLDRLSRQNVDRASELLRNILRSGVDVVTLSDGEHYTRESLKDPLALIKSILIMQRSHEESLRKSERIQAAWNRKKELISEGIKISKRCPAWLRLNDDRKSFSVIPEKVETVKRCFQLRLEGKSIWEIVRTLNAEGHQTLNQYKAGSFGQTSVQDLLKNRSVIGYFTPKGCEEISGYYPAIIDETTFYKVQQLSYARHGRKPASAKPLSVNLFKGVIRCSECGHALIITGFSDTRNGIYRCPLRNENRCSAKGLSRKQTDGTLLTLLSRLDRFDSDTTNTIDTLKLHREHISSNIEKLVQLSLEIEDLSAITSKLKQLKNELSQVDADIEKETQRLKSIDVGCLSDCDLTTKAGRIEAQLIIKSAVKEVVLNTAKRRCKVTFHNGKAITLPITENPSDNVTEAIQSLSEVTERGLIDVDVVEI

SEQ ID NO: 22802 - DNA, 50 bp, Escherichia coli; identical to SEQ ID NO: 22697
  source 1..50: mol_type = genomic DNA

SEQ ID NO: 22803 - DNA, 40 bp, Escherichia coli; identical to SEQ ID NO: 5188
  source 1..40: mol_type = genomic DNA

SEQ ID NO: 22804 - DNA, 40 bp, Escherichia coli; identical to SEQ ID NO: 5189
  source 1..40: mol_type = genomic DNA

SEQ ID NO: 22805 - DNA, 50 bp, Escherichia coli; identical to SEQ ID NO: 5190
  source 1..50: mol_type = genomic DNA

SEQ ID NO: 22806 - protein, 507 aa, Escherichia coli
MKRVISYIRFSSERQAKGDSLRRQSKMVNDWLKAHPEYYLDQDLSFRDLGVSGFTGKHLKGGLGDFLTAIEKGLVKAGDTLLIESLDRLSRQDVDQASELLRNILRSGVDVVTLSDGEHYTRESLKDPLALIKSILIMQRSHEESLRKSERIQAAWNRKKELISEGIKISKRCPAWLKLNDDRKSFSVIPEKVETVKRCFQLRLEGKSIWEIVRTLNDEGHQTLNQYKAGSFGQTSVQDLLKNRSVIGYFTPKGCEEIAGYYPAIIDETTFYKVQQLSYARYGRKPASDKPLSVNLFKGVIRCSECGHALIITGFSDTRSGIYRCPLRNENRCSAKGLSRKQTDGTLLALLSRLDRFDSDTTNTIDTLKLHREHISSNIEKLVQLSLEIEDLSAITSKLKQLKGELSQVDADIEKETQRLKSIDVGCLSDCDLTTKAGRIEAQLIIKSAVKEVVLNTAKRRCKVTFHNGKIIDLPITENPSEDVTEAIQSLSEVTERGLIDVDEVII

SEQ ID NO: 22807 - DNA, 50 bp, Escherichia coli; identical to SEQ ID NO: 22697
  source 1..50: mol_type = genomic DNA

SEQ ID NO: 22808 - DNA, 40 bp, Escherichia coli; identical to SEQ ID NO: 5188
  source 1..40: mol_type = genomic DNA

SEQ ID NO: 22809 - DNA, 40 bp, Escherichia coli; identical to SEQ ID NO: 5189
  source 1..40: mol_type = genomic DNA

SEQ ID NO: 22810 - DNA, 50 bp, Escherichia coli; identical to SEQ ID NO: 5190
  source 1..50: mol_type = genomic DNA

SEQ ID NO: 22811 - protein, 507 aa, Escherichia coli
MKRVISYIRFSSERQAKGDSLRRQSKMVNDWLKAHPEYYLDQDLSFRDLGVSGFTGKHLKGGLGDFLTAIEKGLVKAGDTLLIESLDRLSRQDIDIASELLRRILRAGVDIVTLSDGEHYTRESLKDPLALIKSILIMQRAHEESLRKAERIQAAWDAKKEAAKAGIKISKRCPAWLKLNDDRKSFSVIPEKVETVKRCFQLRLEGKSIWEIVRTLNDEGHQTLNQYKAGSFGQTSVQDLLKNRSVIGYFTPKGCEEIADYYPAIIDETTFYKVQQLSYARYGRKPASDKPMAVNLFKGVIRCSECGHALIITGFSDTRNGIYRCPLRNENRCSAKGLSRKQTDGTLLTLLSRLDRFDSDTTNTIDTLKLHREHISSNIEKLVQLSLEIEDLSAITSKLKQLKGELSQVDADIEKETQRLKSIDVGCLSDCDLTTKAGRIEAQLIIKSAVKEVVLNTAKRRCKVTFHNGKVIDLPITENPSDNVTEAIQSLSEVTERGLIDVDEVII

SEQ ID NO: 22812 - DNA, 50 bp, Escherichia coli; identical to SEQ ID NO: 22697
  source 1..50: mol_type = genomic DNA

SEQ ID NO: 22813 - DNA, 40 bp, Escherichia coli; identical to SEQ ID NO: 5188
  source 1..40: mol_type = genomic DNA

SEQ ID NO: 22814 - DNA, 40 bp, Escherichia coli; identical to SEQ ID NO: 5189
  source 1..40: mol_type = genomic DNA

SEQ ID NO: 22815 - DNA, 50 bp, Escherichia coli; identical to SEQ ID NO: 5190
  source 1..50: mol_type = genomic DNA

SEQ ID NO: 22816 - protein, 507 aa, Escherichia coli
MKRVISYIRFSSERQAKGDSLRRQSKMVNDWLKAHPEYYLDQDLSFRDLGVSGFTGKHLKGGLGDFLTAIEKGLVKAGDTLLIESLDRLSRQDIDIASELLRNILRSGVDVVTLSDGEHYTRESLRDPLALIKSILIMQRAHEESLRKAERIQAAWDAKKEAAKAGIKVSKRCPAWLKLNDDRKSFSVIPEKVETVKRCFQLRLEGKSIWEIVRTLNDEGRQTLNQHKAGSFGQSSVQDLLKNRSVIGYFTPKGCEEIAGYYPAIIDETTFYKVQQLSYARYGRKPASDKPLSVNLFKGVIRCSECGHALIITGFSDTRSGIYRCPLRNENRCSAKGLSRKQTDGTLLALLSRLDRFDSDMTNTIDTLKLHREHISSNIEKLVQLSLEIEDLSAITSKLKQLKGELSQVDADIEKETQRLKSIDVGCLSDCDLTTKAGRIEAQLIIKSAVKEVVLNTAKRRCKVTFHNGKIIDLPITENPSEDVTEAIQSLSEVTERGLIDVDEVII

SEQ ID NO: 22817 - DNA, 50 bp, Escherichia coli; identical to SEQ ID NO: 22697
  source 1..50: mol_type = genomic DNA

SEQ ID NO: 22818 - DNA, 40 bp, Escherichia coli; identical to SEQ ID NO: 5188
  source 1..40: mol_type = genomic DNA

SEQ ID NO: 22819 - DNA, 40 bp, Escherichia coli; identical to SEQ ID NO: 5189
  source 1..40: mol_type = genomic DNA

SEQ ID NO: 22820 - DNA, 50 bp, Escherichia coli; identical to SEQ ID NO: 5190
  source 1..50: mol_type = genomic DNA

SEQ ID NO: 22821 - protein, 507 aa, Escherichia coli
MKRVISYIRFSSERQAKGDSLRRQSKMVNDWLKAHPEYYLDQDLSFRDLGVSGFTGKHLKGGLGDFLTAIEKGLVKAGDTLLIESLDRLSRQNVDRASELLRNILRSGVDVVTLSDGEHYTRESLKDPLALIKSILIMQRSHEESLRKSERIQAAWNRKKELISEGIKISKRCPAWLKLNDDRKSFSVIPEKVETVKRCFQLRLEGKSIWEIVRTMNAEGHQTLHQHKAGSFGQTSVQDLLKNRSVIGYFTPKGCEEISGYYPAIIDETTFYKVQQLSYARYGRKPASDKPLSVNLFKGVIRCSECGHALIITGFSDTRNGIYRCPLRNENRCSAKGLSRKQTDGTLLTLLSRLDRFDSDTTNTIDMLRLHREHISSNIEKLVQLSLEIEDLNAITSKLKQLKNELSQVDADIEKETQRLKSIDVGCLSDCDLTTKAGRIEAQLIIKSAVKEVVLNTAKRRCKVTFHNGRSITLPITETPSEDVTEAIQSLSEVTERGLIDVDEVII

SEQ ID NO: 22822 - DNA, 50 bp, Escherichia coli; identical to SEQ ID NO: 22697
  source 1..50: mol_type = genomic DNA

SEQ ID NO: 22823 - DNA, 40 bp, Escherichia coli; identical to SEQ ID NO: 5188
  source 1..40: mol_type = genomic DNA

SEQ ID NO: 22824 - DNA, 40 bp, Escherichia coli; identical to SEQ ID NO: 5189
  source 1..40: mol_type = genomic DNA

SEQ ID NO: 22825 - DNA, 50 bp, Escherichia coli; identical to SEQ ID NO: 5190
  source 1..50: mol_type = genomic DNA

SEQ ID NO: 22826 - protein, 507 aa, Escherichia coli
MKRVISYIRFSSERQAKGDSLRRQSKMVNDWLKAHPEYYLDQDLSFRDLGVSGFTGKHLKGGLGDFLTAIEKGLVKAGDTLLIESLDRLSRQDVDQASELLRNILRSGVDVVTLSDGEHYTRESLKDPLALIKSILIMQRSHEESLRKSERIQAAWNRKKELISEGIKISKRCPAWLKLNDDRKSFSVIPEKVETVKRCFQLRLEGKSIWEIVRTLNDEGHQTLNQYKAGSFGQTSVQDLLKNRSVIGYFTPKGCEEIADYYPAIIDETTFYKVQQLSYARYGRKPASDKPMAVNLFKGVICCSECGHALIITGFSDTRNGIYRCPLRNENRCSAKGLSRKQTDGTLLTLLSRLDRFDSDTTNTIDTLKLHREHISSNIEKLVQLSLEIEDLSAITSKLKQLKNELSQVDADIEKETQRLKSIDVGCLSDCDLTTKAGRIEAQLIIKSAVKEVVLNTAKRRCKVTFHNGKVIDLPITENPSDNVTEAIQSLSEVTERGLIDVDEVII

SEQ ID NO: 22827 - DNA, 50 bp, Escherichia coli; identical to SEQ ID NO: 22697
  source 1..50: mol_type = genomic DNA

SEQ ID NO: 22828 - DNA, 40 bp, Escherichia coli; identical to SEQ ID NO: 5188
  source 1..40: mol_type = genomic DNA

SEQ ID NO: 22829 - DNA, 40 bp, Escherichia coli; identical to SEQ ID NO: 5189
  source 1..40: mol_type = genomic DNA

SEQ ID NO: 22830 - DNA, 50 bp, Escherichia coli; identical to SEQ ID NO: 5190
  source 1..50: mol_type = genomic DNA

SEQ ID NO: 22831 - protein, 507 aa, Escherichia coli
MKRVISYIRFSSERQAKGDSLRRQSKMVNDWLKAHPEYYLDQDLSFRDLGVSGFTGKHLKGGLGDFLTAIEKGLVKAGDTLLIESLDRLSRQDVDQASELLRNILRSGVDVVTLSDGEHYTRESLKDPLALIKSILIMQRSHEESLRKSERIQAAWNRKKELISEGIKISKRCPAWLKLNDDRKSFSVIPEKVETVKRCFQLRLEGKSIWEIVRTLNDEGHQTLNQYKAGSFGQTSVQDLLKNRSVIGYFTPKGCEEIADYYPAIIDETTFYKVQQLSYARYGRKPASDKPMAVNLFKGVICCSECGHALIITGFSDTRNGIYRCPLRNENRCSAKGLSRKQTDGTLLALLSRLDRFDSDMTNTIDTLKLHREHISSNIEKLVQLSLEIEDLSAITSKLRQLKNELSQVDADIEKETQRLKSIDVGCLSDCDLTTKAGRIEAQLIIKSAVKEVVLNTAKRRCKVTFHNGKVIDLPITENPSDNVTEAIQSLSEVTERGLIDVDEVII

SEQ ID NO: 22832 - DNA, 50 bp, Escherichia coli; identical to SEQ ID NO: 22697
  source 1..50: mol_type = genomic DNA

SEQ ID NO: 22833 - DNA, 40 bp, Escherichia coli; identical to SEQ ID NO: 5188
  source 1..40: mol_type = genomic DNA

SEQ ID NO: 22834 - DNA, 40 bp, Escherichia coli; identical to SEQ ID NO: 5189
  source 1..40: mol_type = genomic DNA

SEQ ID NO: 22835 - DNA, 50 bp, Escherichia coli; identical to SEQ ID NO: 5190
  source 1..50: mol_type = genomic DNA

SEQ ID NO: 22836 - protein, 507 aa, Escherichia coli
MKRVISYIRFSSERQAKGDSLRRQSKMVNDWLKAHPEYYLDQDLSFRDLGVSGFTGKHLKGGLGDFLTAIEKGLVKAGDTLLIESLDRLSRQDVDQASELLRNILRSGVDVVTLSDGEHYTRESLKDPLALIKSILIMQRSHEESLRKSERIQAAWNRKKELISEGIKISKRCPAWLKLNDDRKSFSVIPEKVETVKRCFQLRLEGKSIWEIVRTLNDEGHQTLNQYKAGSFGQTSVQDLLKNRSVIGYFTPKGCEEISGYYPAIIDETTFYKVQQLSYARYGRKPASDKPMAVNLFKGVIRCSECGHALIITGFSDTRNGIYRCPLRNENRCSAKGLSRKQTDGTLLALLSRLDRFDSDMTNTIDTLKLHREHISSNIEKLVQLSLEIEDLSAITSKLRQLKNELSQVDADIEKETQRLKSIDVGCLSDCDLTTKAGRIEAQLIIKSAVKEVVLNTAKRRCKVTFHNGKAITLPITENPSDNVTEAIQSLSEVTERGLIDVDEVII

SEQ ID NO: 22837 - DNA, 50 bp, Escherichia coli; identical to SEQ ID NO: 22697
  source 1..50: mol_type = genomic DNA

SEQ ID NO: 22838 - DNA, 40 bp, Escherichia coli; identical to SEQ ID NO: 5188
  source 1..40: mol_type = genomic DNA

SEQ ID NO: 22839 - DNA, 40 bp, Escherichia coli; identical to SEQ ID NO: 5189
  source 1..40: mol_type = genomic DNA

SEQ ID NO: 22840 - DNA, 50 bp, Escherichia coli; identical to SEQ ID NO: 5190
  source 1..50: mol_type = genomic DNA

SEQ ID NO: 22841 - protein, 507 aa, Escherichia coli
MKRVISYIRFSSERQAKGDSLRRQSKMVNDWLKAHPEYYLDQDLSFRDLGVSGFTGKHLKGGLGDFLTAIEKGLVKAGDTLLIESLDRLSRQAVDRASELLRNILRSGVDIVTLSDGEHYTRESLKDPLALIKSILIMQRAHEESLRKSERIQAAWDAKKEAAKAGIKVSRRCPAWLRLNDDRKSFSVIPEKVETVKRCFQLRLEGKSIWEIVRTLNAEGHRSMNQYKPGKFGQTSVQDLLKNRSVIGYFTPKGCEEIAGYYPAIIDETTFYKVQQLSHSRYGKRSVSDKPLSVNLFKGVIRCSECGHALIITGFSDTRSGIYRCPLRNENRCSAKGLSRKQTDGTLLTLLSRLDRFDSDTTNTIDMLRLHREHISSNIEKLVQLSLEIEDLSAITIKLKQLKGELSQVDADIEKETQRLKSIDTGSLSDCDLSTKAGRIEAQLIIKSAVKEVVLNTAKRRCKVTFHNSKSITLPITENPSEDVTEAIQSLSEVTEKGLIDVDEVII

SEQ ID NO: 22842 - DNA, 50 bp, Escherichia coli; identical to SEQ ID NO: 22697
  source 1..50: mol_type = genomic DNA

SEQ ID NO: 22843 - DNA, 40 bp, Escherichia coli; identical to SEQ ID NO: 5188
  source 1..40: mol_type = genomic DNA

SEQ ID NO: 22844 - DNA, 40 bp, Escherichia coli; identical to SEQ ID NO: 5189
  source 1..40: mol_type = genomic DNA

SEQ ID NO: 22845 - DNA, 50 bp, Escherichia coli; identical to SEQ ID NO: 5190
  source 1..50: mol_type = genomic DNA

SEQ ID NO: 22846 - protein, 507 aa, Escherichia coli
MKRVISYIRFSSERQAKGDSLRRQSKMVNDWLKAHPEYYLDQDLSFRDLGVSGFTGKHLKGGLGDFLTAIEKGLVKAGDTLLIESLDRLSRQDVDQASELLRNILRSGVDVVTLSDGEHYTRESLKDPLALIKSILIMQRSHEESLRKSERIQAAWDAKKEAAKAGIKISRRCPAWLKLNDDRKSFSVIPEKVETVRRCFQLRLEGKSIWEIVRILNDEGHQTLNQYKAGKFGQTSVQDLLKNRSVIGYFTPKGCEAIVGYFPPIIPETDFYKVQQLSYSRYGRKPASDKPLSVNLFKGVIRCSECGHALIITGFSDTRSGIYRCPSRNENRCNAKGLSRKQTDGTLLALLSRIDRFDSDMTNTIDTLKLHREHISSNIEKLVQLSLEIEDLSAITSKLKQLKGELSQVDADIEKETQRLKSIDVGCLSDCDLTTKAGRIEAQLIIKSAVKEVVLNTAKRRCKVTFHNGKVIDLPITEDPSEDVTEAIQSLSEVTERGLIDVDEVII

SEQ ID NO: 22847 - DNA, 50 bp, Escherichia coli; identical to SEQ ID NO: 22697
  source 1..50: mol_type = genomic DNA

SEQ ID NO: 22848 - DNA, 40 bp, Escherichia coli; identical to SEQ ID NO: 5188
  source 1..40: mol_type = genomic DNA

SEQ ID NO: 22849 - DNA, 40 bp, Escherichia coli; identical to SEQ ID NO: 5189
  source 1..40: mol_type = genomic DNA

SEQ ID NO: 22850 - DNA, 50 bp, Escherichia coli; identical to SEQ ID NO: 5190
  source 1..50: mol_type = genomic DNA

SEQ ID NO: 22851 - protein, 507 aa, Escherichia coli; identical to SEQ ID NO: 22721

SEQ ID NO: 22852 - DNA, 50 bp, Escherichia coli; identical to SEQ ID NO: 22697
  source 1..50: mol_type = genomic DNA

SEQ ID NO: 22853 - DNA, 40 bp, Escherichia coli; identical to SEQ ID NO: 5198
  source 1..40: mol_type = genomic DNA

SEQ ID NO: 22854 - DNA, 40 bp, Escherichia coli; identical to SEQ ID NO: 5199
  source 1..40: mol_type = genomic DNA

SEQ ID NO: 22855 - DNA, 50 bp, Escherichia coli; identical to SEQ ID NO: 5190
  source 1..50: mol_type = genomic DNA

SEQ ID NO: 22856 - protein, 507 aa, Escherichia coli; identical to SEQ ID NO: 22741

SEQ ID NO: 22857 - DNA, 50 bp, Escherichia coli; identical to SEQ ID NO: 22697
  source 1..50: mol_type = genomic DNA

SEQ ID NO: 22858 - DNA, 40 bp, Escherichia coli; identical to SEQ ID NO: 21333
  source 1..40: mol_type = genomic DNA

SEQ ID NO: 22859 - DNA, 40 bp, Escherichia coli; identical to SEQ ID NO: 22799
  source 1..40: mol_type = genomic DNA

SEQ ID NO: 22860 - DNA, 50 bp, Escherichia coli; identical to SEQ ID NO: 5190
  source 1..50: mol_type = genomic DNA

SEQ ID NO: 22861 - protein, 507 aa, Escherichia coli
MKRVISYIRFSSERQAKGDSLRRQSKMVNDWLKAHPEYYLDQDLSFRDLGVSGFTGKHLKGGLGDFLTAIEKGLVKAGDTLLIESLDRLSRQNVDRASELLRNILRSGVDVVTLSDGEHYTRESLKDPLSLIKSILIMQRSHEESLRKSERIQAAWNRKKELISEGIKISKRCPAWLKLNDDRKSFSVIPEKVETVRRCFQLRLEGKSIWEIVRTMNAEGHQTLNQYKAGSFGQTSVQDLLKNRSVIGYFTPKGCEEISGYYPAIIDETTFYKVQQLSYARYGRKPASAKPLSVNLFKGVIRCSECGHALIITGFSDTRSGIYRCPLRNENRCNAKGLSRKQTDSTLLALLSRLDRFDSDMTNTIDTLKLHREHISSNIEKLVQLSLEIEDLSAITSKLKQLKNELSQVDADIEKETQRLKSIDVGCLSDCDLTTKAGRVEAQLIIKSAVKEVVLNTAKRRCKVTFHNGKSITLPITENPSEDVTEAIQSLSEVTERGLIDVDEVIV

SEQ ID NO: 22862 - DNA, 50 bp, Escherichia coli
  source 1..50: mol_type = genomic DNA
aggtgtatttagagcttgctaatcttcatcagacacgtttaaatacacca

SEQ ID NO: 22863 - DNA, 40 bp, Escherichia coli; identical to SEQ ID NO: 5188
  source 1..40: mol_type = genomic DNA

SEQ ID NO: 22864 - DNA, 40 bp, Escherichia coli; identical to SEQ ID NO: 5189
  source 1..40: mol_type = genomic DNA

SEQ ID NO: 22865 - DNA, 50 bp, Escherichia coli; identical to SEQ ID NO: 5190
  source 1..50: mol_type = genomic DNA

SEQ ID NO: 22866 - protein, 507 aa, Escherichia coli
MKRVISYIRFSSERQAKGDSLRRQSKMVNDWLKAHPEYYLDKDLSFRDLGVSGFTGKHLKGGLGDFLTAIEKGLVKAGDTLLIESLDRLSRQDVDQASELLRNILRSGVDVVTLSDGEHYTRESLKDPLALIKSILIMQRSHEESLRKSERIQAAWDAKKEAAKAGIKISRRCPAWLKLNDDRKSFSVIPEKVETVRRCFQLRLEGKSIWEIVRTLNAEGHQTLNQYKAGKFGQTSVQDLLKNRSVIGYFTPKGCEEIAGYFPPIIPETDFYKVQQLSHYRYGRKPVSDKPLSVNLFKGVIRCSECGHALIITGFSDTRSGIYRCPLRNENRCSAKGLSRKQTDGTLLALLSRLDRFDSDMTNTVDTLKLHREHISSNIEKLVQLSLEIEDLNAITSKLKQLKGELSQVDADIEKETQRLKSIDVGCLSDCDLTTKAGRIEAQLIIKSAVKEVVLNTAKRRCKVTFHNGRAITLPITENPSEDVTEAIQSLSEAIERGLIDVDVVEI

SEQ ID NO: 22867 - DNA, 50 bp, Escherichia coli; identical to SEQ ID NO: 22697
  source 1..50: mol_type = genomic DNA

SEQ ID NO: 22868 - DNA, 40 bp, Escherichia coli; identical to SEQ ID NO: 5188
  source 1..40: mol_type = genomic DNA

SEQ ID NO: 22869 - DNA, 40 bp, Escherichia coli; identical to SEQ ID NO: 5189
  source 1..40: mol_type = genomic DNA

SEQ ID NO: 22870 - DNA, 50 bp, Escherichia coli; identical to SEQ ID NO: 5190
  source 1..50: mol_type = genomic DNA

SEQ ID NO: 22871 - protein, 507 aa, Escherichia coli
MKRVISYIRFSFERQAKGDSLRRQSKMVNDWLKAHPEYYLDQDLSFRDLGVSGFTGKHLKGGLGDFLTAIEKGLVKAGDTLLIESLDRLSRQDVDQASELLRNILRSGVDVVTLSDGEHYTRESLKDPLALIKSILIMQRSHEESLRKSERIQAAWNRKKELISEGIKISKRCPAWLKLNDDRKSFSVIPEKVETVKRCFQLRLEGKSIWEIVRTLNDEGHQTLNQYKAGSFGQTSVQDLLKNRSVIGYFTPKGCEEIAGYYPAIIDETTFYKVQQLSYSRYGRKPASDKPMAVNLFKGVIRCSECGHALIITGFSDTRSGIYRCPLRNENRCSAKGLSRKQTDGTLLTLLSRLDRFDSDMTNTIDTLKLHREHISSNIEKLVQLSLEIEDLSAITIKLKQLKGELSQVDADIEKETQRLKSIDVGCLSDCDLTTKAGRIEAQLIIKSAVKEVVLNTAKRRCKVSFHNGKVIDLSITENPSEDVTEAIQSLSEVTERGLIDVDEVII

SEQ ID NO: 22872 - DNA, 50 bp, Escherichia coli; identical to SEQ ID NO: 22697
  source 1..50: mol_type = genomic DNA

SEQ ID NO: 22873 - DNA, 40 bp, Escherichia coli; identical to SEQ ID NO: 5188
  source 1..40: mol_type = genomic DNA

SEQ ID NO: 22874 - DNA, 40 bp, Escherichia coli; identical to SEQ ID NO: 5189
  source 1..40: mol_type = genomic DNA

SEQ ID NO: 22875 - DNA, 50 bp, Escherichia coli; identical to SEQ ID NO: 5190
  source 1..50: mol_type = genomic DNA

SEQ ID NO: 22876 - protein, 507 aa, Escherichia coli
MKRVISYIRFSSERQAKGDSLRRQSKMVNDWLKAHPEYYLDQDLSFRDLGVSGFTGKHLKGGLGDFLTAIEKGLVKAGDTLLIESLDRLSRQDVDQASELLRNILRSGVDVVTLSDGEHYTKESLRDPLSLIKSILIMQRAHEESLRKAERIQAAWDAKKEAAKAGIKISRRCPAWLKLNDDRKSFSVIPEKVETVKRCFQLRLEGKSIWEIVRTLNAEGHQTLNQYKAGKFGQTSVQDLLKNRSVIGYFTPKGCEEISGYYPAIIDETTFYKVQQLSYARYGRKPASDKPMAVNLFKGVIRCSECGHALIITGFSDTRNGIYRCPLRNENRCSAKGLSRKQTDGTLLTLLSRLDRFDSDTTNTIDMLRLHREHISSNIEKLVQLSLEIEDLSAITIKLKQLKGELSQVDADIEKETQRLKSIDVGCLSDCDLTTKAGRIEAQLIIKSAVKEVVLNTAKRRCKVTFHNGKVIDLSITENPSEDVTEAIQSLSEVTERGLIDVDEVII

SEQ ID NO: 22877 - DNA, 50 bp, Escherichia coli; identical to SEQ ID NO: 22697
  source 1..50: mol_type = genomic DNA

SEQ ID NO: 22878 - DNA, 40 bp, Escherichia coli
  source 1..40: mol_type = genomic DNA
cggcgttaatcgggtgattttagacagccgccctgttcat

SEQ ID NO: 22879 - DNA, 40 bp, Escherichia coli
  source 1..40: mol_type = genomic DNA
cggcgttaatcgggtgattagagacagccgccctgttcat

SEQ ID NO: 22880 - DNA, 50 bp, Escherichia coli; identical to SEQ ID NO: 5190
  source 1..50: mol_type = genomic DNA

SEQ ID NO: 22881 - protein, 507 aa, Escherichia coli
MKRVISYIRFSSERQAKGDSLRRQSKMVNDWLKAHPEYYLDQDLSFRDLGVSGFTGKHLKGGLGDFLTAIEKGLVKAGDTLLIESLDRLSRQDIDIASELLRRILRAGVDIVTLSDGEHYTRESLKDPLALIKSILIMQRAHEESLRKAERIQAAWDAKKEAAKAGIKISRRCPAWLKLNDDRKSFSVIPEKVETVKRCFQLRLEGKSIWEIVRTLNAEGHQTLNQYKAGKFGQTSVQDLLKNRSVIGYFTPKGCEEISGYYPAIIDETTFYKVQQLSYARYGRKPASDKPMAVNLFKGVIRCSECGHALIITGFSDTRNGIYRCPLRNENRCSAKGLSRKQTDGTLLALLSRLDRFDSDMTNTIDTLKLHREHISSNIEKLVQLSLEIEDLSAITSKLRQLKNELSQVDADIEKETQRLKSIDVGCLSDCDLTTKAGRIEAQLIIKSAVKEVVLNTAKRRCKVTFHNGKVIDLPITEDPSENVTEAIQSLSEVTERGLIDVDEVII

SEQ ID NO: 22882 - DNA, 50 bp, Escherichia coli; identical to SEQ ID NO: 22697
  source 1..50: mol_type = genomic DNA

SEQ ID NO: 22883 - DNA, 40 bp, Escherichia coli; identical to SEQ ID NO: 5188
  source 1..40: mol_type = genomic DNA

SEQ ID NO: 22884 - DNA, 40 bp, Escherichia coli; identical to SEQ ID NO: 5189
  source 1..40: mol_type = genomic DNA

SEQ ID NO: 22885 - DNA, 50 bp, Escherichia coli; identical to SEQ ID NO: 5190
  source 1..50: mol_type = genomic DNA

SEQ ID NO: 22886 - protein, 507 aa, Escherichia coli
MKRVISYIRFSSERQAKGDSLRRQSKMVNDWLKAHPEYYLDQDLSFRDLGVSGFTGKHLKGGLGDFLTAIEKGLVKAGDTLLIESLDRLSRQDVDQASELLRNILRSGVDVVTLSDGEHYTRESLKDPLALIKSILIMQRSHEESLRKSERIQAAWDAKKEAAKAGIKISRRCPAWLKLNDDRKSFSVIPEKVETVRRCFQLRLEGKSIWEIVRILNDEGHQTLNQYKAGKYGQTSVQDLLKNRSVIGYFTPKGCEEIVGYFPPIIPETDFYKVQQLSYSRYGRKPASDKPLSVNLFKGVIRCSECGHALIITGFSDTRSGIYRCPSRNENRCNAKGLSRKQTDGTLLALLSRIDRFDSDMTNTIDTLKLHREHISSNIEKLVQLSLEIEDLSAITSKLKQLKGELSQVDADIEKETQRLKSIDVGCLSDCDLTTKAGRIEAQLIIKSAVKEVVLNTAKRRCKVTFHNGKVIDLPITEDPSEDVTEAIQSLSEVTERGLIDVDEVII

SEQ ID NO: 22887 - DNA, 50 bp, Escherichia coli; identical to SEQ ID NO: 22697
  source 1..50: mol_type = genomic DNA

SEQ ID NO: 22888 - DNA, 40 bp, Escherichia coli; identical to SEQ ID NO: 5188
  source 1..40: mol_type = genomic DNA

SEQ ID NO: 22889 - DNA, 40 bp, Escherichia coli; identical to SEQ ID NO: 5189
  source 1..40: mol_type = genomic DNA

SEQ ID NO: 22890 - DNA, 50 bp, Escherichia coli; identical to SEQ ID NO: 5190
  source 1..50: mol_type = genomic DNA

SEQ ID NO: 22891 - protein, 507 aa, Escherichia coli
MKRVISYIRFSSERQAKGDSLRRQSKMVNDWLKAHPEYYLDQDLSFRDLGVSGFTGKHLKGGLGDFLTAIEKGLVKAGDTLLIESLDRLSRQAIDIASELLRRILRAGVDIVTLSDGEHYTRESLKDPLSLIKSILIMQRSHEESLRKSERIQAAWNRKKELISEGIKISKRCPAWLKLNDDRKSFSVIPEKVETVKRCFQLRLEGKSIWEIVRTLNAEGRQTLNQHKAGSFGQTSVQDLLKNRSVIGYFTPKGCEEISGYYPAIIDETTFYKVQQLSYARYGRKPASDKPMAVNLFKGVIRCSECGHALIITGFSDTRNGIYRCPLRNENRCSAKGLSRKQTDGTLLALLSRLDRFDSDMTNVIDTLKLHREHISSNIEKLVQLSLEIEDLNAITNKLKQLKNELSQVDADIEKETQRLKSIDTGSLSDCDLSTKAGRIEAQLIIRSAVKEVVLNTAKRRCKVTFHNGKAITLPITENPSEDVTEAIQSLSEVTERGLIDVDVVEI

SEQ ID NO: 22892 - DNA, 50 bp, Escherichia coli; identical to SEQ ID NO: 22697
  source 1..50: mol_type = genomic DNA

SEQ ID NO: 22893 - DNA, 40 bp, Escherichia coli; identical to SEQ ID NO: 5188
  source 1..40: mol_type = genomic DNA

SEQ ID NO: 22894 - DNA, 40 bp, Escherichia coli; identical to SEQ ID NO: 5189
  source 1..40: mol_type = genomic DNA

SEQ ID NO: 22895 - DNA, 50 bp, Escherichia coli; identical to SEQ ID NO: 5190
  source 1..50: mol_type = genomic DNA

SEQ ID NO: 22896 - protein, 507 aa, Escherichia coli
MKRVISYIRFSSERQAKGDSLRRQSKMVNDWLKAHPEYYLDQDLSFRDLGVSGFTGKHLKGGLGDFLTAIEKGLVKAGDTLLIESLDRLSRQDIDIASELLRRILRAGVDIVTLSDGEHYTRESLKDPLALIKSILIMQRAHEESLRKAERIQAAWDAKKEAAKAGIKISKRCPAWLKLNDDRKTFSVIPEKVETVRRCFQLRLEGKSIWEIVRTLNDEGHQTLNQYKAGKFGQTSVQDLLKNRSVIGYFTPKGCEEIAGYFPPIIPETDFYKVQQLSYSRYGRKPASDKPLSVNLFKGVIRCSECGHALIITGFSDTRNGIYRCPLRNENRCSAKGLSRKQTDGTLLALLSRIDRFDSDMTNTIDTLKLHREHISSNIEKLVQLSLEIEDLSAITSKLKQLKGELSQVNADIEKETQRLKSIDVGCLSDCDLTTKAGRIEAQLIIKSAVKEVILNTAKRRCKVTFHNGKVIDLPITEDPSENVTEAIQSLSEVTERGLIDVDVVEI

SEQ ID NO: 22897 - DNA, 50 bp, Escherichia coli; identical to SEQ ID NO: 22697
  source 1..50: mol_type = genomic DNA

SEQ ID NO: 22898 - DNA, 40 bp, Escherichia coli; identical to SEQ ID NO: 5188
  source 1..40: mol_type = genomic DNA

SEQ ID NO: 22899 - DNA, 40 bp, Escherichia coli; identical to SEQ ID NO: 5189
  source 1..40: mol_type = genomic DNA

SEQ ID NO: 22900 - DNA, 50 bp, Escherichia coli; identical to SEQ ID NO: 5190
  source 1..50: mol_type = genomic DNA

SEQ ID NO: 22901 - protein, 507 aa, Escherichia coli
MKRVISYIRFSSERQAKGDSLRRQSKMVNDWLKAHPEYYLDQDLSFRDLGVSGFTGKHLKGGLGDFLTAIEKGLVKAGDTLLIESLDRLSRQAVDRASELLRNILRSGVDVVTLSDGEHYTSESLKDPLALIKSILIMQRAHEESLRKSERIQAAWNRKKELISEGIKISKRCPAWLRLNDDRKSFSVIPEKVETVKRCFQLRLEGKSIWEIVRTLNDEGHQTLNQHKAGSFGQSSVQDLLKNRSVIGYFTPKGCEEISGYFPPIIPETDFYKVQQLSYSRYGRKPASDKPLSVNLFKGVIRCSECGHALIITGFSDTRNGIYRCPLRNENRCSAKGLSRKQTDGTLLTLLSRLDRFDSDTTNTIDMLRLHREHISSNIEKLVQLSLEIEDLSAITIKLKQLKGELSQVDADIEKETQRLKSIDVGCLSDCDLTTKAGRIEAQLIIKSAVKEVVLNTAKRRCKVTFHNGKAITLPITENPSEDVTEAIQSLSEVTERGLIDVDEVII

SEQ ID NO: 22902 - DNA, 50 bp, Escherichia coli; identical to SEQ ID NO: 22697
  source 1..50: mol_type = genomic DNA

SEQ ID NO: 22903 - DNA, 40 bp, Escherichia coli; identical to SEQ ID NO: 5188
  source 1..40: mol_type = genomic DNA

SEQ ID NO: 22904 - DNA, 40 bp, Escherichia coli; identical to SEQ ID NO: 5189
  source 1..40: mol_type = genomic DNA

SEQ ID NO: 22905 - DNA, 50 bp, Escherichia coli; identical to SEQ ID NO: 5190
  source 1..50: mol_type = genomic DNA

SEQ ID NO: 22906 - protein, 507 aa, Escherichia coli
MKRVISYIRFSSERQAKGDSLRRQSKMVNDWLKAHPEYYLDQDLSFRDLGVSGFTGKHLKGGLGDFLTAIEKGLVKAGDTLLIESLDRLSRQDVDQASELLRNILRSGVDVVTLSDGEHYTRESLKDPLALIKSILIMQRSHEESLRKSERIQAAWDAKKEAAKAGIKISRRCPAWLKLNDDRKSFSVIPEKVETVRRCFQLRLEGKSIWEIVRILNDEGHQTLNQYKAGKFGQTSVQDLLKNRSVIGYFTPKGCEEIAGYFPPIIPETDFYKVQQLSYSRYGRKPASDKPLSVNLFKGVIRCSECGHALIITGFSDTRSGIYRCPSRNENRCNAKGLSRKQTDGTLLALLSRIDRFDSDMTNTIDTLKLHREHISSNIEKLVQLSLEIEDLSAITSKLKQLKGELSQVDADIEKETQRLKSIDVGCLSDCDLTTKAGRIEAQLIIKSAVKEVVLNTAKRRCKVTFHNGKVIDLPITENPSEDVTEAIQSLSEVTERGLLDVDEVII

SEQ ID NO: 22907 - DNA, 50 bp, Escherichia coli; identical to SEQ ID NO: 22697
  source 1..50: mol_type = genomic DNA

SEQ ID NO: 22908 - DNA, 40 bp, Escherichia coli; identical to SEQ ID NO: 5188
  source 1..40: mol_type = genomic DNA

SEQ ID NO: 22909 - DNA, 40 bp, Escherichia coli; identical to SEQ ID NO: 5189
  source 1..40: mol_type = genomic DNA

SEQ ID NO: 22910 - DNA, 50 bp, Escherichia coli; identical to SEQ ID NO: 5190
  source 1..50: mol_type = genomic DNA

SEQ ID NO: 22911 - protein, 507 aa, Escherichia coli; identical to SEQ ID NO: 22751

SEQ ID NO: 22912 - DNA, 50 bp, Escherichia coli; identical to SEQ ID NO: 22697
  source 1..50: mol_type = genomic DNA

SEQ ID NO: 22913 - DNA, 40 bp, Escherichia coli; identical to SEQ ID NO: 21333
  source 1..40: mol_type = genomic DNA

SEQ ID NO: 22914 - DNA, 40 bp, Escherichia coli; identical to SEQ ID NO: 22799
  source 1..40: mol_type = genomic DNA

SEQ ID NO: 22915 - DNA, 50 bp, Escherichia coli; identical to SEQ ID NO: 5190
  source 1..50: mol_type = genomic DNA

SEQ ID NO: 22916 - protein, 507 aa, Escherichia coli
MKRVISYIRFSSERQAKGDSLRRQSKMVNDWLKAHPEYYLDQDLSFRDLGVSGFTGKHLKGGLGDFLTAIEKGLVKAGDTLLIESLDRLSRQNVDRASELLRNILRSGVDVVTLSDGEHYTKESLRDPLSLIKSILIMQRSHEESLRKSERIQAAWNRKKELISEGIKISRRCPAWLKLNDDRKSFSIIPEKVETVKRCFQLRLEGKSIWEIVRTLNDEGRQTLNQHKAGSFGQSSVQDLLKNRSVIGYFTPKGCEEIAGYYPAIIDETTFYKVQQLSYARYGRKPASDKPLSVNLFKGVIRCSECGHALIITGFSDTRSGIYRCPLRNENRCSAKGLSRKQTDGTLLALLSRLDRFDSDMTNTIDTLKLHREHISSNIEKLVQLSLEIEDLSAITSKLKQLKGELSQVDADIEKETQRLKSIDVGCLSDCDLTTKAGRIEAQLIIKSAVKEVVLNTAKRRCKVTFHNGKSITLPITENPSEDVTEAIQSLSEVTERGLIDVDEVII

SEQ ID NO: 22917 - DNA, 50 bp, Escherichia coli; identical to SEQ ID NO: 22697
  source 1..50: mol_type = genomic DNA

SEQ ID NO: 22918 - DNA, 40 bp, Escherichia coli; identical to SEQ ID NO: 5188
  source 1..40: mol_type = genomic DNA

SEQ ID NO: 22919 - DNA, 40 bp, Escherichia coli; identical to SEQ ID NO: 5189
  source 1..40: mol_type = genomic DNA

SEQ ID NO: 22920 - DNA, 50 bp, Escherichia coli; identical to SEQ ID NO: 5190
  source 1..50: mol_type = genomic DNA

SEQ ID NO: 22921 - protein, 507 aa, Escherichia coli
MKRVISYIRFSSERQAKGDSLRRQSKMVNDWLKAHPEYYLDQDLSFRDLGVSGFTGKHLKGGLGDFLTAIEKGLVKAGDTLLIESLDRLSRQNVDRASELLRNILRSGVDVVTLSDGEHYTRESLKDPLSLIKSILIMQRSHEESLRKSERIQAAWNRKKELISEGIKISKRCPAWLKLNDDRKSFSVIPEKVETVRRCFQLRLEGKSIWEIVRTMNAEGHQTLNQYKAGSFGQTSVQDLLKNRSVIGYFTPKGCEEISGYYPAIIDETTFYKVQQLSYARYGRKPASDKPLSVNLFKGVIRCSECGHALIITGFSDTRSGIYRCPLRNENRCNAKGLSRKQTDSTLLALLSRLDRFDSDMTNTIDTLKLHREHISSNIEKLVQLSLEIEDLSAITSKLKQLKNELSQVDADIEKETQRLKSIDVGCLSDCDLTTKAGRVEAQLIIKSAVKEVVLNTAKRRCKVTFHNGKSITLPITENPSEDVTEAIQSLSEVTERGLIDVDEVII

SEQ ID NO: 22922 - DNA, 50 bp, Escherichia coli; identical to SEQ ID NO: 22697
  source 1..50: mol_type = genomic DNA

SEQ ID NO: 22923 - DNA, 40 bp, Escherichia coli; identical to SEQ ID NO: 5188
  source 1..40: mol_type = genomic DNA

SEQ ID NO: 22924 - DNA, 40 bp, Escherichia coli; identical to SEQ ID NO: 5189
  source 1..40: mol_type = genomic DNA

SEQ ID NO: 22925 - DNA, 50 bp, Escherichia coli; identical to SEQ ID NO: 5190
  source 1..50: mol_type = genomic DNA

SEQ ID NO: 22926 - protein, 507 aa, Escherichia coli
MKRVISYIRFSSERQAKGDSLRRQSKMVNDWLKAHPEYYLDQDLSFRDLGVSGFTGKHLKGGLGDFLTAIEKGLVKAGDTLLIESLDRLSRQDVDQASELLRNILRSGVDVVTLSDGEHYTKESLKDPLSLIKSILIMQRAHEESLRKSERIQAAWDAKKEAAKAGIKISRRCPAWLKLNDDRKSFSIIPEKVETVKRCFQLRLEGKSIWEIVRTLNDEDRQTLNQHKAGKFGQTSVQDLLKNRSVIGYFTPKGCEEIAGYYPAIIDETTFYKVQQLSYARYGRKPASDKPLSVNLFKGVIRCSECGHALIITGFSDTRSGIYRCPLRNENRCSAKGLSRKQTDGTLLALLSRLDRFDSDTTNTVDTLKLHREHISSNIEKLVQLSLEIEDLNAITNKLKQLKNELSQVDADIEKETQRLKSIDVGCLSDCDLTTKAGRIEAQLIIKSAVKEVILNTAKRRCKVTFHNGKVIDLPITENPSEDVTEAIQSLSEVTERGLIDVDVVAI

SEQ ID NO: 22927 - DNA, 50 bp, Escherichia coli; identical to SEQ ID NO: 22697
  source 1..50: mol_type = genomic DNA

SEQ ID NO: 22928 - DNA, 40 bp, Escherichia coli; identical to SEQ ID NO: 5188
  source 1..40: mol_type = genomic DNA

SEQ ID NO: 22929 - DNA, 40 bp, Escherichia coli; identical to SEQ ID NO: 5189
  source 1..40: mol_type = genomic DNA

SEQ ID NO: 22930 - DNA, 50 bp, Escherichia coli; identical to SEQ ID NO: 5190
  source 1..50: mol_type = genomic DNA

SEQ ID NO: 22931 - protein, 507 aa, Escherichia coli
MKRVISYIRFSSERQAKGDSLRRQSKMVNDWLKAHPEYYLDQDLSFRDLGVSGFTGKHLKGGLGDFLTAIEKGLVKAGDTLLIESLDRLSRQDIDIASELLRRILRAGVDIVTLSDGEHYTRESLKDPLALIKSILIMQRAHEESLRKAERIQAAWDAKKEAAKAGIKISKRCPAWLKLNDDRKTFSVIPEKVETVRRCFQLRLEGKSIWEIVRTLNDEGHQTLNQYKAGKFGQTSVQDLLKNRSVIGYFTPKGCEEIAGYFPPIIPETDFYKVQQLSYARHGRKPASAKPLSVNLFKGVIRCSECGHALIITGFSDTRNGIYRCPLRNENRCSAKGLSRKQTDGTLLALLSRLDRFDSDMTNTIDTLKLHREHISSNIEKLVQLSLEIEDLSAITSKLKQLKGELSQVDADIEKETQRLKSIDVGCLSDCDLTTKAGRIEAQLIIKSAVKEVVLNTAKRRCKVTFHNGRAITLPITENPSEDVTEAIQSLSEVTERGLIDVDVVEI

SEQ ID NO: 22932 - DNA, 50 bp, Escherichia coli; identical to SEQ ID NO: 22697
  source 1..50: mol_type = genomic DNA

SEQ ID NO: 22933 - DNA, 40 bp, Escherichia coli; identical to SEQ ID NO: 5188
  source 1..40: mol_type = genomic DNA

SEQ ID NO: 22934 - DNA, 40 bp, Escherichia coli; identical to SEQ ID NO: 5189
  source 1..40: mol_type = genomic DNA

SEQ ID NO: 22935 - DNA, 50 bp, Escherichia coli; identical to SEQ ID NO: 5190
  source 1..50: mol_type = genomic DNA

SEQ ID NO: 22936 - protein, 507 aa, Escherichia coli
MKRVISYIRFSSERQAKGDSLRRQSKMVNDWLKAHPEYYLDESLTFRDLGVSGFTGKHLKGGLGDFLTAIEKGLVKAGDTLLIESLDRLSRQDIDIASELLRRILRAGVDIVTLSDGEHYTRESLKDPLALIKSILIMQRAHEESLRKAERIQAAWDAKKEAAKAGIKISKRCPAWLKLNDDRKTFSVIPEKVETVRRCFQLRLEGKSIWEIVRTLNDEGHQTLNQYKAGKFGQTSVQDLLKNRSVIGYFTPKGCEEIAGYFPPIIPETDFYKVQQLSYSRYGRKPASDKPLSVNLFKGVIRCSECGHALIITGFSDTRNGIYRCPLRNENRCSAKGLSRKQTDGTLLALLSRIDRFDSDTTNTIDTLKLHREHISSNIEKLVQLSLEIEDLSAITIKLKQLKNELSQVDADIEKETQRLKSIDVGCLSDCDLTTKAGRIEAQLIIKSAVKEVVLNTAKRRCKVTFHNGKSITLPITENPSEDVTEAIQSLSEVTERGLIDVDEVII

SEQ ID NO: 22937 - DNA, 50 bp, Escherichia coli; identical to SEQ ID NO: 22697
  source 1..50: mol_type = genomic DNA

SEQ ID NO: 22938 - DNA, 40 bp, Escherichia coli; identical to SEQ ID NO: 5188
  source 1..40: mol_type = genomic DNA

SEQ ID NO: 22939 - DNA, 40 bp, Escherichia coli; identical to SEQ ID NO: 5189
  source 1..40: mol_type = genomic DNA

SEQ ID NO: 22940 - DNA, 50 bp, Escherichia coli; identical to SEQ ID NO: 5190
  source 1..50: mol_type = genomic DNA

SEQ ID NO: 22941 - protein, 507 aa, Escherichia coli
MKRVISYIRFSSERQAKGDSLRRQSKMVNDWLKAHPEYYLDQDLSFRDLGVSGFTGKHLKGGLGDFLTAIEKGLVKAGDTLLIESLDRLSRQDIDIASELLRRILRAGVDIVTLSDGEHYTRESLKDPLALIKSILIMQRAHEESLRKAERIQAAWDAKKEAAKAGIKISKRCPAWLKLNDDRKTFSVIPEKVETVRRCFQLRLEGKSIWEIVRTLNDEGHQTLNQYKAGKFGQTSVQDLLKNRSVIGYFTPKGCEEISGYYPAIIDETTFYKVQQLSYARYGRKPASDKPMAVNLFKGVIRCSECGHALIITGFSDTRNGIYRCPLRNENRCSAKGLSRKQTDGTLLALLSRLDRFDSDMTNTIDTLKLHREHISSNIEKLVQLSLEIEDLSAITSKLRQLKNELSQVDADIEKETQRLKSIDVGCLSDCDLTTKAGRIEAQLIIKSAVKEVVLNTAKRRCKVTFHNGKTITLPITENPSDNVTEAIQSLSEVTERGLIDVDEVII

SEQ ID NO: 22942 - DNA, 50 bp, Escherichia coli; identical to SEQ ID NO: 22697
  source 1..50: mol_type = genomic DNA

SEQ ID NO: 22943 - DNA, 40 bp, Escherichia coli; identical to SEQ ID NO: 5188
  source 1..40: mol_type = genomic DNA

SEQ ID NO: 22944 - DNA, 40 bp, Escherichia coli; identical to SEQ ID NO: 5189
  source 1..40: mol_type = genomic DNA

SEQ ID NO: 22945 - DNA, 50 bp, Escherichia coli; identical to SEQ ID NO: 5190
  source 1..50: mol_type = genomic DNA

SEQ ID NO: 22946 - protein, 507 aa, Escherichia coli
MKRVISYIRFSSERQAKGDSLRRQSKMVNDWLKAHPEYYLDQDLSFRDLGVSGFTGKHLKGGLGDFLTAIEKGLVKAGDTLLIESLDRLSRQDIDIASELLRRILRAGVDIVTLSDGEHYTRESLKDPLALIKSILIMQRAHEESLRKAERIQAAWDAKKEAAKAGIKISKRCPAWLKLNDDRKSFSVIPEKVETVRRCFQLRLEGKSIWEIVRILNDEGHQTLNQYKAGKFGQTSVQDLLKNRSVIGYFTPKGCEEIAGYFPPIIPETDFYKVQQLSYSRYGRKPASDKPLSVNLFKGVIRCSECGHALIITGFSDTRSGIYRCPSRNENRCNAKGLSRKQTDGTLLALLSRIDRFDSDMTNTIDTLKLHREHISSNIEKLVQLSLEIEDLSAITSKLKQLKGELSQVDADIEKETQRLKSIDVGCLSDCDLTTKAGRIEAQLIIKSAVKEVVLNTAKRRCKVTFHNGKVIDLPITEDPSEDVTEAIQSLSEVTERGLIDVDEVII

SEQ ID NO: 22947 - DNA, 50 bp, Escherichia coli; identical to SEQ ID NO: 22697
  source 1..50: mol_type = genomic DNA

SEQ ID NO: 22948 - DNA, 40 bp, Escherichia coli; identical to SEQ ID NO: 5188
  source 1..40: mol_type = genomic DNA

SEQ ID NO: 22949 - DNA, 40 bp, Escherichia coli; identical to SEQ ID NO: 5189
  source 1..40: mol_type = genomic DNA

SEQ ID NO: 22950 - DNA, 50 bp, Escherichia coli; identical to SEQ ID NO: 5190
  source 1..50: mol_type = genomic DNA

SEQ ID NO: 22951 - protein, 507 aa, Escherichia coli
MKRVISYIRFSSERQAKGDSLRRQSKMVTDWLKAHPEYYLDQDLSFRDLGVSGFTGKHLKGGLGDFLTAIEKGLVKAGDTLLIESLDRLSRQDIDIASELLRNILRSGVDVVTLSDGEHYTRESLKDPLSLIKSILIMQRAHEESLRKSERIQAAWNRKKELISEGIKVSRRCPAWLKLNDDRKSFSVIPEKVETVKRCFQLRLEGKSIWEIVRTLNDEGRQTLNQHKAGSFGQSSVQDLLKNRSVIGYFTPKGCEEIAGYYPAIIDETTFYKVQQLSYARYGRKPASDKPLSVNLFKGVIRCSECGHALIITGFSDTRSGIYRCPLRNENRCSAKGLSRKQTDGTLLALLSRLDRFDSDTTNTIDTLKLHREHISSNIEKLVQLSLEIEDLSAITSKLRQLKNELSQVDADIEKETQRLKSIDVGCLSDCDLSTKAGRIEAQLIIRSAVKEVVLNTAKRRCKVTFHNGKVIDLPITENPSEDVTEAIQSLSEVTERGLIDVDEVII

SEQ ID NO: 22952 - DNA, 50 bp, Escherichia coli; identical to SEQ ID NO: 22697
  source 1..50: mol_type = genomic DNA

SEQ ID NO: 22953 - DNA, 40 bp, Escherichia coli; identical to SEQ ID NO: 5188
  source 1..40: mol_type = genomic DNA

SEQ ID NO: 22954 - DNA, 40 bp, Escherichia coli; identical to SEQ ID NO: 5189
  source 1..40: mol_type = genomic DNA

SEQ ID NO: 22955 - DNA, 50 bp, Escherichia coli; identical to SEQ ID NO: 5190
  source 1..50: mol_type = genomic DNA

SEQ ID NO: 22956 - protein, 507 aa, Escherichia coli
MKRVISYIRFSSERQAKGDSLRRQSKMVNDWLKAHPEYYLDQDLSFRDLGVSGFTGKHLKGGLGDFLTAIEKGLVKAGDTLLIESLDRLSRQNVDRASELLRNILRSGVDVVTLSDGEHYTRESLKDPLSLIKSILIMQRSHEESLRKSERIQAAWNRKKELISEGIKISKRCPAWLKLNDDRKSFSVIPEKVETVKRCFQLRLEGKSIWEIVRTMNAEGYQTLHQHKAGSFGQSSVQDLLKNRSVIGYFTPKGCEEIAGYYPAIIDETTFYKVQQLSYARYGRKPASDKPLSVNLFKGVIRCSECGHALIITGFSDTRSGIYRCPLRNENRCSAKGLSRKQTDGTLLALLSRLDRFDSDMTNVIDTLKLHREHISSNIEKLVQLSLEIEDLSAITSKLKQLKNELSQVDADIEKETQRLKSIDVGCLSDCDLSTKAGRIEAQLIIRSAVKEVVLNTAKRRCKVTFHNGKEIDLPITETPSEDVTEAIQSLSEVTERGLIDVDEVIV

SEQ ID NO: 22957 - DNA, 50 bp, Escherichia coli; identical to SEQ ID NO: 22697
  source 1..50: mol_type = genomic DNA

SEQ ID NO: 22958 - DNA, 40 bp, Escherichia coli; identical to SEQ ID NO: 5188
  source 1..40: mol_type = genomic DNA

SEQ ID NO: 22959 - DNA, 40 bp, Escherichia coli; identical to SEQ ID NO: 5189
  source 1..40: mol_type = genomic DNA

SEQ ID NO: 22960 - DNA, 50 bp, Escherichia coli; identical to SEQ ID NO: 5190
  source 1..50: mol_type = genomic DNA

SEQ ID NO: 22961 - protein, 507 aa, Escherichia coli
MKRVISYIRFSSERQAKGDSLRRQSKMVNDWLKAHPEYYLDQDLSFRDLGVSGFTGKHLKGGLGDFLTAIEKGLVKAGDTLLIESLDRLSRQDIDIASELLRRILRAGVDIVTLSDGEHYTRESLKDPLALIKSILIMQRAHEESLRKAERIQAAWDAKKEAAKAGIKISKRCPAWLKLNDDRKTFSVIPEKVETVRRCFQLRLEGKSIWEIVRTLNDEGHQTLNQYKAGKFGQTSVQDLLKNRSVIGYFTPKGCEEIAGYFPPIIPETDFYKVQQLSYSRYGRKPASDKPLSVNLFKGVIRCSECGHALIITGFSDTRNGIYRCPLRNENRCSAKGLSRKQTDGTLLALLSRIDRFDSDMTNTIDTLKLHREHISSNIEKLVQLSLEIEDLSAITSKLKQLKGELSQVNADIEKETQRLKSIDVGCLSDCDLTTKAGRIEAQLIIKSAVKEVILNTAKRRCKVTFHNGKVIDLPITEDPSEDVTEAIQSLSEVTERGLIDVDEVII

SEQ ID NO: 22962 - DNA, 50 bp, Escherichia coli; identical to SEQ ID NO: 22697
  source 1..50: mol_type = genomic DNA

SEQ ID NO: 22963 - DNA, 40 bp, Escherichia coli; identical to SEQ ID NO: 5188
  source 1..40: mol_type = genomic DNA

SEQ ID NO: 22964 - DNA, 40 bp, Escherichia coli; identical to SEQ ID NO: 5189
  source 1..40: mol_type = genomic DNA

SEQ ID NO: 22965 - DNA, 50 bp, Escherichia coli; identical to SEQ ID NO: 5190
  source 1..50: mol_type = genomic DNA

SEQ ID NO: 22966 - protein, 507 aa, Escherichia coli
MKRVISYIRFSSERQAKGDSLRRQSKMVNDWLKAHPEYYLDQDLSFRDLGVSGFTGKHLKGGLGDFLTAIEKGLVKAGDTLLIESLDRLSRQDVDQASELLRNILRSGVDVVTLSDGEHYTKESLRDPLSLIKSILIMQRAHEESLRKAERIQAAWDAKKEAAKAGIKISRRCPAWLKLNDDRKSFSVIPEKVETVKRCFQLRLEGKSIWEIVRTLNAEGHQTLNQYKAGKFGQTSVQDLLKNRSVIGYFTPKGCEEISGYYPAIIDETTFYKVQQLSYARYGRKPASDKPMAVNLFKGVIRCSECGHALIITGFSDTRNGIYRCPLRNENRCSAKGLSRKQTDGTLLALLSRLDRFDSDMTNTIDTLKLHREHISSNIEKLVQLSLEIEDLSAITSKLRQLKNELSQVDADIEKETQRLKSIDVGCLSDCDLTTKAGRIEAQLIIKSAVKEVVLNTAKRRCKVTFHNGKVIDLSITENPSEDVTEAIQSLSEVTERGLIDVDEVII

SEQ ID NO: 22967 - DNA, 50 bp, Escherichia coli; identical to SEQ ID NO: 22697
  source 1..50: mol_type = genomic DNA

SEQ ID NO: 22968 - DNA, 40 bp, Escherichia coli; identical to SEQ ID NO: 5188
  source 1..40: mol_type = genomic DNA

SEQ ID NO: 22969 - DNA, 40 bp, Escherichia coli; identical to SEQ ID NO: 5189
  source 1..40: mol_type = genomic DNA

SEQ ID NO: 22970 - DNA, 50 bp, Escherichia coli; identical to SEQ ID NO: 5190
  source 1..50: mol_type = genomic DNA

SEQ ID NO: 22971 - protein, 507 aa, Escherichia coli
MKRVISYIRFSSERQAKGDSLRRQSKMVNDWLKAHPEYYLDQDLSFRDLGVSGFTGKHLKGGLGDFLTAIEKGLVKAGDTLLIESLDRLSRQDVDQASELLRNILRSGVDVVTLSDGEHYTRESLKDPLALIKSILIMQRSHEESLRKSERIQAAWNRKKELISEGIKISKRCPAWLKLNDDRKSFSVIPEKVETVKRCFQLRLEGKSIWEIVRTLNDEGHQTLNQYKAGSFGQTSVQDLLKNRSVIGYFTPKGCEEIADYYPAIIDETTFYKVQQLSYARYGRKPASDKPMAVNLFKGVIRCSECGHALIITGFSDTRNGIYRCPLRNENRCSAKGLSRKQTDGTLLTLLSRLDRFDSDTTNTIDTLKLHREHISSNIEKLVQLSLEIEDLSAITSKLKQLKNELSQVDADIEKETQRLKSIDVGCLSDCDLTTKAGRIEAQLIIKSAVKEVVLNTAKRRCKVTFHNGKVINLPITENPSDNVTEAIQSLSEVTERGLIDVDEVII

SEQ ID NO: 22972 - DNA, 50 bp, Escherichia coli; identical to SEQ ID NO: 22697
  source 1..50: mol_type = genomic DNA

SEQ ID NO: 22973 - DNA, 40 bp, Escherichia coli; identical to SEQ ID NO: 5188
  source 1..40: mol_type = genomic DNA

SEQ ID NO: 22974 - DNA, 40 bp, Escherichia coli; identical to SEQ ID NO: 5189
  source 1..40: mol_type = genomic DNA

SEQ ID NO: 22975 - DNA, 50 bp, Escherichia coli; identical to SEQ ID NO: 5190
  source 1..50: mol_type = genomic DNA

SEQ ID NO: 22976 - protein, 507 aa, Escherichia coli
MKRVISYIRFSSERQAKGDSLRRQSKMVNDWLKAHPEYYLDQDLSFRDLGVSGFTGKHLKGGLGDFLTAIEKGLVKAGDTLLIESLDRLSRQDVGQASELLRNILRSGVDVVTLSDGEHYTRESLKDPLALIKSILIMQRSHEESLRKSERIQAAWDAKKEAAKAGIKVSKRCPAWLKLNDDRKSFSVIPEKVETVKRCFQLRLEGKSIWEIVRTLNDEGHQTLNQYKAGKFGQTSVQDLLKNRSVIGYFTPKGCEEIAGYFPPIIPETDFYKVQQLSYSRYGRKPASDKPLSVNLFKGVIRCSECGHALIITGFSDTRSGIYRCPLRNENRCSAKGLSRKQTDGTLLALLSRLDRFDSDTTNTIDTLKLHREHISSNIEKLVQLSLEIEDLNAITNKLKQLKNELSQVDADIEKETQRLKSIDVGCLSDCDLSTKAGRIEAQLIIRSAVKEVVLNTAKRRCKVTFHNGKVIDLPITENPSEDVTEAIQSLSEVTERGLIDVDEVII

SEQ ID NO: 22977 - DNA, 50 bp, Escherichia coli; identical to SEQ ID NO: 22697
  source 1..50: mol_type = genomic DNA

SEQ ID NO: 22978 - DNA, 40 bp, Escherichia coli; identical to SEQ ID NO: 5188
  source 1..40: mol_type = genomic DNA

SEQ ID NO: 22979 - DNA, 40 bp, Escherichia coli; identical to SEQ ID NO: 5189
  source 1..40: mol_type = genomic DNA

SEQ ID NO: 22980 - DNA, 50 bp, Escherichia coli; identical to SEQ ID NO: 5190
  source 1..50: mol_type = genomic DNA

SEQ ID NO: 22981 - protein, 507 aa, Escherichia coli
MKRVISYIRFSSERQAKGDSLRRQSKMVNDWLKAHPEYYLDQDLSFRDLGVSGFTGKHLKGGLGDFLTAIEKGLVKAGDTLLIESLDRLSRQDVDQASELLRNILRSGVDVVTLSDGEHYTRESLKDPLALIKSILIMQRSHEESLRKSERIQAAWNRKKELISEGIKISKRCPAWLKLNDDRKSFSVIPEKVETVKRCFQLRLEGKSIWEIVRTLNDEGHQTLNQYKAGSFGQTSVQDLLKNRSVIGYFTPKGCEEIADYYPAIIDETTFYKVQQLSYARYGRKPASDKPMAVNLFKGVIRCSECGHALIITGFSDTRNGIYRCPLRNENRCSAKGLSRKQTDGTLLALLSRLDRFDSDTTNTIDTLKLHREHISSNIEKLVQLSLEIEDLSAITSKLKQLKNELSQVDADIEKETQRLKSIDVGCLSDCDLTTKAGRIEAQLIIKSAVKEVVLNTAKRRCKVTFHNGKVIDLPITENPSDNVTEAIQSLSEVTERGLIDVDEVII

SEQ ID NO: 22982 - DNA, 50 bp, Escherichia coli; identical to SEQ ID NO: 22697
  source 1..50: mol_type = genomic DNA

SEQ ID NO: 22983 - DNA, 40 bp, Escherichia coli; identical to SEQ ID NO: 5188
  source 1..40: mol_type = genomic DNA

SEQ ID NO: 22984 - DNA, 40 bp, Escherichia coli; identical to SEQ ID NO: 5189
  source 1..40: mol_type = genomic DNA

SEQ ID NO: 22985 - DNA, 50 bp, Escherichia coli; identical to SEQ ID NO: 5190
  source 1..50: mol_type = genomic DNA

SEQ ID NO: 22986 - protein, 507 aa, Escherichia coli; identical to SEQ ID NO: 22741

SEQ ID NO: 22987 - DNA, 50 bp, Escherichia coli; identical to SEQ ID NO: 22697
  source 1..50: mol_type = genomic DNA

SEQ ID NO: 22988 - DNA, 40 bp, Escherichia coli
  source 1..40: mol_type = genomic DNA
cggcgttaatcgggtgattttagacagccgcccgattcat

SEQ ID NO: 22989 - DNA, 40 bp, Escherichia coli
  source 1..40: mol_type = genomic DNA
cggcgttaatcgggtgattagagacagccgcccgattcat

SEQ ID NO: 22990 - DNA, 50 bp, Escherichia coli; identical to SEQ ID NO: 5190
  source 1..50: mol_type = genomic DNA

SEQ ID NO: 22991 - protein, 534 aa, Brevibacillus reuszeri
MMKLAVYARVSSDDQAERGTIENQLEFARKYADLHQLEVVKWYKDDGVTGTLPLDARPAGRDLLQDAKNGEIDLLLIYRLDRLGRSARIILNSVHELESDGVKIRSMTEPFDTGDPSGRFLLTILAGVADLERETIIERLWYGANRAARAGKWLGGIVPYGYRVNSEGYLEVCDDLLPNTDMTESGVVRLIFHMLANKGHSCIKVADYLNALGVPPSYVKDDRKITRGKRKENTAGIWRPARIRGIITNPTYKGIHEYGKRSTRQREVIEREVPAIVDVETWEKAQQVLRDNQLEAVRNTKNSYLLRSLMKCQCCGLTYVGIHYYRSNRTLKGYYVCTGKQAYKGPMQGKCKSKNLPQDWIEDLVWQDCLAFINQPGEALQEIAAAMEVKESEKSDLESEATLIQNSIDDKDVERQSILDLFRKNIITFTDLEKQIQKINYEKDVLEQRLKEIRSSLKVDRDFSTKITNAFQLLTTLRNKLDDNPSFETRREIVKALVERIQVHSFQDEYRKRPRATITVKYSFSKDIIYRDRD

SEQ ID NO: 22992 - DNA, 50 bp, Brevibacillus reuszeri
  source 1..50: mol_type = genomic DNA
ttccaaggatattatctacagggacaagggtgaagataacacccttggaa

SEQ ID NO: 22993 - DNA, 40 bp, Brevibacillus reuszeri
  source 1..40: mol_type = genomic DNA
agcgaaaaatccgcaaggacagggattgcacgaaccaatg

SEQ ID NO: 22994 - DNA, 40 bp, Brevibacillus reuszeri
  source 1..40: mol_type = genomic DNA
agcgaaaaatccgcaaggagcgggattgcacgaaccaatg

SEQ ID NO: 22995 - DNA, 50 bp, Brevibacillus reuszeri
  source 1..50: mol_type = genomic DNA
gccaaagaacttcatgaagtgggagcagggtgaaaacattccccttggaa

SEQ ID NO: 22996 - protein, 576 aa, Rhizobium phaseoli
MKPKAYSYVRMSTDVQLKGDSLRRQTEESKRYCDENGLELVEDFKLQDIGISAYHGKNVAQGALGRFLALAQDGSIPKGSFLIVESLDRISREKPETATALFLQILQSGIHIVTLTDRHVYKSGSGNFTDIIVSVVIMARAYEESQTKSLRVGAAWENKRKNIHEKKLTQVAPAWLRLSEDRKAYDVIPERLAVLQAIFNHADNGKGSYQIARKLNLDSVPTFAPSQGWHESYVSKLLTNRAVLGEFQPHRYIEAKRTQAGDPIADYFPAVISRDQFERIQAGRAVRRNRGSGRKGRNNINLFSGVATCGYCNGKTMIVDKGAGPKGGIYIRCDNARRGNECWAGLWPLKHLETAFLFFVKELDLKSLIVDSSAKDARLLAEGQVAAISNELVTKKKMRDGAFELLSDDSIGSDYIKVRIADLSGEIQRLEIELAELNTRAKRELASQADSDLDDQILIDAISAGPKDNLDSRIAVADWIRRNVQQMKIYPDGRDGPQREIDRMKVSLDPEVAQLLNASISYAKRHDALIDGSHRHFSVAFEGHRFRAVEVDRDDPTKHIVMTFADDDTWGTDRAS

SEQ ID NO: 22997 - DNA, 50 bp, Rhizobium phaseoli
  source 1..50: mol_type = genomic DNA
gcctcattaatccacctcataatccagatgttgaggtggattaatttatg

SEQ ID NO: 22998 - DNA, 40 bp, Rhizobium phaseoli
  source 1..40: mol_type = genomic DNA
gcccggaaagatcggcatgcagatcgtcggactgcctgat

SEQ ID NO: 22999 - DNA, 40 bp, Rhizobium phaseoli; identical to SEQ ID NO: 22998
  source 1..40: mol_type = genomic DNA

SEQ ID NO: 23000 - DNA, 50 bp, Rhizobium phaseoli
  source 1..50: mol_type = genomic DNA
gcctaattattaatcctcttaatacacatgtttatcattacaaatttatc

SEQ ID NO: 23001 - protein, 454 aa, Macrococcus caseolyticus
MYTALYLRVSTMEQADNNFSLAAQESKLRAYAEAKTLSNIKVFTDPGYSGSNMNRPALAQLLESVKRNQVSNILVYKLDRLSRSQKDTLNIIEDYLLPHDTNLISLSESFDTSTSFGRAMIGILSVFAQLERENFKERSRMGMIQRAKEGKISGYGGKVFGYDYVNGELIINDYEAMIVRKIYDYYVKGSGVTKIFMRLQKEHPNVIKSSHHIWQILRRRTYTGDFDYMDESYEGIHEAIIDKSIYDQVQVLRDSRNSKQKSDAVYMLTGLTYCKCCGYKMQGTVSSSTYKDKRYERRYYKCNTNKRNKVNHNPFRCNTKSIKKDELEHAVISQIKALDIDLKIDDIQTNTIDDKAIDKRLNELEKQSEKLLNLYIEDSISKSILDKKLEEINAEKEALQNTEIEENQSKLQALELAKEFNFDEATDYELQNLIHLLVKRIDVDNSSVDIQFVV

SEQ ID NO: 23002 - DNA, 50 bp, Macrococcus caseolyticus
  source 1..50: mol_type = genomic DNA
tttagtgtttaatttattagtacgaacataacgataatataaacacaaat

SEQ ID NO: 23003 - DNA, 40 bp, Macrococcus caseolyticus
  source 1..40: mol_type = genomic DNA
ttgtgcgattccgaccgtgaatggattaatcatgccacct

SEQ ID NO: 23004 - DNA, 40 bp, Macrococcus caseolyticus
  source 1..40: mol_type = genomic DNA
ttgtgcgattccgaccgtgagtggattaatcatgccacct

SEQ ID NO: 23005 - DNA, 50 bp, Macrococcus caseolyticus
  source 1..50: mol_type = genomic DNA
tttatggttgcttttattagtaatagcaaaacactgaaaacaacacatat

SEQ ID NO: 23006 - protein, 474 aa, Gemella morbillorum
MKRVALYMRVSTQEQAENGNSLEFQKEKLEAYCKLHEYKIVGEYVDAGVSGAKFNRPALDRLKDDVEKIDIVLIYKLDRLSRSIKDTMLLIEDFFKPNNVDLISLSENFDTSQAIGMATVGMLSTFAQLERDTIAQRMMAGKVQSVKNGNYINNAPFGYVKKDGKLVKDEKTKECVEFIFEKLLDGYSTTQVTKLVELNNYSYLMESLWHYATINRIAKNIAYAGHTLLMGTLVENTHEPYISDKQRKDIIDMLKKRSQATSKTKNNTYASPYRGLINCPTCHRKLSCTRQIRKKSTTYSYRCVYCQRSNAITRVVNHKLIDKSLITYLKNLDFSLEFSEEKKKVLKPIDFNKEYIKLENKRKKIQKAWFNELITDEELKEHQDKIQLAYDELKKEENKILIFKENSDVRNKIKNIILNFSELIDNLSIEDKVSFLNSFIDSIDIEFANIRDLSTENSKRVKMDVVVKKVNYKT

SEQ ID NO: 23007 - DNA, 50 bp, Gemella morbillorum
  source 1..50: mol_type = genomic DNA
aaatatcactcttacatttacattgagatgcatgtgtaagagtgatgttt

SEQ ID NO: 23008 - DNA, 40 bp, Gemella morbillorum
  source 1..40: mol_type = genomic DNA
acgagcgtttacgtttattgagattaacgtgaacgctttt

SEQ ID NO: 23009 - DNA, 40 bp, Gemella morbillorum
  source 1..40: mol_type = genomic DNA
acgagcgtttacgtttattaggattaacgtgaacgctttt

SEQ ID NO: 23010 - DNA, 50 bp, Gemella morbillorum
  source 1..50: mol_type = genomic DNA
acaatccacagtatcattaccattagcatgcatgtgggcctgtgttcttt

SEQ ID NO: 23011 - protein, 589 aa, Cronobacter sakazakii; identical to SEQ ID NO: 12416

SEQ ID NO: 23012 - DNA, 50 bp, Cronobacter sakazakii; identical to SEQ ID NO: 17197
  source 1..50: mol_type = genomic DNA

SEQ ID NO: 23013 - DNA, 40 bp, Cronobacter sakazakii
  source 1..40: mol_type = genomic DNA
tggcgtgaccatcggcaacaccgacggcaatattatcgat

SEQ ID NO: 23014 - DNA, 40 bp, Cronobacter sakazakii
  source 1..40: mol_type = genomic DNA
tggcgtgaccatcggcaacttcgacggcaatattatcgat

SEQ ID NO: 23015 - DNA, 50 bp, Cronobacter sakazakii
  source 1..50: mol_type = genomic DNA
agtacccatagagattcattgcattttaatgtaaaagtaaccaaatgaaa

SEQ ID NO: 23016 - protein, 504 aa, Klebsiella quasipneumoniae
MTLAFSYVRFSTKHQASGTSLERQVNASKLFCSQNGLTLSNQSYHDLGISGFKNVRRPELEQMLEAIQTGDIPSGSYILIEAIDRLSRKGISHTQDILKKILQYDVKVAFVGEDAKTLQGHILNKDSLNDLSSVILVALAADLAHKESLRKSKLVKASKAIAREKAADGEILPGKSVFYLDYDRKNKKYVFNKRVDLARKIIQMRLEGKGVRKIARILNEENIPGPTGKQWYQMSVKRLLKSPVLYGAYQTHQIIEEKYIPVSLIENYYPALIDYQTFSQIQFDDKRVSKGRPSRHKFSGVLYCECGAVLCRKVNTSVTKKGIKEYQYFNCFGAFESRCKNNKAIRDLHIPLEKAIDKLQIKTRSVKNIKNEQIIAKREKIDQLNKMLLELEMPPVSVLKTISALEKELQELLEQPDVQPPKSADIKTLVEIKDAEQYNLYLKRLVVRITIFQLNGPKNIRIKIEKTDGHYQSFIVNNGKIMFNADTKALQEHLHKLKEGTSDE

SEQ ID NO: 23017 - DNA, 50 bp, Klebsiella quasipneumoniae
  source 1..50: mol_type = genomic DNA
ttttgtcaaaatgaaaccgttcttcaggtaatagtatcattttacaaaat

SEQ ID NO: 23018 - DNA, 40 bp, Klebsiella quasipneumoniae; identical to SEQ ID NO: 21943
  source 1..40: mol_type = genomic DNA

SEQ ID NO: 23019 - DNA, 40 bp, Klebsiella quasipneumoniae
  source 1..40: mol_type = genomic DNA
ccctgacagaaatgtgccgaaggtaatagttctttcatat

SEQ ID NO: 23020 - DNA, 50 bp, Klebsiella quasipneumoniae
  source 1..50: mol_type = genomic DNA
tttttacaactgtatacacttcttaaagtattagtaggcactaacaaaac

SEQ ID NO: 23021 - protein, 521 aa, Streptococcus suis
MKKVITIEPAKQVSHKVDLPSFTKRRVAGYARVSTDHEGQTTSYEAQMKYYTDYINSRSDWEFVKMYSDEGISGTNTKARIGFQRMVEDALDGKIDLILTKSVSRFARNTVDSLSTVRKLKEAGVEIYFEKENIWTFDSKGELLITIMSSLAQEESRSISENVTWGRRRQLAEGQVTFSYSQVLGFKKSDTGGFEIDHEEAKIVRYIFHQVLLGNNPNKIARELTAQGIPTPQGKRKWSYGTVKRMLRNEKYKGDALLQKSFTTNFLTKSTKSNEGELPQYYVENSHEAIIKREVFDLVQVELDKLEKKRQTSNIFTGRLFCGDCGGAFGSKVWHSTSKYKRTIYQCNAKYKGEHKCQTPHVTEEEIKAWFLSAINQLLSNRDEIIANTELLIDMAKNTSPLENKIDDLEKKLETIRQDIEDLVDRNAREAQNQELYQEQYDILVTVYQEKQKELQETRSSLEEQKSKRISLDGFIQQLKEQDDLITDFNQELWQTSVERLDIKVGKKISLTFKNGVRIDL

SEQ ID NO: 23022 - DNA, 50 bp, Streptococcus suis
  source 1..50: mol_type = genomic DNA
tgtatgataaaattaatcgcaacagaaatcggaataaggaaattgataca

SEQ ID NO: 23023 - DNA, 40 bp, Streptococcus suis
  source 1..40: mol_type = genomic DNA
agttcgattaattgctacagacatggatgggaccttttta

SEQ ID NO: 23024 - DNA, 40 bp, Streptococcus suis
  source 1..40: mol_type = genomic DNA
agttcgattaattgctacaaacatggatgggaccttttta

SEQ ID NO: 23025 - DNA, 50 bp, Streptococcus suis
  source 1..50: mol_type = genomic DNA
tatagtataatcaaaatcacaaccaaaatcaggaaattacaattgatacc

SEQ ID NO: 23026 - protein, 542 aa, Pseudomonas fluorescens
MHNLQEVQSIMTVKNPLPRAFSDVFRDDETINVYSYIRFSSKAQALGFGEVRQLEQLNGFFEQYPQARQVEKYEDLGVSAFRGKNLKSGQLAKFVERIKSKEILPNALLLVESFDRISRMGGYDALELVVSIIQADCAIYTLFDNRLYSKRKKDSNVDISLIQNILERSNDESRAKSERISDAKARNLTKGENGGIITKRCPFWISFVDDKFVLNEHAKAVKRMTELCFDFGFQSIAKELNKENHPKKYTDSIVGKVLHKHAIYGSFLAMKNDENGNRTIVNKEIKNYYPAVIGESEFHRISEKLKERQDPKLAGRKSEEFRNILRGLVFCKCGSTFRYHAQKNYYVDLVCHASTVGQCKYAMPGKGIRHRYARIEEIFLAYQSLIPFHKIIVKNDDIKALEKEHQEVLGQIIIKEKALANNFSILEKASDSAQKYITNRIDEVSQELDKLKVDEHKLNLKISSLHLATKPDLNVMEIYRLLITEKGRIRINNFLHSQKIKLIITPVKKKFFALDIYHNNKHIDTIDVTPDGYLAHHKLHLK

SEQ ID NO: 23027 - DNA, 50 bp, Pseudomonas fluorescens
  source 1..50: mol_type = genomic DNA
attctacaaaaagtgccactcattgcaatgacaggaggcttttgtataaa

SEQ ID NO: 23028 - DNA, 40 bp, Pseudomonas fluorescens
  source 1..40: mol_type = genomic DNA
ttccagcatgccgatgacggcgttcatcggtgtgcgtatt

SEQ ID NO: 23029 - DNA, 40 bp, Pseudomonas fluorescens
  source 1..40: mol_type = genomic DNA
ttccagcatgccgatgacgccgttcatcggtgtgcgtatt

SEQ ID NO: 23030 - DNA, 50 bp, Pseudomonas fluorescens
  source 1..50: mol_type = genomic DNA
attctacataagttggaactaatgccaataatggcattattttgtataaa

SEQ ID NO: 23031 - protein, 542 aa, Pseudomonas veronii
MHNLQEVQSIMTVKNPLPRAFSDVFRDDETINVYSYIRFSSKAQALGFGEVRQLEQLNGFFEQYPQARQVEKYEDLGVSAFRGKNLKSGQLAKFVERIKSKEILPNALLLVESFDRISRMGGYDALELVVSIIQADCAIYTLFDNRLYSKRKKDSNVDISLIQNILERSNDESRAKSERISDAKARNLTKGENGGIITKRCPFWISFVDDKFVLNEHAKAVKRMTELCFDFGFQSIAKELNKENHPKKYTDSIVGKVLHKHAIYGSFLAMKNDENGNRTIVNKEIKNYYPAVIGESEFHRISEKLKERQDPKLAGRKSEEFRNILRGLVFCKCGSTFRYHAQKNYYVDLVCHASTVGQCKYAMPGKGIRHRYARIEEIFLAYQSLIPFHKIIVKNDDIKALEKEHQEVLGQIIIKEKALANNFSILEKASDSAQKYITNRIDEVSQELDKLKVDEHKLNLKISSLHLATKPDLNVMEIYRLLITEKGRIRINNFLHSQKIKLIITPVKKKFFALDIYHNNKHIDTIDVTPDGYLAHHKPHLK

SEQ ID NO: 23032 - DNA, 50 bp, Pseudomonas veronii; identical to SEQ ID NO: 23027
  source 1..50: mol_type = genomic DNA

SEQ ID NO: 23033 - DNA, 40 bp, Pseudomonas veronii
  source 1..40: mol_type = genomic DNA
ttcgagcatgccgatcaccgcgttcatcggggtgcggatt

SEQ ID NO: 23034 - DNA, 40 bp, Pseudomonas veronii
  source 1..40: mol_type = genomic DNA
ttcgagcatgccgatcaccccgttcatcggggtgcggatt

SEQ ID NO: 23035 - DNA, 50 bp, Pseudomonas veronii; identical to SEQ ID NO: 23030
  source 1..50: mol_type = genomic DNA

SEQ ID NO: 23036 - protein, 480 aa, Streptococcus equi
MTTNKVAIYVRVSTTNQAEEGYSIEEQKDKLSSYCNIKDWSIYNIYTDGGFSGSNTERPALEKLIKDAKKKKFDTVLVYKLDRLSRSQKDTLYLIEDIFLENNIDFVSLLENFDTSTPFGKAMVGILSVFAQLEREQIKERMQLGKLGRAKSGKSMMWAKVAYGYDYHIGTGEMTVNPWQSITVRSIYDWYLSGKSITKIRDALNENYPKSPAWSYRIVRQILCNPVYCGYNQYKGEVYKGNHEPIVSKKVFDKVQEELKVRQRKAAETGNPRPFQAKYMLSGIAQCGYCHAPLKLILGMIRKDGTRFMKYECYQRIPRKTKGVTVYNNNEKCNSGYYYKEDIEAYVLKEISRLQNDIDYLDEIFDNPETTTIDHDDYQKQIDELSNKLSRLNDLYIDNRITLEELQKRSAEFTTMRAFLEAEIENDPTLKQQERKEDMRNILSAEDIFSMDYERQKVMVRALINKVQVTADDVSIKWKI

SEQ ID NO: 23037 - DNA, 50 bp, Streptococcus equi
  source 1..50: mol_type = genomic DNA
taaagaattttactatcctacatttcaatgaaagatactaaatttcttga

SEQ ID NO: 23038 - DNA, 40 bp, Streptococcus equi; identical to SEQ ID NO: 5158
  source 1..40: mol_type = genomic DNA

SEQ ID NO: 23039 - DNA, 40 bp, Streptococcus equi
  source 1..40: mol_type = genomic DNA
taacaaaaccagaagcattcacagtaaagtgaaggcctga

SEQ ID NO: 23040 - DNA, 50 bp, Streptococcus equi
  source 1..50: mol_type = genomic DNA
taaagcatttaggaatccttccttcacataaaatatgcctgctttgtaga

SEQ ID NO: 23041 - protein, 575 aa, Pseudomonas aeruginosa
MPKAYPYIRFSSDKQKDGLSIQRQTEAIEAYLEANPHLTVDRSVNLEDLGVSGYAGRHVQKGGALYYFLEKVKAGEIEKGSVLIIEHFNRLSRLKLNKAMDLFNDILKHGIDIAVLDEKQIFTADSITSLDYIKAVLKFDFAHEESKDKSRKGKDNWKFKKEALRSSTNPQIARLNFTKTLPLWLEKTETEITVNEQKAETIRLIFRLCSENNGYMRIATHLNQNKIPRLDASNGPWTLDIVKRLLFNRALLGEYQPRKTVEIQGRARPIYIPNEEEPIKDVYPAVIDEDTFNAAHNGLKSRKNTGGGRRADMPNLFVKLLKCHECGGSIKFNKHHNGYKQYNYLKCFNSLYGHCTSPGPKTWRYDKFEEVFFTFSGRLNLEEIFKKNEQSKSIQKEITALTVKQNKKKEKISEILSEIQKVEFTRSLYALVSDLEKETEELEIQIKQKYQELSSVKQEELDRKIKNFKDIDSLLLQSIEVETREKINNHLRGLINSIALDFSSKTCTIKFKNGIERNIHNEGVFASIPPKAEGKQREDDLKTILNWSKKSPARRKKIYAEADFKIVPLPVTDEI

SEQ ID NO: 23042 - DNA, 50 bp, Pseudomonas aeruginosa
  source 1..50: mol_type = genomic DNA
tgtatccaatggttgtgccgtttggtcgagcggtgctagtattggataaa

SEQ ID NO: 23043 - DNA, 40 bp, Pseudomonas aeruginosa
  source 1..40: mol_type = genomic DNA
cgtctacccgcgccaggtggtcaagcgcaccctggcgcac

SEQ ID NO: 23044 - DNA, 40 bp, Pseudomonas aeruginosa
  source 1..40: mol_type = genomic DNA
cgtctacccgcgccaggtgtacaagcgcaccctggcgcac

SEQ ID NO: 23045 - DNA, 50 bp, Pseudomonas aeruginosa
  source 1..50: mol_type = genomic DNA
cctttccatctcatgtgccttttgtaagaatggtgccatgtttggaaaaa

SEQ ID NO: 23046 - protein, 576 aa, Klebsiella variicola
MTKAYIYTRVSTLQQIDGFGIDRQINTLMDFLENAELPKELGYQLDPKNYEILDSDEGLSGYKGHNFTKGSLGKFKSRVANGEITSGCLLIESVDRFSRRQGYDAIDEFTFLLKRNIDIIEVETEQIFSYRLDHKLTQLSTSIERAYQESKRKSRLITKSWANLKRKAVDEGIALKRNVPYWLALDGDHYRLNTSEVERIRTIFNDYANGKGVTAIVRDLNKAGGKYDEKAFSTNFINVMLRDRRLIGWLTGKRKKDETIADWKLREIKIYPEVIDANLFELVQRRIDANAVTKEVRSSSKQVSLFNGVARCGICNEPLVGHFTQKGSYLRCLGKRSKLGTCNSSLIRYKECELAVINYVKNIDFKSIYGNNKNNTPMINLLQQRMTVATAEINGIESLLYTSDNSSEIVALTKARREKVKERDKISYELTELMRTVDVCDEDFILDLESICDHNNAELREKFNGVLKKVIKSIKIIQDNGSDNKIFIIKFEYHTDYAMHCVALNLDGSLIGYSYIEDKGELCLKSSCMDVNFKTGDITTKHVPDYIEALIVKSTLENIEQVLNEFDDNLNKFEIT

SEQ ID NO: 23047 - DNA, 50 bp, Klebsiella variicola
  source 1..50: mol_type = genomic DNA
ggttgtatttgtgttagatgctgggtacaaatgctaacattgatacaaac

SEQ ID NO: 23048 - DNA, 40 bp, Klebsiella variicola
  source 1..40: mol_type = genomic DNA
tatctgcacgatggcatgggtttacggttcggttcagggc

SEQ ID NO: 23049 - DNA, 40 bp, Klebsiella variicola
  source 1..40: mol_type = genomic DNA
tatctgcacgatggcatggatttacggttcggttcagggc

SEQ ID NO: 23050 - DNA, 50 bp, Klebsiella variicola
  source 1..50: mol_type = genomic DNA
gtttgagttccttgtagattctggatacgaatcctttgtcagatacatag

SEQ ID NO: 23051 - protein, 576 aa, Klebsiella pneumoniae
MTKAYIYTRVSTLQQIDGFGIDRQINTLMDFLENAELPKELGYQLDPKNYEILDSDEGLSGYKGHNFTKGSLGKFKSRVANGEITSGCLLIESVDRFSRRQGYDAIDEFTFLLKRNIDIIEVETEQIFSYRLDHKLTQLSTSIERAYQESKRKSRLITKSWANLKRKAVDEGIALKSNVPYWLALDGDHYRLNTSEAERIRTIFNDYANGKGVTAIVRDLNKAGGKYDEKPFSTNFINVMLRDRRLIGWLTGKRKKDETIADWELREIKIYPEVIDANLFELVQRRIDANAVTKEVRSSSKQVSLFNGVARCGICNEPLVGHFTQKGSYLRCLGKRSKLGTCNSSLIRYKECELAVINYVKNIDFKAIYGNNKNSTPMINLLQQRMSVATAEINGIESLLYTSDNSSEIVALTKARREKVKERDKISYELSELMRTVDFCDEDFILDLESICDHNNAELREKFNGVLKKVIKSIKIIQDNGSDNKIFIIKFEYHTDYAMHCVALNLDGSLIGYSYIEDKGELCLKSSCMDINFKTGDITTKHVPDYIEALIVKSTLENIEQVLNEFDDNLNKFEIT

SEQ ID NO: 23052 - DNA, 50 bp, Klebsiella pneumoniae; identical to SEQ ID NO: 23047
  source 1..50: mol_type = genomic DNA

SEQ ID NO: 23053 - DNA, 40 bp, Klebsiella pneumoniae
  source 1..40: mol_type = genomic DNA
tatctgcacaatggcatgggtttacggctcggttcagggc

SEQ ID NO: 23054 - DNA, 40 bp, Klebsiella pneumoniae
  source 1..40: mol_type = genomic DNA
tatctgcacaatggcatggatttacggctcggttcagggc

SEQ ID NO: 23055 - DNA, 50 bp, Klebsiella pneumoniae; identical to SEQ ID NO: 23050
  source 1..50: mol_type = genomic DNA

SEQ ID NO: 23056 - protein, 462 aa, Bacillus licheniformis
MTVGIYIRVSTEEQAREGFSISAQREKLKAYCVSQDWTDYKFYVDEGKSAKDTNRPYLKLMLDHIQQGLINVVLVYRLDRLTRSVKDLYKLLDLFDKNSCIFRSATEVYDTGSATGRLFITLVAAMAQWERENLGERVTMGQVEKARQGQYSAPAPFGFKKQDETLVKDKTQGHILMDMIDKVKKGWSIRQIAKYLDQSYLPIRGYKWHIATILSILHNPALYGALRWKDELNETSHEGYLTKEEFEELQNILYSRQNFRKRQIESAHIFQMKLVCPQCGNRLGCERSVYFRKKDQKNVESLHYRCQSCALNERPSISVSEKKLEKALLLFMKNVKFDLEPVVKEEKNETTEIQNAIVKIERQREKFQKAWASDLMTDEEFTARMSETRKAHENFTKRLSEIQRATPLPIDIKKAKKLVNEFKINWAYLNTEEKREFVQSFIEKIEFTKKDQNPHILNVSFY

SEQ ID NO: 23057 - DNA, 50 bp, Bacillus licheniformis
  source 1..50: mol_type = genomic DNA
attagggtttatatcaactacacacatgtaaagttaacataaatactaaa

SEQ ID NO: 23058 - DNA, 40 bp, Bacillus licheniformis
  source 1..40: mol_type = genomic DNA
tttcgtgttcagatacacacatacgaagtgctcctgagag

SEQ ID NO: 23059 - DNA, 40 bp, Bacillus licheniformis
  source 1..40: mol_type = genomic DNA
tttcgtgttcagatacacagttacgaagtgctcctgagag

SEQ ID NO: 23060 - DNA, 50 bp, Bacillus licheniformis
  source 1..50: mol_type = genomic DNA
actagggttgaattcaattgtacagtaggaaaattatagttaataccaat

SEQ ID NO: 23061 - protein, 584 aa, Klebsiella quasipneumoniae
MTKHKIHVYTRISKTYQQEGSGLDEQLSRIDAYIKSKPEFLGSEITYWQDVGVSAFKNKNIHDGQLAEFIKQVESGSIGSGHALVIYSLDRLSRRSSWDEDTIQKLVKNGVDIHDVSTPVVLKRDDPFSKIIMELIVARGNNESKIKSERSIAGWEKRLKETREQGKVFTRKLPRWLSTDENGYVVITEQAELIKRIFLEYTNGLSSPMIARRLNEEGIKSTGRSMWRPNTITKLIKDERLRGYLRRSTDQALIPDIFPVVIDEEIFVLANRILKNNATGIKGRPRENNITREVNNILTGIVRCGKCGARVTTSKNSRGVRYVVCLNRRNYEMCGQKSIKLDEFEKIVISHAQQVDMSKVFSYDKVDTSRESTLNSELSNLEIDEKNCINDIDARKKAKKTASLVLANTLVEIQDRIEEIKQQLLELKIKEPLPEIQHFSINDLINPSNIELRMSLRKFLTQAVDKITFRSLDNNILIEIKYHNNVYRHILITDKKVKEVLHEVDIVKNGEVINYTTNGFLITENEHENTCIFHGIYNVHYTDYFLLANYIGSLKNKHWIVDKMYETENMSIVMTNEKQKSHYN

SEQ ID NO: 23062 - DNA, 50 bp, Klebsiella quasipneumoniae
  source 1..50: mol_type = genomic DNA
aaatgtgaaactattatcatgactgtggtaatgtgatacaattcacacat

SEQ ID NO: 23063 - DNA, 40 bp, Klebsiella quasipneumoniae
  source 1..40: mol_type = genomic DNA
gtggcgcaatgccgataccgtggtcatcggccgcgcgcag

SEQ ID NO: 23064 - DNA, 40 bp, Klebsiella quasipneumoniae
  source 1..40: mol_type = genomic DNA
gtggcgcaatgccgatacctgggtcatcggccgcgcgcag

SEQ ID NO: 23065 - DNA, 50 bp, Klebsiella quasipneumoniae
  source 1..50: mol_type = genomic DNA
aaatgtgaggcaattatcatgccttggtttatgtgtgtgtgtgtagacgt

SEQ ID NO: 23066 - protein, 584 aa, Klebsiella pneumoniae
MTKHKIHVYTRISKTYQQEGSGLDEQLSRIDAYIKSKPEFLGSEITYWQDVGVSAFKNKNIHDGQLAEFIKQVESGSIGSGHALVIYSLDRLSRRSSWDEDTIQKLVKNGVDIHDVSTPVVLKRDDPFSKIIMELIVARGNNESKIKSERSIAGWEKRLKETREQGKVFTRKLPRWLSTDENGYVVITEQAELIKRIFLEYTNGLSSPMIARRLNEEGIKSTGRSMWRPNTITKLIKDERLRGYLRRSTDQALIPDIFPVVIDEEIFVLANRILKNNATGIKGRPRENNITREVNNILTGIVRCGKCGARVTTSKNSRGVRYVVCLNRRNYEMCGQKSIKLDEFEKIVISHAQQVDMSKVFSYDKVDTSRESTLNSELSNLEIDEKNCIDDIDARKKAKKTASLVLANTLVEIQDRIEEIKQQLLELKIKEPLPEIQHFSINDLINPSNIELRMSLRKFLTQAVDKITFRSLDNNILIEIKYHNNAYRHILITDKKVKEVLHEVDIVKNGEVINYTTNGFLITENEHENTCIFHGIYNVHYTDYFLLANYIGSLKNKHWIVDKMYETENMSIVMTNEKQKSHYN

SEQ ID NO: 23067 - DNA, 50 bp, Klebsiella pneumoniae; identical to SEQ ID NO: 23062
  source 1..50: mol_type = genomic DNA

SEQ ID NO: 23068 - DNA, 40 bp, Klebsiella pneumoniae; identical to SEQ ID NO: 23063
  source 1..40: mol_type = genomic DNA

SEQ ID NO: 23069 - DNA, 40 bp, Klebsiella pneumoniae; identical to SEQ ID NO: 23064
  source 1..40: mol_type = genomic DNA

SEQ ID NO: 23070 - DNA, 50 bp, Klebsiella pneumoniae; identical to SEQ ID NO: 23065
  source 1..50: mol_type = genomic DNA

SEQ ID NO: 23071 - protein, 540 aa, Lachnospiraceae bacterium MD335
MTRQTTQKLITALYPRLSHEDTLQGESNSISNQKRILEAYAKQNGFSNLKWYTDDGFSGANFQRPGFQSMLADIEAGLVGTVIVKDMSRLGRNYLQVGMYTEMIFPQKDVRFIAINDGVDSAQGENDFAPLRNIFNEWLVRDTSKKIRAVKRSKGMSGKPVTSKPVYGYLMDEDENFIIDEEAAPVVKQIYSLCLAGNGPTKIARMLTEQEIPTPGTLEYCRTGSTRRYHPGYECKWAANTVVHILENREYTGCLVNFKTTTQSYKCSKIIYNSEDKQAIFENHHEQIIDKDTWERVQELRKQRKRPNRYDEVGLFSGILFCADCGSVMYQQRYQTDKRKQDCYICGSYKKRTADCTAHFIRTDLLTEGVTENLRKVTSYAAKHEARFMKLLTEQTEDGSKRRNAAKKKELEAAEKRIAELSAIFKRLYEDSVTGRISDERFTELSADYEAEQKELKEKAAALQSELSKTLEATANAEKFMKVVRKYTSFEELTPTLLREFVEKIVIHESEALDGKRRGKLRRQEIEIYYSFVGKVELPD

SEQ ID NO: 23072 - DNA, 50 bp, Lachnospiraceae bacterium MD335
  source 1..50: mol_type = genomic DNA
ttacttctttatctcacatgagcaaatgctcatgtacggtaaagaagcaa

SEQ ID NO: 23073 - DNA, 40 bp, Lachnospiraceae bacterium MD335
  source 1..40: mol_type = genomic DNA
aaatgataatccgggcgcaaaatcgcagggcatgaagcag

SEQ ID NO: 23074 - DNA, 40 bp, Lachnospiraceae bacterium MD335
  source 1..40: mol_type = genomic DNA
aaatgataatccgggcgcacaatcgcagggcatgaagcag

SEQ ID NO: 23075 - DNA, 50 bp, Lachnospiraceae bacterium MD335
  source 1..50: mol_type = genomic DNA
gaacttctttgagctaaaagagcacattgtaatgtaatgcaaagaagcta

SEQ ID NO: 23076 - protein, 540 aa, Longicatena caecimuris
MTRQTTQKLITALYPRLSHEDTLQGESNSISNQKRILEAYAKQNGFSNLKWYTDDGFSGANFQRPGFQSMLADIEAGLVGTVIVKDMSRLGRNYLQVGMYTEMIFPQNGVRFIAINDGVDSAQGENDFAPLRNIFNEWLVRDTSKKIRAVKRSKGMSGKPVTSKPVYGYLMDEDENFIIDEEAAPVVKQIYSLCLAGNGPTKIARMLTEQEIPTPGTLEYRRTGRTRRYHPGYECKWAANTVVHILENREYTGCLVNFKTTTQSYKCSKIIYNSEDKQAIFENHHEQIIDKDTWERVQELRKQRKRPNRYDEVGLFSGILFCADCGSVMYQQRYQTDKRKQDCYICGSYKKRTADCTAHFIRTDLLTAGVTENLRKVTSYAAKHEARFMKLLTEQTEDGSKRRNAAKKKELEAAEKRIAELSAIFKRLYEDSVTGRISDERFTELSADYEAEQKELKEKAAALQSELSKTLEATANAEKFMKVVRKYTSFEELTPTLLREFVEKIVIHESEALDGKRRGKLRRQEIEIYYSFVGKVELPD

SEQ ID NO: 23077 - DNA, 50 bp, Longicatena caecimuris; identical to SEQ ID NO: 23072
  source 1..50: mol_type = genomic DNA

SEQ ID NO: 23078 - DNA, 40 bp, Longicatena caecimuris
  source 1..40: mol_type = genomic DNA
cagtttgaagccgtaatctaatacataagtgatggagcaa

SEQ ID NO: 23079 - DNA, 40 bp, Longicatena caecimuris
  source 1..40: mol_type = genomic DNA
cagtttgaagccgtaatctcatacataagtgatggagcaa

SEQ ID NO: 23080 - DNA, 50 bp, Longicatena caecimuris; identical to SEQ ID NO: 23075
  source 1..50: mol_type = genomic DNA

SEQ ID NO: 23081 - protein, 540 aa, Clostridium symbiosum
MPRQTTQKLITALYPRLSHEDTLQGESNSISNQKRILEAYAKQNGFSNLKWYTDDGFSGANFQRPGFQSMLADIEAGLVGTVIVKDMSRLGRNYLQVGMYTEMIFPQNGVRFIAINDGVDSAQGENDFAPLRNIFNEWLVRDTSKKIRAVKRSKGMSGKPVTSKPVYGYLMDEDENFIIDEEAAPVVKQIYSLCLAGNGPTKIARMLTEQEIPTPGTLEYRRTGRTRRYHPGYECKWAANTVVHILENREYTGCLVNFKTTTQSYKCSKIIYNSEDKQAVFENHHEIIIDRDTWERVQELRKQRKRPNRYDEVGLFSGILFCADCGSVMYQQRYQTDKRRQDCYICGSYKKRTADCTAHFIRTDLLTAGVTENLRKVTSYAAKHEARFMKLLTEQTEDGSKRRNAAKKKELEAAEKRIAELSAIFKRLYEDSVTGRISDERFTELSADYEAEQKELKEKAAALQSELSKTLEATANAEKFMKVVRKYTSFEELTPTLLREFVEKIVIHESEALDGKRRGKLRRQEIEIYYSFVGKVELPD

SEQ ID NO: 23082 - DNA, 50 bp, Clostridium symbiosum
  source 1..50: mol_type = genomic DNA
ttacttctttatctcacatgagcaaatgttcatgtacggtaaagaagcaa

SEQ ID NO: 23083 - DNA, 40 bp, Clostridium symbiosum
  source 1..40: mol_type = genomic DNA
tgtgtcattaccttaatcaaaatctcctgggatgcatcct

SEQ ID NO: 23084 - DNA, 40 bp, Clostridium symbiosum
  source 1..40: mol_type = genomic DNA
tgtgtcattaccttaatcacaatctcctgggatgcatcct

SEQ ID NO: 23085 - DNA, 50 bp, Clostridium symbiosum; identical to SEQ ID NO: 23075
  source 1..50: mol_type = genomic DNA

SEQ ID NO: 23086 - protein, 604 aa, Bacteroides clarus
MAKIIGYARVSTTKQDLSRQKLKIKEFCENNNYELIEIIEDFGISGVVADRKGYIELQSKTYKDADMIVISELSRLSRQEDVTETVYNIQQIINKGLSVILLDSPSKIYEANKLLDITEILILTIKAWAAAQERLDIKKKNQDGKQALFQSYPYAVVDQKIPYGYKAVPNPNGKRPKYILEEVPEEVENIKRLFALVNSGKTLGAVARYFNERNITFRGYYSTVAILSNYIHSDIYRGIRRRTQKLGREEPYTIEVRIKPIISEEDFMKAQELIKNNYKNTPTGKVNHNPLKGIIRCRCGRAMTVKDKKPAAGISKLTYRCSCVDRKSHPDFCKYNIDEVSYDLTNEILYSLFKSMHTAEYINFFRNQTDNRVTELQEEVAGIEKRLSTLYLDKENLSNESKENANKFLLTTNPTLLNIIQERQNQLDEKIKSIDKEIIRYKKSQSKKIADIERIKDNNGKEKLQNLTIEEQGELYHKYLERVNYIPVTTMQGYYIVQFLNGIKFYIAITKVRSIAMASLLLDNWTIDEKGIITANYDTLKSNSMKNFSIETIRKTKTMTLQEYLKSDLAKERALHLDLSYRKRYLEELHKAGLDGRLRPLKKE

SEQ ID NO: 23087 - DNA, 50 bp, Bacteroides clarus
  source 1..50: mol_type = genomic DNA
ttgggtttttccgttttattatactcacttaactaaacaaatttgcccaa

SEQ ID NO: 23088 - DNA, 40 bp, Bacteroides clarus
  source 1..40: mol_type = genomic DNA
cggaatttgaaaagcatactctgccagcgctatcatccat

SEQ ID NO: 23089 - DNA, 40 bp, Bacteroides clarus
  source 1..40: mol_type = genomic DNA
cggaatttgaaaagcatacaatgccagcgctatcatccat

SEQ ID NO: 23090 - DNA, 50 bp, Bacteroides clarus
  source 1..50: mol_type = genomic DNA
ttggatgttatgactttttaatataatcttgagtaatcttttttgcctaa

SEQ ID NO: 23091 - protein, 444 aa, Sharpea azabuensis
MRMACYIRVSTDRQADDGCSLEMQRATLEKYLSIMNLVSDRDQVSWYCDDGYSAKSIAGRPSFLRLLKDIREGTIDALAIWDLSRLTRSIWDLRDILNLLAENEVELYCMNDDVHTETASERFSMNVRMLSYQFEREKVSERTNAVLIDLVKNKKRYVAGGKIAYGFRRTREKELVIDEERARYVREMFRLARHGMSLEQITLALNTLQSERYFQVENVRCMLKNRKYSGHYLFKGVEYDDIIPPIVTDEEQQEALDNLNHHSQKSDNYIFAGLVKCQCGTPMTNGLAWGSHYPRRYYYYHCRECNKYFSQIKLDKYFRSYRFPEGGDAFFDRIQTMLTGRQKAIRDRLRRLDEKYASGYVQEKEYLMLREVLESRSREAAEDQESLGCLNKKYADMDILEKKRYVHEKIKMITVDPIGKKVLSVEEREPLDPAESPVGKIGKG

SEQ ID NO: 23092 - DNA, 50 bp, Sharpea azabuensis
  source 1..50: mol_type = genomic DNA
gtttagcatttcaaaatcaactggcacctaatgatactccaaaactaaaa

SEQ ID NO: 23093 - DNA, 40 bp, Sharpea azabuensis
  source 1..40: mol_type = genomic DNA
aagactcataatcaactggcaggggctgcaggaatcgaac

SEQ ID NO: 23094 - DNA, 40 bp, Sharpea azabuensis; identical to SEQ ID NO: 23093
  source 1..40: mol_type = genomic DNA

SEQ ID NO: 23095 - DNA, 50 bp, Sharpea azabuensis
  source 1..50: mol_type = genomic DNA
gtctagcatttgcaaattatctagcacatagtgagagcttaacattaaaa

SEQ ID NO: 23096 - protein, 583 aa, Gemella morbillorum
MSNNVEIIKANPLVTRRNDNSGSLSRRVAAYCRVSSDSDDQKNSYDSQVRHYREYISQHQDWNLVDIYADEGISGTQVGKRQDFQRLISDCLDGKIDYIITKAIARFARNTLDTLKYVRLLKDKQIGVFFEEENIDTLTMDGELLLTILSSVAQQEVENTSAHVKKGLKMKMQRGELIGFQGCLGYDYNQDTKSISINEKEAKIVRYIFERYIDGIGGKAIARELDELGYKTPRGLDHWQDTTVLGIIKNEKYKGDILMGKTFTVDPISKRRLINFGEEDKYYIKNNHDAIISPETFTQAQEIRLRRAGNKKTIANTKGKRERYSRMYPFSSRLECGFCGTVLSRRSWHSSSEYKKIIWHCTTSIKKGKKHCIHSKGIEEKAIENAFLQSYQQLFYENNNLTEDFLEIIKEELTDDTLKVELNKIVSKLNSLYKKEEKLVSMNLDGKISDSVYEDKFNQIQIEKEKFLEEKVNLEVTLKSEVDIKSRLENFKEILTSQKTLTEFDKDIFESIVEKIIVGGVNSDGEIDPAMLTIIFKTGDSSIKDAKSYKSKRKNAKIDNDKLCFNSVNNDEKKCTNKENNAC

SEQ ID NO: 23097 - DNA, 50 bp, Gemella morbillorum
  source 1..50: mol_type = genomic DNA
tacaaataaagaaaacaacgcatgttgaggcggtaagtttgctagtcaag

SEQ ID NO: 23098 - DNA, 40 bp, Gemella morbillorum
  source 1..40: mol_type = genomic DNA
ttcccaggaacgtatcatgttgaatgtgtgagtttattag

SEQ ID NO: 23099 - DNA, 40 bp, Gemella morbillorum; identical to SEQ ID NO: 23098
  source 1..40: mol_type = genomic DNA

SEQ ID NO: 23100 - DNA, 50 bp, Gemella morbillorum
  source 1..50: mol_type = genomic DNA
ttgagatgagtcagacactgaatgttgaggctgtacctgtgctagtcaag

SEQ ID NO: 23101 - protein, 549 aa, Bacteroides faecis
MKCILLVRVSTESQSFNEQEKELYDLAYSHGYKNNDIVSIATKESAIRLNEEERYGLNRMKELVETGKYDCVFAWEISRIARRKKILFSILEYLVERKIQLIIKEPRIHLLKEDRTIDEGAETMFTLYAQLAESEMRNKMARFERAKKEGYNKGKYMGGKVKLGYKIDENGFWAIDENDSKLIQLMFDLYNSGEYSVSELGKELKSRGYFKNLSITNVKAEIYHMLKDPLYKGERTSNNIYPRIIDDETWEKCRVKRQENRVRSKQKGSHLLTPLIRCSCGASYSVNLMDGSYSCRVKHNGVEKGLIHSPDINVNMIESLVWYVALQELHEDMVCKRSDAKKTYEEEIKIYNQKITYSRELVDSTMKRRSDLDENYFVHGRLTKEKYEEFTQKQNDIIKNEQNNIRKCEAAINNLQQQIQADITFDDMMNSLSSSYDSLRNGTDLETMRKIIHRYIVEVNIEPWVGKATCFWKKVIIKTIHEVENKEKIKFLQKQGLNNIAFAFVNAFYVNTFHKKAYWDKDMKNCVPMVYILRLERKRQDTRKIEAVE

SEQ ID NO: 23102 - DNA, 50 bp, Bacteroides faecis
  source 1..50: mol_type = genomic DNA
accacctaatagttaattagtgttgttatataaatatacgatttggtggt

SEQ ID NO: 23103 - DNA, 40 bp, Bacteroides faecis
  source 1..40: mol_type = genomic DNA
tcatcacacgatatcgcaagtagccatggtcggcggcgga

SEQ ID NO: 23104 - DNA, 40 bp, Bacteroides faecis
  source 1..40: mol_type = genomic DNA
tcatcacacgatatcgcaattagccatggtcggcggcgga

SEQ ID NO: 23105 - DNA, 50 bp, Bacteroides faecis
  source 1..50: mol_type = genomic DNA
tccatgttaatgtaaaatagtatttttataaaaatattatatttgggggc

SEQ ID NO: 23106 - protein, 550 aa, Clostridium jeddahense
MKRQPDKKIYLYGRLSHEDELQGDSNSIINQRKILTKYAEENGFTPYEFIYDDGFSGADFERPAFSEMIEEVEAGNVSTVIVKDMSRFGRDYLKVGFYTEILFSEKDVRLIAVNDNVDTGRGENDFTPMMNLFNEWFVKNTSKKIRAVWQAKGKSGERLAVVPPYGYRKDPDNPKQLVIDEESAANVRRIFRLSVEGYGPAQIARLLNDEHILNPSGYKYEHGIVKKARPCKDPYFWNTTTVHKILDAPEYLGLTINFKTWSKSYKDNRPRLNPPEKQLVFEDTHPAIIDLETWDIVRSMRQHKRRAPRYGKSGLFSGVAYCADCGNKLYFHTRSIKNKWGTRYEGSYSCSEYRKDVQYQGKRQCTCHFIRESQLEQLVLEELRDLLRYIPKHEKQFARVVMDRSAQEYKRETAAKKRTAEKHRRRIAELDTLIERLYVDNVSGKITDERYEKMSGKFEAEQEELTNILASLETEIAAEESQAVNVDRFLSVVRRYTEIEELTPAIVHEFIDRIIVHEPEQARGDRRQKVEIIYNNIGAVDRLALKGLGA

SEQ ID NO: 23107 - DNA, 50 bp, Clostridium jeddahense
  source 1..50: mol_type = genomic DNA
atgcttcctttaggacactgtcctaatgggcagtgtccataaggaagcaa

SEQ ID NO: 23108 - DNA, 40 bp, Clostridium jeddahense
  source 1..40: mol_type = genomic DNA
gtcggacaatccgggcgcgaaatcgcaaggcattaaacag

SEQ ID NO: 23109 - DNA, 40 bp, Clostridium jeddahense
  source 1..40: mol_type = genomic DNA
gtcggacaatccgggcgcggcatcgcaaggcattaaacag

SEQ ID NO: 23110 - DNA, 50 bp, Clostridium jeddahense
  source 1..50: mol_type = genomic DNA
atgcttcccgaggacccatgtcatgctgggcactgtatccggggatgcag

SEQ ID NO: 23111 - protein, 487 aa, Dorea formicigenerans
MKSRRTRRADSPETSSGFSKFFGSLLTQGDLSRFARNYSDAGSLIDNLFVQMGVRFISLAENVDSYKNPDSVSNIIVPITNVMNDNYCYQTSKKIRQVFDYKRRNGQYIGAFAPYGYVKHPKDKHRLIVDPDAAENVKLIFTMLIQGSSKRAIALYLNEHGVPSPSAYKVQKGLPVSTRGYDDPMWGARMIHSILTNPTYTGDLAQGRSRVKSYKVHQIEAVPREEWVEVAGTHEAIIDYETFDKVQALLQRDTRTSPKGREVHLFSGFLKCADCGRAITRCVSKNNNVYYSCSTYKNRSRTACTMHSIKHERLEAAVLFAVQHQVHLAVSYAEIVTQINSAPIKKSQSYRLDDLIAAKERELIKITRYKQSLYQDWKDGEITQQEYRDMKADYERQTSDISAVLTRLNAERAELANGVDNEHPALVAFMKYQNIEALNREILVELVDYIKVYENGNISVKFKFADELRKIAEYIEINTTEDTAVAG

SEQ ID NO: 23112 - DNA, 50 bp, Dorea formicigenerans; identical to SEQ ID NO: 2692
  source 1..50: mol_type = genomic DNA

SEQ ID NO: 23113 - DNA, 40 bp, Dorea formicigenerans
  source 1..40: mol_type = genomic DNA
agaatgaacttcataatcgtacgatgcacattagtggaag

SEQ ID NO: 23114 - DNA, 40 bp, Dorea formicigenerans
  source 1..40: mol_type = genomic DNA
agaatgaacttcataatcgcacgatgcacattagtggaag

SEQ ID NO: 23115 - DNA, 50 bp, Dorea formicigenerans
  source 1..50: mol_type = genomic DNA
tgttttcctggtattgtcaaaacacattattacttataaacaggaagaat

SEQ ID NO: 23116 - protein, 560 aa, Coprococcus comes
MARAKNRGYQQSFSPSYTIRRWRLGIYIRLSKEDLKKGKDDSNSVKNQRDLLNDFYRRNIDEFESITEYVDDGHTGTDANREDFQRLLADVMSGKINCVIVKDLSRFARNYSDAGSLIDNLFVQMGVRFISLAENVDSYKNPDSVSNIIVPITNVMNDNYCYQTSKKIRQVFDYKRRNGQYIGAFAPYGYVKHPKDKHRLIVDPDAAENVKLIFTMLIQGSSKRAIALYLNEHGVPSPSAYKVQKGLPVSTRGYDDPMWGVRMIHSILTNPTYTGDLAQGRSRVKSYKVHQIEAVPREEWVEVAGTHEAIIDYETFDKVQALLQRDTRTSPKGREVHLFSGFLKCADCGRAITRCVGKNNNVYYSCSTYKNRSRTACTMHSIKHERLEAAVLFAVQHQVHLAVSYSEIVTQINSAPIKKSQSYRLDDLIAAKERELTKITRYKQSLYQDWKDCEITQQEYRDMKADYERQTSDISAVLTRLNAERAELANGVDNEHPALVAFMKYQNIEALNREILVELVDYIKVYENGNISVKFKFADELRKIAEYIEINTTEDTAVAG

SEQ ID NO: 23117 - DNA, 50 bp, Coprococcus comes; identical to SEQ ID NO: 2692
  source 1..50: mol_type = genomic DNA

SEQ ID NO: 23118 - DNA, 40 bp, Coprococcus comes
  source 1..40: mol_type = genomic DNA
ttttttatatcacgagaaatatgagctttatcatacaatg

SEQ ID NO: 23119 - DNA, 40 bp, Coprococcus comes
  source 1..40: mol_type = genomic DNA
ttttttatatcacgagaaacatgagctttatcatacaatg

SEQ ID NO: 23120 - DNA, 50 bp, Coprococcus comes; identical to SEQ ID NO: 23115
  source 1..50: mol_type = genomic DNA

SEQ ID NO: 23121 - protein, 548 aa, Streptococcus anginosus; identical to SEQ ID NO: 14641

SEQ ID NO: 23122 - DNA, 50 bp, Streptococcus anginosus
  source 1..50: mol_type = genomic DNA
tacaatctctaattagccataaagcaattgatggcgaaataaagacggaa

SEQ ID NO: 23123 - DNA, 40 bp, Streptococcus anginosus
  source 1..40: mol_type = genomic DNA
taagagccaaggtattaagcagcttatggctggaggaggt

SEQ ID NO: 23124 - DNA, 40 bp, Streptococcus anginosus
  source 1..40: mol_type = genomic DNA
taagagccaaggtattaaggtgcttatggctggaggaggt

SEQ ID NO: 23125 - DNA, 50 bp, Streptococcus anginosus
  source 1..50: mol_type = genomic DNA
gagaatcttcataaagccataaatgttctgatggctttcagaagacagta

SEQ ID NO: 23126 - protein, 542 aa, Hungatella hathewayi; identical to SEQ ID NO: 17711

SEQ ID NO: 23127 - DNA, 50 bp, Hungatella hathewayi; identical to SEQ ID NO: 427
  source 1..50: mol_type = genomic DNA

SEQ ID NO: 23128 - DNA, 40 bp, Hungatella hathewayi
  source 1..40: mol_type = genomic DNA
cgtgagtaaatgggagtcaggaatttcctgcccggatatt

SEQ ID NO: 23129 - DNA, 40 bp, Hungatella hathewayi
  source 1..40: mol_type = genomic DNA
cgtgagtaaatgggagtcaccaatttcctgcccggatatt

SEQ ID NO: 23130 - DNA, 50 bp, Hungatella hathewayi
  source 1..50: mol_type = genomic DNA
ttctctctcctagctggggaaaccccagatttccattctccaggatgcgc

SEQ ID NO: 23131 - protein, 542 aa, Hungatella hathewayi
MKQPNNTKTKIYSTALYMRLSRDDENFGDSVSIETQRTILQKFAAENGLRVYGEYVDDGWSGTNFDRPSFQRMMNDVEAGKVNCIVTKDLSRFGREHVMMDYYLEFVFPEKQIRYIAIAENEDTEKGLSEFVPFKNLFNEWFAKDTSRKVKSALHAKFEKGERIFAYAPLGYKRHPEIKNTLTPDEETRWIVEKIFDLAVHGAGAAKITRILIAEKVPTAGWLNYKRYGTFAYIYAGAPEEKSYAWTIAQVKSILKDETYIGNSIHNKQTNISYKNKKKVRKPKEEWVRVENTHEALVSKDVFDRVQELIETRRRKQKDGTTQIFSGLVKCADCGWSLAFGMNKQNKKPYGHYHCSNYGQGTGHCTMHYIRYDVLYTYVLARVRYWSYQAQMDEGRLLQKLLKAGDRERMASQKKQSAELNKAEKRKTELDRLFAKMYEDWAAGRITEYNFNMLSQRYQAEQQELVEKIERLNTDLAAEQQSAVNAEKWVNLIKQYVNPSELTAELLNALIEKIVVHEAVKDESNTRTQEIEIYYRFIGKVE

SEQ ID NO: 23132 - DNA, 50 bp, Hungatella hathewayi; identical to SEQ ID NO: 427
  source 1..50: mol_type = genomic DNA

SEQ ID NO: 23133 - DNA, 40 bp, Hungatella hathewayi
  source 1..40: mol_type = genomic DNA
tgtttcaaagtgggaatccgggcagtcggtaccggagttg

SEQ ID NO: 23134 - DNA, 40 bp, Hungatella hathewayi
  source 1..40: mol_type = genomic DNA
tgtttcaaagtgggaatccccgcagtcggtaccggagttg

SEQ ID NO: 23135 - DNA, 50 bp, Hungatella hathewayi; identical to SEQ ID NO: 23130
  source 1..50: mol_type = genomic DNA

SEQ ID NO: 23136 - protein, 542 aa, Clostridium symbiosum; identical to SEQ ID NO: 17711

SEQ ID NO: 23137 - DNA, 50 bp, Clostridium symbiosum; identical to SEQ ID NO: 427
  source 1..50: mol_type = genomic DNA

SEQ ID NO: 23138 - DNA, 40 bp, Clostridium symbiosum
  source 1..40: mol_type = genomic DNA
cgtctccaaatgggaatcaggccagtcttatccggagatg

SEQ ID NO: 23139 - DNA, 40 bp, Clostridium symbiosum
  source 1..40: mol_type = genomic DNA
cgtctccaaatgggaatcaccccagtcttatccggagatg

SEQ ID NO: 23140 - DNA, 50 bp, Clostridium symbiosum; identical to SEQ ID NO: 23130
  source 1..50: mol_type = genomic DNA

SEQ ID NO: 23141 - protein, 542 aa, Eisenbergiella massiliensis; identical to SEQ ID NO: 17711

SEQ ID NO: 23142 - DNA, 50 bp, Eisenbergiella massiliensis; identical to SEQ ID NO: 427
  source 1..50: mol_type = genomic DNA

SEQ ID NO: 23143 - DNA, 40 bp, Eisenbergiella massiliensis
  source 1..40: mol_type = genomic DNA
agtctccaaatgggagcggggaatcagctgccctgatatt

SEQ ID NO: 23144 - DNA, 40 bp, Eisenbergiella massiliensis
  source 1..40: mol_type = genomic DNA
agtctccaaatgggagcggccaatcagctgccctgatatt

SEQ ID NO: 23145 - DNA, 50 bp, Eisenbergiella massiliensis; identical to SEQ ID NO: 23130
  source 1..50: mol_type = genomic DNA

SEQ ID NO: 23146 - protein, 542 aa, Eubacterium limosum; identical to SEQ ID NO: 17711

SEQ ID NO: 23147 - DNA, 50 bp, Eubacterium limosum; identical to SEQ ID NO: 427
  source 1..50: mol_type = genomic DNA

SEQ ID NO: 23148 - DNA, 40 bp, Eubacterium limosum
  source 1..40: mol_type = genomic DNA
cgtttctaaatgggaatcgggattatccaatccggatatc

SEQ ID NO: 23149 - DNA, 40 bp, Eubacterium limosum
  source 1..40: mol_type = genomic DNA
cgtttctaaatgggaatcgccattatccaatccggatatc

SEQ ID NO: 23150 - DNA, 50 bp, Eubacterium limosum; identical to SEQ ID NO: 23130
  source 1..50: mol_type = genomic DNA

SEQ ID NO: 23151 - protein, 506 aa, Escherichia coli
MRSVITYLRFSSATQGAEGADSTRRQNELFKQWLRKNSDAQVVASFNDEGLSGYKGKHLSGQFGDMLSRIESGEFPEGTILLVEAIDRIGRLEHLETEALMNRIIAHGIEIHTLQDGLIYTRDALSDDLGISIIQRVKSYIAHQESKQKSFRVSQKWEQRAKLALAGEQRLTRNVPGWIDSETFKLNEHAETVRLIFKLLLDGESLHNIARHLQSNGIRSFSRRKDANGFSVHSVRTILRSETAIGTLPASQRNDRPAIPNYYEAAIDASTFNKAQEILGKNRIGRTPASDNPLTINIFKGLFRCQCGASVHPTGTKNKYQGVYRCNNHLDGRCDVPPLKRKPFDRWMIDNFLGMIDVVSDGETERRIAALQHEVETVTARIKKATALLLEMDDITELKAQVKELNQKRTELQTTIDTLKRKTSLTDKELPQLKDIDLMTKAGRVECQLILSKHLKGLTLGKDSVTVTLQNDTEITIPTNPLPLNDGTSIFEIADKELLEIDAYQL

SEQ ID NO: 23152 - DNA, 50 bp, Escherichia coli
  source 1..50: mol_type = genomic DNA
aaaccgaatagacttaaatcaagggtcattgtattgtagctattcggcat

SEQ ID NO: 23153 - DNA, 40 bp, Escherichia coli; identical to SEQ ID NO: 20043
  source 1..40: mol_type = genomic DNA

SEQ ID NO: 23154 - DNA, 40 bp, Escherichia coli
  source 1..40: mol_type = genomic DNA
gcggcgaggtaaatcaagggccattgaagtcataatcatt

SEQ ID NO: 23155 - DNA, 50 bp, Escherichia coli; identical to SEQ ID NO: 5265
  source 1..50: mol_type = genomic DNA

SEQ ID NO: 23156 - protein, 506 aa, Escherichia coli
MRSVITYLRFSSATQGAEGADSTRRQNELFKQWLRKNSDAQVVASFNDEGLSGYKGKHLSGQFGDMLSRIESGEFPEGTILLVEAIDRIGRLEHLETEALMNRIIAHGIEIHTLQDGLIYTRDALSDDLGISIIQRVKSYIAHQESKQKSFRVSQKWEQRAKLALAGEQRLTRNVPGWIDPETFKLNEHAETVRLIFKLLLDGESLHNIARHLQSNGIRSFSRRKDANGFSVHSVRTILRSETAIGTLPASQRNDRPAIPNYYEAAIDASTFNKAQEILGKNRIGRTPASDNPLTINIFKGLFRCQCGASAHPTGTKNKYQGVYRCNNHLDGRCDVPPLKRKPFDRWMIDNFLGMIDVVSDGETERRIAALQHEVETVTARIKKATALLLEMDDITELKAQVKELNQKRTELQTTIDTLKRKTSLTDKELPQLKDIDLMTKAGRVECQLILSKHLKGLTLGKDSVTVTLQNDTEITIPTNPLPLNDGTSIFEIADKELLEIDAYQL

SEQ ID NO: 23157 - DNA, 50 bp, Escherichia coli; identical to SEQ ID NO: 23152
  source 1..50: mol_type = genomic DNA

SEQ ID NO: 23158 - DNA, 40 bp, Escherichia coli; identical to SEQ ID NO: 20043
  source 1..40: mol_type = genomic DNA

SEQ ID NO: 23159 - DNA, 40 bp, Escherichia coli; identical to SEQ ID NO: 23154
  source 1..40: mol_type = genomic DNA

SEQ ID NO: 23160 - DNA, 50 bp, Escherichia coli; identical to SEQ ID NO: 5265
  source 1..50: mol_type = genomic DNA

SEQ ID NO: 23161 - protein, 506 aa, Escherichia coli
MRSVITYLRFSSATQGAEGADSTRRQNELFKQWLRKNSDAQVVASFNDEGLSGYKGKHLSGQFGDMLSRIESGEFPEGTILLVEAIDRIGRLEHLETEALMNRIIAHGIEIHTLQDGLIYTRDALSDDLGISIIQRVKSYIAHQESKQKSFRVSQKWEQRAKLALAGEQRLTRNVPGWIDPETFKLNEHAETVRLIFKLLLDGESLHNIARHLQSNGIRSFSRRKDANGFSVHSVRTILRSETAIGTLPASQRNDRPAIPNYYEAAIDASTFNKAQEILGKNRIGRTPASDNPLTINIFKGLFRCQCGASVHPTGTKNKYQGVYRCNNHLDGRCDVPPLKRKPFDRWMIDNFLGMIDVVSDGETERRIAALQHEVETVTARIKKATALLLEMDDITELKAQVKELNQKRTELQTTIDTLKRKTSLTDKELPQLKDIDLMTKAGRVECQLILSKHLKGLTLGKDSVTVTLQNDTEITIPTNPLPLNDGTSIFEIADKELLEIDAYQL

SEQ ID NO: 23162 - DNA, 50 bp, Escherichia coli; identical to SEQ ID NO: 23152
  source 1..50: mol_type = genomic DNA

SEQ ID NO: 23163 - DNA, 40 bp, Escherichia coli; identical to SEQ ID NO: 20043
  source 1..40: mol_type = genomic DNA

SEQ ID NO: 23164 - DNA, 40 bp, Escherichia coli; identical to SEQ ID NO: 23154
  source 1..40: mol_type = genomic DNA

SEQ ID NO: 23165 - DNA, 50 bp, Escherichia coli; identical to SEQ ID NO: 5265
  source 1..50: mol_type = genomic DNA

SEQ ID NO: 23166 - protein, 506 aa, Citrobacter freundii
MRGVITYLRYSSAIQGAEGADSTRRQNDLFKQWLKKNSDAQVVASFNDEGLSGYKGKHLSGQFGDMLSRIESGEFPEGTILLVEAIDRIGRLEHLETEALMNRIIAHGIEIHTLQDGLIYTRDALSDDLGISIIQRVKSYIAHQESKQKSFRVSQKWEQRAKLALAGEQRLTRNVPGWIDPETFKLNEHAETVRLIFKLLLDGESLHNIARHLQANNISSFSRRKDANGFSVHSVRTILRSETTIGTLPASQRNDRPAILNYYEAAIDASTFNKAQEILSKNRKGRTPASDNPLTINIFKGLFRCQCGASVHPTGTKNKYAGVYRCNNHLDGRCDVPPLKRKPFDKWMIDNFLGMIDVVSDGESERKIAALQHEVETVTARIKKATALLLEMDDITELKAQVKELNQKRTELQTTIDTLKRKTSLTDKELPQLKDIDLTTKVGRVECQLILSKHLKGLTLGKDSVTVTLQNDTEIIVPTDPLPLNDGTSIFEIAEKNLLEVDGFQL

SEQ ID NO: 23167 - DNA, 50 bp, Citrobacter freundii; identical to SEQ ID NO: 23152
  source 1..50: mol_type = genomic DNA

SEQ ID NO: 23168 - DNA, 40 bp, Citrobacter freundii; identical to SEQ ID NO: 5263
  source 1..40: mol_type = genomic DNA

SEQ ID NO: 23169 - DNA, 40 bp, Citrobacter freundii; identical to SEQ ID NO: 5264
  source 1..40: mol_type = genomic DNA

SEQ ID NO: 23170 - DNA, 50 bp, Citrobacter freundii; identical to SEQ ID NO: 5265
  source 1..50: mol_type = genomic DNA

SEQ ID NO: 23171 - protein, 506 aa, Escherichia coli; identical to SEQ ID NO: 23161

SEQ ID NO: 23172 - DNA, 50 bp, Escherichia coli; identical to SEQ ID NO: 23152
  source 1..50: mol_type = genomic DNA

SEQ ID NO: 23173 - DNA, 40 bp, Escherichia coli
  source 1..40: mol_type = genomic DNA
gcggcgaggtaaatcaagggtcattgaagtaataatcatt

SEQ ID NO: 23174 - DNA, 40 bp, Escherichia coli
  source 1..40: mol_type = genomic DNA
gcggcgaggtaaatcaagggccattgaagtaataatcatt

SEQ ID NO: 23175 - DNA, 50 bp, Escherichia coli; identical to SEQ ID NO: 5265
  source 1..50: mol_type = genomic DNA

SEQ ID NO: 23176 - protein, 506 aa, Escherichia coli
MRGVITYLRYSSAIQGAEGADSTRRQNDLFKQWLKKNSDAQVVASFNDEGLSGYKGKHLSGQFGDMLSRIESGEFPEGTILLVEAIDRIGRLEHLETEALMNRIIAHGIEIHTLQDGLIYTRDALSDDLGISIIQRVKSYIAHQESKQKSFRVSQKWEQRAKLALAGEQRLTRNVPGWIDPETFKLNEHAETVRLIFKLLLDGESLHNIARHLQANNISSFSRRKDANGFSVHSVRTILRSETTIGTLPASQRNDRPAILNYYEAAIDASTFNKAQEILSKNRKGRTPASDNPLTINIFKGLFRCQCGASVHPTGTKNKYAGVYRCNNHLDGRCDVPPLKRKPFDKWMIDNFLGMIDVVSDGESERKIAALQHEVETVTARIKKATALLLEMDDITELKAQVKELNQKRTELQTTIDTLKRKTSLTDKELPQLKDIDLTTKVGRVECQLILSKHLKGLTLGKDSVTVTLQNDTEIIIPTDPLPLNDGTSILEIAEKELLGIDVYQL

SEQ ID NO: 23177 - DNA, 50 bp, Escherichia coli; identical to SEQ ID NO: 23152
  source 1..50: mol_type = genomic DNA

SEQ ID NO: 23178 - DNA, 40 bp, Escherichia coli; identical to SEQ ID NO: 20043
  source 1..40: mol_type = genomic DNA

SEQ ID NO: 23179 - DNA, 40 bp, Escherichia coli; identical to SEQ ID NO: 23154
  source 1..40: mol_type = genomic DNA

SEQ ID NO: 23180 - DNA, 50 bp, Escherichia coli; identical to SEQ ID NO: 5265
  source 1..50: mol_type = genomic DNA

SEQ ID NO: 23181 - protein, 505 aa, Escherichia coli
MRGVITYLRYSSAIQGVEGADSTRRQNDLFQQWLKKNSDAQVVASFSDEGLSGYKGKHLSGQFGDMLSRIESGEFPEGTILLVESIDRIGRLEHLETEALMNRILGNGLEIHTLQDGLIYTKDALADDLGISIIQRVKAYIAHQESKQKSFRVSQKWEQRAKLALAGEQRLTRNVPGWIDPDTFKCNEHAETVRLIFKLLLSGESLHHIARHLQSNGIPSFSRHRANGFSVHSVRTVLRSESVIGTLPASQRNDRPAIPNYYEAAIDVSTFSKAQEILDKNRKGRTPASDNPLTINVFKGLFRCQCGASVHPTGTKRTYQGVYRCNNHLDGRCDVPPLKRKPFDNWMIDNFLGMIDVVSDGESERKIAALQHEVETVTARIKKATALLLEMDDITELKLQVKELNQKRTELQTTIDTLKRKTSLTDKELPQLKDIDLMTKVGRVECQLILSKHLKGLTLGKDSVTVTLQNDTEIIIPTDPLPLNDGSPILEIAEKELLEIDAYQL

SEQ ID NO: 23182 - DNA, 50 bp, Escherichia coli; identical to SEQ ID NO: 23152
  source 1..50: mol_type = genomic DNA

SEQ ID NO: 23183 - DNA, 40 bp, Escherichia coli; identical to SEQ ID NO: 20043
  source 1..40: mol_type = genomic DNA

SEQ ID NO: 23184 - DNA, 40 bp, Escherichia coli; identical to SEQ ID NO: 23154
  source 1..40: mol_type = genomic DNA

SEQ ID NO: 23185 - DNA, 50 bp, Escherichia coli; identical to SEQ ID NO: 5265
  source 1..50: mol_type = genomic DNA

SEQ ID NO: 23186 - protein, 506 aa, Escherichia coli
MRSVITYLRFSSATQGAEGADSTRRQNELFKQWLRKNSDAQVVASFNDEGLSGYKGKHLSGQFGDMLSRIESGEFPEGTILLVEAIDRIGRLEHLETEALMNRIIAHGIEIHTLQDGLIYTRDALSDDLGISIIQRVKSYIAHQESKQKSFRVSQKWEQRAKLALAGEQRLTRNVPGWIDPETFKLNEHAETVRLIFKLLLDGESLHNIARHLQSNGIRSFSRRKDANGFSVHSVRTILRSETAIGTLPASQRNDRPAIPNYYEAAIDASTFNKAQEILGKNRIGRTPASDNPLTINIFKGLFRCQCGASVHPTGTKNKYQGVYRCNNHLDGRCDVPPLKRKPFDRWMIDNFLGMIDVVSDGETERRIAALQHEVETVTARIKKATALLLEMDDITELKAQVKELNQKRTELQTTIDTLKRKTSLTDKELTQLKDIDLMTKAGRVECQLILSKHLKGLTLGKDSVTVTLQNDTEITIPTNPLPLNDGTSIFEIADKELLEIDAYQL

SEQ ID NO: 23187 - DNA, 50 bp, Escherichia coli; identical to SEQ ID NO: 23152
  source 1..50: mol_type = genomic DNA

SEQ ID NO: 23188 - DNA, 40 bp, Escherichia coli; identical to SEQ ID NO: 20043
  source 1..40: mol_type = genomic DNA

SEQ ID NO: 23189 - DNA, 40 bp, Escherichia coli; identical to SEQ ID NO: 23154
  source 1..40: mol_type = genomic DNA

SEQ ID NO: 23190 - DNA, 50 bp, Escherichia coli; identical to SEQ ID NO: 5265
  source 1..50: mol_type = genomic DNA

SEQ ID NO: 23191 - protein, 506 aa, Citrobacter portucalensis
MRAVITYLRYSSAIQGVDGADSTRRQNELFKQWLRKNSDAQVVASFNDEGLSGYKGKHLSGQFGDMLSRIESGEFPEGTILLVEAIDRIGRLEHLETEALMNRIIAHGIEIHTLQDGLIYTRDALSDDLGISIIQRVKSYIAHQESKQKSFRVSQKWEQRAKLALAGEQRLTRNVPGWIDPETFKLNEHAETVRLIFKLLLDGESLHNIARHLQSNGIKSFSRRKDANGFSVHSVRTILRSETTIGTLPASQRNDRPAIPNYYEAAIDASTFNKAQEILGKNRTGRTPASDNPLTINLFKGLFKCQCGASVHPTGTKNKYAGVYRCNNHLDGRCDVPPLKRKPFDRWMIDNFLGMIDVVSDGESERKIAALQHEVETVTARIKKATALLLEMDDITELKSQVKELNHKRTELQTTIDTLKRKTSLTDKELPQLKDIDLTTKAGRVECQLILSKHLKGLILCKDSVTVTLQNDTEITIPTNPLPLNDGSPILEIAKKELLEIDAYQL

SEQ ID NO: 23192 - DNA, 50 bp, Citrobacter portucalensis; identical to SEQ ID NO: 23152
  source 1..50: mol_type = genomic DNA

SEQ ID NO: 23193 - DNA, 40 bp, Citrobacter portucalensis; identical to SEQ ID NO: 5263
  source 1..40: mol_type = genomic DNA

SEQ ID NO: 23194 - DNA, 40 bp, Citrobacter portucalensis; identical to SEQ ID NO: 5264
  source 1..40: mol_type = genomic DNA

SEQ ID NO: 23195 - DNA, 50 bp, Citrobacter portucalensis; identical to SEQ ID NO: 5265
  source 1..50: mol_type = genomic DNA

SEQ ID NO: 23196 - protein, 506 aa, Escherichia coli; identical to SEQ ID NO: 23161

SEQ ID NO: 23197 - DNA, 50 bp, Escherichia coli; identical to SEQ ID NO: 23152
  source 1..50: mol_type = genomic DNA

SEQ ID NO: 23198 - DNA, 40 bp, Escherichia coli
  source 1..40: mol_type = genomic DNA
gctgcgaggtaaatcaagggtcattgaagtaataatcatt

SEQ ID NO: 23199 - DNA, 40 bp, Escherichia coli
  source 1..40: mol_type = genomic DNA
gctgcgaggtaaatcaagggccattgaagtaataatcatt

SEQ ID NO: 23200 - DNA, 50 bp, Escherichia coli; identical to SEQ ID NO: 5265
  source 1..50: mol_type = genomic DNA

SEQ ID NO: 23201 - protein, 506 aa, Escherichia coli
MRSVITYLRFSSATQGAEGADSTRRQNELFKQWLRKNSDAQVVASFNDEGLSGYKGKHLSGQFGDMLSRIESGEFPEGTILLVEAIDRIGRLEHLETEALMNRIIAHGIEIHTLQDGLIYTRDALSDDLGISIIQRVKSYIAHQESKQKSFRVSQKWEQRAKLALAGEQRLTRNVPGWIDPETFKLNEHAETVRLIFKLLLDGESLHNIARHLQSNGIRSFSRRKDANGFSVHSVRTILRSETTIGTLPASQRNDRPAIPNYYEAAIDASTFNKAQEILGKNRIGRTPASDNPLTINIFKGLFRCQCGASVHPTGTKNMYQGVYRCNNHLDGRCDVPPLKRKPFDRWMIDNFLGMIDVVSDGETERKIAALHHEVETVTARIKKATALLLEMDDITELKAQVKELNQKRTELQTTIDILKRKTSLTDKELPQLKDIDLMTKAGRVECQLILSKHLKGLTLCKDSVTVTLQNDTEITIPTNPLPLNDGTSIFEIADKELLEIDAYQL

SEQ ID NO: 23202 - DNA, 50 bp, Escherichia coli; identical to SEQ ID NO: 23152
  source 1..50: mol_type = genomic DNA

SEQ ID NO: 23203 - DNA, 40 bp, Escherichia coli; identical to SEQ ID NO: 20043
  source 1..40: mol_type = genomic DNA

SEQ ID NO: 23204 - DNA, 40 bp, Escherichia coli; identical to SEQ ID NO: 23154
  source 1..40: mol_type = genomic DNA

SEQ ID NO: 23205 - DNA, 50 bp, Escherichia coli; identical to SEQ ID NO: 5265
  source 1..50: mol_type = genomic DNA

SEQ ID NO: 23206 - protein, 506 aa, Escherichia coli
MRSVITYLRFSSATQGAEGADSTRRQNDLFKQWLKKNSDAQIVASFSDEGLSGYKGKHLTGQFGDMLARIESGEFPQGAILLVESIDRIGRLEHLETEALMNRIIAHGIEIHTLQDGLIYTRDALSDDLGISIIQRVKSYLAHQESKQKSFRVSEKWKQRAKLALAGKQRLTKMVPGWIDHDTFKINEHAETVRLIFKLLLSGESLHNIARHLQSNGIKSFSRRKDANGFSVHSVRTILRSETTIGTLPASQRNDRPAIPNYYEAAIDAATFNKAQEILDKNRKGRTPASDNPLTINIFKGLFRCQCGASVHPTGTKNKYAGVYRCNNNPDGRCDVPPLKRKPFDKWVLENFLGMIDVGNDGESERKIAALQHEVEIVTARIKKATALLLEMDDIDELKIQLKELNQKRTELQTTIDSMRRKASLTDKELPQLKDIDLTTKAGRVECQLILSKHLKGLTLGKDSVTVTLQNDTEITIPTNPLPLNDGSPIFEIADKELLDIDAYQL

SEQ ID NO: 23207 - DNA, 50 bp, Escherichia coli; identical to SEQ ID NO: 23152
  source 1..50: mol_type = genomic DNA

SEQ ID NO: 23208 - DNA, 40 bp, Escherichia coli; identical to SEQ ID NO: 20043
  source 1..40: mol_type = genomic DNA

SEQ ID NO: 23209 - DNA, 40 bp, Escherichia coli; identical to SEQ ID NO: 23154
  source 1..40: mol_type = genomic DNA

SEQ ID NO: 23210 - DNA, 50 bp, Escherichia coli; identical to SEQ ID NO: 5265
  source 1..50: mol_type = genomic DNA

SEQ ID NO: 23211 - protein, 505 aa, Escherichia coli
MRGVITYLRYSSAIQGVEGADSTRRQNDLFQQWLKKNSDAQVVASFSDEGLSGYKGKHLSGQFGDMLSRIESGEFPEGTILLVESIDRIGRLEHLETEALMNRILGNGLEIHTLQDGLIYTKDALADDLGISIIQRVKAYIAHQESKQKSFRVSQKWEQRAKLALAGEQRLTRNVPGWIDPDTFKCNEHAETVRLIFKLLLSGESLHHIARHLQSNGIPSFSRHRANGFSVHSVRTVLRSESVIGTLPASQRNDRPAIPNYYEAAIDVSTFSKAQEILDKNRKGRTPASDNPLTINVFKGLFRCQCGASVHPTGTKRTYQGVYRCNNHLDGRCDVPPLKRKPFDKWMIDNFLGMIDVVSDGESERKIAALQHEVETVTARIKKATALLLEMDDITELKAQVKELNQKRTELQTTIDTLKRKTSLTDKELPQLKDIDLTTKVGRVECQLILSKHLKGLTLGKDSVTVTLQNDTEIIIPTDPLPLNDGSPILEIAEKELLEIDAYQL

SEQ ID NO: 23212 - DNA, 50 bp, Escherichia coli; identical to SEQ ID NO: 23152
  source 1..50: mol_type = genomic DNA

SEQ ID NO: 23213 - DNA, 40 bp, Escherichia coli; identical to SEQ ID NO: 20043
  source 1..40: mol_type = genomic DNA

SEQ ID NO: 23214 - DNA, 40 bp, Escherichia coli; identical to SEQ ID NO: 23154
  source 1..40: mol_type = genomic DNA

SEQ ID NO: 23215 - DNA, 50 bp, Escherichia coli; identical to SEQ ID NO: 5265
  source 1..50: mol_type = genomic DNA

SEQ ID NO: 23216 - protein, 506 aa, Citrobacter koseri
MRSVITYLRFSSAIQGAEGADSTRRQNELFKQWLRKNSDAQVVASFNDEGLSGYKGKHLSGQFGDMLSRIESGEFPEGTILLVEAIDRIGRLEHLETEALMNRIIAHGIEIHTLQDGLIYTRDALSDDLGISIIQRVKSYIAHHESKQKSFRVSQKWEQRAKLALAGEQRLTRNVPGWIDPETFKLNEHAETVRLIFNLLLSGESLHNIARHLQSNGVRSFSRRKDANGFSVHSVRTILRSETTIGTLPASQRNDRPAIPNYYEAAIDASTFNKAQEILNKNRKGRTPASDNPLTLNIFKGLFRCQCGASVHPTGTKNKYAGVYRCNNHLDGRCDVPALKRKPFDRWMIDNFLGMIDVVSDGESERKIAALQHEVETVTARIKKATALLLEMDDITELKSQVKELNQKRTELQTTIDTLKRKTSLTDKELPQLKDIDLTTKAGRVECQLILSRHLKGLTLCKDSVTVTLQNDTEIIIPTDPLPLNDGTSIFEIADKELLDIDAYKL

SEQ ID NO: 23217 - DNA, 50 bp, Citrobacter koseri; identical to SEQ ID NO: 23152
  source 1..50: mol_type = genomic DNA

SEQ ID NO: 23218 - DNA, 40 bp, Citrobacter koseri; identical to SEQ ID NO: 5263
  source 1..40: mol_type = genomic DNA

SEQ ID NO: 23219 - DNA, 40 bp, Citrobacter koseri; identical to SEQ ID NO: 5264
  source 1..40: mol_type = genomic DNA

SEQ ID NO: 23220 - DNA, 50 bp, Citrobacter koseri; identical to SEQ ID NO: 5265
  source 1..50: mol_type = genomic DNA

SEQ ID NO: 23221 - protein, 506 aa, Escherichia coli
MRSVITYLRFSSATQGAEGADSTRRQNELFKQWLRKNSDAQVVASFNDEGLSGYKGKHLSGQFGDMLSRIESGEFPEGTILLVEAIDRIGRLEHLETEALMNRIIAHGIEIHTLQDGLIYTRDALSDDLGISIIQRVKSYIAHQESKQKSFRVSQKWEQRAKLALAGEQRLTRNVPGWIDPETFKLNEHAETVRLIFKLLLDGESLHNIARHLQSNGIRSFSRRKDANGFSVHSVRTILRSETTIGTLPASQRNDRPAIPNYYEAAIDASTFNKAQEILGKNRIGRTPASDNPLTINIFKGLFRCQCGASVHPTGTKNKYQGVYRCNNHLDGRCDVPPLKRKPFDRWMIDNFLGMIDVVSDGESERKIAALQHEVETVTARIKKATALLLEMDDITELKAQVKELNQKRTELQTTIDTMKRKTSLTDKGLPQLKDIDLMTKAGRVECQLILSKHLKGLTLGKDSVTVTLQNDTEIIVPTDPLPLNDGTSIFEIAEKNLLEVDGFQL

SEQ ID NO: 23222 - DNA, 50 bp, Escherichia coli; identical to SEQ ID NO: 23152
  source 1..50: mol_type = genomic DNA

SEQ ID NO: 23223 - DNA, 40 bp, Escherichia coli; identical to SEQ ID NO: 20043
  source 1..40: mol_type = genomic DNA

SEQ ID NO: 23224 - DNA, 40 bp, Escherichia coli; identical to SEQ ID NO: 23154
  source 1..40: mol_type = genomic DNA

SEQ ID NO: 23225 - DNA, 50 bp, Escherichia coli; identical to SEQ ID NO: 5265
  source 1..50: mol_type = genomic DNA

SEQ ID NO: 23226 - protein, 505 aa, Escherichia coli
MRGVITYLRYSSAIQGVEGADSTRRQNDLFQQWLKKNSDAQVVASFSDEGLSGYKGKHLSGQFGDMLSRIESGEFPEGTILLVESIDRIGRLEHLETEALMNRILGNGLEIHTLQDGLIYTKDALADDLGISIIQRVKAYIAHQESKQKSFRVSQKWEQRAKLALAGEQRLTRNVPGWIDPDTFKCNEHAETVRLIFKLLLSGESLHHIARHLQSNGIPSFSRHRANGFSVHSVRTVLRSESVIGTLPASQRNDRPAIPNYYEAAIDVSTFSKAQEILDKNRKGRTPASDNPLTINVFKGLFRCQCGASVHPTGTKRTYQGVYRCNNHLDGRCDVPPLKRKPFDKWMIDNFLGMIDVVSDGESERKIAALQHEVETVTARIKKATALLLEMDDITELKAQVKELNQKRTELQTTIDTLKRKTSLTDKELPQLKDIDLTTKVGRVECQLILSKHLKGLTLGKDSVTVTLQNDTEIIIPTDPLPLNDGSPIPEIAEKELLEIDAYQL

SEQ ID NO: 23227 - DNA, 50 bp, Escherichia coli; identical to SEQ ID NO: 23152
  source 1..50: mol_type = genomic DNA

SEQ ID NO: 23228 - DNA, 40 bp, Escherichia coli; identical to SEQ ID NO: 20043
  source 1..40: mol_type = genomic DNA

SEQ ID NO: 23229 - DNA, 40 bp, Escherichia coli; identical to SEQ ID NO: 23154
  source 1..40: mol_type = genomic DNA

SEQ ID NO: 23230 - DNA, 50 bp, Escherichia coli; identical to SEQ ID NO: 5265
  source 1..50: mol_type = genomic DNA

SEQ ID NO: 23231 - protein, 506 aa, Escherichia coli
MRSVITYLRFSSAIQGAEGADSTRRQNDLFKQWLKKNSDAQIVASFSDEGLSGYKGKHLTGQFGDMLARIESGEFPEGTILLVEAIDRIGRLEHLETEALMNRILGNGIEIHTLQDGLIYTKDALADDLGISIIQRVKAYIAHQESKQKSFRVSQRWGQRAKLALAGKQRLTKMVPGWIDPETFKLNEHAETVRLIFKLLLDGESLHNIARHLQSNGIKSFSRRKDANGFSVHSVRTILRSETTIGTLPASQRNDRPAIPNYYEGVVDIPTFNKAQEILDKNRKGRTPASDNPLTINIFKGLFRCQCGASVHPTGTKNKYAGVYRCNNHLDGRCDVQPLKRKPFDRWMIDNFLGMIDVGNDGESERKIAALQHEVEIVTSRIKKATALLLEMDDITELKTQVKELNQRRTDIQTTIDTLKRKTSLSDKGLPQLKDIDLMTKAGRVECQLILSKHLKGLTLGKGSVTITLQNDTEITIPTNPLPLNDGSPIFEIADKELLDIDAYQL

SEQ ID NO: 23232 - DNA, 50 bp, Escherichia coli
  source 1..50: mol_type = genomic DNA
aaccgaatagactttattcaatggccattgtattgtagctattcggcatt

SEQ ID NO: 23233 - DNA, 40 bp, Escherichia coli
  source 1..40: mol_type = genomic DNA
cggcgaggtaaatcaagggtcattgaagtcataatcattt

SEQ ID NO: 23234 - DNA, 40 bp, Escherichia coli
  source 1..40: mol_type = genomic DNA
cggcgaggtaaatcaagggccattgaagtcataatcattt

SEQ ID NO: 23235 - DNA, 50 bp, Escherichia coli
  source 1..50: mol_type = genomic DNA
aaacgaaaaaaggaaaaacaatggccattgttttttgtaactttggcatc

SEQ ID NO: 23236 - protein, 555 aa, Streptomyces spectabilis
MATATLTRSAGTLSVPTGGMEMTTQGGVCGCHGRPWVDLLLRKSKIVREGERALSIRAQEDRGRAWADEHGYCVRKVWKENLSAWSDVQRPKYDAAMAAVMNGEVPCLWVYALDRFSRKGAEAVVPILGKARVIFDYERLDSMDERDRRWIIDRAENAREYSQRLSYNVRTTKGKQRNEGRWLAKAPFGLVADKETRRLSPDLSPYLCVVKGRRELSPWEVVVRIFTEIAEGVSSRALARKFNEEGIRSSTGKFWRADSIRAIVIHPVYEGWLTVSPGGKSHKSPVHYVNDKGERVRCVEPDVLPDMISATLAARARRVLSGNQIIDNTPVEGKAVHALSGKMRCASCTNAMVLDGKSYNCQRRAAGGACPGPASAWREAIERYVVQQWADRLYRAADDDPLMIAVAERWQALTRPDENAEIKEARAELKAAQAKLDKFMADDAADFYTGRSAKYRIPHKNAAEKRLDAAEERVKELTGGGRVDLSFLMEGHAEATWRAADPMLRRDLLGLAIESVTVTKSPGQGKRFKGDERVSIVWATPEGAEPDADEFEQAA

SEQ ID NO: 23237 - DNA, 50 bp, Streptomyces spectabilis
  source 1..50: mol_type = genomic DNA
agttgccagggtgtagggtctaccggtgtaggtccaacaccctgggacct

SEQ ID NO: 23238 - DNA, 40 bp, Streptomyces spectabilis
  source 1..40: mol_type = genomic DNA
tccctggagggcgccgacgggctcgcggtcgtagcggaac

SEQ ID NO: 23239 - DNA, 40 bp, Streptomyces spectabilis
  source 1..40: mol_type = genomic DNA
tccctggagggcgccgacgtcctcgcggtcgtagcggaac

SEQ ID NO: 23240 - DNA, 50 bp, Streptomyces spectabilis
  source 1..50: mol_type = genomic DNA
aggtgccatcttccaggtcctccgtctggatgtccactttgctggggcct

SEQ ID NO: 23241 - protein, 480 aa, Enterococcus casseliflavus
MKFAIYVRVSTLEQAEEGYSIEEQIDKLSKYCEVKNWDIFKIYKDGGFSGSTTDRPGLSSLITDSKRKKFQGVLVYKLDRLSRSQKDTLYLIEDVFTANDISFVSLNENFDTSSAFGKAMIGILAVFAQLEREQIKERMVMGKVGRAKSGKAMSWSKVPFGYIYENDTYVAHPIQAPIVKQIFDDYMSGISITKLKDKLNDEGHIGKEINWSYRTIRQTLANPIYAGINRYNGELFEGNHEGIITKDFFEKVQSELKVRQVAAYEKNNNPRPFQSKYMLSGIIRCGLCGASLSVGMQAKRKDGSRHRYYRCYSKSKKKNLTMTKDPNGCSSPNYSMDELEKHILSQIEQIRLNPELINALSANDSVVDFSSYNKRIDELDLSLEKIVNLFIDDAIPKDILEAKMKKIKQEKDSLEKKIDSLKIKRPILEPIEAKDILSKLTDNIWNLSYEDQKSIVMELISKILVYPDKLEIYWKFAINQ

SEQ ID NO: 23242 - DNA, 50 bp, Enterococcus casseliflavus
  source 1..50: mol_type = genomic DNA
tcagtaaatttaatatacagcatttcaaccaatgatagtaaatttactca

SEQ ID NO: 23243 - DNA, 40 bp, Enterococcus casseliflavus; identical to SEQ ID NO: 5123
  source 1..40: mol_type = genomic DNA

SEQ ID NO: 23244 - DNA, 40 bp, Enterococcus casseliflavus
  source 1..40: mol_type = genomic DNA
taataaaacgactagcattacaaccaatgtaaagcctttt

SEQ ID NO: 23245 - DNA, 50 bp, Enterococcus casseliflavus
  source 1..50: mol_type = genomic DNA
tcattacacatgttatatatcattacatacaatgataatgtattttatca

SEQ ID NO: 23246 - protein, 454 aa, Listeria innocua
MEMKAAIYIRVSTQEQVENYSIQAQTEKLTALCRSKDWDVYDIFIDGGYSGSNMNRPALNEMLSKLHEIDAVVVYRLDRLSRSQRDTITLIEEYFLKNNVEFVSLSETLDTSSPFGRAMIGILSVFAQLERETIRDRMVMGKIKRIEAGLPLTTAKGRTFGYDVIDTKLYINEEEAKQLRLIYDIFEEEQSITFLQKRLKKLGFKVRTYNRYNNWLTNDLYCGYVSYKDKVHVKGIHEPIISEEQFYRVQEIFTRMGKNPNMNRDSASLLNNLVVCGKCGLGFVHRRKDTVSRGKKYHYRYYSCKTYKHTHELEKCGNKIWRADKLEELIIDRVNNYSFASRNVDKEDELDYLNEKLKIEHAKKKRLFDLYINGSYEVSELDSMMNDIDAQINYYEAQIEANEELKKNKKIQENLADLATVDFDSLEFREKQLYLKSLINKIYIDDEQVTIEWL

SEQ ID NO: 23247 - DNA, 50 bp, Listeria innocua
  source 1..50: mol_type = genomic DNA
tttagtttctcatttcctctcactggacggagaataactgagaaactaaa

SEQ ID NO: 23248 - DNA, 40 bp, Listeria innocua
  source 1..40: mol_type = genomic DNA
tttcggatcaagttatgatggacgtaaagagggaacaaag

SEQ ID NO: 23249 - DNA, 40 bp, Listeria innocua
  source 1..40: mol_type = genomic DNA
tttcggatcaagttatgattgacgtaaagagggaacaaag

SEQ ID NO: 23250 - DNA, 50 bp, Listeria innocua
  source 1..50: mol_type = genomic DNA
tttagttttgcaacaactttaacttgaatgaggatagaatggaaactaca

SEQ ID NO: 23251 - protein, 547 aa, Streptococcus pyogenes
MSKEKIKVYLYTRVSTSIQIDGYSLEAQKSRMKAFALYNDYEIVGEYEDAGKSGKSIEGRVQFTRMMEDIKSGKDGVSFVLVFKLSRFARNAADVLSTLQIMQDFGVNLICVEDGIDSSKDAGKLMISVLSAVAEIERENIRVQTMEGRIQKAREGKWNGGFAPYGYQLIDGKLLINEEEAIAIRTIFDQYVNTSIGANGISKYLENHGIRKIPRQNGKNPLFDAGLIRKILKNPVYNGKIAFGRRTLEKVHGTRNEYKQVEQDEYLISEGIHEAIVSDEVWQAAQVKLKSQAKKYEHVNKGKDTRTHLLSGIVKCPICGVGMFGNKCIKKKKDGTKYKDFYYYGCKHRQMIRGHKCTFSKQIREELLDDAVAEVIIKLVSNPKFASMMQEKINMKVDTSEIEKEIDNYQKELRKSHSTKFKLIEEIDNLDVEDKHYKRRKQDLDDRLYRMYDKIEELESLLIDAKAKKQTIEAEKLTGDNIYKVLIYFDKLYKVMNDVERRQLISALISEIQIYEEKQPNGQWLKSITFKLPIIDENINIGLDNDE

SEQ ID NO: 23252 - DNA, 50 bp, Streptococcus pyogenes
  source 1..50: mol_type = genomic DNA
atataggtttggacaacgatgaacatgtggagtgcatagcgttgatacaa

SEQ ID NO: 23253 - DNA, 40 bp, Streptococcus pyogenes
  source 1..40: mol_type = genomic DNA
ttgtttccgcaaacgcatcacgttgagtgcgtagtgttgc

SEQ ID NO: 23254 - DNA, 40 bp, Streptococcus pyogenes
  source 1..40: mol_type = genomic DNA
ttgtttccgcaaacgcatcctgttgagtgcgtagtgttgc

SEQ ID NO: 23255 - DNA, 50 bp, Streptococcus pyogenes
  source 1..50: mol_type = genomic DNA
aaataggtataagcaataatttatctgtggaatgcagggccttgatacat

SEQ ID NO: 23256 - protein, 578 aa, Pseudomonas rhodesiae
MSATPPSGYAYIRHSTKRQGGDDKDSVTRQKESIRSLAEQYKVEVPDDNFFYENGVSAFSGKNRTHGKLKELIDQIDSLRIRPGDYVFVESIDRLSRQRLLQAKELVNGILEKGIILVTTIDNQRYEKASEANGIDDLAQDILLSVIAKRAHEESRTKSVRRLSAWNKAKKEADEKGKPFNVKRPPFGVQYNDLTQSFEPNPEQVEELTRIFVSLKLQGVTATIKEINKTSLIRWTSNRVKDIFETKYPLGFLYSQKKADGKMQFDKYIENYYPQLVSYELFEEARQAMQQRKIKKRVGRASVGNVNIFRHTARCGKCGESMFFMHNFGSGKKHYYYLSCRTNFEQNAKCSNRIRYDLAVQILFVAIQHAEMLKWLSEQPDEDKKQFGDYLYKTFKELDELSVTNGMLTLATAFLKIMSTSNEHKTYNTEIIEMEGELSKAKVRLENLERSAQSITDGNYPSILLKQLASAEESISILKEKREQYITNASTPKSDLKIETLKQFTNLFREETGRLEIINFLVSNGLTFSFDYDKNSKKLTTTVHIDNRLTTTLYHTNDNTYLSEFGFNNLGDEFKLFD

SEQ ID NO: 23257 - DNA, 50 bp, Pseudomonas rhodesiae
  source 1..50: mol_type = genomic DNA
atgttagtaaaaggtaggttggtcttgtacaatgcagccataactaacaa

SEQ ID NO: 23258 - DNA, 40 bp, Pseudomonas rhodesiae
  source 1..40: mol_type = genomic DNA
cacgggcatgtggttggtcttgaagtaaatcccaaccatc

SEQ ID NO: 23259 - DNA, 40 bp, Pseudomonas rhodesiae
  source 1..40: mol_type = genomic DNA
cacgggcatgtggttggtcctgaagtaaatcccaaccatc

SEQ ID NO: 23260 - DNA, 50 bp, Pseudomonas rhodesiae
  source 1..50: mol_type = genomic DNA
atgttagtaaattctagattgattctgttccctgcagaaggaactccaaa

SEQ ID NO: 23261 - protein, 465 aa, Brochothrix thermosphacta
MKLRAAIYVRVSTMEQAEEGYSISAQTEKLKSYANAKDYQVVKVFTDPGYSGAKLERPGLQNMIKSIESKEIDVVLVYKLDRLSRSQKNTLFLIEDVFLKNHVQFTSMQESFDTSTSFGRAMIGILSVFAQLERDAITERMQMGAKERAKAGMWRGGPQSRLPFGYRYIDGVLLVDDYEAMIVKYMYTEFIKGTPLTKIQSKVAAKFPVKETLIYPSIMKNILQNNIYIGKIKYAGETYEGLHEHILDTETYDKAQQLWEHRNTNKKKYFESKYLLSGILYCGHCGGKMASTGAGLLKSGERVTDYICYSKKGTPSHMVVDRNCPSKRHRVNRLDPKIVELLKTITFEEMQKDNSFTDNTTTIKSEIESLDTKISKLLDLYQDGLVPIDVLNDRISKLNDDKELLQETLISQKKQIHPEEIAKNIQTAKDFDWANSDSAAKRAMVRALINKVELTNEDMKIEWNI

SEQ ID NO: 23262 - DNA, 50 bp, Brochothrix thermosphacta
  source 1..50: mol_type = genomic DNA
gttagtgcacaaacaacttctacatgcgtagtttttcattgttcaacagt

SEQ ID NO: 23263 - DNA, 40 bp, Brochothrix thermosphacta
  source 1..40: mol_type = genomic DNA
agccgtgactacctccacgtgagttgtctgtggaaacatg

SEQ ID NO: 23264 - DNA, 40 bp, Brochothrix thermosphacta
  source 1..40: mol_type = genomic DNA
agccgtgactacctccacggaagttgtctgtggaaacatg

SEQ ID NO: 23265 - DNA, 50 bp, Brochothrix thermosphacta
  source 1..50: mol_type = genomic DNA
ctcacttcaattactacttctacagaggtactttttcttgattccacaga

SEQ ID NO: 23266 - protein, 493 aa, Bacillus cereus
MKEIMNVAIYLRLSRDEENKGIESILENHRNKLTELCQQNKWKYEIFQEIASSRTIELREQLSDMLERVKQNHYDAVVVMDVDRLSRNEFDAPQIFKILSDSNTVIVTPTKIYDWSRDEDNLLLGIQSLVAAQEYKQIKKRMTAGKRSASEKGLWVHGIPPLGYDKDSETRKLVPNEDAKHVKFIFNSIVKGKTVSDVYHELNKMGVKTRTNSTFAFNSVIRIVNNQAYKGTIASNKYLDKNEMRPKNEWHYVENVHPAIVDETTWEKANKIVNTYSFSAPRSKNKIYPTTKLIFCGNCGKVQGAQMAGTGKMYLKVCQRCKNRTYLYEPILKLIKERVKKRIPDVLKQITEIEQKDNSAEIEYKKQQIKKKMKILERAIEKIKDAYELEEYTPSEFKERKAKREDEIKQLKAELGRIEQQNPKDKIADLIEIKKRIEHLLQTWQCLDGEGLTDEEVNRNLHFIIERIEWTYEKGDETPELNIVWKTDESYAK

SEQ ID NO: 23267 - DNA, 50 bp, Bacillus cereus
  source 1..50: mol_type = genomic DNA
aaataatccccaaattcgtaacaaacaagacctgaatttagggactattt

SEQ ID NO: 23268 - DNA, 40 bp, Bacillus cereus; identical to SEQ ID NO: 22328
  source 1..40: mol_type = genomic DNA

SEQ ID NO: 23269 - DNA, 40 bp, Bacillus cereus
  source 1..40: mol_type = genomic DNA
actcgtgtttactggaccgtgtggatctgggaagacgacg

SEQ ID NO: 23270 - DNA, 50 bp, Bacillus cereus
  source 1..50: mol_type = genomic DNA
aaaaaatcctattctttataaaactgaagtgctgaactgatggatttttt

SEQ ID NO: 23271 - protein, 507 aa, Escherichia coli; identical to SEQ ID NO: 5406

SEQ ID NO: 23272 - DNA, 50 bp, Escherichia coli
  source 1..50: mol_type = genomic DNA
agtgtatttagaccttgctgttcttttcatcagacacgtttaaatacacc

SEQ ID NO: 23273 - DNA, 40 bp, Escherichia coli; identical to SEQ ID NO: 5408
  source 1..40: mol_type = genomic DNA

SEQ ID NO: 23274 - DNA, 40 bp, Escherichia coli
  source 1..40: mol_type = genomic DNA
gcggcgttaatcgggtgatattagacagccgcccggttca

SEQ ID NO: 23275 - DNA, 50 bp, Escherichia coli
  source 1..50: mol_type = genomic DNA
agtctattttttttttcctattctattcatgagaagccagtaaacccagc

SEQ ID NO: 23276 - protein, 669 aa, Vibrio parahaemolyticus
MRLSAIAQATEDLRPVVITYTRFSTNIQKEGLSEYRQDELTQRYVLDFCEEHGVPVEDIISLKDRGISAYRGKNMTKGSLSEIISKFNSGELPKVYNEKGEINTFLFIESLDRLSRADLHTANKLFLDLVEYCNIVVVAENEKKIYSLNSLKTDMGMLDLFSALLTLSRSHNESRMKEMRHRANWSKKRQVVIDYFELPEDEREGVEYPLNPTKTCPWWLRPKADNRGFEFIEEHKEAMLYFLNRMMEGHGLTSCIRRLNEKIENGDFKVEFTERQKKAQGFQTHTFYQLLSGDDNESIIGNLIFHQDYYPTEKDVQQGLYEKKSLGKKVRIPVFTAKGFYPALLNEVEYMRLKQQMKQRKQSQTKPTKKVQNIAQGLLKCPLCGYSYVYVADNRKGRHHNLVCGLSRSKKCKSYTFRYKWFEKNLLNYCRNLDMNRILGIKIDNKLKERISELEVNALTYEQEIGVKNKELEQLVENLSKITIPTLLEKAQDQYVKIENSIKVITYEKEQNELELVDLKKRSIKSDIVSKEVYELIDSVQLQENVSLRERLNIELKKVISELYIYHKDNPNNYFGRNMIVVKFRDDYIRFIPLDRELEREELYNILPTINTKKAVDYSKYEILPFDYLEGLEEGRYPEHQFITKFYQENPDVLAEILSELDEADDVYV

SEQ ID NO: 23277 - DNA, 50 bp, Vibrio parahaemolyticus
  source 1..50: mol_type = genomic DNA
tgctaaatattactttttactatcttaatagtgacaaacaaagtttagca

SEQ ID NO: 23278 - DNA, 40 bp, Vibrio parahaemolyticus
  source 1..40: mol_type = genomic DNA
tgcaatgatcatcactttattgatcatccaaaccattgca

SEQ ID NO: 23279 - DNA, 40 bp, Vibrio parahaemolyticus
  source 1..40: mol_type = genomic DNA
tgcaatgatcatcactttatagatcatccaaaccattgca

SEQ ID NO: 23280 - DNA, 50 bp, Vibrio parahaemolyticus
  source 1..50: mol_type = genomic DNA
tgagaattacagatttttgctatctaactggtgacactggaagaaaagca

SEQ ID NO: 23281 - protein, 669 aa, Vibrio parahaemolyticus
MRLSAIAQATEDLRPVVITYTRFSTNIQKEGLSEYRQDELTQRYVLDFCEEHGVPVEDIISLKDRGISAYRGKNMTKGSLSEVIAKFNSGELPKVYNEKGEINTFLFIESLDRLSRADLHTANKLFLDLVEYCNIVVVAENEKKIYSLNSLKTDMGMLDLFSALLTLSRSHNESRMKEMRHRANWSKKRQVVIDYFELPEDEREGVEYPLNPTKTCPWWLRPKADNRGFEFIEEHREAMLYFLNRMMEGHGLTSCIRRLNEKIENGDFKVEFTERQKKAKGFQTHTFYQLLSGDDNESIIGNLIFHQDYYPTEKDVQQGLYEKKSLGKKVRIPVFTAKGFYPALLNEVEYMRLKQQMKQRKQSQTKPTKKVQNIAQGLLKCPLCGYSYVYVADNRKGRHHNLVCGLSRSKKCKSYTFRYKWFEKNLLNYCRNLDMNRILGIKIDNKLKERISELEVNALTYEQEIEVKNKELEQLVENLSKITIPTLLEKAQDQYVKIENSIKVITYEKEQNELELVDLKKRSIKSDIVSEEVYELIDSVQLQENVSLRERLNIELKKVISELYIYHKDNPNNYFGRNMIVVKFRDDYIRFIPLDRELEREELYNILPTISTKKAVDYSKYEILPFDYLEGLEEGRYPEHQFITKFYQENPDVLAEILSELDEADNVYV

SEQ ID NO: 23282 - DNA, 50 bp, Vibrio parahaemolyticus; identical to SEQ ID NO: 23277
  source 1..50: mol_type = genomic DNA

SEQ ID NO: 23283 - DNA, 40 bp, Vibrio parahaemolyticus; identical to SEQ ID NO: 23278
  source 1..40: mol_type = genomic DNA

SEQ ID NO: 23284 - DNA, 40 bp, Vibrio parahaemolyticus; identical to SEQ ID NO: 23279
  source 1..40: mol_type = genomic DNA

SEQ ID NO: 23285 - DNA, 50 bp, Vibrio parahaemolyticus; identical to SEQ ID NO: 23280
  source 1..50: mol_type = genomic DNA

SEQ ID NO: 23286 - protein, 669 aa, Vibrio diabolicus
MRLSAIAQATEDLRPVVITYTRFSTNIQKEGLSEYRQDELTQRYVLDFCEEHGVPVEDIISLKDRGISAYRGKNMTKGSLSEVIAKFNSGELPKVYNEKGEINTFLFIESLDRLSRADLHTANKLFLDLVEYCNIVVVAENEKKIYSLNSLKTDMGMLDLFSALLTLSRSHNESRMKEMRHRANWSKKRQVVIDYFELPEDEREGVEYPLNPTKTCPWWLRPKTDNRGFEFIEEHKEAMLYFLNRMMEGHGLTSCIRRLNEKIENGDFKVEFTERQKKAKGFQTHTFYQLLSGDDNESIIGNLIFHQDYYPTEKDVQQGLYEKKSLGKKVRIPVFTAKGFYPALLNEVEYMRLKQQMKQRKQSQTKPTKKVQNIAQGLLKCPLCGYSYVYVADNRKGRHHNLVCGLSRSKKCKSYTFRYKWFEKNLLNYCRNLDMNRILGIKIDNKLKERISELEVNALTYEQEIEVKNKELEQLVENLSKITIPTLLEKAQDQYVKIENSIKVITYEKEQNELELVDLKKRSIKSDIVSKEVYELIDSVQLQENVSLRERLNIELKKVISELYIYHKDNPNNYFGRNMIVVKFRDDYIRFIPLDRELEREELYNILPTISTKKAVDYSKYEILPFDYLEGLEEGRYPEHQFITKFYQENPDVLAEILSELDEADNVYV

SEQ ID NO: 23287 - DNA, 50 bp, Vibrio diabolicus; identical to SEQ ID NO: 23277
  source 1..50: mol_type = genomic DNA

SEQ ID NO: 23288 - DNA, 40 bp, Vibrio diabolicus
  source 1..40: mol_type = genomic DNA
ggcaatgatcatcactttgttgatcatccaaaccattgcg

SEQ ID NO: 23289 - DNA, 40 bp, Vibrio diabolicus
  source 1..40: mol_type = genomic DNA
ggcaatgatcatcactttgtagatcatccaaaccattgcg

SEQ ID NO: 23290 - DNA, 50 bp, Vibrio diabolicus; identical to SEQ ID NO: 23280
  source 1..50: mol_type = genomic DNA

SEQ ID NO: 23291 - protein, 542 aa, Brevibacillus brevis
MKKRVWALYRVSTDKQVTDEDIPMQKNAVYRFIEKRKDWELSNELSELGVSGFKKSVQQRDKLQLIKKGAQEGKFDVLVVWKDDRLGRNKFEIPFMLEFLGKHGIEVWSVEDGILNKDEKHEDSLLSFLRFWVAEGESKKTSVRVTEAIKQMNELGKWTGNKIPFGYEMYDTGIVHPKSDKTIKEIKIKEMDSIIVKLIFYLVLEKGYGADRIANFLNENGYSPREGGKWRNNVVRRILRNPIYIGRQRYNINDKDGIKLKPKREDLVILPDEIFYNVQDVLNKRNAKQKGDSDSELNLPTKSKNLLLSGIARCGYCRAKLYADSSTKTKLKSDGTKSSYTYWRYVCRESLNHRETHPKSYFGAKRYEPEIEKHVINMLNSFVNAEEFDETALDTLDSQYEQKCVQIQAIKKEIQNLNTQLEAVKGLIIKIAMGESKLTENYVVEQIGLKEAEIKKQQNLIEVCEKEKNELEDRNKKFRSTKQELETWEYRYRKGDHDTKKTMLANALDVVYFFDKEFEIELNYYYEEILKRFKMIGKAETY

SEQ ID NO: 23292 - DNA, 50 bp, Brevibacillus brevis
  source 1..50: mol_type = genomic DNA
aggctcttttccgataccatgccagatgctatggtttcattgctgccctt

SEQ ID NO: 23293 - DNA, 40 bp, Brevibacillus brevis
  source 1..40: mol_type = genomic DNA
acctggaccacccatgccagatcccaatggatcgcctgtt

SEQ ID NO: 23294 - DNA, 40 bp, Brevibacillus brevis
  source 1..40: mol_type = genomic DNA
acctggaccacccatgccatctcccaatggatcgcctgtt

SEQ ID NO: 23295 - DNA, 50 bp, Brevibacillus brevis
  source 1..50: mol_type = genomic DNA
aggctctttctggcttccacaccatctggtatggtttggctgtgtcccca

SEQ ID NO: 23296 - protein, 657 aa, Vibrio kanaloae
MKGSGVAIQINDEVLKSLSNEHSLPIAQETYQDLGKSAYKGEHLQNELGLFLSAVKSRTVAEGSILVVYSLDRLSRLEIGHAKQTYYDLTNNGVSVYALVDNHLYRAHNAADDIIATITFERAHNESKNKSRRVIDAAKQALKRWKETGESQKNLGRTPFWIDQSTNSFNVNAEGVKKAIEMRIAGYGDLKIKQYLDENFEYKPTRLKGRVKLINSWDYIAISQLWGKRSLFGEKTYTIEGIEHVMDNYYPALISEDTFRKLQIQKKTKQGRDTASGKIPLLKSLARCGFCGGAMVFVDKGGNRVNYQCNLAMKGEHPREVYNVNMLDLLTLEVCKDAYLSESSKSNDTFVAEQILKLESELLEQQESRDNLLDYYKTTPSKSLLDLIVDSESKIVELEAKLDAINIKTIEFNTDELSNLPEIFTDSIRTDFLNPERYEIRNNLRRFISSITLSRSEEPCRDAKTKVANCVDITWHFKNGQKRRLSMLPYQFIKSDGGDKTLYLPFVYLYGTKSKIKVEDGDEFLSGILEKLHALDLTRTLYPSKGRYQWSKLSLECGKTYWAPLDNAEFGELGTSFTEFSLSVEDDFLQEHAQRTDYLSLMFNYPSSRGERYDYPETTFLELANKFNFEEERDFSSTLQDNSFNHELYSSLDFLKS

SEQ ID NO: 23297 - DNA, 50 bp, Vibrio kanaloae
  source 1..50: mol_type = genomic DNA
atgtgctaagtttatggcttgctaataaaaaacagtttccctcgggagag

SEQ ID NO: 23298 - DNA, 40 bp, Vibrio kanaloae
  source 1..40: mol_type = genomic DNA
tatttgctgtggtttgctaagaagggcttcccatctggtg

SEQ ID NO: 23299 - DNA, 40 bp, Vibrio kanaloae
  source 1..40: mol_type = genomic DNA
tatttgctgtggtttgctataaagggcttcccatctggtg

SEQ ID NO: 23300 - DNA, 50 bp, Vibrio kanaloae
  source 1..50: mol_type = genomic DNA
atgtgctgaaatattaggttgctataagaaatcaggatggtttttgagag

SEQ ID NO: 23301 - protein, 597 aa, Vibrio toranzoniae
MKKAYSYIRYSSPQQASGDSYRRQLAATQAYCDANGYELDTELSIYKELGVSGFKGDQEHLKQFINDCETGKVKKGSLLVVENLDRLSRQAINVAMRQFLSLLEYVDIYTLQDEKHYSNNDGRDSENQLLDIMTSLIIMSRAHEESLTKQKRLKESWSNQRKNAHKIKMSGCYPHWLVRADDKTEFYVKEDRAQIIKDMFDMCINGLGATQIVRSLNNNIEKYPPPSTKKEFWVRSTVKRLLSDRRLLGEHQLYKGHHAKREPVGEPIKDYFPQIIDEKTFVNAQISLKSRKIGAGKVKTDSFSNIFRGFLRCGHCDSPVEYVNKAAKQVSTLYLTCSNAKRGGDCNHSKHYRYLPLEHMLIHLSTANGFMPKPEEPNDLQQQMELTIIKRDRANEKLSVLLEKDFTAPVIMAKIEELTSDVGKYDAQIKEVEEKLLTIKPDYEYEDLYYDAVLEADSVKKFTNRTMFNSYLNKKIDSAYLYSIGLFPCMAFKMHDGSVHTLVLDERYNFGGCTLPNEKDTLIRLNGEALAAVDEQIWVMIGYAIDFLNSIDNENEEMVKIGRKVSLLISKFIMDNQNQKLLSEFEKTLNNAITLAQ

SEQ ID NO: 23302 - DNA, 50 bp, Vibrio toranzoniae
  source 1..50: mol_type = genomic DNA
cagtagtgttattgacataagtttataaacatatgttaatatcactacta

SEQ ID NO: 23303 - DNA, 40 bp, Vibrio toranzoniae
  source 1..40: mol_type = genomic DNA
tttaggtggcttggcagtgatccatatggcgccgccttgt

SEQ ID NO: 23304 - DNA, 40 bp, Vibrio toranzoniae
  source 1..40: mol_type = genomic DNA
tttaggtggcttggcagtggcccatatggcgccgccttgt

SEQ ID NO: 23305 - DNA, 50 bp, Vibrio toranzoniae
  source 1..50: mol_type = genomic DNA
ctgtagagtttttcacattatattgctaacatatgtgttccttaatatta

SEQ ID NO: 23306 - protein, 597 aa, Vibrio toranzoniae; identical to SEQ ID NO: 23301

SEQ ID NO: 23307 - DNA, 50 bp, Vibrio toranzoniae; identical to SEQ ID NO: 23302
  source 1..50: mol_type = genomic DNA

SEQ ID NO: 23308 - DNA, 40 bp, Vibrio toranzoniae
  source 1..40: mol_type = genomic DNA
acaaggcggcgccatatggatcactgccaagccacctaaa

SEQ ID NO: 23309 - DNA, 40 bp, Vibrio toranzoniae
  source 1..40: mol_type = genomic DNA
acaaggcggcgccatatgggccactgccaagccacctaaa

SEQ ID NO: 23310 - DNA, 50 bp, Vibrio toranzoniae; identical to SEQ ID NO: 23305
  source 1..50: mol_type = genomic DNA

SEQ ID NO: 23311 - protein, 609 aa, Vibrio parahaemolyticus
MDLYGSGMKKAYSYIRYSSPQQASGDSYRRQLAATQAYCDAYGYELDTELSIYKELGVSGFTGDQENLKQFINDCETGKVKKGSLLVVENLDRLSRQAINVAMRQFLSLLEYVDIYTLQDEKRYSNNDGRDSENQLLDIMTSLIIMSRAHEESRTKQKRLKESWANQRKNAHKIKMSGVYPHWLVRSEDKKEFYLKEDRVKIIRHIFDLCINGQGATQILRSLNDNVEKYPPPSSKKEFWVRSTVKRLLSDRRLLGEHQFYVGHHSKREPIGEPLSNYFPQVIDEKTFVNAQISLKSRKIGAGKIKSDSFSNIFRGFLRCGHCDSPIEYVNKASKQASTLYLTCSNAKRGGDCNHSKHYRYLPLEHMLIHLSTANGFIPKPEKPSDLQQQLELITVKREQTNSKLSTLLERDFTAPIIMSKIEELTHNLTKYESEIAEIEDKLLALKADYEYEDLYHDMIVESDATKKFSNRVRFNSNLNKKIDNAYLYSIGLLPSIVFTMSDKSVHSLIIDERYNFGGCSIKNEGDTLIRLNGESVEAVDQMIWQMINQSIDLLGSIDNDNEQAVKAGRKISLLISKFAMDSQNHSLLDEFQSVLSEFQDIQYKSEIC

SEQ ID NO: 23312 - DNA, 50 bp, Vibrio parahaemolyticus
  source 1..50: mol_type = genomic DNA
gagtagtgttattgacataagtttattaacatatgttaatatcactacta

SEQ ID NO: 23313 - DNA, 40 bp, Vibrio parahaemolyticus
  source 1..40: mol_type = genomic DNA
acatggtggtgccatatggatgattgccaaaccacctaga

SEQ ID NO: 23314 - DNA, 40 bp, Vibrio parahaemolyticus
  source 1..40: mol_type = genomic DNA
acatggtggtgccatatgggcgattgccaaaccacctaga

SEQ ID NO: 23315 - DNA, 50 bp, Vibrio parahaemolyticus; identical to SEQ ID NO: 23305
  source 1..50: mol_type = genomic DNA

SEQ ID NO: 23316 - protein, 646 aa, Vibrio parahaemolyticus
MLYAYCRVSSGKQLEGLSMSLQGDEALLSRIAKEYHTTVSDRIYIDEGVSSYKGKNLESGQLGEIVRDIEKGRIKKGDIIVMRALDRLSRQELTDSENLYNRIVGAGVNIYTTIDNHLYKPNCVHSAILKTLALNTAHEESAKKAYLTNRYALHRIEEFQRGEKPENGTAWDIGVGKHPFWIQLDKKVVQPHPVNFEIAKVMVRLIISGKGNREVMRYLEEHHPRYDKNGERIEWSYSIVASFHRKEALTGLLSVKLEDTEYKLEDYYPRVCTDLEFHQMSLRKEEKYVSNGNRARPTLLGGIRRLYCSCGRAMGGITPKDSPAFYRCLHILNPCISYISLRVVDRIVLDAIQTHVFESEKFDDTLLNELLSKADLMRIKYSKQESMLMSDPDLFTPEFKQQLRKFKLEIEQVEQEIITERKKHAVIEDVDLKSYAEWQAAISELQDQRDDEEIIKLRDKVQKLVRRIEIDGQLITISMVDGKKIYRHIVKDNTHDTVYCKVHVVDSETLEMVTATNPALADVYCLESDLERFKSACDINQTFITRIAIREKTDHLGIVQQAVSEYLDEHDVLRWRRSDVMKLGVTTTQWQMYKDPEHMSGTGIVIEELKYKDKNYAKKSAVVAYKRYNEQAILNLLNARSLIHSA

SEQ ID NO: 23317 - DNA, 50 bp, Vibrio parahaemolyticus
  source 1..50: mol_type = genomic DNA
tatctcactagttttgactttagcgtcacttaaactaaaatagtgtgata

SEQ ID NO: 23318 - DNA, 40 bp, Vibrio parahaemolyticus
  source 1..40: mol_type = genomic DNA
cctctacgctttctttggcatcgccaaacagcatcgaagt

SEQ ID NO: 23319 - DNA, 40 bp, Vibrio parahaemolyticus
  source 1..40: mol_type = genomic DNA
cctctacgctttctttggcctcgccaaacagcatcgaagt

SEQ ID NO: 23320 - DNA, 50 bp, Vibrio parahaemolyticus
  source 1..50: mol_type = genomic DNA
tttctcaccattagttattttatcctcatacaaactgtagtagtgttata

SEQ ID NO: 23321 - protein, 576 aa, Aeromonas hydrophila
MKSYLYSRISTLQQVQGFGIERQIQTVTDFLENAVLDSRLGYQLDPNDYEILESDIGKSAFRGNNWKPNSNLGRFYDDVINKRITRGALIVENIDRLTRLSNYQASHKLSTLITHGIDIIEVESGTCFSDRIPESNSILNMSISRAHNESKRKSNMGQKTWTNRISKLRDEGKASVKICPRWLTVQDGKYVLDPEQAAILLSIHQQYVEGHGSSAIVRRLNDEGKLNSGKLWNTLTLHKVLRDERLTGKMVIGKQRVVDTSKSQEEQKKQREEIKNNLITVDDAFPVIVDQELFNRVQAKINSSKHGTQKPKTTKLMRNLFNGISTCGVCGNPFIVCSNGRGNLFYTCLGRRSEKTCTNVGVKYTQFEMSILRHIKELNWNSIYNGENEKTDSLNECRQKIVDVERRIGDFNRELADLDDDDLELHIIRKIKKNKEVLNELVIELNTLMANSDTYTDFNPDLNLVHDQSNTYLRQDTNVALRKVIRQLSIAREGNLVQCWIKYYTDSVSHLFIYDVKKENVVSKTYITDDGVFHFDAGSINIRTGMINITGTELKEEDKIAFELWVAMIEKATSQI

SEQ ID NO: 23322 - DNA, 50 bp, Aeromonas hydrophila
  source 1..50: mol_type = genomic DNA
tgtcttaaaatgcttccttgctccttgtaaccgtgatatgatttacgcca

SEQ ID NO: 23323 - DNA, 40 bp, Aeromonas hydrophila
  source 1..40: mol_type = genomic DNA
gcggcacaataccggtcagttatgacaaatattgtgccgc

SEQ ID NO: 23324 - DNA, 40 bp, Aeromonas hydrophila
  source 1..40: mol_type = genomic DNA
gcggcacaataccggtcagctatgacaaatattgtgccgc

SEQ ID NO: 23325 - DNA, 50 bp, Aeromonas hydrophila
  source 1..50: mol_type = genomic DNA
tgtctaaaacacacaccttgatccctttgatcttgaacacgtttagccca

SEQ ID NO: 23326 - protein, 576 aa, Aeromonas hydrophila
MKSYLYSRISTLQQVQGFGIERQIQTVTDFLENAVLDSRLGYQLDPNDYEILESDIGKSAFRGNNWKPNSNLGRFYDDVINKRITRGALVVENIDRLTRLSNYQASHKLSTLITHGIDIIEVESGTCFSDRIPESNSILNMSISRAHNESNRKSNMGQKTWTNRISKLRDEGKASVKICPRWLTVQDGKYILDPEQAAILLSIHQQYVEGHGSSAIVRRLNDEGKLNSGKPWNTLTLHKVLRDERLTGKMVIGKQRVVDTSKSQEEQKKQREEIKNNLITVDDAFPVVVNQELFNRVQAKINSSKHGTQKPKTTKLMRNLFNGISICGVCRNPFIVCSNGRGNLFYTCLGRRSEKTCTNVGVRYTQFEMSILRHIKELNWNSIYNSENEKTDSLNECRQKIVDVERRIGDFNRELADLDDDDLELHIIRKIKKNKEILNELVIELNTLMANSDTYTDFNPDLNLVHDQSNTYLRQDTNVALRKVIRQLSIAREGSLVQCWIKYYTDSISHLFIYDVKKENVVSKTYITDDGVFHFDAGSINIRTGTINITSTELKEEDKIAFELWVAMIEESTRQA

SEQ ID NO: 23327 - DNA, 50 bp, Aeromonas hydrophila
  source 1..50: mol_type = genomic DNA
tgtcttaaaacgcttccttgttccttgtaaccgtgatatgatttacgcca

SEQ ID NO: 23328 - DNA, 40 bp, Aeromonas hydrophila
  source 1..40: mol_type = genomic DNA
gcggcacaatactggtcagttatgacaaatattgtgccgc

SEQ ID NO: 23329 - DNA, 40 bp, Aeromonas hydrophila
  source 1..40: mol_type = genomic DNA
gcggcacaatactggtcagctatgacaaatattgtgccgc

SEQ ID NO: 23330 - DNA, 50 bp, Aeromonas hydrophila; identical to SEQ ID NO: 23325
  source 1..50: mol_type = genomic DNA

SEQ ID NO: 23331 - protein, 501 aa, Escherichia coli
MQKQNGLAYSYIRFSSKKQEQGDSVRRQTELAEKYSIANNLTLSEKNFQDLGISAFKEGNRPSLGDMLEAIEQGAIESGSTIIIESLDRLSRRGIDVTQQIIKSILQHNVFIASLTDGLLLNRESVNDLVSVIRIALAADLAHKESEKKSQRLRETKQQQRKAALEGKVINKILPFWLSREKDQFVFSDRLDAVKRIIELKKKGLGTNKIAKTLNDEGFRPLRSAGWNHTTVGKTLSSVALYGAYQTSETTKDRKVILLDIVDDYYPAVISKEDWMLLQSDAKQNKPGYKSDKNAFTGLLKHSCGGALVRKFHVVTGKTYQYHVCANARDGKCTVTQNFKNMEIALYKILKHLKMEKKTSVDTTIAQERAQLKEQIDNLNGMLLTMKKVPMSVLETIGNLEEKLQELDQQFKQQSDMVLAEQSVDFNLLSEIKDPIELNMMLKRVIKEITVFNLKKSWRIKVQYLNGHSQSFRWDGYSMSFVSDSKKLLEYMNAEKEQLDN

SEQ ID NO: 23332 - DNA, 50 bp, Escherichia coli
  source 1..50: mol_type = genomic DNA
attttgtcgctttgaaactatattgtgatgttgttgctaaggagcaaaat

SEQ ID NO: 23333 - DNA, 40 bp, Escherichia coli; identical to SEQ ID NO: 4473
  source 1..40: mol_type = genomic DNA

SEQ ID NO: 23334 - DNA, 40 bp, Escherichia coli
  source 1..40: mol_type = genomic DNA
cttactgccgaactgcatgaagacgttactggaaactaac

SEQ ID NO: 23335 - DNA, 50 bp, Escherichia coli
  source 1..50: mol_type = genomic DNA
attttgtaggtatctgaatatatcaaaatgttgataatttggagtaaaat

SEQ ID NO: 23336 - protein, 501 aa, Escherichia coli
MQKQNGLAYSYIRFSSKKQEQGDSVRRQTELAEKYSIANNLTLSEKNFQDLGISAFKEGNRPSLGDMLSAIEQGAIESGSTIIIESLDRLSRRGIDVTQQIIKSILQHNVFIASLTDGLLLNRESVNDLVSVIRIALAADLAHKESEKKSQRLRETKQQQRKAALEGKVINKILPFWLAREKDQFVFSDRLDAVKRIIELKRKGLGTNKIAKTLNDEGFRPLRSAGWNHTTVGKTLSSVALYGAYQTSETTKDRKVILLDIIDNYYPAVISKEDWMLLQSDAKQNKPGYKSDKNAFTGLLKHSCGGALVRKFHVVTGKTYQYHVCANARDGKCTVTQNFKNMEIALYKILKHLKMEKKTSVDTTIAQERAQLKEQIDNLNGMLLTMKKVPMSVLETIGNLEEKLQELDQQFKQQSDMVLAEQSVDFNLLSEIKDPIELNMMLKRVIKEITVFNLKKSWRIKVQYLNGHSQSFRWDGYSMSFVSDSKKLLEYMNAEKEQLDN

SEQ ID NO: 23337 - DNA, 50 bp, Escherichia coli; identical to SEQ ID NO: 23332
  source 1..50: mol_type = genomic DNA

SEQ ID NO: 23338 - DNA, 40 bp, Escherichia coli; identical to SEQ ID NO: 4473
  source 1..40: mol_type = genomic DNA

SEQ ID NO: 23339 - DNA, 40 bp, Escherichia coli; identical to SEQ ID NO: 23334
  source 1..40: mol_type = genomic DNA

SEQ ID NO: 23340 - DNA, 50 bp, Escherichia coli; identical to SEQ ID NO: 23335
  source 1..50: mol_type = genomic DNA

SEQ ID NO: 23341 - protein, 501 aa, Citrobacter portucalensis
MQKQNGLAYSYIRFSSKKQEQGDSVRRQTELAEKYSIANNLTLSEKNFQDLGISAFKEGNRPSLGDMLSAIEQGAIESGSTIIIESLDRLSRRGIDVTQQIIKSILQHNVFIASLTDGLLLNRESVNDLVSVIRIALAADLAHKESEKKSQRLRETKQQQRKAALEGKVINKILPFWLAREKDQFVFSDRLDAVKRIIELKRKGLGTNKIAKTLNDEGFRPLRSAGWNHTTVGKTLSSVALYGAYQTSETTKDRKVILLDIVDDYYPAVISKEDWMLLQSDAKQNKPGYKSDKNAFTGLLKHSCGGALVRKFHVVTGKTYQYHVCANARDGKCTVTQNFKNMEIALYKILKHLKMEKKTSVDTTIAQERAQLKEQIDNLNGMLLTMKKVPMSVLETIGNLEEKLQELDQQFKQQSDMVLAEQSVDFNLLSEIKDPIELNMMLKRVIKEITVFNLKKSWRIKVQYLNGHSQSFRWDGYSMSFVSDSKKLLEYMNAEKEQLDN

SEQ ID NO: 23342 - DNA, 50 bp, Citrobacter portucalensis; identical to SEQ ID NO: 23332
  source 1..50: mol_type = genomic DNA

SEQ ID NO: 23343 - DNA, 40 bp, Citrobacter portucalensis; identical to SEQ ID NO: 8058
  source 1..40: mol_type = genomic DNA

SEQ ID NO: 23344 - DNA, 40 bp, Citrobacter portucalensis
  source 1..40: mol_type = genomic DNA
cttactgccgaactgcatgaagacgttgctggaaactaac

SEQ ID NO: 23345 - DNA, 50 bp, Citrobacter portucalensis; identical to SEQ ID NO: 23335
  source 1..50: mol_type = genomic DNA

SEQ ID NO: 23346 - protein, 501 aa, Citrobacter cronae
MQKQNGLAYSYIRFSSKKQEQGDSVRRQTELAEKYSIANNLTLSEKNFQDLGISAFKEGNRPSLGDMLEAIEQGAIESGSTIIIESLDRLSRRGIDVTQQIIKSILQHNVFIASLTDSLLLNRESVNDLVSVIRIALAADLAHKESEKKSQRLRETKQQQRKAALSGKVINKILPFWLAREKDQFVFSDRLDAVKRIIELKRKGLGTNKIAKTLNDEGFRPLRSAGWNHTTVGKTLSSVALYGAYQTSETTKDRKVILLDIVDDYYPAVISKEDWMLLQSDAKQNKPGYKSDKNAFTGLLKHSCGGALVRKFHVVTGKTYQYHVCANARDGKCTVTQNFKNMEIALYKILKHLKMEKKTSIDTTIAQERAQLKEQIDNLNGMLLTMKKVPMSVLETIGNLEEKLQELDQQFKQQSDMVLAEQSVDFNLLSEIKDPIELNMMLKRVIKEITVFNLKKSWRIKVQYLNGHSQSFRWDGYSMSFVSDSKKLLEYMNAEKEQLDN

SEQ ID NO: 23347 - DNA, 50 bp, Citrobacter cronae; identical to SEQ ID NO: 23332
  source 1..50: mol_type = genomic DNA

SEQ ID NO: 23348 - DNA, 40 bp, Citrobacter cronae
  source 1..40: mol_type = genomic DNA
cttactgccaaactgcatggtgacgttgctggaaactaac

SEQ ID NO: 23349 - DNA, 40 bp, Citrobacter cronae
  source 1..40: mol_type = genomic DNA
cttactgccaaactgcatgaagacgttgctggaaactaac

SEQ ID NO: 23350 - DNA, 50 bp, Citrobacter cronae; identical to SEQ ID NO: 23335
  source 1..50: mol_type = genomic DNA

SEQ ID NO: 23351 - protein, 501 aa, Citrobacter werkmanii; identical to SEQ ID NO: 23336

SEQ ID NO: 23352 - DNA, 50 bp, Citrobacter werkmanii; identical to SEQ ID NO: 23332
  source 1..50: mol_type = genomic DNA

SEQ ID NO: 23353 - DNA, 40 bp, Citrobacter werkmanii; identical to SEQ ID NO: 23348
  source 1..40: mol_type = genomic DNA

SEQ ID NO: 23354 - DNA, 40 bp, Citrobacter werkmanii; identical to SEQ ID NO: 23349
  source 1..40: mol_type = genomic DNA

SEQ ID NO: 23355 - DNA, 50 bp, Citrobacter werkmanii; identical to SEQ ID NO: 23335
  source 1..50: mol_type = genomic DNA

SEQ ID NO: 23356 - protein, 536 aa, Ruminococcus torques
MLRQTTRNLITALYPRLSHEDELQGESNSISNQKRILETYAKQNGFSNLQWYTDDGYSGANFQRPGFQAMLADIEAGKVGTVIVKDMSRLGRNYLQVGMYTEMIFPQKGVRFIAINDGVDSAQGDNDFAPLRNIFNEWLVRDTSKKIKAVKRSKGMSGKPVTSKPVYGYLMDEDENFIIDGEAAPVVRQIYSLCLAGNGPTKIARMLTEQEIPTPGTLEYRRTGSTRRYHPGYECKWATNTVVHILENREYTGCLVNFKTEKPSYKTKHSVENPIEKQAIFENHHEPIIDTQMWERVQELRKQRKRPNRYDEVGLFSGILFCADCGSVLYQQRYQNATRKQDCYICGSYKKRTVDCTAHFIRTDLLTAGVTDNLRKVTSYAAKHEARFMKLLIEQNEDGGKRRNAARKKELEAAEKRISELSAIFKRLYEDSVTGRISDERFTELSADYEAEQKELKERAAAIRAELSKAQEATVNAEKFMNVVRKYTSFEELTPTLLREFVEKIVVHECSYDENGTRRQDIDIYYSFVGKVDLPE

SEQ ID NO: 23357 - DNA, 50 bp, Ruminococcus torques
  source 1..50: mol_type = genomic DNA
ttgcttctttatcacatctgagcaaatgctcatgtacggtaaggaagcaa

SEQ ID NO: 23358 - DNA, 40 bp, Ruminococcus torques
  source 1..40: mol_type = genomic DNA
ataaaagaaacgctggaagaagagctgcgggacgtatcgt

SEQ ID NO: 23359 - DNA, 40 bp, Ruminococcus torques
  source 1..40: mol_type = genomic DNA
ataaaagaaacgctggaagtggagctgcgggacgtatcgt

SEQ ID NO: 23360 - DNA, 50 bp, Ruminococcus torques
  source 1..50: mol_type = genomic DNA
tttcttccatttgacatctgagtatgttgaaatgttctaacaggaagcaa

SEQ ID NO: 23361 - protein, 510 aa, Pectobacterium atrosepticum; identical to SEQ ID NO: 22131

SEQ ID NO: 23362 - DNA, 50 bp, Pectobacterium atrosepticum
  source 1..50: mol_type = genomic DNA
tattaccacatatgaaactgcatggtgatattgttacttaatagcaaagg

SEQ ID NO: 23363 - DNA, 40 bp, Pectobacterium atrosepticum; identical to SEQ ID NO: 20978
  source 1..40: mol_type = genomic DNA

SEQ ID NO: 23364 - DNA, 40 bp, Pectobacterium atrosepticum
  source 1..40: mol_type = genomic DNA
cttgctgccgaactgcatgatgatattgttggtacttaac

SEQ ID NO: 23365 - DNA, 50 bp, Pectobacterium atrosepticum
  source 1..50: mol_type = genomic DNA
ttttaaaactcttcaaactgaatgatgataatgatacaacctatcaaaac

SEQ ID NO: 23366 - protein, 491 aa, Mycobacteroides chelonae
MGARVSVLSGPQKVSHEAQIDTATKWAKAHDYPVVGAFEDVGVSASVPPDERPELGPWIRERSHEWEVIIWSKLDRGFRSMRHCSDFIKWAEMNHKIVVFADDGLTLNYLNPASLVESTLSELFVSMAAAFAQIELNRFKSRAEDMHRAIRPTTRWAAGLPPLGYRVVDHPSGRGKGLAIDPDAANLVREMADKLVDGWSFVRITEWLNESGKLTSQGRSRKARGLEPKGRWTTTNVIEILTGYRTLGIKTHKDQPVLDNNGEPIRLAPPLFTPERWDEVQRAAQLRKGKARTPSDTSNPMLEVGFCAVCGSSLAQQFSKTKPRKSDGHVTRYRYYRCSRTPINCKTVFVVADILDELLSEQFLLERGDRRVTERVFIAGEDNSYELDFIKQRIELLREDRASGLFPSGEDELVYRNQMKQLLARRDELASAPVRQPGYENVELEKTYREVWPSATPEEKRKMLIDAEISIRLGKSPGKSLRAELVIGAPY

SEQ ID NO: 23367 - DNA, 50 bp, Mycobacteroides chelonae
  source 1..50: mol_type = genomic DNA
ccttctcataggtgtacttctcgatcaacagtagcatacactcttgaagc

SEQ ID NO: 23368 - DNA, 40 bp, Mycobacteroides chelonae
  source 1..40: mol_type = genomic DNA
tgatcgccatgctcctcgatcaacagatcccgatggaagt

SEQ ID NO: 23369 - DNA, 40 bp, Mycobacteroides chelonae
  source 1..40: mol_type = genomic DNA
tgatcgccatgctcctcgagcaacagatcccgatggaagt

SEQ ID NO: 23370 - DNA, 50 bp, Mycobacteroides chelonae
  source 1..50: mol_type = genomic DNA
ccttctgatagatttccttctcaagcaactgtgctatatacttttgaaac

SEQ ID NO: 23371 - protein, 509 aa, Mycobacteroides abscessus
MGARVSVLSGPQKVSHEAQIDTAIKWANTQDYPVVGVFEDLGVSASVPPHERPDLGPWIRERSHEWEVIIWSKLDRAFRSMRHCSDFIEWAEANKKIVVFAEDGMTLNYLNPSSKIDSILGELFVTIAAAFAQIELNRFKSRAEDMHRAIRPTTRWAAGLPPLGYQVVDHPSGRGKGLAIDPDAANLVREMADKLVDGWSFVRITEWLNESGKLTSQGRSRKARGLEPKGRWTTTNVIEILTGYRTLGIKTHKGQPVLDDSGEPIRLAPPLFTPERWDEVQRAAQLRKGKPRTPSDTSNPMLGVGYCGAPCSHKRSGSECLGDCQGICGSSLAQQFSKTRPRKSDGHVTFYRYYRCSRTPINCKAVFVVADDLDELLSEQFLLERGDRRVTERVFIPGEDNSYELDFINQRIELLREDRASGLFPSGEDELVYRNQMKQLLARRDELASVPVRQPGYENVELEKTYREVWPGATPEEKRKMLIDAEISIRLGESPGKSLRAELVIGTPY

SEQ ID NO: 23372 - DNA, 50 bp, Mycobacteroides abscessus; identical to SEQ ID NO: 23367
  source 1..50: mol_type = genomic DNA

SEQ ID NO: 23373 - DNA, 40 bp, Mycobacteroides abscessus
  source 1..40: mol_type = genomic DNA
tgatagcgatgctcctggatcagcagattccgatggaggt

SEQ ID NO: 23374 - DNA, 40 bp, Mycobacteroides abscessus
  source 1..40: mol_type = genomic DNA
tgatagcgatgctcctggagcagcagattccgatggaggt

SEQ ID NO: 23375 - DNA, 50 bp, Mycobacteroides abscessus; identical to SEQ ID NO: 23370
  source 1..50: mol_type = genomic DNA

SEQ ID NO: 23376 - protein, 480 aa, Streptococcus salivarius
MAMHKVAIYVRVSTTSQVDEGYSIDEQKAKLTSYCEIKDWNIYEIYTDGGFSGSNTERPALEQLIRDAKRKLFDTVLVYKLDRLSRSQKDTLYLIEDVFLENNIEFVSLLENFDTSTPFGKAMIGLLSVFAQLEREQIKERMQLGKLGRAKSGKSMQWAKTSFGYDYIKETGTLSVNPYQALIVRKMFEWYLSGMSITKLRDALNEQYGQDKEWNYRTVRVILSNPVYCGYNQFKGQIFPGTHEPIISEEDFNKTQEEIKTRQRTAAQRFNPRPFQAKYMLSGIAQCGYCSAPLAIKLGMKRKDGTRLVKYECKQRHPRKTKGVTVYNNNEKCDSGFYFKDDIEHFVLTEISKLQTDSDYIDKLFSNTDKETIDRASYQKQIDNLTAKISRLNDLYIDDRISLEELQKRSSDFMAERSALEKELETDTSLKAVERKEDVRRVLDTKDIFTLDYEQQKAIARALISKVRVTSESIVILWKL

SEQ ID NO: 23377 - DNA, 50 bp, Streptococcus salivarius
  source 1..50: mol_type = genomic DNA
tagagcgttttactaaccttcatttcaatcaaggacactaaaattcttga

SEQ ID NO: 23378 - DNA, 40 bp, Streptococcus salivarius
  source 1..40: mol_type = genomic DNA
gagaagcacgaccagcatttcaatcagcgtaaaagcacgt

SEQ ID NO: 23379 - DNA, 40 bp, Streptococcus salivarius
  source 1..40: mol_type = genomic DNA
gagaagcacgaccagcattaaaatcagcgtaaaagcacgt

SEQ ID NO: 23380 - DNA, 50 bp, Streptococcus salivarius
  source 1..50: mol_type = genomic DNA
gagatctttattaagaccttcattaagatcaatgactgggcaagttttaa

SEQ ID NO: 23381 - protein, 507 aa, Escherichia coli; identical to SEQ ID NO: 5406

SEQ ID NO: 23382 - DNA, 50 bp, Escherichia coli
  source 1..50: mol_type = genomic DNA
tgtatttagaccttgatgccctcctttcatcagacacgtttaaatacacc

SEQ ID NO: 23383 - DNA, 40 bp, Escherichia coli; identical to SEQ ID NO: 5408
  source 1..40: mol_type = genomic DNA

SEQ ID NO: 23384 - DNA, 40 bp, Escherichia coli
  source 1..40: mol_type = genomic DNA
gcggcgttaatcgggtgatgatagacagccgcccggttca

SEQ ID NO: 23385 - DNA, 50 bp, Escherichia coli
  source 1..50: mol_type = genomic DNA
aatatttaggcccctttgccatctgaacaccagactttttcaaatacacc

SEQ ID NO: 23386 - protein, 626 aa, Anaerobutyricum hallii
MRNEKITPLYERLSRDDELQGESNSISNQKQMLEDFARRNGLPNPTHFTDDGISGTRFDRPGFLAMMEEVEAGRVEAIVIKDMSRLGRDYLKVGQVMEVLRQRGVRLIAINDGVDSLKGDDDFTPFRNIMNEFYARDTSRKIRSVFKSKGMSGKHLTGTVIYGYLWDEKREHWLVDEEAAEVVRRIFSLTLEGYGPYQIACKLSADRIEIPVVHLARFNEGVNRSKPVKDPYGWGSSTIVNILKKREYLGHTINFKTRKHFKDKKSHYVSEDEWTIFENTHEAIIDQQTFDLVQKIRSNVRRYPNGWGEAAPLTGLLYCADCGGKMYVHRTNNGKRVSQYTCSNYTKVPCGTLCPTQHRINESAVLTLVSDTLRAIAEYLRNDRTEFIHTVQETQVAQQSADISKKRRRLAAAQKRAGELEKLICKIYEDNALGKLPDARYKALDAQYAKEQDALEIEIAELEKAVTGYEQSQKSAEKFIALIDKYENFDTMTNTMLNEFVEKILVHERARKGSQDTTQEIEIYFNFLGRYIPPSLQPVPLTPEEQEELRKQEERKDRLHQNYLKRKASGAQKRYEDKIKAKKKAEMDAKKALIRAEDMKKGVFSTVGQLPKEEPRKGSIAASAAV

SEQ ID NO: 23387 - DNA, 50 bp, Anaerobutyricum hallii; identical to SEQ ID NO: 2337
  source 1..50: mol_type = genomic DNA

SEQ ID NO: 23388 - DNA, 40 bp, Anaerobutyricum hallii
  source 1..40: mol_type = genomic DNA
aaattataaacgggcagccgggcagatcaacttatctgtt

SEQ ID NO: 23389 - DNA, 40 bp, Anaerobutyricum hallii
  source 1..40: mol_type = genomic DNA
aaattataaacgggcagccctgcagatcaacttatctgtt

SEQ ID NO: 23390 - DNA, 50 bp, Anaerobutyricum hallii
  source 1..50: mol_type = genomic DNA
aaatctcctcttacatgtgtctctctctatataacccattggttatttct

SEQ ID NO: 23391 - protein, 626 aa, Fusicatenibacter saccharivorans; identical to SEQ ID NO: 18106

SEQ ID NO: 23392 - DNA, 50 bp, Fusicatenibacter saccharivorans; identical to SEQ ID NO: 2337
  source 1..50: mol_type = genomic DNA

SEQ ID NO: 23393 - DNA, 40 bp, Fusicatenibacter saccharivorans
  source 1..40: mol_type = genomic DNA
gaaatataagctggcagccggcaaaaccgctaagtcgatt

SEQ ID NO: 23394 - DNA, 40 bp, Fusicatenibacter saccharivorans
  source 1..40: mol_type = genomic DNA
gaaatataagctggcagccctcaaaaccgctaagtcgatt

SEQ ID NO: 23395 - DNA, 50 bp, Fusicatenibacter saccharivorans; identical to SEQ ID NO: 23390
  source 1..50: mol_type = genomic DNA

SEQ ID NO: 23396 - protein, 626 aa, Blautia massiliensis
MRNEKITPLYERLSRDDELQGESNSISNQKQMLEDFARRNGLPNPTHFTDDGISGTRFDRPGFLAMMEEVEAGRVEAIVIKDMSRLGRDYLKVGQVMEVLRQRGIRLIAINDGVDSLKGDDDFTPFRNIMNEFYARDTSRKIRSVFKSKGMSGKHLTGTVIYGYLWDEKREHWLVDEEAAEVVRRIFSLTLEGYGPYQIACKLSADRIEIPVVHLARFNEGVNRSKPVKDPYGWGSSTIVNILKKREYLGHTINFKTRKHFKDKKSHYVSEDKWTIFENTHEAIIDQQTFDLAQKIRSNVRRYPNGWGEAAPLTGLLYCADCGGKMYVHRTNNGKRVSQYTCSNYTKVPCGTLCPTQHRINESAVLTLVSDTLRAIAEYSRNDRTEFIHTVQETQVAQQSADISKKRRRLAAAQKRAGELEKLICKIYEDNALGKLPDARYKALDAQYAKEQDALEIEIAELEKAVTGYEQSQKSAEKFIALIDKYENFDTLTNTMLNEFVEKILVHERARKGSQDTTQEIEIYFNFLGRYIPPSLQPVPLTPEEQEELQKKEERKDRLHQNYLKRKASGAQKRYEDKIKAKKKAEMDAKKALIRAEDMKKGVFSTIGQLPKEEPRKGSIAASAAV

SEQ ID NO: 23397 - DNA, 50 bp, Blautia massiliensis; identical to SEQ ID NO: 2337
  source 1..50: mol_type = genomic DNA

SEQ ID NO: 23398 - DNA, 40 bp, Blautia massiliensis
  source 1..40: mol_type = genomic DNA
aatttctttttctccacccggaagtgcttttaaatccgtg

SEQ ID NO: 23399 - DNA, 40 bp, Blautia massiliensis
  source 1..40: mol_type = genomic DNA
aatttctttttctccacccctaagtgcttttaaatccgtg

SEQ ID NO: 23400 - DNA, 50 bp, Blautia massiliensis; identical to SEQ ID NO: 23390
  source 1..50: mol_type = genomic DNA

SEQ ID NO: 23401 - protein, 626 aa, Clostridium innocuum
MRNEKITPLYERLSRDDELQGESNSISNQKQMLEDFARRNGLPNPTHFTDDGISGTRFDRPGFLAMMEEVEAGRVEAIVIKDMSRLGRDYLKVGQVMEVLRQRGVRLIAINDGVDSLKGDDDFTPFRNIMNEFYARDTSRKIRSVFKSKGMSGKHLTGTVIYGYLWDEKREHWLVDEEAAEVVRRIFSLTLEGYGPYQIACKLSTDRIEIPVVHLARFNEGVNRSKPVKDPYGWGSSTIVNILKKREYLGHTINFKTRKHFKDKKSHYVSEDEWTIFENTHEAIIDQQTFDLVQKIRSNVRRYPNGWGEAAPLTGLLYCADCGGKMYVHRTNNGKRVSQYTCSNYTKVPCGTLCPTQHRINESAVLTLVSDTLRAIAEYSRNDRTEFIHTVQETQVAQQSADISKKRRRLAAAQKRAGELEKLICKIYEDNVLGKLPDARYKALDAQYAKEQDALEIEIAELEKAVTGYEQSQKSAEKFIALIDKYENFDTLTNTMLNEFVEKILVHERARKGSQDTTQEIEIYFNFLGRYIPPSLQPVPLTPEEQEELRKKEERKDRLHQNYLKRKASGAQKRYEDKIKAKKKAEMDAKKALIRAEDMKKGVFSTIGQLPKEEPHKGSIAASAAV

SEQ ID NO: 23402 - DNA, 50 bp, Clostridium innocuum; identical to SEQ ID NO: 2337
  source 1..50: mol_type = genomic DNA

SEQ ID NO: 23403 - DNA, 40 bp, Clostridium innocuum
  source 1..40: mol_type = genomic DNA
gaaatataagctcgctgccggaaaaacagcgaagtcgatc

SEQ ID NO: 23404 - DNA, 40 bp, Clostridium innocuum
  source 1..40: mol_type = genomic DNA
gaaatataagctcgctgccctaaaaacagcgaagtcgatc

SEQ ID NO: 23405 - DNA, 50 bp, Clostridium innocuum; identical to SEQ ID NO: 23390
  source 1..50: mol_type = genomic DNA

SEQ ID NO: 23406 - protein, 626 aa, Enterocloster bolteae; identical to SEQ ID NO: 18106

SEQ ID NO: 23407 - DNA, 50 bp, Enterocloster bolteae; identical to SEQ ID NO: 2337
  source 1..50: mol_type = genomic DNA

SEQ ID NO: 23408 - DNA, 40 bp, Enterocloster bolteae; identical to SEQ ID NO: 19953
  source 1..40: mol_type = genomic DNA

SEQ ID NO: 23409 - DNA, 40 bp, Enterocloster bolteae
  source 1..40: mol_type = genomic DNA
gaaatataagctggccgctctaaaaacagccaagtcgatc

SEQ ID NO: 23410 - DNA, 50 bp, Enterocloster bolteae; identical to SEQ ID NO: 23390
  source 1..50: mol_type = genomic DNA

SEQ ID NO: 23411 - protein, 626 aa, Roseburia faecis
MRNEKITPLYERLSRDDELQGESNSISNQKQMLADFARRNGLPNPTHFTDDGISGTRFDRPGFLAMMEEVEAGRVEAIVIKDMSRLGRDYLKVGQVMEILRQRGVRLIAINDGVDSLKGDDDFTPFRNIMNEFYARDTSRKIRSVFKSKGMSGKHLTGTVIYGYLWDEKREHWLVDEEASEVVRRIFSLTLEGYGPYQIACKLSIDRIEIPVVHLARFNEGVNRSKPVKDPYGWGSSTIVNILKKREYLGHTINFKTRKHFKDKKSHYVSEDEWTIFENTHEAIIDQQTFDLAQKIRSNVRRYPNGWGEAAPLTGLLYCADCGGKMYVHRTNNGKRISQYTCSNYTKVPCGTLCPTQHRINESAVLTLVSDTLRAIAEYSRNDRTEFIHTVQETQVAQQSADISKKRRRLAAAQKRAGELEKLICKIYEDNALGKLPDARYRALDAQYAKEQDALEIEIAELEKAVTGYEQSQKSAEKFIALIDKYENFDTLTNTMLNEFVEKILVHERARKGSQDTTQEIEIYFNFLGRYIPPSLQPVPLTPEEQEELRKKEERKDRLHQNYLKRKASGAQKRYEDKIKAKKKAEMDAKKAMIRAEDMKKGVFSTIGQLPKEEPRKGGIAASAAV

SEQ ID NO: 23412 - DNA, 50 bp, Roseburia faecis; identical to SEQ ID NO: 2337
  source 1..50: mol_type = genomic DNA

SEQ ID NO: 23413 - DNA, 40 bp, Roseburia faecis
  source 1..40: mol_type = genomic DNA
aaaatacaagctggcggcgggaaagacagcaaaatcaatt

SEQ ID NO: 23414 - DNA, 40 bp, Roseburia faecis
  source 1..40: mol_type = genomic DNA
aaaatacaagctggcggcgctaaagacagcaaaatcaatt

SEQ ID NO: 23415 - DNA, 50 bp, Roseburia faecis; identical to SEQ ID NO: 23390
  source 1..50: mol_type = genomic DNA

SEQ ID NO: 23416 - protein, 626 aa, Blautia obeum
MRNEKITPLYERLSRDDELQGESNSISNQKQMLEDFARRNGLPNPTHFTDDGISGTRFDRPGFLAMMEEVEAGRVEAIVIKDMSRLGRDYLKVGQVMEVLRQRGVRLIAINDGVDSLKGDDDFTPFRNIMNEFYARDTSRKIRSVFKSKGMSGKHLTGTVIYGYLWDEKREHWLVDEEAAEVVRRIFSLTLEGYGPYQIACKLSTDRIEIPVVHLARFNEGVNRSKPVKDPCGWGSSTIVNILKKREYLGHTINFKTRKHFKDKKSHYVSEDEWTIFENTHEAIIDQQTFDLAQKIRSNVRRYPNGWGEAAPLTGLLYCADCGGKMYIHRTNNGKRVSQYTCSNYTKVPCGTLCPTQHRINESAVLTLVSDTLRAIAEYSRNDRKEFIHTVQETQVAQQSADISKKRRRLAAAQKRDGELEKLICKIYEDNALGKLPDARYRALDAQYAKEQDALEIEIAELEKAVTGYEQSQKSAEKFIALIDKYENFDTLTNTMLNEFVEKILVHERARKGSQDTTQEIEIYFNFLGRYIPPSLQPVPLTPEEQEELRKKEERKDRLHQNYLKRKASGAQKQYEDKIKAKKKAEMDAKKALIRAEDMKKGVFSTVGQLPKEEPHKGSIAASAAV

SEQ ID NO: 23417 - DNA, 50 bp, Blautia obeum; identical to SEQ ID NO: 2337
  source 1..50: mol_type = genomic DNA

SEQ ID NO: 23418 - DNA, 40 bp, Blautia obeum; identical to SEQ ID NO: 23388
  source 1..40: mol_type = genomic DNA

SEQ ID NO: 23419 - DNA, 40 bp, Blautia obeum; identical to SEQ ID NO: 23389
  source 1..40: mol_type = genomic DNA

SEQ ID NO: 23420 - DNA, 50 bp, Blautia obeum; identical to SEQ ID NO: 23390
  source 1..50: mol_type = genomic DNA

SEQ ID NO: 23421 - protein, 626 aa, Faecalibacterium prausnitzii; identical to SEQ ID NO: 18106

SEQ ID NO: 23422 - DNA, 50 bp, Faecalibacterium prausnitzii; identical to SEQ ID NO: 2337
  source 1..50: mol_type = genomic DNA

SEQ ID NO: 23423 - DNA, 40 bp, Faecalibacterium prausnitzii
  source 1..40: mol_type = genomic DNA
gaagctctttcatgttacagggaaaacggctcagataccg

SEQ ID NO: 23424 - DNA, 40 bp, Faecalibacterium prausnitzii
  source 1..40: mol_type = genomic DNA
gaagctctttcatgttacactgaaaacggctcagataccg

SEQ ID NO: 23425 - DNA, 50 bp, Faecalibacterium prausnitzii; identical to SEQ ID NO: 23390
  source 1..50: mol_type = genomic DNA

SEQ ID NO: 23426 - protein, 559 aa, Bacillus licheniformis
MLILKGDERLTTEQIMGLIGKINAIIYVRVSTTDQAEKGYSLESQIERCKERALTKFKYKESELIALVEPGGMGDDPNRPALNHALYLLEKGLGKKFIVLHPDRLTRDNTLQGIVSRKIWGMGVDIEFIEFEVDPTNPESMLMYNIQGSIAQYNKAKINANSKRGRVAKAKKGEFPSFKRLFGYKFNKETDLPEYDEEERQVLLEMKDMLLNRDMSSNEIAKELSKRGVPAPDGDTWYQATVSRILKNEDYTGNFYYGKSKVVQINGESKQVPTPEEEWILIKIPPIWDYETRDQILKKLKENYKGRSRKTRDYLLKGKAKCGRCGSACGSGFTSKTKSGVYKYYSCRRKNAKAYQNGKKIIDCPGKNWRVDIVDDVFWKWFKKLLKNPTDFLEQFLSETSNEKKIEELQHKVKNLTKQIEEIDSEVSNYVILFGKGKINEDMFDKLTQPLEQKKEYIETELEIINSQINANKDVEDKNQKLKEYVSSFSEMVDKDLSMDEKRKFIDFFIEKVTLFDDDHMEIVWKSDGLNSNDDKVSLYNEGDAMKLNNSHKRLNYVQ

SEQ ID NO: 23427 - DNA, 50 bp, Bacillus licheniformis
  source 1..50: mol_type = genomic DNA
cacataaaagattaaactatgttcaagaacaaggttttaaattttatgtc

SEQ ID NO: 23428 - DNA, 40 bp, Bacillus licheniformis
  source 1..40: mol_type = genomic DNA
ggcaatcgatacattggtcaaacatatggaggataagcgc

SEQ ID NO: 23429 - DNA, 40 bp, Bacillus licheniformis
  source 1..40: mol_type = genomic DNA
ggcaatcgatacattggtctaacatatggaggataagcgc

SEQ ID NO: 23430 - DNA, 50 bp, Bacillus licheniformis
  source 1..50: mol_type = genomic DNA
caaataaaactctcaattattttctacaaaaatgttttatgttttattca

SEQ ID NO: 23431 - protein, 559 aa, Bacillus licheniformis
MLILKGDERLTTEQIMGLIGKINAIIYVRVSTTDQAEKGYSLESQIERCKERALTKFKYKESELIALVEPGGMGDDPNRPALNHALYLLEKGLGKKFIVLHPDRLTRDNTLQGIVSRKIWGMGVDIEFIEFEVDPTNPESMLMYNIQGSIAQYNKAKINANSKRGRVAKAKKGEFPSFKRLFGYKFNKETDLPEYDEEERQVLLEMKDMLLNRDMSSNEIAKELSKRGVPAPDGDTWYQATVSRILKNEDYTGDFYYGKSKVVQINGEAKQVPTPEEEWILIKIPPIWDHETRDQILNKLKENYKGRSRKTRDYLLKGKAKCGRCGSACGSGFTSKTKSGVYKYYSCRRKNAKAYQNGKKIIDCPGKNWRVDIVDDVFWKWFKKLLKNPTDFLEQFLSETSNEKKIEELQHKVNNLTKQIEEIDSEVSNYVILFGKGKINEDMFDKLTQPLEQKKEYIETELEIINSQINANKDVEDKNQKLKEYVSSFSEMVDKDLSMDEKRKFIDFFIEKVTLFDDDHMEIVWKGDGLNNNDDKVSLYNEGGAMKLNNSHKRLNYVQ

SEQ ID NO: 23432 - DNA, 50 bp, Bacillus licheniformis; identical to SEQ ID NO: 23427
  source 1..50: mol_type = genomic DNA

SEQ ID NO: 23433 - DNA, 40 bp, Bacillus licheniformis; identical to SEQ ID NO: 23428
  source 1..40: mol_type = genomic DNA

SEQ ID NO: 23434 - DNA, 40 bp, Bacillus licheniformis; identical to SEQ ID NO: 23429
  source 1..40: mol_type = genomic DNA

SEQ ID NO: 23435 - DNA, 50 bp, Bacillus licheniformis; identical to SEQ ID NO: 23430
  source 1..50: mol_type = genomic DNA

SEQ ID NO: 23436 - protein, 559 aa, Bacillus licheniformis
MLILKGDERLTTEQIMGLIGKINAIIYVRVSTTDQAEKGYSLESQIERCKERALTKFKYKESELIALVEPGGMGDDPNRPALNHALYLLEKGLGKKFIVLHPDRLTRDNTLQGIVSRKIWGMGVDIEFIEFEVDPTNPESMLMYNIQGSIAQYNKAKINANSKRGRVAKAKKGEFPSFKRLFGYKFNKETDLPEYDEEERQVLLEMKDMLLNRDMSSNEIAKELSKRGVPAPDGDTWYQATVSRILKNEDYTGNFYYGKSKVVQINGESKQVPTPEEEWILIKIPPIWDYETRDQILKKLKENYKGRSRKTRDYLLKGKAKCGRCGSACGSGFTSKTKSGVYKYYSCRRKNAKAYQNGKKIIDCPGKNWRVDIVDDVFWKWFKKLLKNPTDFLEQFLSETSNEKKIEELQHKVKNLTKQIEEIDSEVSNYVILFGKGKINEDMFDKLTQPLEQKKEYIETELEIINSQINANKDVEDKNQKLKEYVSSFSKMVDKDLSMDEKRKFIDFFIEKVTLFDDDHMEIVWKSDGLNSNDDKVSLYNEGDAMKLNNSHKRLNYVQ

SEQ ID NO: 23437 - DNA, 50 bp, Bacillus licheniformis; identical to SEQ ID NO: 23427
  source 1..50: mol_type = genomic DNA

SEQ ID NO: 23438 - DNA, 40 bp, Bacillus licheniformis; identical to SEQ ID NO: 23428
  source 1..40: mol_type = genomic DNA

SEQ ID NO: 23439 - DNA, 40 bp, Bacillus licheniformis; identical to SEQ ID NO: 23429
  source 1..40: mol_type = genomic DNA

SEQ ID NO: 23440 - DNA, 50 bp, Bacillus licheniformis; identical to SEQ ID NO: 23430
  source 1..50: mol_type = genomic DNA

SEQ ID NO: 23441 - protein, 559 aa, Bacillus paralicheniformis; identical to SEQ ID NO: 23431

SEQ ID NO: 23442 - DNA, 50 bp, Bacillus paralicheniformis; identical to SEQ ID NO: 23427
  source 1..50: mol_type = genomic DNA

SEQ ID NO: 23443 - DNA, 40 bp, Bacillus paralicheniformis
  source 1..40: mol_type = genomic DNA
ggcaatcgatacattagtcaaacatatggaagataagcgg

SEQ ID NO: 23444 - DNA, 40 bp, Bacillus paralicheniformis
  source 1..40: mol_type = genomic DNA
ggcaatcgatacattagtctaacatatggaagataagcgg

SEQ ID NO: 23445 - DNA, 50 bp, Bacillus paralicheniformis; identical to SEQ ID NO: 23430
  source 1..50: mol_type = genomic DNA

SEQ ID NO: 23446 - protein, 668 aa, Enterococcus faecalis
MKKEYNTSIVGRLDRQEENMSIQANRKTALYCRLSRDDELQGESNSITNQKKILSQFAKQSGFFRCEFFIDDGYSGTNFDRPEFQNMITRVANGEIGTVIVKDLSRFGRNHLHVGIYTTEFFPKHNVRFIAINDNVDTFTTDMETDISIPIKNIINEIYAVDTSRKIKAVYRAKGLEGKHTGSHAIYGYKKDPEDKDKWIIDEEAAKVVKRIYSLVVSGLGPYQIADLLYKEKVYSPSYYMAMNGYGNRVNKEFDTPYRWWGTSISCIVRREEYLGHTVNFKTIKPSFKDKRRYTNKKENWAIFENTHEAIVDKETWDIANALLKTTRRQSREGTVNPLTGKLFCGDCGEKLYNSRGINRKGTGHYKEDVRYDNYVCSTYQKHRNECSAHYIRTKVVRELILEALKDISKYIENNEEEFKNIVISARLEEREKSQKENIKKLKADKNRLAVIDRLFVKLYEDNASGRINDETFNKIAVQYTEEQKTLNTEIVELEEVTEKLQSVSDNTEQFIKTIKSFTDFSILTTSMINQLIDKIIIYQKQKLKRYKFTQRIDIYFNFIGKFEIEKEDEIKEDTYIEKTEDKKYIHKDSRFLPITEYLKGQDREIELDFSKVEELIGRKLCKSARKYPSYWYASEDRPMGNSIYNAGYDIVKVDVKKETIRLINYDK

SEQ ID NO: 23447 - DNA, 50 bp, Enterococcus faecalis; identical to SEQ ID NO: 1827
  source 1..50: mol_type = genomic DNA

SEQ ID NO: 23448 - DNA, 40 bp, Enterococcus faecalis
  source 1..40: mol_type = genomic DNA
gttctgtaaagctatcgcggaaggcgacacctaaacctaa

SEQ ID NO: 23449 - DNA, 40 bp, Enterococcus faecalis
  source 1..40: mol_type = genomic DNA
gttctgtaaagctatcgcgtaaggcgacacctaaacctaa

SEQ ID NO: 23450 - DNA, 50 bp, Enterococcus faecalis
  source 1..50: mol_type = genomic DNA
atgcttagtctggtaatatcaacatatattgtattcttttagtacagata

SEQ ID NO: 23451 - protein, 668 aa, Streptococcus dysgalactiae
MKKEYNTSIVGRLDRQEENMSIQANRKTALYCRLSRDDELQGESNSITNQKKILSQFAKQSGFFQCEFFIDDGYSGTNFDRPEFQNMITRVANGEIGTVIVKDLSRFGRNHLHVGIYTTEFFPKHNVRFIAINDNVDTFTTDMETDISIPIKNIINEIYAVDTSRKIKAVYRAKGLEGKHTGSHAIYGYKKDPENKDKWIIDEEAAKVVKRIYSLVVSGLGPYQIADLLYKEKVYSPSYYMAMNGYGNRVNKEFDTPYRWWGTSIQCIVRREEYLGHTVNFKTIKPSFKDKRRYTNKKENWAIFENTHEAIIDKETWDIANSLLKTTRRQSREGTVNPLTGKLFCGDCGEKLYNSRGINRKGTGHYKEDVRYDNYVCSTYQKHRNECSAHYIRTKVVRELILEALKDISKYIENNEEEFKNIVISARLEEREKSQKENIKKLKADKNRLAVIDRLFVKLYEDNASGRINDETFNKIAVQYTEEQKTLNTEIVELEEVTEKLQSVSDNTEQFIKTIKSFTDFSILTTSMINQLIDKIIIYQKQKLKRYKFTQRIDIYFNFIGKFEIEKDDEIKEDTYIEEKEDKKYIHKDSRFSPITEYLKGQDREIELDFSKVEELIGRKLCKSARTYPSYWYASEDRPMGNSIYNAGYDIVKVDVKKETIRLINYDK

SEQ ID NO: 23452 - DNA, 50 bp, Streptococcus dysgalactiae; identical to SEQ ID NO: 1827
  source 1..50: mol_type = genomic DNA

SEQ ID NO: 23453 - DNA, 40 bp, Streptococcus dysgalactiae
  source 1..40: mol_type = genomic DNA
gcaaaagaacaatatgcacgatacggatacctttgaattt

SEQ ID NO: 23454 - DNA, 40 bp, Streptococcus dysgalactiae
  source 1..40: mol_type = genomic DNA
gcaaaagaacaatatgcactatacggatacctttgaattt

SEQ ID NO: 23455 - DNA, 50 bp, Streptococcus dysgalactiae; identical to SEQ ID NO: 23450
  source 1..50: mol_type = genomic DNA

SEQ ID NO: 23456 - protein, 500 aa, Escherichia coli
MRFSTEKQIKGDSIRRQSKLVTDWLSKNPDYFLDESLSFKDLGKSAFSGKHLRAGLGDFLTAIKEGLVKAGDTLLIESLDRLSRQDVDQASELLRGILRSGVDVVTLSDGEHYTAESLKDPLSLIKSILIMQRAYEESLRKSERVAAAWNRKKDIISEGIKVSKRCPAWLKLNDDRRGFTIIPEKVEIVKKVFALRLQGLSFWAITRALNDGGYLSLNQYKPQGWSDTSVKTLLRNRSVIGCFTPAGREEVKDYYPAIISESLFYKVQQLNTGQYGRASTSDNPLSVNLFRGIIKCSECGSSVVVGGYAKRRYGMYRCPKNSSHQCHAKAISRKQTDETLLFMLSLVDRMEPDITNQIDSLNLRKSDLETKISKLLELAIELDDMAMVTDKLRDLKKELGQVKHQIEEETKRVRAISTGNLKDIDRSTKEGMIEAQLLIKGVVKSIIIDSAKRRCRVTLHNGKVIGLPISKNPSEELTSALTSMFEGTERGLLSLDEVEL

SEQ ID NO: 23457 - DNA, 50 bp, Escherichia coli
  source 1..50: mol_type = genomic DNA
tagtgcattaagatagcatatatgagtataatacctccctaaatacacca

SEQ ID NO: 23458 - DNA, 40 bp, Escherichia coli; identical to SEQ ID NO: 5293
  source 1..40: mol_type = genomic DNA

SEQ ID NO: 23459 - DNA, 40 bp, Escherichia coli; identical to SEQ ID NO: 5294
  source 1..40: mol_type = genomic DNA

SEQ ID NO: 23460 - DNA, 50 bp, Escherichia coli; identical to SEQ ID NO: 5295
  source 1..50: mol_type = genomic DNA

SEQ ID NO: 23461 - protein, 452 aa, Listeria monocytogenes
MKAAIYIRVSTQEQVENYSIQAQTEKLTALCRSKDWDVYDTFIDGGYSGSNMNRPALNEMLSKLHEIDAVVVYRLDRLSRSQKDTITLIEEYFLKNNVEFVSLSETLDTSSPFGRAMIGILSVFAQLERETIRDRMVMGKIKRIEAGLPLTTAKGRTFGYDVIDTKLYINEEEAKQLRLIYDIFEEEQSITFLQKRLKKLGFKVRTYNRYNNWLTNDLYCGYVSYKDKVHVKGIHEPIISEEQFYRVQEIFSRMGKNPNMNKESASLLNNLVVCSKCGLGFVHRRKDTVSRGKKYHYRYYSCKTYKHTHELEKCGNKIWRADKLEELIIDRVNNYSFASRNVDKEDELDYLNEKLKIEHAKKKRLFDLYINGSYEVSELDAMMADIDAQINYYEAQIEANEELKKNKKIQENLADLATVDFNSLEFREKQLYLKSLINKIYIDGEQVTIEWL

SEQ ID NO: 23462 - DNA, 50 bp, Listeria monocytogenes
  source 1..50: mol_type = genomic DNA
tttagtatctcgttatctctcgttggagggagaggaaatgggatacaaaa

SEQ ID NO: 23463 - DNA, 40 bp, Listeria monocytogenes; identical to SEQ ID NO: 7733
  source 1..40: mol_type = genomic DNA

SEQ ID NO: 23464 - DNA, 40 bp, Listeria monocytogenes; identical to SEQ ID NO: 22389
  source 1..40: mol_type = genomic DNA

SEQ ID NO: 23465 - DNA, 50 bp, Listeria monocytogenes
  source 1..50: mol_type = genomic DNA
atcagttacattgcatttctccttctgaggagaggaaagcatatacaaaa

SEQ ID NO: 23466 - protein, 452 aa, Listeria monocytogenes
MKAAIYIRVSTQEQIENYSIQAQTEKLTALCRSKDWDVYDIFIDGGYSGSNMNRPALNEMLSKLHEIDAVVVYRLDRLSRSQRDTITLIEEYFLKNNVEFVSLSETLDTSSPFGRAMIGILSVFAQLERETIRDRMVMGKIKRIEAGLPLTTAKGRTFGYDVIDTKLYINEEEAKQLRLIYDIFEEEQSITFLQKRLKKLGFKVRTYNRYNNWLTNDLYCGYVSYADKVHVRGIHEPIISEEQFYRVQEIFSRMGKNPNMNKESASLLNNLVVCSKCGLGFVHRRKDTVSRGKKYHYRYYSCKTYKHTHELEKCGNKIWRADKLEELIIDRVNNYSFASRNIDKEDELDSLNEKLKIEHAKKKRLFDLYINGSYEVSELDSMMNDIDAQINYYEAQIEANEELKKNKKIQENLADLATVDFNSLEFREKQLYLKSLINKIYIDGEQVTIEWL

SEQ ID NO: 23467 - DNA, 50 bp, Listeria monocytogenes; identical to SEQ ID NO: 23462
  source 1..50: mol_type = genomic DNA

SEQ ID NO: 23468 - DNA, 40 bp, Listeria monocytogenes; identical to SEQ ID NO: 1298
  source 1..40: mol_type = genomic DNA

SEQ ID NO: 23469 - DNA, 40 bp, Listeria monocytogenes; identical to SEQ ID NO: 22394
  source 1..40: mol_type = genomic DNA

SEQ ID NO: 23470 - DNA, 50 bp, Listeria monocytogenes; identical to SEQ ID NO: 23465
  source 1..50: mol_type = genomic DNA

SEQ ID NO: 23471 - protein, 452 aa, Listeria monocytogenes; identical to SEQ ID NO: 20166

SEQ ID NO: 23472 - DNA, 50 bp, Listeria monocytogenes; identical to SEQ ID NO: 23462
  source 1..50: mol_type = genomic DNA

SEQ ID NO: 23473 - DNA, 40 bp, Listeria monocytogenes; identical to SEQ ID NO: 7733
  source 1..40: mol_type = genomic DNA

SEQ ID NO: 23474 - DNA, 40 bp, Listeria monocytogenes; identical to SEQ ID NO: 22389
  source 1..40: mol_type = genomic DNA

SEQ ID NO: 23475 - DNA, 50 bp, Listeria monocytogenes; identical to SEQ ID NO: 23465
  source 1..50: mol_type = genomic DNA

SEQ ID NO: 23476 - protein, 452 aa, Listeria monocytogenes
MKAAIYIRVSTQEQVENYSIQAQTEKLTALCRSKDWDVYDIFIDGGYSGSNMNRPALNEMLSKLHEIDAVVVYRLDRLSRSQRDTITLIEEYFLKNNVEFVSLSETLDTSSPFGRAMIGILSVFAQLERETIRDRMVMGKIKRIEAGLPLTTAKGRTFGYDVIDTKLYINEEEAKQLRLIYDIFEEEQSITFLQKRLKKLGFKVRTYNRYNNWLTNDLYCGYVSYKDKVHVKGIHEPIISEEQFYRVQEIFSRMGKNPNMNKESASLLNNLVVCSKCGLGFVHRRKDTVSRGKKYHYRYYSCKTYKHTHELEKCGNKIWRADKLEELIIDRVNNYSFASRNIDKEDELDSLNEKLKIEHAKKKRLFDLYINGSYEVSELDSMMNDIDAQINYYEAQIEANEELKKNKKIQENLADLATVDFNSLEFREKQLYLKSLINKIYIDGEQVTIEWL

SEQ ID NO: 23477 - DNA, 50 bp, Listeria monocytogenes; identical to SEQ ID NO: 23462
  source 1..50: mol_type = genomic DNA

SEQ ID NO: 23478 - DNA, 40 bp, Listeria monocytogenes; identical to SEQ ID NO: 7733
  source 1..40: mol_type = genomic DNA

SEQ ID NO: 23479 - DNA, 40 bp, Listeria monocytogenes; identical to SEQ ID NO: 22389
  source 1..40: mol_type = genomic DNA

SEQ ID NO: 23480 - DNA, 50 bp, Listeria monocytogenes; identical to SEQ ID NO: 23465
  source 1..50: mol_type = genomic DNA

SEQ ID NO: 23481 - protein, 452 aa, Listeria monocytogenes
MKAAIYIRVSTQEQVENYSIQAQTEKLTALCRSKDWDVYDTFIDGGYSGSNMNRPALNEMLSKLHEIDAVVVYRLDRLSRSQRDTITLIEEYFLKNNVEFVSLSETLDTSSPFGRAMIGILSVFAQLERETIRDRMVMGKIKRIEAGLPLTTAKGRTFGYDVIDTKLYINEEEAKQLRLIYDIFEEEQSITFLQKRLKKLGFKVRTYNRYNNWLTNDLYCGYVSYADKVHVRGIHEPIISEEQFYRVQEIFSRMGKNPNMNKESASLLNNLVVCSKCGLGFVHRRKDTVSRGKKYHYRYYSCKTYKHTHELEKCGNKIWRADKLEELIIDRVNNYSFASRNIDKEDELDSLNEKLKIEHAKKKRLFDLYINGSYEVSELDSMMNDIDAQINYYEAQIEANEELKKNKKIQENLADLATVDFNSLEFREKQLYLKSLINKIYIDGEQVTIEWL

SEQ ID NO: 23482 - DNA, 50 bp, Listeria monocytogenes; identical to SEQ ID NO: 23462
  source 1..50: mol_type = genomic DNA

SEQ ID NO: 23483 - DNA, 40 bp, Listeria monocytogenes; identical to SEQ ID NO: 1298
  source 1..40: mol_type = genomic DNA

SEQ ID NO: 23484 - DNA, 40 bp, Listeria monocytogenes; identical to SEQ ID NO: 22394
  source 1..40: mol_type = genomic DNA

SEQ ID NO: 23485 - DNA, 50 bp, Listeria monocytogenes; identical to SEQ ID NO: 23465
  source 1..50: mol_type = genomic DNA

SEQ ID NO: 23486 - protein, 452 aa, Listeria monocytogenes; identical to SEQ ID NO: 20166

SEQ ID NO: 23487 - DNA, 50 bp, Listeria monocytogenes; identical to SEQ ID NO: 23462
  source 1..50: mol_type = genomic DNA

SEQ ID NO: 23488 - DNA, 40 bp, Listeria monocytogenes; identical to SEQ ID NO: 1298
  source 1..40: mol_type = genomic DNA

SEQ ID NO: 23489 - DNA, 40 bp, Listeria monocytogenes; identical to SEQ ID NO: 22394
  source 1..40: mol_type = genomic DNA

SEQ ID NO: 23490 - DNA, 50 bp, Listeria monocytogenes; identical to SEQ ID NO: 23465
  source 1..50: mol_type = genomic DNA

SEQ ID NO: 23491 - protein, 452 aa, Listeria innocua
MKAAIYIRVSTQEQIENYSIQAQTEKLTALCRSKDWDVYDIFIDGGYSGSNMNRPALNEMLSKLHEIDAVVVYRLDRLSRSQRDTITLIEEYFLKNNVEFVSLSETFDTSSPFGRAMIGILSVFAQLERETIRDRMVMGKIKRIEAGLPLTTAKGRTFGYDVIDTKLYINEEEAKQLRLIYDIFEEEQSITFLQKRLKKLGFKVRTYNRYNNWLTNDLYCGYVSYKDKVHVKGIHEPIISEEQFYRVQEIFARMGKNPNMNRDSASLLNNLVVCSKCGLGFVHRRKDTMSRGKKYHYRYYSCKTYKHTHELEKCGNKIWRADKLEELIIDRVNNYSFASRNVDKEDELDSLNEKLKTEHTKKKRLFDLYISGSYEVSELDAMMADIDAQINYYEAQIEANEELKKNKKIQENLADLATVDFDSLEFREKQLYLKSLINKIYIDGEQVTIEWL

SEQ ID NO: 23492 - DNA, 50 bp, Listeria innocua
  source 1..50: mol_type = genomic DNA
tttagtttctcgttttctctcgttggagggagaggaaatgggatacaaaa

SEQ ID NO: 23493 - DNA, 40 bp, Listeria innocua; identical to SEQ ID NO: 7873
  source 1..40: mol_type = genomic DNA

SEQ ID NO: 23494 - DNA, 40 bp, Listeria innocua; identical to SEQ ID NO: 22449
  source 1..40: mol_type = genomic DNA

SEQ ID NO: 23495 - DNA, 50 bp, Listeria innocua; identical to SEQ ID NO: 23465
  source 1..50: mol_type = genomic DNA

SEQ ID NO: 23496 - protein, 452 aa, Listeria innocua; identical to SEQ ID NO: 23461

SEQ ID NO: 23497 - DNA, 50 bp, Listeria innocua; identical to SEQ ID NO: 23462
  source 1..50: mol_type = genomic DNA

SEQ ID NO: 23498 - DNA, 40 bp, Listeria innocua; identical to SEQ ID NO: 7873
  source 1..40: mol_type = genomic DNA

SEQ ID NO: 23499 - DNA, 40 bp, Listeria innocua; identical to SEQ ID NO: 22449
  source 1..40: mol_type = genomic DNA

SEQ ID NO: 23500 - DNA, 50 bp, Listeria innocua; identical to SEQ ID NO: 23465
  source 1..50: mol_type = genomic DNA

SEQ ID NO: 23501 - protein, 452 aa, Listeria monocytogenes
MKAAIYIRVSTQEQIENYSIQAQTEKLTALCRSKDWDVYDIFIDGGYSGSNMNRPALNEMLSKLHEIDAVVVYRLDRLSRSQRDTITLIEEYFLKNNVEFVSLSETLDTSSPFGRAMIGILSVFAQLERETIRDRMVMGKIKRIEAGLPLTTAKGRTFGYDVIDTKLYINEEEAKQLQLIYDIFEEEQSITFLQKRLKKLGFKVRTYNRYNNWLTNDLYCGYVSYKDKVHVKGIHEPIISEEQFYRVQEIFSRMGKNPNMNKESASLLNNLVVCSKCGLGFVHRRKDTVSRGKKYHYRYYSCKTYKHTHELEKCGNKIWRADKLEELIIDRVNNYSFASRNVDKEDELDYLNEKLKIEHAKKKRLFDLYINGSYEVSELDAMMADIDAQINYYEAQIEANEELKKNKKIQENLADLATVDFDSLEFREKQLYLKSLINKIYIDDEQVTIEWL

SEQ ID NO: 23502 - DNA, 50 bp, Listeria monocytogenes
  source 1..50: mol_type = genomic DNA
tttagttcctcgttttctctcgttggagggagaggaaatgggatacaaaa

SEQ ID NO: 23503 - DNA, 40 bp, Listeria monocytogenes; identical to SEQ ID NO: 7828
  source 1..40: mol_type = genomic DNA

SEQ ID NO: 23504 - DNA, 40 bp, Listeria monocytogenes
  source 1..40: mol_type = genomic DNA
tttcggatcaagctatgaactacgcaaagagggaactaaa

SEQ ID NO: 23505 - DNA, 50 bp, Listeria monocytogenes; identical to SEQ ID NO: 23465
  source 1..50: mol_type = genomic DNA

SEQ ID NO: 23506 - protein, 452 aa, Listeria monocytogenes
MKAAIYIRVSTQEQVENYSIQAQTEKLTALCRSKDWDVYDIFIDGGYSGSNMNRPALNEMLSKLHEIDAVVVYRLDRLSRSQRDTITLIEEYFLKNNVEFVSLSETLDTSSPFGRAMIGILSVFAQLERETIRDRMVMGKIKRIEAGLPLTTAKGRTFGYDVIDTKLYINEEEAKQLRLIYDIFEEEQSITFLQKRLKKLGFKVRTYNRYNNWLTNDLYCGYVSYKDKVHVKGIHEPIISEEQFYRVQEIFARMGKNPNMNRDSASLLNNLVVCSKCGLGFVHRRKDTMSRGKKYHYRYYSCKTYKHTHELEKCGNKIWRADKLEELIIDRVNNYSFASRNVDKEDELDSLNEKLKTEHTKKKRLFDLYISGSYEVSELDAMMADIDAQINYYEAQIEANEELKKNKKIQENLADLATVDFDSLEFREKQLYLKSLINKIYIDGEQVTIEWL

SEQ ID NO: 23507 - DNA, 50 bp, Listeria monocytogenes; identical to SEQ ID NO: 23492
  source 1..50: mol_type = genomic DNA

SEQ ID NO: 23508 - DNA, 40 bp, Listeria monocytogenes; identical to SEQ ID NO: 1298
  source 1..40: mol_type = genomic DNA

SEQ ID NO: 23509 - DNA, 40 bp, Listeria monocytogenes; identical to SEQ ID NO: 22394
  source 1..40: mol_type = genomic DNA

SEQ ID NO: 23510 - DNA, 50 bp, Listeria monocytogenes; identical to SEQ ID NO: 23465
  source 1..50: mol_type = genomic DNA

SEQ ID NO: 23511 - protein, 588 aa, Shewanella algae
MTSPCGILCQTPSRRIRHATMTSPKQPTSTPLAHSYIRFSSIAQEKGDSINRQIASATSWSEKRGIPLSDVVYRDLGISAFKKVDRPGLRQLTESIRAGIIRQGDYILLERLDRLSRKDLDIAQEEVKSMLRLGVNIIAIEDGLELTPDSLNDPSALIRIIILAENAHRQSREKSERIKAAYASARQRARDGKAVKRRLPCWLEVAPDDVYTFHPVYLPIVQRIIELRHAGRGYSSIAKTLNAEGLPGRIGKSGTTSKGWTGGSVREIVTSRALYGFYQPHITVEKERDDGTTKRVLQPDGDPIVDHYPPVIGYREWLAIQPDTTATAKNRIPAGGYNKTDRLSGVARCGVCGGRVALRIYRRPSKKAQGGMKDYRHWVCVAGYSSGTCPVTRAFPDLDLVIIKSIGHLEVDVAPPAPSTCSSSSAVDTIRATLDANRERAEQLKSLLVDPEGGDVGFVYNALSTLQNRIKDLEAELEQLEKVEVSGGNTTQEDIDRLKSLVDDVELFNHELRKIVGAIRVQHFGKKGFKGVIEQVNGKRVGFVSTAPENPKRGHAKERIEFFARGLGIPEPGDVEQLYPWETDEQED

SEQ ID NO: 23512 - DNA, 50 bp, Shewanella algae; identical to SEQ ID NO: 19882
  source 1..50: mol_type = genomic DNA

SEQ ID NO: 23513 - DNA, 40 bp, Shewanella algae
  source 1..40: mol_type = genomic DNA
tttgcgagttttgaacacaaagcttatcagtagcaggaaa

SEQ ID NO: 23514 - DNA, 40 bp, Shewanella algae
  source 1..40: mol_type = genomic DNA
tttgcgagttttgaacacagtgcttatcagtagcaggaaa

SEQ ID NO: 23515 - DNA, 50 bp, Shewanella algae
  source 1..50: mol_type = genomic DNA
gtttgccagcagccccccatcacagtattgttgccagcagactgggaaca

SEQ ID NO: 23516 - protein, 511 aa, Halobacillus kuroshimensis
MGAIKNVAIYSRKSRPDETDEGIKRQLAYLIDKCIESGWEYEVFQEVGSSQDINRPELNKMLERVQHFHFDAVVVTDQDRLSRTTSGFSQIKDILNDYGVKVVTSSKIYDYATQEDDLMSDMQSIVAKQEYLNIKKRLVRGKRQSAKEGNWVGGKTPVGYLYDKNTKKLKPDEYAPTIKKIFTMYLDGKTSTEIAREFELEGVLTPTGSKWDKARIAVVLSNPVYKGTVIYGKTKVSKTSKKPSGTPRQVKTDRDEQIVYDNAHQPIVSPEDWDKVERIRKDRNSRPPSARIGKLAYTGLIKCGLCGRTHSFQRRKGKELRITSCQTRHYSEDGESYTVCQNKGCRLDNFEKLFFVKLSQFTDMLENHIEFIKEQNEQETHNPVDEKASLEAQLNKIEASIKRVQNGFVMEIFTEEEAHTKIKQFKAQKDNVEAQLEELNTKSQDEQIDELEETLRGLRGIMSGEMTSEPKRVHEILSRVIDHIEYKRVGDHKAEIDMKVHLKGQSEEQVQ

SEQ ID NO: 23517 - DNA, 50 bp, Halobacillus kuroshimensis
  source 1..50: mol_type = genomic DNA
tgtagcattttagttatgttctatttatagattgaaactattatgcaacc

SEQ ID NO: 23518 - DNA, 40 bp, Halobacillus kuroshimensis
  source 1..40: mol_type = genomic DNA
tgtagcatccttcgtcaatttataaatcatggtcgcaatc

SEQ ID NO: 23519 - DNA, 40 bp, Halobacillus kuroshimensis
  source 1..40: mol_type = genomic DNA
tgtagcatccttcgtcaatatataaatcatggtcgcaatc

SEQ ID NO: 23520 - DNA, 50 bp, Halobacillus kuroshimensis
  source 1..50: mol_type = genomic DNA
tgtatgtatatacatatgttatatatatagtataaaattattttgcaacc

SEQ ID NO: 23521 - protein, 551 aa, Clostridium cadaveris
MNREGKKCVLYPRVSTEMQVDGYSLEGQKNSLKRFADREEMEIVGIYEDAGKSGKSIEGRPAFKKMLSDIKNGLEIDYILVYKLSRFGRNAADILNSLEFVQSYGINLICIEEGIDSSQTSGKLLISVLSAVAEIERENIIEQTMNGRREKARQGGWNGGFAPYGYYLKDNQLLIEETEAEAIRIIFDKFANSDIGLGGVAKYLNLQGIKKIPRQNGTLETWSSHFIRLILDNPVYCGKIAYGRRTREKVKGTKNEYKQVHAEDYILEDGQHEGIISEELWQKVHAKRMATGIKQPSKIGKDRSHLLTGILKCPLCGSSMYTNKHAWTNKDGTYKEVYYYICGRNKQERGHHCDYKASLRKTDIEPLVIEAVKELVSDKYFAKEIEKRIGVQTDTTAIDKELANYESKLKEVDLNKARLEREIDNLPVDTRFRERKIHDMTLRLDALYDTIVELEERIEDAKLRKSSIEMETITLDNIYKLMLNFGKLYDIISDEEKKSLITYLIKEIQIYPNGESEQPLKSIEFNFPIYRDGQEVRRLLWEKGNTVETVV

SEQ ID NO: 23522 - DNA, 50 bp, Clostridium cadaveris
  source 1..50: mol_type = genomic DNA
ttgtgggaaaaaggtaatactgttgagacggtagtactgctttcccacaa

SEQ ID NO: 23523 - DNA, 40 bp, Clostridium cadaveris
  source 1..40: mol_type = genomic DNA
cttacaaacaccacatgtggagacggtagtattgatgtca

SEQ ID NO: 23524 - DNA, 40 bp, Clostridium cadaveris
  source 1..40: mol_type = genomic DNA
cttacaaacaccacatgtgctgacggtagtattgatgtca

SEQ ID NO: 23525 - DNA, 50 bp, Clostridium cadaveris
  source 1..50: mol_type = genomic DNA
gggtgtgaattccctcatactgttctcatggtagtgaataactctcacaa

SEQ ID NO: 23526 - protein, 619 aa, Vibrio parahaemolyticus
MRTSPKIYNYARVSTTKQLQGVGLETQQQRSVLETLSQEHDLPIHDENFVDQGLSAYHGKHREGALGLVLSHIESGEIPSGSILVVFSLDRLSRETVNVAMEQLLSIINRGVRVYTHIDGKMFDAKSQNLTADLIVSLITMQRANEESETKSKRIIAAQKEALKKWKIDGKPRGALGRVPFWIDQPTNSLNENAEGAKVAVDLFLEGWSTIKIKQYLDENYPYKQTRKRSIQKASTWDSGVIDQLWRKVSLIGDKRYTIDGEEHVLHNYYPSLISLEKFNKLTRLKKPKLGRSTSTGSLHLLKGLARCGVCGSAMVFVDKAQHSKNYVCSLATKGEQSHNREVFSAELLELLTLEVCRDQYLINSFNAQLNVEETARVEYELAEEKKQLEDLKSRYKQKSRASLLDLIEDTEDKIEVLEQQLASFETFDLSDNLHLLNSDIFTEDVRTNFRHSSRAEIIDNLKSVLSDVTLSRVVEASEITKTGTVNCVCITWRFKNDQTRSISVRPFRYIGTGSNKKLFVPVRYEYTVPVLNEENRRGEKFVPDMIKKLHEKKLLNKLYPSKGRYQWNNLELALGEFQTGLHNFLPNFVADPDAFWGDMVDKARAKGTRYTVLSKNVL

SEQ ID NO: 23527 - DNA, 50 bp, Vibrio parahaemolyticus
  source 1..50: mol_type = genomic DNA
cgaagaatttagttttataatggtttgccaataaaaaacaatttccttcg

SEQ ID NO: 23528 - DNA, 40 bp, Vibrio parahaemolyticus
  source 1..40: mol_type = genomic DNA
gaggaatatttgctgtggtttgataaaaaaggctggccga

SEQ ID NO: 23529 - DNA, 40 bp, Vibrio parahaemolyticus
  source 1..40: mol_type = genomic DNA
gaggaatatttgctgtggtctgataaaaaaggctggccga

SEQ ID NO: 23530 - DNA, 50 bp, Vibrio parahaemolyticus
  source 1..50: mol_type = genomic DNA
agttgaattcagtgtgataatggactgcaaaggaaacctcttttcctttg

SEQ ID NO: 23531 - protein, 600 aa, Vibrio parahaemolyticus
MKGSGVAMQINDEVLKSLSNEYNLPIAQETYQDLGKSAYKGEHLKNELGLFLAAVKNRTVAKGSILVVYSLDRLSRLEIGHAKQTYYDLTNNGVSVYAVVDNHLYRAHNAADDIIATITFERAHNESEIKSRRVIDAAKEGLKRWKETKQPQSSLGRSPFWIDQPTNSLNENAEGVKVAVDLFLEGWSTIKVKQHLDKNYPYLRTRKTSIKKAQTWDYGVIDQLWRKTSLIGEKRLTIEGQKYVLSNYYPPLISLEKFNKLTRLKKPKLGRSTSTGSIHLLKGLARCGICGSAMVFVDKAQHSKNYVCSLAIKGEPLHNREVFSAELLELLTIEVCRDQYLINSFNAQLNVEKKARFEYELAEEKKQLEDLKSRYKQKSRASLLDLIEDTEDKIEELEQQLVSLDTFDLSDKLHLLQSDIFTEDVRTNFQHSSRAEIIDNLNSVLSDVTLNRAVEASEFTKTGEVNCVSITWRFKNDQTRSLSVKPFRYIGKGSNKKLFVPVRYEYTVPVIDEENRRGEKFVPDMIKKVHEKKLLNKFYPSKGRYQWDKLEFVLGEFQTGLHNFLPNFVADPDPDAFWGDMVDKARDKGTRYTVLSKNVL

SEQ ID NO: 23532 - DNA, 50 bp, Vibrio parahaemolyticus
  source 1..50: mol_type = genomic DNA
cgaagaatttagttttataatggtttgcgaataaaaaacaatttccttcg

SEQ ID NO: 23533 - DNA, 40 bp, Vibrio parahaemolyticus; identical to SEQ ID NO: 23528
  source 1..40: mol_type = genomic DNA

SEQ ID NO: 23534 - DNA, 40 bp, Vibrio parahaemolyticus; identical to SEQ ID NO: 23529
  source 1..40: mol_type = genomic DNA

SEQ ID NO: 23535 - DNA, 50 bp, Vibrio parahaemolyticus; identical to SEQ ID NO: 23530
  source 1..50: mol_type = genomic DNA

SEQ ID NO: 23536 - protein, 621 aa, Vibrio parahaemolyticus
MRTSPKIYNYARVSTTKQLQGVGLETQQQRSVLETLSQEHNLPIHDENFVDQGLSAYHGKHREGALGLVLSHIESGEIPSGSILVVFSLDRLSRETVNVAMEQLLSIINRGVRVYTHIDGKMFDAKSQNLTADLIVSLITMQRANEESETKSKRIIAAQKEALKKWKIDGKPRGALGRVPFWIDQPTNSLNENAEGAKVAVDLFLEGWSTIKIKQYLDENYPYKQTRKRSIQKASTWDSGVIDQLWRKVSLIGDKRYTIDGEEHVLHNYYPSLISLEKFNKLTRLKKPKLGRSTSTGSLHLLKGLARCGVCGSAMVFVDKAQHSKNYVCSLATKGEQSHNREVFSAELLELLTLEVCRDQYLINSFNAQLNVEETARVEYELAEEKKQLEDLKSRYKQKSRASLLDLIEDTEDKIEVLEQQLASFETFDLSDNLHLLNSDIFTEDVRTNFRHSSRAEIIDNLKSVLSDVTLSRVVEASEITKTGTVNCVCITWRFKNDQTRSISVRPFRYIGTGSNKKLFVPVRYEYTVPVLNEENRRGEKFVPDMIKKLHEKKLLNKLYPSKGRYQWNNLELVLGEFQTGLHNFLPNFVADPDPDAFWGDMVDKARAKGTRYTVLSKNVL

SEQ ID NO: 23537 - DNA, 50 bp, Vibrio parahaemolyticus; identical to SEQ ID NO: 23527
  source 1..50: mol_type = genomic DNA

SEQ ID NO: 23538 - DNA, 40 bp, Vibrio parahaemolyticus; identical to SEQ ID NO: 23528
  source 1..40: mol_type = genomic DNA

SEQ ID NO: 23539 - DNA, 40 bp, Vibrio parahaemolyticus; identical to SEQ ID NO: 23529
  source 1..40: mol_type = genomic DNA

SEQ ID NO: 23540 - DNA, 50 bp, Vibrio parahaemolyticus; identical to SEQ ID NO: 23530
  source 1..50: mol_type = genomic DNA

SEQ ID NO: 23541 - protein, 512 aa, Chryseobacterium cucumeris
MKVADLYIRVSTDEQADKGYSQRDQEDRLKKYCLSNNISIGQIIYEDHSAKSFNRPGWIRLLTTLKKRSCKTNLILFTKWDRFSRNAGDAYQMISTLAKLGIEPQAVDQPLDLSIPENKMMLAIYLAAPEVENDRRALNVFYGMRRAKKEGRVMGKAPFGYANKSRENGEKYIVLQEPEASAMNWAFNEIAKGVLASNQIRKRVNELTIKKVSRTSFHVAIRNPIYYGKVFLEKHKDEEAYFVDGQHEALISEELFNRVQEVLDGKRRLQRPNTKILSDEHFPLRGFLVCPKCGKNITASASKGRNNRYYYYHCNAVCGFRHRAELVNSVFEEGLKQLEMTEPAKKLIEKVFLDNYQKFIKTPQNERKKVSDEIDRLNSRISLARNKLLSEVITDEEYLEIKKEYKEQIEKLERQLSNKPEENKMNVPKLLEKALETLTNIWKIYTEGDIAVKRQIIGSIFPEKLEFDENHYRTTRINAIVYYIFQINNGLSQNKNRRNDNNNHFSCYVDPQ

SEQ ID NO: 23542 - DNA, 50 bp, Chryseobacterium cucumeris
  source 1..50: mol_type = genomic DNA
atcatttctcctgctatgtagacccacaggaacaaatctcgaagcatttt

SEQ ID NO: 23543 - DNA, 40 bp, Chryseobacterium cucumeris
  source 1..40: mol_type = genomic DNA
aaaggatggtttgtagacccacagggattcgaaccccaga

SEQ ID NO: 23544 - DNA, 40 bp, Chryseobacterium cucumeris
  source 1..40: mol_type = genomic DNA
aaaggatggtttgtagaccaccagggattcgaaccccaga

SEQ ID NO: 23545 - DNA, 50 bp, Chryseobacterium cucumeris
  source 1..50: mol_type = genomic DNA
attaattttgcttatctgtagacaaccagtagcagaggacaaagaatttt

SEQ ID NO: 23546 - protein, 529 aa, Vibrio parahaemolyticus
MRKVYSYMRFSRPEQAKGTSIERQSSFAEQYALAHGLELDKSLTMMDKGLSAFHGMHRTKGAFGQFLAAVAAGKVPSGSVLVVESLDRLSREDPLIAQAALTDLILSGITVVTAADNQVYSREEIQQNPFKLIMSLVVMIRANEESETKQRRSNAFLKSALNQYQANGNIRRLGADPSWLDFNKDDNTYSFNARVDVIRRILSLYNQGIGSLKIARQLTEESIPTLSGKRNAWGQTTVANIVKSHALYGMKRINVQGVDYDLEDFYPALITKSKWLALQQHRSKRSKTMHGRGEVVHLITGHGKGFTTCGYCGGGLGAQTQKQYKRSGEYSRTVTRLHCLTHKETSSCCSSVFLQPIESAVLFAVCIGVEPQSLVPTVNNVNYSALIDEVENKVKHIVEQVTAGAPWDLFKDVHDRLKLEKQKLIKERDSQKPDVNQSDVQKWVNKLVELADKARANDKEARLKCRTLINSICKSIVIKLRGHDLKSEPVVTITFVTDEQFEFKVGKNGAVQFVDNGMAVNRRLKPLLA

SEQ ID NO: 23547 - DNA, 50 bp, Vibrio parahaemolyticus
  source 1..50: mol_type = genomic DNA
tagttatgcactgtacatttgctttctatccaatgtatagtgaaaactta

SEQ ID NO: 23548 - DNA, 40 bp, Vibrio parahaemolyticus
  source 1..40: mol_type = genomic DNA
gaaataaccaaaagatccgtcagtccaatggatgtcttgc

SEQ ID NO: 23549 - DNA, 40 bp, Vibrio parahaemolyticus
  source 1..40: mol_type = genomic DNA
gaaataaccaaaagatccggtagtccaatggatgtcttgc

SEQ ID NO: 23550 - DNA, 50 bp, Vibrio parahaemolyticus
  source 1..50: mol_type = genomic DNA
tatttaggcttaagaattttagttgttatcctatgtgcagtgagaagtta

SEQ ID NO: 23551 - protein, 512 aa, Vibrio vulnificus
MKAYLYIRFSSKQQEQGDSVRRQEEAARKWCKAHDVELSDMTFEDLGVSAFKEGGKRPALADLIEAIELGKIARDSYVLVENDDRLSRHGWYATQQMIRRMVLDLGVKLVVISSGTVYDSSNIEDIAQNILLMFNADRAHKESLRKSEMIRAARQTRRDDETLTGKLPFWLKRVDDKILLDQQKADIVRMIVELKKSGKSNQATARFLNDQKIVSATGGKWNASAIRMVYSNHAIYGAKAYFITDGTRKMTLDKVVEDKFPAIVTKADFDAVQTTQKHRGRRSTKTPFSLLLKCGKCGGGMVQRTSMYKEKKMIYRHCIASLEGRCDQNKLIREPDVILSNALKHMQYIDSVEQYVSRVSGIQAQIDTLKQTQDRLIELGQVDALTNLYTRLAELEQKLVQARIEDEANEQKPIDFNYKNVFDLEDASEQNAMLKRVIDSIEIHYLGVVDKKTSSKWRIKVNQRNKHHQGFVINQYHGFGNWEIIHMTDTEKFKKELEALTDDIDDCIDFDE

SEQ ID NO: 23552 - DNA, 50 bp, Vibrio vulnificus
  source 1..50: mol_type = genomic DNA
acttagtagaataggcataaaatgaaagtgctataccgaatctaataagt

SEQ ID NO: 23553 - DNA, 40 bp, Vibrio vulnificus
  source 1..40: mol_type = genomic DNA
gttcggttggcacgtgttgaaggtattgtacagaacctaa

SEQ ID NO: 23554 - DNA, 40 bp, Vibrio vulnificus
  source 1..40: mol_type = genomic DNA
gttcggttggcacgtgttggcggtattgtacagaacctaa

SEQ ID NO: 23555 - DNA, 50 bp, Vibrio vulnificus
  source 1..50: mol_type = genomic DNA
acttggcagagttatcacaaaatggcagtgctacacctgaaataacgagc

SEQ ID NO: 23556 - protein, 512 aa, Vibrio vulnificus
MKAYLYIRFSSKQQEQGDSVRRQEEAARKWCKAHDVELSDMTFEDLGVSAFKEGGKRPALADLIEAIELGKIARDSYVLVENDDRLSRHGWYATQQMIRRMVLDLGVKLVVISSGTVYDSSNIEDIAQNILLMFNADRAHKESLRKSEMIRAARQTRRDDETLTGKLPFWLKRVDDKILLDQQKADIVRMIVELKKSGKSNQATARFLNDQKINSATGGKWNASAIRMVCSNHAIYGAKAYFITDGTRKMTLDKVVEDKLPAIVTKADFDAVQTTQKHRGRRSTKTPFSLLLKCGKCGGGMVQRTSMYKEKKMIYRRCIASLEGRCDQNKLIREPDVILSNALKHMQYIDSVEQYVSRVSSIQAQIDTLKQTQDRLIELGQVDALTNLYTRLAELEQKLVQARIEDEANEQKPIDFNYKNVFDLEDASEQNAMLKRVIDSIEIHYLGVVDKKTSSKWRIKVNQRNKHHQGFVINQYHGFGNWEIIHMTDTEKFKKELEALTDDIDDCIDFDE

SEQ ID NO: 23557 - DNA, 50 bp, Vibrio vulnificus; identical to SEQ ID NO: 23552
  source 1..50: mol_type = genomic DNA

SEQ ID NO: 23558 - DNA, 40 bp, Vibrio vulnificus; identical to SEQ ID NO: 5483
  source 1..40: mol_type = genomic DNA

SEQ ID NO: 23559 - DNA, 40 bp, Vibrio vulnificus
  source 1..40: mol_type = genomic DNA
gttcggttggcacgtgttggcggtgttgtacagaacctaa

SEQ ID NO: 23560 - DNA, 50 bp, Vibrio vulnificus; identical to SEQ ID NO: 23555
  source 1..50: mol_type = genomic DNA

SEQ ID NO: 23561 - protein, 543 aa, Vibrio lentus
MLAFSYKRFSSKQQAQGMSIERQTKLAEDYCHKHSLELSSQSFEDLGVSAWTGRNSNEDAGLGQFIQALESQKIRTPCYLLVESLDRLSRAKIQKAMRQLMDITDFDVTIVTLMDEKQYTKDMEFTDFLLAGVIMERANNESETKSKRLKAVWAKKRAEQAMHSNAPFWLDRTDEGYKINQSVSIVQRIFRLAAEGLGHYSITGILNKEQVPSPTGKGWNGSTVSKLLRSRTVIGEYQPNTVNNKVATPIGEPICGYYPIVIEEDLFNRVQLEINHRLKKYKSYRGGSTSTHRNLLRDKGKCSCQKYLSLVKKRQRYYLQCIDNRSQLCGKRAIQMDAFEKWLRQYFLSPMFHNHWIDSGEKNADIDSKINELIIAKQSSRDGLEGLLSITENLSDKLVLQRIRELSEEVSALDKRIEDLEGSKLSGNKRQSLEETSRLIDLAFAVEDMAENIAARVQLKQLLNQTFDYFELTRVDSDNGKVLYYRIELGFYGQTWKYQSIDAPTALQNAKKRHIWFDWSDKPRVELTEEQKQAVIEEFKINH

SEQ ID NO: 23562 - DNA, 50 bp, Vibrio lentus
  source 1..50: mol_type = genomic DNA
tgtggttctagtatgtaaaagatgttactttcttacttactataaccccc

SEQ ID NO: 23563 - DNA, 40 bp, Vibrio lentus
  source 1..40: mol_type = genomic DNA
atgtatcgcgctcgatactttattgacgttttggccgccg

SEQ ID NO: 23564 - DNA, 40 bp, Vibrio lentus
  source 1..40: mol_type = genomic DNA
atgtatcgcgctcgatacttcattgacgttttggccgccg

SEQ ID NO: 23565 - DNA, 50 bp, Vibrio lentus
  source 1..50: mol_type = genomic DNA
ttttcaactggtgagaaaaagatgtcacttactttccctacataaccacc

SEQ ID NO: 23566 - protein, 645 aa, Vibrio sp F13
MALIPYARVSSGKQLDGLSMSLQGDSKLLKDLENKYDTTVSDLIYNDEGVSSYKGKNVSHGELGRLLTDIERGVIKKGDIIVVRHLDRLSRLRLTGAMTIYNKIMEAGVLIHTTMDDRLYEPDDQIAHILATLAFNTANEESAKKSHLTNTYAAHRIQQFLSNEKPDNGTAYDIGIGRHPFWIEIDNRVIQKGKHFTLARIMFEKAMQGYGVARLQKFALEKGLKLSYSAVGKMFRSHTVFGDLHITHQGNKHTLKGYYPALATENEYYIVRAIKDRLTKESNSQRKHVSILAGMQKLYCGCCNSSVGISRNTKQDINYYSCINKLEKCYQPLRQDIIDNIVLNAIDTHIFNADTSDTTVLDGLELELKNKTKVFEEAETNYILLGSRASSNGAKIIKSLANELDDIQEKIEVEKNQTASYAIDYDAITSFHAAMADYKAQQDKITEYVHGDSELKQEIKDILKLVLKCITIDHRHMITIEMLDGSKSHLYLLRRKDGKRLHDRYYVPIKVHDEETIKQVRDSTPELVNWVTESELDSLDLYFEDVANPFLAIERKRHQRDLEQEFFDLLQGNVYEWKRADIMRAGATTTQWQDFKDVDVSKYGFTKDVCTITTKHYTKQHKTVIYREFNESELINHFDCKRIDF

SEQ ID NO: 23567 - DNA, 50 bp, Vibrio sp F13
  source 1..50: mol_type = genomic DNA
ctaaaatcttagagcaactcgacttagcatcactaaaaacaacttactat

SEQ ID NO: 23568 - DNA, 40 bp, Vibrio sp F13
  source 1..40: mol_type = genomic DNA
atacttagacaactctttttagcatcaccaaacgacacag

SEQ ID NO: 23569 - DNA, 40 bp, Vibrio sp F13
  source 1..40: mol_type = genomic DNA
atacttagacaactcttttaggcatcaccaaacgacacag

SEQ ID NO: 23570 - DNA, 50 bp, Vibrio sp F13
  source 1..50: mol_type = genomic DNA
ataaaatctcaagtcacctccattaggcatcattaattctaccaaacttt

SEQ ID NO: 23571 - protein, 458 aa, Tsukamurella pseudospumae
MTSMEAVIYARVSQDHGTRSVQEQERECREFCDRQGWNVTRVLTDNDIGASRYSGKDRPAYRELKEILRPGDVLVTWEASRAQRDLAAYVELRNLCADRGVKWAYNGRVFDLSDGDDRFGTGLDALLAEKEAEQIRARVLRGKRSAAAEGRPSGKTPPGYRPVRDPRTGRTVTWEPDEVAPVMQEAARRILEGETLREVTRWANEQGVTGTHRQMRDRLHLASYAGLRVHQGKVVGEANWPALWSPEQRDQIIAAFADPARRASGGGGVPVRHLLAGIARCGVCGAGMRHYWPPSAQKISAPPAYVCSDGLHVRRQAKPLEKAVVRATLARIRTIDRAQLADDGGAAAAAARREAQELQDRLDEFTVAAAEPGGPSPRALAAIEQKLQPQIDAALARARASYRSPLIGRLAENPEDWTVLTVVERREVIRSMVTVRVMPTQSRGVAGFRREDVEIHPA

SEQ ID NO: 23572 - DNA, 50 bp, Tsukamurella pseudospumae
  source 1..50: mol_type = genomic DNA
ctgaacctatcggaacagtcagcctcaggcaagtgcatgaataggttcag

SEQ ID NO: 23573 - DNA, 40 bp, Tsukamurella pseudospumae
  source 1..40: mol_type = genomic DNA
ctgcacggggtcgcccgcctcgatcatccggccgtcgccg

SEQ ID NO: 23574 - DNA, 40 bp, Tsukamurella pseudospumae
  source 1..40: mol_type = genomic DNA
ctgcacggggtcgcccgccttgatcatccggccgtcgccg

SEQ ID NO: 23575 - DNA, 50 bp, Tsukamurella pseudospumae
  source 1..50: mol_type = genomic DNA
ctgaacatagccctacagtgagctttacccaagtgagcttctatgttctc

SEQ ID NO: 23576 - protein, 456 aa, Clostridioides difficile; identical to SEQ ID NO: 18966

SEQ ID NO: 23577 - DNA, 50 bp, Clostridioides difficile
  source 1..50: mol_type = genomic DNA
taatttttgttgtactaaattgtccataccatgtggttaaatacttttta

SEQ ID NO: 23578 - DNA, 40 bp, Clostridioides difficile
  source 1..40: mol_type = genomic DNA
gaccacttacaggatgttccatatcatgtggtaaggctgt

SEQ ID NO: 23579 - DNA, 40 bp, Clostridioides difficile
  source 1..40: mol_type = genomic DNA
gaccacttacaggatgttcattatcatgtggtaaggctgt

SEQ ID NO: 23580 - DNA, 50 bp, Clostridioides difficile
  source 1..50: mol_type = genomic DNA
gaatttctgttaatctaaattgtcattaatatttgatattgttgtttttt

SEQ ID NO: 23581 - protein, 547 aa, Citrobacter freundii
MKLLVTYIRWSTKEQDSGDSLRRQTNLIDAFYAKHQEEYYLLPAHRYVDKGKSGFHQQHKNQGSDFRRMFENVMSGTIPEGSLIVVENFDRFSRADIDTAIDDVRQILRKGVSILTLGDGELYDKSALTDPVKLIKHIIIAERAHQESLVKQKRIAQVWNHKTQLARELKKPMGKQAPGWLELSDDGSHYIVDEDKASLVNLIYDKRLSGMSMFAICKWLNEQGYPTINQRKVRISKTKKPDGNWSALSVKHILTSRSVLGYLPAKISTEDRKTVLREEIEGFYPQIVTDSKFYAVQQLLEETGKGKTSGGEHWLYVNILKGIIRCKCGLVMTPTGIRKPVYQGTYRCNGNKESRCNYGTVSRKLLDSQLCSRLFSKLSQLHDEATDTARLDELQRRLTTVDSELEKLTETLIQLPNITQIQEALRVKQEEKDELIAQLSREKARVKSVSSLDLSGLDMESVEGRTEAQIIIKRLVKEIVVSGNEKLVDIYLHNGNMIRGFPLDGKDDHTLTLEEATDEMQPLDDMLIFGEPVTRVYPAGDMEEVDA

SEQ ID NO: 23582 - DNA, 50 bp, Citrobacter freundii
  source 1..50: mol_type = genomic DNA
atacgtgtttagctatgtaaaagcactagtattcttaccttaacactcat

SEQ ID NO: 23583 - DNA, 40 bp, Citrobacter freundii; identical to SEQ ID NO: 21398
  source 1..40: mol_type = genomic DNA

SEQ ID NO: 23584 - DNA, 40 bp, Citrobacter freundii
  source 1..40: mol_type = genomic DNA
gtacatggaataataaagctacagaacttttgccatttta

SEQ ID NO: 23585 - DNA, 50 bp, Citrobacter freundii
  source 1..50: mol_type = genomic DNA
atccgtgtcaagagatgatcaagctatagtattctttttctaataatact

SEQ ID NO: 23586 - protein, 547 aa, Citrobacter portucalensis
MKLLVTYIRWSTKEQDSGDSLRRQTNLIDAFYSKHKEEYYLLPAHRYVDKGKSGFHQQHKNQGSDFRRMFENVMSGVIPEGSLIVVENFDRFSRADIDTAIDDVRQILRKGVSILTLGDGELYDKSALTDPVKLIKHIIIAERAHQESLVKQKRIAQVWNHKTQLARELKKPMGKQAPGWLELSDDGSHYIVDEDKASLVNLIFDKRLSGLSMFAICKWLNEQGYPTINQRKVRISKTQKPDGNWSALSVKHILTSRSVLGYLPAKISTEDRKTVLREEIEGFYPQIVTDSKFYAVQQLLEETGKGKTSSGEHWLYVNILKGVVRCKCGLVMTPTGIRKPVYQGTYRCNGNKESRCNYGTVSRKLLDTQLCSRLFSKLSQLHDEATDTDRLDELQRRLTTVDIELEKLTETLIQLPNITQIQEALRVKQEEKDELIAQLSREKARVKSVSSLDLSGLDMESVEGRTEAQIIIKRLVKEIVVSGNEKLVDIYLHNGNMIRGFPLDGKDDHTLTLEEATDEMQSLDDMLIFGEPVTRVYPASDMEEVDA

SEQ ID NO: 23587 - DNA, 50 bp, Citrobacter portucalensis; identical to SEQ ID NO: 3502
  source 1..50: mol_type = genomic DNA

SEQ ID NO: 23588 - DNA, 40 bp, Citrobacter portucalensis; identical to SEQ ID NO: 21398
  source 1..40: mol_type = genomic DNA

SEQ ID NO: 23589 - DNA, 40 bp, Citrobacter portucalensis; identical to SEQ ID NO: 23584
  source 1..40: mol_type = genomic DNA

SEQ ID NO: 23590 - DNA, 50 bp, Citrobacter portucalensis; identical to SEQ ID NO: 23585
  source 1..50: mol_type = genomic DNA

SEQ ID NO: 23591 - protein, 547 aa, Citrobacter freundii
MKLLVTYIRWSTKEQDSGDSLRRQTNLIDAFYSKHREEYYLLPAHRYVDKGKSGFHQQHKNQGSDFRRMFENVMSGGIPEGSLIVVENFDRFSRADIDTAIDDVRQILRKGVSILTLGDGELYDKSALTDPVKLIKHIIIAERAHQESLVKQKRIAQVWNHKTQLARELKKPMGKQAPGWLELSDDGSHYIVDEDKASLVNLIFDKRLSGLSMFAICKWLNEQGYPTINQRKVRISKTQKPDGNWSALSVKHILTSRSVLGYLPAKISTEDRKTVLREEIEGFYPQIVTDSKFYAVQQLLEETGKGKTSSGEHWLYVNILKGLIRCRCGLVMTPTGIRKPVYQGTYRCNGNKESRCNYGTVSRKLLDTQLCSRLFSKLSQLHDEATDTDRLDELQRRLTTVDIELEKLTETLIQLPNITQIQEALRVKQEEKDELIAQLSREKARVKSVSSLDLSGLDMESVEGRTEAQIIIKRLVKEIVVSGNEKLVDIYLHNGNMIRGFPLDGKDDHTLTLEEATDEMQSLDDMLIFGEPVTRVYPASDMEEVDA

SEQ ID NO: 23592 - DNA, 50 bp, Citrobacter freundii; identical to SEQ ID NO: 3502
  source 1..50: mol_type = genomic DNA

SEQ ID NO: 23593 - DNA, 40 bp, Citrobacter freundii; identical to SEQ ID NO: 21398
  source 1..40: mol_type = genomic DNA

SEQ ID NO: 23594 - DNA, 40 bp, Citrobacter freundii; identical to SEQ ID NO: 23584
  source 1..40: mol_type = genomic DNA

SEQ ID NO: 23595 - DNA, 50 bp, Citrobacter freundii; identical to SEQ ID NO: 23585
  source 1..50: mol_type = genomic DNA

SEQ ID NO: 23596 - protein, 462 aa, Bacillus cereus
MKCVIYRRVSTDMQAEKGSSLDAQKERLNAFAISQGWEVTNDYVDDGYSAKDMNRPALQRLLSDMRKNKFDIILVYKLDRLCRSVRDLNDMITEFEKYNVKFKSSTESLDTTTATGRMMINIIGTLAQWEREQTAERVSMIMNQRSKKGLWNGGPMPYGYTYKNNVASIIEHEAKVVRFCFDKAITHGAQAIARTLNENGYRTRDGNKWLMRSVLRMLHNPLYKGYVTYEEDRISQLAKVKIEGFHPIISEEVFDKIQYIIKQRTLSPTRVKSDVIFPFSGILVCPKCGGKMSGTTITAKGVPYKYYRCSRFVHSICDQSLINTKHINAEFPNTLERISKELSLNSKDNDIDRKHIEKQLKSFEGKRNRVKELYIEGEISRQEYSDKISVLNDQKEELLSVLENANQDISQKEILNLIEEMKVSWNLWPDEIKAKIIRGLFSEVHFKQITRREISIIDYKFI

SEQ ID NO: 23597 - DNA, 50 bp, Bacillus cereus
  source 1..50: mol_type = genomic DNA
gttttgcttaatcagacgattagacctctaattgtcctattaagcaaaaa

SEQ ID NO: 23598 - DNA, 40 bp, Bacillus cereus; identical to SEQ ID NO: 5113
  source 1..40: mol_type = genomic DNA

SEQ ID NO: 23599 - DNA, 40 bp, Bacillus cereus
  source 1..40: mol_type = genomic DNA
attttgccaaccagttaatgcccctccagccgtataaaat

SEQ ID NO: 23600 - DNA, 50 bp, Bacillus cereus
  source 1..50: mol_type = genomic DNA
gtattgcatttcatgacaattagagcttaaattgtaattgcatgtataaa

SEQ ID NO: 23601 - protein, 497 aa, Priestia flexa
MRDVKHVAVYLRLSRNEENLNIDEVFASHEKVLYKMCEDNNWKKVVFKEVASSVYLGRKQLNIMLDRIKEGEFDYVLVMDIDRLSRDVFDAPTIFKVLNDSKTNIITPSKIYDWDKDEDVLLLNIQMVVASQEYKQIKKRMTRGKRNASEIGLWVHGIPPLGYDKDPATRKLVPNDKRKHIEFIFNSIVNGKTVSDVFQELNAMGVKTRTGHAFHFNAILRLVNNEAYKGTLVYNQYIITGEKRKDGKNKTKKRPKEEWERIPNAHPAIIDETTWEKANRIVNTYSFAKKRSDVKTYPTSKLIYCANCNRLQGPQYYPHIDKLYLKVCKYCKNRTYLYEPILKMIKEDVLNYSSKILEKIEHIERTDNSTEIEYKKQQLQKQIEKSEKAIEKIKYAFEEDEYTISEFKERKASREQEIQQLKAELEEIQKQDTTDILAGYQEIKERVEYLLQNWECIDGEGLSDEDVNRNLHHIYQKIEWRFDKGENAVPQMSFEYK

SEQ ID NO: 23602 - DNA, 50 bp, Priestia flexa
  source 1..50: mol_type = genomic DNA
tggttgtctaaaaaaacataaccaacagggtctgtcatcagtgacaacta

SEQ ID NO: 23603 - DNA, 40 bp, Priestia flexa
  source 1..40: mol_type = genomic DNA
aattgtgtttactgggccaacaggatccggtaaaacaaca

SEQ ID NO: 23604 - DNA, 40 bp, Priestia flexa
  source 1..40: mol_type = genomic DNA
aattgtgtttactgggccataaggatccggtaaaacaaca

SEQ ID NO: 23605 - DNA, 50 bp, Priestia flexa
  source 1..50: mol_type = genomic DNA
tgtttgtcttttgaaatttaactttaaggttcttactttcatgacaccta

SEQ ID NO: 23606 - protein, 508 aa, Serratia marcescens
MTVYAYSYVRFSSKQQATGASLRRQVEASEAFCNQHNLTLAPLSFHDLGVSAYKKKIRASLNELFLAIESGRIAPGSYVLIEAIDRLSRKGFDDTHNMLRQILLKGVNVAFVGTDAKSLAGVILTRESLNDTMSIIQVAISADLAHKESQRKSKLVRDAKKRAKDDVQAGKIAKRRLPFWLSLKDDESGYEFNDRVEVVKLIVKMRQQGLGKHKIAQTLNEKDIKSSLGKQWSNQTVKHLLTHPALYGAHQLTEVIEDEKVNSKIVENVYPPVINKKEFFLIQFDEKRTTSGRTSSNFPFKGVVRCICGATIVYGPRKLNKKVYHYYYCSGAKDGTCDQKKLIPNLSDILKRIIDRVTISHVIKDKTDVIKQEIQTKREKLGGIQVKLLEMTDPPLSMFEILRSMEKEIESLEEQLKTESLNKVGVSASDVKKLGTITDPVEYNIQVKRIVKQIIVWRPNDKQSWYRVKINKLDGNFQGFMVIKGEIRMFSDLEAIKNMVREPDADDE

SEQ ID NO: 23607 - DNA, 50 bp, Serratia marcescens
  source 1..50: mol_type = genomic DNA
atttgtaagattcaaaagttcaccaaagagaacttgaggatcttacaaag

SEQ ID NO: 23608 - DNA, 40 bp, Serratia marcescens
  source 1..40: mol_type = genomic DNA
gatgcgcgatatgttcaccaaggatgagttctcgcgcatg

SEQ ID NO: 23609 - DNA, 40 bp, Serratia marcescens
  source 1..40: mol_type = genomic DNA
gatgcgcgatatgttcacctgggatgagttctcgcgcatg

SEQ ID NO: 23610 - DNA, 50 bp, Serratia marcescens
  source 1..50: mol_type = genomic DNA
agttgtaagaaatagaaattcacttgagttaacttaaagctcttgcagag

SEQ ID NO: 23611 - protein, 556 aa, Vibrio diazotrophicus
MDNRKVLYPYIRFSKDEQKHGTSYERQMDKIEKYAAENDFVIDDTLNLKDLGLSAFKGKHKDKGALGGFIKAIEKKSIPVDGSSYLCIEQFDRLSREDVDTAYQLFRSILKANVNIITLMDKRIYTKESLNDMMSIIYSIMLMSQANVESQKKSERITASYRTKLDKVKSGENILFAARYPEWIDNQGSIKDRQFVLNEKAEIVRRIFQLYLDGVSMNGIARIFNDEGIAPFMRTKNSINQWSSGNVSSILRNRCVVGDLCVSRTGDIIKGYYPPVISVDDFEATEGLRDKKRTLKTAGKPSINVFTGKVFCVECGRKFYFEKESFTYKGQKNIYHFLKCSGKRNNGGCHSLNIKYEDFLDATKAPLKMKMKKDPKKVGEIENHISKIRGVVKELDGELAQLDLMLDSGEINATIYAKTASKLEDKLVVERKRIASYKQKIAQMNNDLDFDSFDIHDPKSINKVKKYINDTYAAFMVSSYNKTILSLSHTGGVFITPFKHKKSLVKSSESAKDFYTLQADILDQYKRGEMDSKFTEILEATNFWGIETPETDYSFE

SEQ ID NO: 23612 - DNA, 50 bp, Vibrio diazotrophicus
  source 1..50: mol_type = genomic DNA
atgcagggaataacaaaaatatccttcaacaactatataattatcggtat

SEQ ID NO: 23613 - DNA, 40 bp, Vibrio diazotrophicus
  source 1..40: mol_type = genomic DNA
aatgccagcgaacaggtctttaaatatgttagcaccaaga

SEQ ID NO: 23614 - DNA, 40 bp, Vibrio diazotrophicus; identical to SEQ ID NO: 23613
  source 1..40: mol_type = genomic DNA

SEQ ID NO: 23615 - DNA, 50 bp, Vibrio diazotrophicus
  source 1..50: mol_type = genomic DNA
aagctgggaagagaaaaattatgcttcaagaactatggtatatttgttat

SEQ ID NO: 23616 - protein, 482 aa, Mixta calida
MTTNIHKMTQAISYVRYSSKIQQEGDSDRRQNERVAKWLSEHSGFNLVEEYSDEGLSAFSGAHLAAGSDLNRLLMDCKRGIYQQGAVILIEAFDRLSRGGIDATQQLVREILLTGMRIVILQDNPDKFYDRSDLNDAFAVITIAIKAQAAFEESEKKQKRGLINWSQKRLLAAQGKIMTRACPAWLRVDEEGTRFEPVEPHLSTVRRIFKQRLAGDSMSRIAKSLNDDLTPNFKGGVQKWNQTTIQQLLKNPAVYGCKVVSSQATKDVKASAEPIENYYVWTNKLTGKPEVAIPLHEFQQVNQIVTAWAKGRSAGSKDDARLVNVFKTVLVCAHCGASIIQSSIKPMNPKHYTYGYYVCSNKRLGRCKEAKAIRRDDVENAIIQGLLYNTKRLLSGTKATENELVQMQAEETLIQDKQRKLVDLLLDDRIDKETYNTRYDALTASLDQLQKQINQHRQTVSCDFPTEFVRNIDLNDKVNRHG

SEQ ID NO: 23617 - DNA, 50 bp, Mixta calida
  source 1..50: mol_type = genomic DNA
gattaatattatcgttgaatattggtcataatgccctcataataatgatt

SEQ ID NO: 23618 - DNA, 40 bp, Mixta calida
  source 1..40: mol_type = genomic DNA
cagcaccgtacggatattggtcatcgtcaggttaataatc

SEQ ID NO: 23619 - DNA, 40 bp, Mixta calida
  source 1..40: mol_type = genomic DNA
cagcaccgtacggatattgggcatcgtcaggttaataatc

SEQ ID NO: 23620 - DNA, 50 bp, Mixta calida
  source 1..50: mol_type = genomic DNA
taaaaaaatgcatgttcaatatagggcttaaagcccactctataatggtt

SEQ ID NO: 23621 - protein, 571 aa, Leclercia adecarboxylata
MRTLIWYRRVSSDRQIDGHGLQRQQESFNEYLNKLKDRHLYKIEEVSDEGLSAYHGVNISEKGGLGLILERVKTGSIPAGSILVCESQSRLSRLHAIDATLILHTLNQAGIKVWSLSDNRELTTSDDTGTLLAVLDGIRNNKYSRDLAEKVSAVKKAKQHAARIDKTGSLGNVCPYWLKPLGNGKFEPIAEHVTTIRRIFAERYELHSMASIAAGLNADNIPLITKRNWKKKPSPTGWTQSTVKNILSNPRVIGTLPESERRGAVYPAVKGYYGDPIVPLEHWLSSQESLSHKGKKAVRNSNNPFGVRLFRSLIICKHCGHKMDVNGARAALSEKGSPYYGSLICRGARDNSCMCGEGGARTPALPMKLVEQALTVNLFRDLKQRDVATGAKERIALLTLEVSELEQSIQQNTADLAVIRNQNARTAILQMIDNLGAELDQKRSQLDTEQRKQQSTTVDTLEGLDLLSVDGRLEAQRVIAKNIALISIDTVTATAEITLRNGNIITGFNLKSTSDKTSSMAEATDEEKQAELTAIIGEHLPLVIPAGDPVGVAYEPMLDWPDVDADDYPNE

SEQ ID NO: 23622 - DNA, 50 bp, Leclercia adecarboxylata
  source 1..50: mol_type = genomic DNA
aattttatatttagcagtcatcaatccagattgacgctacgtttaatagc

SEQ ID NO: 23623 - DNA, 40 bp, Leclercia adecarboxylata
  source 1..40: mol_type = genomic DNA
atctggtaggcgttgacgatccagatcgaactggcaggcg

SEQ ID NO: 23624 - DNA, 40 bp, Leclercia adecarboxylata
  source 1..40: mol_type = genomic DNA
atctggtaggcgttgacgattcagatcgaactggcaggcg

SEQ ID NO: 23625 - DNA, 50 bp, Leclercia adecarboxylata
  source 1..50: mol_type = genomic DNA
aatttgttacacagcagtcaacaattaatacagaagcccattgtaatagc

SEQ ID NO: 23626 - protein, 452 aa, Listeria monocytogenes; identical to SEQ ID NO: 7751

SEQ ID NO: 23627 - DNA, 50 bp, Listeria monocytogenes
  source 1..50: mol_type = genomic DNA
tttagttcctcgtttcctctcgtttggaagaagaataaacgagataccaa

SEQ ID NO: 23628 - DNA, 40 bp, Listeria monocytogenes
  source 1..40: mol_type = genomic DNA
ttttcggatcaagctatgaaggacgcaaagagggaactaa

SEQ ID NO: 23629 - DNA, 40 bp, Listeria monocytogenes
  source 1..40: mol_type = genomic DNA
ttttcggatcaagctatgaatgacgcaaagagggaactaa

SEQ ID NO: 23630 - DNA, 50 bp, Listeria monocytogenes
  source 1..50: mol_type = genomic DNA
tttactccccagcttactctctttatgaagaagaaagacaaattttccta

SEQ ID NO: 23631 - protein, 553 aa, Roseburia hominis
MSKRVRTLLRVSSRQQLHDDDIPIQRAEAEQFIAKQKDWVFDKEYLEKGISAYHNGVEDRVVLQEIMQDAKQGEFEILLAYMSDRIGRQEEYSFYVAELNRMGIEVWTIKDGQLKTEEHIDKLLNYIRFWQNEGESKKTGMRVHDTMVEMVKDGRFVGGKAPYGYKLVLSGEISNHGRALHKLVVVPEQAEVVRQIFGYAVNQGMGFQKIAKTLNENGVPAPILEQWKNGTVRSILTNPIYMGYIAYNRRKNGHANSTRLDRKEWTYAREQNPEIAIVSQELWERAQEIREARKNKINVARQATNELYMEQYNVPFSTRGRLALTGMVYCGYCGKRLKNTGYANHWTCKKTGEKKVSYVGRYGCPNGCKPRSTYLQEYLESIIFATVDAYLENLKKIDISKELEDMQAQQTKDMKREIKDLEKTIKSLIADIETLEEKLPEAIRGEFAFSVDKLSAIISDKETSKKEIEANKSRLQKQLDEVSVQSNELLAYVDAMPKWSEIFKDSDIQTKQMILSTLIDKIIVKDDDITIKFKIRLDNFLDEKLLESSGVDV

SEQ ID NO: 23632 - DNA, 50 bp, Roseburia hominis
  source 1..50: mol_type = genomic DNA
ttacttgaatccagtggtgtggatgtaggtaggcgaatagtttcaagtaa

SEQ ID NO: 23633 - DNA, 40 bp, Roseburia hominis
  source 1..40: mol_type = genomic DNA
atcgtgtatacacggagtggtaccgcaacaaaggctacag

SEQ ID NO: 23634 - DNA, 40 bp, Roseburia hominis
  source 1..40: mol_type = genomic DNA
atcgtgtatacacggagtgaaaccgcaacaaaggctacag

SEQ ID NO: 23635 - DNA, 50 bp, Roseburia hominis; identical to SEQ ID NO: 5315
  source 1..50: mol_type = genomic DNA

SEQ ID NO: 23636 - protein, 553 aa, Roseburia hominis
MSKRVRTLLRVSSRQQLHDDDIPIQRAEAEQFIAKQKDWVFDKEYLEKGISAYHNGVEDRAVLQEIMQDAKQGEFEILLAYMSDRIGRQEEYSFYVAELNRMGIEVWTIKDGQLKTEEHIDKLLNYIRFWQNEGESKKTGMRVHDTMVEMVKDGRFVGGKAPYGYKLVLSGKISNHGRALHKLVIVPEQAEVVRQIFGYAVNQGMGFQKIAKTLNENGVPAPILEQWKNGTVRSILTNPIYMGVVAYNRRKNGHANSTRLDRKEWTYAREQNPEIAIVSQELWERAQEIREARKNKINAARQATNELYMEQYNVPFSTRGRLALTGMVYCGYCGKRLKNTGYANHWTCKKTGEKKVSYVGRYGCPNGCKPRSTYSQEYLESIVFATVETYLENLKKIDISKELEDMQAQQTKDIKREIKDLEKTIKSLTADIETLEEKLPEAIRGEFAFSVDKLSAIISDKETSKKEIEANKSRLQKQLDEVSVESNELLAYVDAMPKWSEIFKDSDTQTKQMILSTLIDKIIVKDDDITIKFKIRLDNFLDEKLLESSGVDV

SEQ ID NO: 23637 - DNA, 50 bp, Roseburia hominis
  source 1..50: mol_type = genomic DNA
ctacttgaatccagtggtgtggatgtaggtaggcaaatagtttcaagtaa

SEQ ID NO: 23638 - DNA, 40 bp, Roseburia hominis; identical to SEQ ID NO: 23633
  source 1..40: mol_type = genomic DNA

SEQ ID NO: 23639 - DNA, 40 bp, Roseburia hominis; identical to SEQ ID NO: 23634
  source 1..40: mol_type = genomic DNA

SEQ ID NO: 23640 - DNA, 50 bp, Roseburia hominis; identical to SEQ ID NO: 5315
  source 1..50: mol_type = genomic DNA

SEQ ID NO: 23641 - protein, 553 aa, Roseburia hominis
MSKRVRTLLRVSSRQQLHDDDIPIQRAEAEQFIAKHPDWVFDKEYLEKGVSAYHNGVDDREVLQEIMQDAKQGEFEILLTYMSDRIGRQEEYSFYVAELNRMGIEVWTIKDGQLKTEEHIDKLLNYIRFWQNEGESKKTGMRVHDTMVEMVKDGRFVGGKAPYGYKLVLSGEISNHGRALHKLVIVPGQAEIVREIFDYAVNQGMGFQKIAKTLNEKGVPAPVLEQWKNGTVRSILTNPIYMGVVAYNRRKNGHANSTRLDRKEWTYAREQNPEIAIVSQELWERAQEIREARKNKINAARQATNELYMEQYNVPFSTRGRLALTGMVYCGYCGKRLKNTGYANHWTCKKTGEKKVSYVGRYGCPNGCKPRSTYSQEYLESIVFATVETYLENLKKIDISKELEDMQAQQTKDIKREIKDLEKTIKSLTADIETLEEKLPEAIRGEFAFSVDKLSAIISDKETSKKEIEANKSRLQKQLDEVSVESNELLAYVDAMPKWSEIFKDSDTQTKQMILSTLIDKIIVKDDDITIKFKIRLDNFLDEKLLESSGVDV

SEQ ID NO: 23642 - DNA, 50 bp, Roseburia hominis; identical to SEQ ID NO: 23637
  source 1..50: mol_type = genomic DNA

SEQ ID NO: 23643 - DNA, 40 bp, Roseburia hominis; identical to SEQ ID NO: 23633
  source 1..40: mol_type = genomic DNA

SEQ ID NO: 23644 - DNA, 40 bp, Roseburia hominis; identical to SEQ ID NO: 23634
  source 1..40: mol_type = genomic DNA

SEQ ID NO: 23645 - DNA, 50 bp, Roseburia hominis; identical to SEQ ID NO: 5315
  source 1..50: mol_type = genomic DNA

SEQ ID NO: 23646 - protein, 528 aa, Paenibacillus antibioticophila
MERKNKGYVRVSTMHDSQKDSPEHQMEFIKKTASGEGIILTDDDFYEDRDTATSIVEREDVQRMIDDAKRGKISSIWFASLSRFSRDVIDAITLKRTLVNALKIRVVSIEDGYDSAKKDDELLFGIKAVINQNTSGDIGKSSRRGIEQSAEKGNYIGSIPPLGYKKVTIDDPRMKSGKRKTLEVIPDKAEIVRKIFDLYVNHGKGEKSIVNYLNGDNENGELIPSYKGGVWGLTSVQRILQNEVYTGYNVYGRHTNEVHYNDLGNMLDRRKKLVQKHKSEWKKTKYQTHEAIISKELFDAAQEMRLKRGGGERGGRREFVNAFAKMIFCAECGSAMVTMKSKSRNGTDEYRYLLCSKRRRSGDRGCRNGKWIPYYSMRDELVGEILRRLKSRLSLIDSNDINASLPINRDNDKEKKQLEKRITDNRKWLFEIRRQNMQGELDKAQYDFEREQYEKEIEAAEKRMSVISANEQRVIDLERIKKEVRVAIKRLSDMSSYDDIEKLRPLLMDSVQRIDVHADGNIDIKTYI

SEQ ID NO: 23647 - DNA, 50 bp, Paenibacillus antibioticophila
  source 1..50: mol_type = genomic DNA
ttgtgtgtttgaaaacctattacaaatgttatgggttttcaaccacacaa

SEQ ID NO: 23648 - DNA, 40 bp, Paenibacillus antibioticophila
  source 1..40: mol_type = genomic DNA
agtccggaaccacatttccaatgtcatgcaaaaactgaac

SEQ ID NO: 23649 - DNA, 40 bp, Paenibacillus antibioticophila
  source 1..40: mol_type = genomic DNA
agtccggaaccacatttccgatgtcatgcaaaaactgaac

SEQ ID NO: 23650 - DNA, 50 bp, Paenibacillus antibioticophila
  source 1..50: mol_type = genomic DNA
ttttgtgttcatttacccagtacagatattatggctcattaagaaccaaa

SEQ ID NO: 23651 - protein, 468 aa, Bacillus badius
MTIGIYVRVSTEEQAKEGYSIPAQKERLEAYCKSQGWDDYKFYVDEGVSARSMERPYLQSMMADIKKGKINIVLVYRLDRFTRKVKDLHKMLEFMDQHKCGFKSATEAYDTTTATGRLFITLVAAIAEWESDNSAERIKMALEEKVAGGERVGNVPYGFDLNEKEQLVKNEKAVVVKDMIEKVREGMSASQLASYLNKVSNDRNWHPQGVLRVLRNPALYGATRWTDKIYENTHEGLISKAEFNKLQKLLEARSLHHRRDVTSIYLFQGIIACTSCGRPLSVNRYIRKRKDGTTYQGCIYKCQACWKKGKDMLSIGEYRFEEALKEYFKNKTFDHIKPIKTNEDLELYLVQIKQIERTRQKYQRAWGADRMTDDEFNKLMDETKEVYDELKRKISELEEVETIDPEEIKKIASSFNKNYEKLTQEEKSKFISRFIRRIEFKLVDQPPQRPDKAKRGKALVVITDVHFY

SEQ ID NO: 23652 - DNA, 50 bp, Bacillus badius
  source 1..50: mol_type = genomic DNA
attagtgtttatggtactctatcagtagttagcgtttcataaacacgact

SEQ ID NO: 23653 - DNA, 40 bp, Bacillus badius
  source 1..40: mol_type = genomic DNA
ggtcgttttgccgctgcccgtaggaccggtaaaaacaatt

SEQ ID NO: 23654 - DNA, 40 bp, Bacillus badius
  source 1..40: mol_type = genomic DNA
ggtcgttttgccgctgcccggaggaccggtaaaaacaatt

SEQ ID NO: 23655 - DNA, 50 bp, Bacillus badius
  source 1..50: mol_type = genomic DNA
attggtttttgccttacttgaacaggtgtttgccttatttgaacacgatt

SEQ ID NO: 23656 - protein, 541 aa, Eubacterium rectale
MAYRKITDIKDTIGMRAVFYARVSTAEEEQLNAIELQIEENRGCIKDHGWKLVGEYIDRSKSGTMVKGRDDYQRLYEDLYEDLFDIVVIKDQERLQRNTLDWYLFINRVVQTGKLLFMYMDGKFYSPDDALITGVRAIIAEEFSRNLSKKLHNYHDHRIEKARQGQEIALQGSGNVYGWDKKDGKYYINPEQAKVRRLMCEGIMARKGSTLIAKELNDAGYRNTVGKPWKPMDIPKFVYDCKNVGTMIINKERHDFESKQTIKLPKEEWVYVENALPPIVTQEEWDLICKIHEERVIATGSDRRGKKTSGYSFSGKLVCGICGAPYWRKQRVSKDEYWVCSTKQTKGRRTRKRDSTMGKAGEINPLGCDNENISYNSLMEIMGVVSERLQANTDTIKHDMINWLTKLRKQLLEANGGHTEADLQRELSRKSKLLDAYLDGILNKQEYQKKAEELDERIIQLKAETEKNKANSGDIAEIDKVLANIDEEVSRYVDGNEKLKVEYLLEHLEQVQIFPDKVIVIVPILSEGIVVEKTQYVSREK

SEQ ID NO: 23657 - DNA, 50 bp, Eubacterium rectale
  source 1..50: mol_type = genomic DNA
aaactcagtatgtatctagggagaaatattccaagatacatactgaaagt

SEQ ID NO: 23658 - DNA, 40 bp, Eubacterium rectale
  source 1..40: mol_type = genomic DNA
ttatggactgcttggaccgaatggcgctggtaaatctacc

SEQ ID NO: 23659 - DNA, 40 bp, Eubacterium rectale
  source 1..40: mol_type = genomic DNA
ttatggactgcttggaccggatggcgctggtaaatctacc

SEQ ID NO: 23660 - DNA, 50 bp, Eubacterium rectale
  source 1..50: mol_type = genomic DNA
aaactcagtgaatctctcctgagagatatttagaaagaagcacagaaaga

SEQ ID NO: 23661 - protein, 541 aa, Eubacterium rectale
MAYRKITDIRDTIGMRAVFYARVSTAEEEQLNAIELQIEENRGCIKDHGWKLVGEYIDRSKSGTMVKGRDDYQRLYEDLYEDLFDIVVIKDQERLQRNTLDWYLFINRVVQTGKLLFMYMDGKFYSPDDALITGVRAIIAEEFSRNLSKKLHNYHDHRIEKARQGQEIALQGSGNVYGWDKKDGKYYINPEQAKVRRLMCEGIMARKGSTLIAKELNEAGYRNTVGKPWKPMDIPKFVYDCKNVGTMIINKERHDFESKQTIKLPKEEWVYVENALPPIVTQEEWDLICKIHEERVIATGSDKRGKKTSGYSFSGKLVCGICGAPYWRKQRVSKDEYWVCSTKQTKGRKTRKRDSTMGKAGEINPLGCDNENISYNSLMEIMGVVSERLQANTDTIKQDMINWLTKLRKQLLEANGGHTEADLQRELSRKSKLLDAYLDGILNKQEYQKKAEELDERIIQLKAETEKNKANSGDIAEIDKVLANIDEEVARYVDGNEKLKVEYLLEHLEQVQIFPDKVIVIVPILSDGIVVEKTQYVSREK

SEQ ID NO: 23662 - DNA, 50 bp, Eubacterium rectale
  source 1..50: mol_type = genomic DNA
aaactcagtatgtatctagggagaaatgttccgagatacatactgaaagt

SEQ ID NO: 23663 - DNA, 40 bp, Eubacterium rectale
  source 1..40: mol_type = genomic DNA
ctatggatttatcggcagaaacggtgccggcaagactacc

SEQ ID NO: 23664 - DNA, 40 bp, Eubacterium rectale
  source 1..40: mol_type = genomic DNA
ctatggatttatcggcagagacggtgccggcaagactacc

SEQ ID NO: 23665 - DNA, 50 bp, Eubacterium rectale; identical to SEQ ID NO: 23660
  source 1..50: mol_type = genomic DNA

SEQ ID NO: 23666 - protein, 678 aa, Bacteroides thetaiotaomicron
MVKKAAILARVSRDRQETESQIKDLQFDAELEGYVVPEEYIFSEKITGMDSYDKEERESLQNLKSVIETKQDIEVVFMWELTRLSRNPYFLIEQLRWFNYRKIPIYFHDLEKWTINRETLVEDFETTNRIFGAATYGQQEWEKIKKRTKRGRDAKARKGLFVGHIADGYKVTLVGLEKHIVLDEERVPLIKDIFNMYTEQQMSTDRIARELNERGILTFNALEAKRNEGNDRFSQVYKKKNTNIELLKSEIKWTASSIGQLLKNRWYIGERQYNKVTYGVPSIISEEQFEKAQHQLIYNKKVITKRRESVYPLKGLLVCGKCGQLMYGHKVRINSSYYCSSLETGKKCGAEGICKQNIDGIIWDYIQYIQFYMLRHYGMAKLSTIFGLENIDKELLQESIDKKKLKIKQKKQRIEDLSIGLAELIIQKSSSVNATIINVFSKKQIQIEKDIDSIENEIKELEVQIAEDERIIDRNASIDETISDKIGEVERSHDMKRVYDIIHQLILRVTLYNLEDYYKLIEIEVSSHRKFYAIYNSRKLKGRYIQVPFTNDDFSYNKETNRFQHRYKFIGMLNTMEIEKEGKMLTREMISKHSEGDIDKLIEVSRERSLPYLLCDFSTTELIGFLGNWHYIRNIRRIELEPSDEEFQKWKEDYKKWDKVRNMRKKEKRKLLKSEVKE

SEQ ID NO: 23667 - DNA, 50 bp, Bacteroides thetaiotaomicron
  source 1..50: mol_type = genomic DNA
aattagttttcttatatgttgtttaaaaatgacatataagaatattagtt

SEQ ID NO: 23668 - DNA, 40 bp, Bacteroides thetaiotaomicron; identical to SEQ ID NO: 1023
  source 1..40: mol_type = genomic DNA

SEQ ID NO: 23669 - DNA, 40 bp, Bacteroides thetaiotaomicron
  source 1..40: mol_type = genomic DNA
gaattcgggtaattcgtccgcaaataaaactccgttatgc

SEQ ID NO: 23670 - DNA, 50 bp, Bacteroides thetaiotaomicron
  source 1..50: mol_type = genomic DNA
aattagtgttcttttctgttgtttgcaaacaacagaaatgaactctagct

SEQ ID NO: 23671 - protein, 522 aa, Bacillus licheniformis
MKRTFDHIKHVAIYLRISQEKKGENVETLENHRQILCDFCKENRYTYEEYGEVVSGGKSEIEQRKELQRLLEDIEKFDAILCFELTRLSRNGLISQTVKQYCIDYDKPILTPYQSYDLANSETDRLLYDVGSMISSHEHGTIGKRSKANKKQMSKAGLHVSGNVPFGYRRNNETKKLEIYEEEAKVVRYIFKLHSEGLGSFKIRDILNSEGYKSAKGKAFELPTIKRIIKNPTYKGTIVFNDRKKVKKNGKFVYEPIETIQVDNAHPAIIPPDEWNRANRERLNRAKQAAVIREKPASTTGTTMLKDLVYCGVCGRKMRIFFDDRSSTGYVIQRCYHLYNGEKCPNRGIKLELVEKEVAKALPNFKSLLKKSVQRLQQDKEAGVETDIKRKIKQQERKLKDLNDQQDKLIDLALKGIFNEEEIRNKKQELIDEIKYTESAIADLKEKMSNIDINDHINSLVNIIELIEKLPNMEPEEVNQSLKTFINKIVYTRVLPPELLKKSTRNKERKEYPFEIEIEFIE

SEQ ID NO: 23672 - DNA, 50 bp, Bacillus licheniformis
  source 1..50: mol_type = genomic DNA
ttacatgaaataaaaaacgctgtacctactgcattttttatttcatgtgt

SEQ ID NO: 23673 - DNA, 40 bp, Bacillus licheniformis; identical to SEQ ID NO: 21298
  source 1..40: mol_type = genomic DNA

SEQ ID NO: 23674 - DNA, 40 bp, Bacillus licheniformis
  source 1..40: mol_type = genomic DNA
cacgagcggctatgcagtgtagacctttgtcgttgacgcg

SEQ ID NO: 23675 - DNA, 50 bp, Bacillus licheniformis
  source 1..50: mol_type = genomic DNA
tcatatgcatttgaaaacaatgtatattttgcatttgttgggtcaagtgt

SEQ ID NO: 23676 - protein, 585 aa, Streptococcus agalactiae
MNTKVKVIKASNTGARNRNSIHLDLKRVAAYCRVSTDSKDQLESYKSQVDYYTNLIKNNKSWTLAGIYADEATTGTTATKRADFIRLISDCQNGDIDMIITKSISRFARNTLDTIKYVRLLKENNVGVVFEEENIDTLTMDGELLLTILSSVAQQEVENTSAHVKKGLKMKMEKGELIGFQGCLGYDYDPTTKTISINEEEAKIVRYIFKRYLEGNGGSVIGRELEEQGYLTPRGKTKWSDTTVLGIIKNEKYIGDILMGKTFTVDPITKRRLANFGESDKYHIENHHEPIISREDFEKAQEIRLRRAQNRNTIANKDRKREKLSRQYAFSSMLECGFCGEILSRRTWHTSSIYKKINWQCVRSTKKGKKYCPHSKGIQEAAIEKAFVESYRQLCHADSTVIDDFLKIVEEEINDNTLVKDLKKIENQLNRIISQERKLVDLHLEDSIDEEVYAKKYKKLTKQKEELLDEKKTLELTIKDENSIKERLKQFKKVLENREIIEEFNRTVFESIVDKVVVGRIDKDGTVHPYDLTFYFKTGVKDSQDSNNFKDKRKNAKDNDINKLCSYKNDEDKKLCSQSKDNACG

SEQ ID NO: 23677 - DNA, 50 bp, Streptococcus agalactiae
  source 1..50: mol_type = genomic DNA
atgttcccaatcaaaagacaatgcatgtggagactatagcgttgatacaa

SEQ ID NO: 23678 - DNA, 40 bp, Streptococcus agalactiae
  source 1..40: mol_type = genomic DNA
ttattcccaatgacacatcatgtggagtgtgtggctctgc

SEQ ID NO: 23679 - DNA, 40 bp, Streptococcus agalactiae
  source 1..40: mol_type = genomic DNA
ttattcccaatgacacatcacgtggagtgtgtggctctgc

SEQ ID NO: 23680 - DNA, 50 bp, Streptococcus agalactiae
  source 1..50: mol_type = genomic DNA
attttcacagagttaagacaaagcacatgggcactatgagctttagaaaa

SEQ ID NO: 23681 - protein, 585 aa, Streptococcus agalactiae
MNTKVKLIKASNTGARNRNALHLDLKRVAAYCRVSTDSKDQLESYKSQVDYYTNLIKNNKNWTLAGIYADEATTGTTATKRADFMRLISDCQNGDIDMIITKSISRFARNTLDTLKYVRLLKENNVGVVFEEENIDTLTMDGELLLTILSSVAQQEVENTSAHVKKGLKMKMEKGELIGFQGCLGYDYDPITKSISINEEEAKIVRYIFKRYLEGNGGSVIGRELEEQGYLTPRGKTKWSDTTVLGIIKNEKYIGDILMGKTFTVDPITKRRLANFGESDKYHIENHHEPIISKEDFEKAQEIRLRRAQNRNTIANKDRKREKLSRQYAFSSMLECGFCGEILSRRTWHTSSIYKKINWQCVKSTKKGKKYCPHSKGIQEAAIEKAFVESYRQLCHADSTVIDDFLKIVEEEINDNTLVKDLKKIESQLNRIISQERKLVYLHLEDSIDEEVYAKKYKKLTKQKEELLDEKKTLELTIKDEDSIKERLKQFKKVLENKEIIEEFNRTVFESIVDKVVVGRIDKDGTVHPYDLTFYFKTGVKDSQDSNNFKDKRKNAKDNDINKLCSYKNDEDKKLCSQSKDNACG

SEQ ID NO: 23682 - DNA, 50 bp, Streptococcus agalactiae; identical to SEQ ID NO: 10557
  source 1..50: mol_type = genomic DNA

SEQ ID NO: 23683 - DNA, 40 bp, Streptococcus agalactiae; identical to SEQ ID NO: 23678
  source 1..40: mol_type = genomic DNA

SEQ ID NO: 23684 - DNA, 40 bp, Streptococcus agalactiae; identical to SEQ ID NO: 23679
  source 1..40: mol_type = genomic DNA

SEQ ID NO: 23685 - DNA, 50 bp, Streptococcus agalactiae; identical to SEQ ID NO: 23680
  source 1..50: mol_type = genomic DNA

SEQ ID NO: 23686 - protein, 585 aa, Streptococcus agalactiae
MNTKVKLIKASNTGARNRNALHLDLKRVAAYCRVSTDSKDQLESYKSQVDYYTNLIKNNKNWTLAGIYADEATTGTTASKRADFMRLISDCQNGDIDMIITKSISRFARNTLDTLKYVRLLKENNVGVVFEEENIDTLTMDGELLLTILSSVAQQEVENTSAHVKKGLKMKMEKGELIGFQGCLGYDYDPITKSISINEEEAKIVRYIFKRYLEGNGGSVIGRELEEQGYLTPRGKTKWSDTTVLGVIKNEKYIGDILMGKTFTVDPITKRRLANFGESDKYHIENHHEPIISKEDFEKAQEIRLRRAQNRNTIANKDRKREKLSRQYAFSSMLVCGFCGEILSRRTWHTSSIYKKINWQCVKSTKKGKKYCPHSKGIQEAAIEKAFVESYRQLCHADSTVIDDFLKIVEEEINDDTLVKDLKKLENQLNRIISQERKLVDLHLEDSIDEEVYAKKYKKLTKQKEELLDEKKTLELTIKDENSIKERLKQFKKVLENKEIIEEFNRTVFESIVDKVVVGRIDKDGTVHPYDLTFYFKTGVKDSQDSNNFKDKRKNAKDNDINKLCSYKNDEDKKLCSQSKDNACG

SEQ ID NO: 23687 - DNA, 50 bp, Streptococcus agalactiae; identical to SEQ ID NO: 10557
  source 1..50: mol_type = genomic DNA

SEQ ID NO: 23688 - DNA, 40 bp, Streptococcus agalactiae; identical to SEQ ID NO: 23678
  source 1..40: mol_type = genomic DNA

SEQ ID NO: 23689 - DNA, 40 bp, Streptococcus agalactiae; identical to SEQ ID NO: 23679
  source 1..40: mol_type = genomic DNA

SEQ ID NO: 23690 - DNA, 50 bp, Streptococcus agalactiae; identical to SEQ ID NO: 23680
  source 1..50: mol_type = genomic DNA

SEQ ID NO: 23691 - protein, 585 aa, Streptococcus agalactiae
MNTKVKVIKASNTGARNRNALHLDLKRVAAYCRVSTDSKDQLESYKSQVDYYTNLIKNNKNWTLAGIYADEATTGTTATKRADFMRLISDCQNGDIDMIITKSISRFARNTLDTLKYVRLLKENNVGVVFEEENIDTLTMDGELLLTILSSVAQQEVENTSAHVKKGLKMKMEKGELIGFQGCLGYDYDPTTKSISINEEEAKIVRYIFKRYLEGNGGSVIGRELEEQGYLTPRGKTKWSDTTVLGVIKNEKYIGDILMGKTFTVDPITKRRLANFGESDKYHIENNHEPIISKEDFEKAQEIRLRRAQNRNTIANKDRKREKLSRQYAFSSMLECGFCGEILSRRTWHTSSIYKKINWQCVRSTKKGKKYCPHSKGIQEAAIEKAFVESYRQLCHADSTVIDDFLKIVEEEINDNTLVKDLKKLENQLNRIISQERKLVDLHLEDSIDEEVYAKKYKKLTKQKEELHDEKKTLELTIKDENSIKERLKQFKRVLENREIIEEFNRTVFESIVDKVVVGRIDKDETVHPYDLTFYFKTRVKDSQDSNNFKDKRKNAKDNDSDKLCSYKDDEDKKLCSQAKDNACG

SEQ ID NO: 23692 - DNA, 50 bp, Streptococcus agalactiae
  source 1..50: mol_type = genomic DNA
atgttcccaagcaaaagacaacgcatgtggagactatagcgttgatacaa

SEQ ID NO: 23693 - DNA, 40 bp, Streptococcus agalactiae; identical to SEQ ID NO: 23678
  source 1..40: mol_type = genomic DNA

SEQ ID NO: 23694 - DNA, 40 bp, Streptococcus agalactiae; identical to SEQ ID NO: 23679
  source 1..40: mol_type = genomic DNA

SEQ ID NO: 23695 - DNA, 50 bp, Streptococcus agalactiae; identical to SEQ ID NO: 23680
  source 1..50: mol_type = genomic DNA

SEQ ID NO: 23696 - protein, 585 aa, Streptococcus agalactiae
MNTKVKLIKASNTGARNRNALHLDLKRVAAYCRVSTDSKDQLESYKSQVDYYTNLIKNNKNWTLAGIYADEATTGTTATKRADFMRLISDCQNGDIDMIITKSISRFARNTLDTLKYVRLLKENNVGVVFEEENIDTLTMDGELLLTILSSVAQQEVENTSAHVKKGLKMKMEKGELIGFQGCLGYDYDPITKSISINEEEAKIVRYIFKRYLEGNGGSVIGRELEEKGYLTPRGKTKWSDTTVLGIIKNEKYIGDILMGKTFTVDPITKRRLANFGESDKYHIENHHEPIISKEDFEKAQEIRLRRAQNRNTIANKDRKREKLSRQYAFSSMLECGFCGEILSRRTWHTSSIYKKINWQCVKSTKKGKKYCPHSKGIQEAAIEKAFVESYRQLCHADSTIIDDFLKIVEEEINDETLVKDLKKLENQLNRIISQERKLVDLHLEDSIDEEVYAKKYKKLTKQKEELLDEKKTLELTIKDEDSIKERLKQFKKVLENKEIIEEFNRTVFESIVDKVVVGRIDKDGTVHPYDLTFYFKTGVKDSQDSNNFKDKRKNAKDNDINKLCSYKNDEDKKLCSQSKDNACG

SEQ ID NO: 23697 - DNA, 50 bp, Streptococcus agalactiae; identical to SEQ ID NO: 10557
  source 1..50: mol_type = genomic DNA

SEQ ID NO: 23698 - DNA, 40 bp, Streptococcus agalactiae; identical to SEQ ID NO: 23678
  source 1..40: mol_type = genomic DNA

SEQ ID NO: 23699 - DNA, 40 bp, Streptococcus agalactiae; identical to SEQ ID NO: 23679
  source 1..40: mol_type = genomic DNA

SEQ ID NO: 23700 - DNA, 50 bp, Streptococcus agalactiae; identical to SEQ ID NO: 23680
  source 1..50: mol_type = genomic DNA

SEQ ID NO: 23701 - protein, 585 aa, Erysipelothrix rhusiopathiae
MNTKVKLIKASNTGARNRNALHLDLKRVAAYCRVSTDSKDQLESYKSQVDYYTNLIKNNKNWTLAGIYADEATTGTTATKRADFMRLISDCQNGDIDMIITKSISRFARNTLDTLKYVRLLKENNVGVVFEEENIDTLTMDGELLLTILSSVAQQEVENTSAHVKKGLKMKMEKGELIGFQGCLGYDYDPTTKSISINEEEAKIVRYIFKRYLEGNGGSVIGRELEEQGYLTPRGKTKWSDTTVLGIIKNEKYIGDILMGKTFTVDPITKRRLANFGESDKYHIENHHESIISKEDFEKAQEIRLRRAQNRNTIANKDRKREKLSRQYAFSSMLECGFCGEILSRRTWHTSSIYKKINWQCVKSTKKGKKYCPHSKGIQEAAIEKAFVESYRQLCHADSTVIDDFLKIVEEEINDNTLVKDLKKLENQLNRIISQERKLVDLHLEDSIDEEVYAKKYKKFTKQKEELLDEKKTLELTIKDENSIKERLKQFKKVLENKEIIEEFNRTVFESIVDKVVVGRIDKDGTVHPYDLTFYFKTGVKDSQDSNNFKDKRKNAKDNDSDKLCSYKNDEDKKLCSQSKDNACG

SEQ ID NO: 23702 - DNA, 50 bp, Erysipelothrix rhusiopathiae
  source 1..50: mol_type = genomic DNA
atgttcccaatcaaaagacaacgcacgtggagactatagcgttgatacaa

SEQ ID NO: 23703 - DNA, 40 bp, Erysipelothrix rhusiopathiae
  source 1..40: mol_type = genomic DNA
atgttccctcaaacgacacatgtggaggctattgtgttgc

SEQ ID NO: 23704 - DNA, 40 bp, Erysipelothrix rhusiopathiae
  source 1..40: mol_type = genomic DNA
atgttccctcaaacgacacacgtggaggctattgtgttgc

SEQ ID NO: 23705 - DNA, 50 bp, Erysipelothrix rhusiopathiae; identical to SEQ ID NO: 23680
  source 1..50: mol_type = genomic DNA

SEQ ID NO: 23706 - protein, 583 aa, Streptococcus pyogenes
MNTKVKLIKASNTGARNRNALHLDLKRVAAYCRVSTDSKDQLESYKSQVDYYTNLIKNNKNWTLAGIYADEATTGTTATKRADFMRLISDCQNGDIDMIITKSISRFARNTLDTLKYVRLLKENNVGVVFEEENIDTLTMDGELLLTILSSVAQQEVENTSAHVKKGLKMKMEKGELIGFQGCLGYDYDPITKSISINEEEAKIVRYIFKRYLEGNGGSVIGRELEEQGYLTPRGKTKWSDTTVLGIIKNEKYIGDILMGKTFTVDPITKRRLANFGESDKYHIENHHEPIISKEDFEKAQEIRLRRAQNRNTIANKDRKREKLSRQYAFSSMLECGFCGEILSRRTWHTSSIYKKINWQCVKSTKKGKKYCPHSKGIQEAAIEKAFVESYRQLCHADSTVIDDFLKIVEEEINDNTLVKDLKKLENQLNRIISQERKLVDLHLEDSIDEEVYAKKYKKLTKQKEELLDEKKTLELTIKDEDSIKERLKQFKKVLENKEIIEEFNRTVFESIVDKVVVGRIDKDGTVHPYDLTFYFKTGVKDSQDSNNFKDKRKNAKDNDINKLCSYKNDEDKKLCSQSKDNA

SEQ ID NO: 23707 - DNA, 50 bp, Streptococcus pyogenes; identical to SEQ ID NO: 10557
  source 1..50: mol_type = genomic DNA

SEQ ID NO: 23708 - DNA, 40 bp, Streptococcus pyogenes
  source 1..40: mol_type = genomic DNA
ttgtttccgcaaacgcatcacgtcgagtgcgtagtgttgc

SEQ ID NO: 23709 - DNA, 40 bp, Streptococcus pyogenes; identical to SEQ ID NO: 23708
  source 1..40: mol_type = genomic DNA

SEQ ID NO: 23710 - DNA, 50 bp, Streptococcus pyogenes; identical to SEQ ID NO: 23680
  source 1..50: mol_type = genomic DNA

SEQ ID NO: 23711 - protein, 583 aa, Streptococcus pyogenes; identical to SEQ ID NO: 10751

SEQ ID NO: 23712 - DNA, 50 bp, Streptococcus pyogenes; identical to SEQ ID NO: 10557
  source 1..50: mol_type = genomic DNA

SEQ ID NO: 23713 - DNA, 40 bp, Streptococcus pyogenes; identical to SEQ ID NO: 23708
  source 1..40: mol_type = genomic DNA

SEQ ID NO: 23714 - DNA, 40 bp, Streptococcus pyogenes; identical to SEQ ID NO: 23708
  source 1..40: mol_type = genomic DNA

SEQ ID NO: 23715 - DNA, 50 bp, Streptococcus pyogenes; identical to SEQ ID NO: 23680
  source 1..50: mol_type = genomic DNA

SEQ ID NO: 23716 - protein, 583 aa, Streptococcus pyogenes
MNTKVKLIKASNTGARNRNALHLDLKRVAAYCRVSTDSKDQLESYKSQVDYYTNLIKNNKNWTLAGIYADEATTGTTATKRADFMRLISDCQNGDIDMIITKSISRFARNTLDTLKYVRLLKENNVGVVFEEENIDTLTMDGELLLTILSSVAQQEVENTSAHVKKGLKMKMEKGELIGFQGCLGYDYDPITKTISINEEEAKIVRYIFKRYLEGNGGSVIGRELEEQGYLTPRGKTKWSDTTVLGIIKNEKYIGDILMGKTFTVDPITKRRLANFGESDKYHIENHHEPIISREDFEKAQEIRLRRAQNRNTIANKDRKREKLSRQYAFSSMLECGFCGEILSRRTWHTSSIYKKINWQCVRSTKKGKKYCPHSKGIQESAIEKAFVESYRQLCHTDSTVIDDFLKIVEEEINDNTLVKDLKKIESQLNRIISQERKLVDLHLEDSIDEEVYAKKYKKLTKQKEELLDEKKTLELTIKDENSIKERLKQFKKVLENKEIIEEFNRTVFESIIDKVVVGRIDKDGTVHPYDLTFYFKTGDKDSQDSNNFKDKRKNAKDNDINKLCSYKNDEDKKLCSQSKDNA

SEQ ID NO: 23717 - DNA, 50 bp, Streptococcus pyogenes; identical to SEQ ID NO: 10557
  source 1..50: mol_type = genomic DNA

SEQ ID NO: 23718 - DNA, 40 bp, Streptococcus pyogenes; identical to SEQ ID NO: 23708
  source 1..40: mol_type = genomic DNA

SEQ ID NO: 23719 - DNA, 40 bp, Streptococcus pyogenes; identical to SEQ ID NO: 23708
  source 1..40: mol_type = genomic DNA

SEQ ID NO: 23720 - DNA, 50 bp, Streptococcus pyogenes; identical to SEQ ID NO: 23680
  source 1..50: mol_type = genomic DNA

SEQ ID NO: 23721 - protein, 583 aa, Streptococcus pyogenes
MNTKVKLIKASNTGARNRNALHLDLKRVAAYCRVSTDSKDQLESYKSQVDYYTNLIKNNKNWTLAGIYADEATTGTTATKRADFMRLISDCQNGDIDMIITKSISRFARNTLDTLKYVRLLKENNVGVVFEEENIDTLTMDGELLLTILSSVAQQEVENTSAHVKKGLKMKMEKGELIGFQGCLGYDYDPITKSISINEEEAKIVRYIFKRYLEGNGGSVIGRELEEQGYLTPRGKTKWSDTTVLGIIKNEKYIGDILMGKTFTVDPITKRRLANFGESDKYHIENHHEPIISKGDFEKAQEIRLRRAQNRNTIANKDRKREKLSRQYAFSSMLECGFCGEILSRRTWHTSSIYKKINWQCVRSTKKGKKYCPHSKGIQEAAIEKAFVESYRQLCHADSTVIDDFLKIVEEEINDNSLVKDLKKIENQLNRIISQERKLVDLHLEDSIDEEVYAKKYKKLTKQKEELLDEKKTLELTIKDEDSIKERLKQFKKVLENKEIIEEFNRTVFESIVDKVVVGRIDKDGTVHPYDLTFYFKTGVKDSQDSNNFKDKRKNAKDNDINKLCSYKNDEDKKLCSQSKDNA

SEQ ID NO: 23722 - DNA, 50 bp, Streptococcus pyogenes; identical to SEQ ID NO: 10557
  source 1..50: mol_type = genomic DNA

SEQ ID NO: 23723 - DNA, 40 bp, Streptococcus pyogenes
  source 1..40: mol_type = genomic DNA
ttgtttccgcaaacgcatcacgtcgagtgtgtagtgttgc

SEQ ID NO: 23724 - DNA, 40 bp, Streptococcus pyogenes; identical to SEQ ID NO: 23723
  source 1..40: mol_type = genomic DNA

SEQ ID NO: 23725 - DNA, 50 bp, Streptococcus pyogenes; identical to SEQ ID NO: 23680
  source 1..50: mol_type = genomic DNA

SEQ ID NO: 23726 - protein, 583 aa, Streptococcus pyogenes; identical to SEQ ID NO: 10736

SEQ ID NO: 23727 - DNA, 50 bp, Streptococcus pyogenes; identical to SEQ ID NO: 10557
  source 1..50: mol_type = genomic DNA

SEQ ID NO: 23728 - DNA, 40 bp, Streptococcus pyogenes; identical to SEQ ID NO: 23708
  source 1..40: mol_type = genomic DNA

SEQ ID NO: 23729 - DNA, 40 bp, Streptococcus pyogenes; identical to SEQ ID NO: 23708
  source 1..40: mol_type = genomic DNA

SEQ ID NO: 23730 - DNA, 50 bp, Streptococcus pyogenes; identical to SEQ ID NO: 23680
  source 1..50: mol_type = genomic DNA

SEQ ID NO: 23731 - protein, 583 aa, Streptococcus pyogenes; identical to SEQ ID NO: 10761

SEQ ID NO: 23732 - DNA, 50 bp, Streptococcus pyogenes; identical to SEQ ID NO: 10557
  source 1..50: mol_type = genomic DNA

SEQ ID NO: 23733 - DNA, 40 bp, Streptococcus pyogenes; identical to SEQ ID NO: 23708
  source 1..40: mol_type = genomic DNA

SEQ ID NO: 23734 - DNA, 40 bp, Streptococcus pyogenes; identical to SEQ ID NO: 23708
  source 1..40: mol_type = genomic DNA

SEQ ID NO: 23735 - DNA, 50 bp, Streptococcus pyogenes; identical to SEQ ID NO: 23680
  source 1..50: mol_type = genomic DNA

SEQ ID NO: 23736 - protein, 583 aa, Streptococcus pyogenes
MNTKVKVIKASNTGARNRNTLHLDLKRVAAYCRVSTDSKDQLESYKSQVDYYTNLIKNNKNWTLAGIYADEATTGTTTTKRADFMRLISDCQNGDIDMIITKSISRFARNTLDTLKYVRLLKENNVGVVFEEENIDTLTMDGELLLTILSSVAQQEVENTSAHVKKGLKMKMEKGELIGFQGCLGYDYDPTTKSISINEEEAKIVRYIFKRYLEGNGGSVIGRELEEQGYLTPRGKTKWSDTTVLGVIKNEKYIGDILMGKTFTVDPITKRRLANFGESDKYHIENHHEPIISREDFEKAQEIRLRRAQNRNTIANKDRKREKLSRQYAFSSMLECGFCGEILSRRTWHTSSIYKKINWQCVRSTKKGKKYCPHSKGIQEAAIEKAFVESYRQLCHADSTVIDDFLKIVEEEINDNTLVKDLKKIENQLNRIISQERKLVDLHLEDSIDEEVYAKKYKKLTKQKEELLDEKKTLELTIKDENSIKERLKQFKKVLENREIIEEFNRTVFESIVDKVVVGRIDKDGTIHPYDLTFYFKTGVKDSQDSNNFKDKRKNAKDNDINKLCSYKNDEDKKLCSQSKDNA

SEQ ID NO: 23737 - DNA, 50 bp, Streptococcus pyogenes; identical to SEQ ID NO: 10557
  source 1..50: mol_type = genomic DNA

SEQ ID NO: 23738 - DNA, 40 bp, Streptococcus pyogenes; identical to SEQ ID NO: 23723
  source 1..40: mol_type = genomic DNA

SEQ ID NO: 23739 - DNA, 40 bp, Streptococcus pyogenes; identical to SEQ ID NO: 23723
  source 1..40: mol_type = genomic DNA

SEQ ID NO: 23740 - DNA, 50 bp, Streptococcus pyogenes; identical to SEQ ID NO: 23680
  source 1..50: mol_type = genomic DNA

SEQ ID NO: 23741 - protein, 583 aa, Streptococcus pyogenes
MNTKVKLIKASNTGARNRNALHLDLKRVAAYCRVSTDSKDQLESYKSQVDYYTNLIKNNKNWTLAGIYADEATTGTTATKRADFMRLISDCQNGDIDMIITKSISRFARNTLDTLKYVRLLKENNVGVVFEEENIDTLTMDGELLLTILSSVAQQEVENTSAHVKKGLKMKMEKGELIGFQGCLGYDYDPITKSISINEEEAKIVRYIFKRYLEGNGGSVIGRELEEQGYLTPRGKTKWSDTTVLGIIKNEKYIGDILMGKTFTVDPITKRRLANFGESDKYHIENHHEPIISREDFEKAQEIRLRRAQNRNTIANKDRKREKLSRQYAFSSMLECGFCGEILSRRTWHTSSIYKKINWQCVRSTKKGKKYCPHSKGIQEAAIEKAFVESYRQLCHADSTVIDDFLKIVEEEINDNTLVKDLKKLENQLNRIISQERKLVDLHLEDSIDEEVYAKKYKKLTKQKEELLDEKKTLELTIKDENSIKERLKQFKKVLENKEIIEEFNRTVFESIVDKVVVGRIDKDGTVHPYDLTFYFKTGVKDSQDSNNFKDKRKNAKDNDINKLCSYKNDEDKKLCSQSKDNA

SEQ ID NO: 23742 - DNA, 50 bp, Streptococcus pyogenes; identical to SEQ ID NO: 10557
  source 1..50: mol_type = genomic DNA

SEQ ID NO: 23743 - DNA, 40 bp, Streptococcus pyogenes; identical to SEQ ID NO: 23708
  source 1..40: mol_type = genomic DNA

SEQ ID NO: 23744 - DNA, 40 bp, Streptococcus pyogenes; identical to SEQ ID NO: 23708
  source 1..40: mol_type = genomic DNA

SEQ ID NO: 23745 - DNA, 50 bp, Streptococcus pyogenes; identical to SEQ ID NO: 23680
  source 1..50: mol_type = genomic DNA

SEQ ID NO: 23746 - protein, 583 aa, Streptococcus pyogenes; identical to SEQ ID NO: 10761

SEQ ID NO: 23747 - DNA, 50 bp, Streptococcus pyogenes; identical to SEQ ID NO: 10557
  source 1..50: mol_type = genomic DNA

SEQ ID NO: 23748 - DNA, 40 bp, Streptococcus pyogenes; identical to SEQ ID NO: 23723
  source 1..40: mol_type = genomic DNA

SEQ ID NO: 23749 - DNA, 40 bp, Streptococcus pyogenes; identical to SEQ ID NO: 23723
  source 1..40: mol_type = genomic DNA

SEQ ID NO: 23750 - DNA, 50 bp, Streptococcus pyogenes; identical to SEQ ID NO: 23680
  source 1..50: mol_type = genomic DNA

SEQ ID NO: 23751 - protein, 583 aa, Streptococcus pyogenes; identical to SEQ ID NO: 10716

SEQ ID NO: 23752 - DNA, 50 bp, Streptococcus pyogenes; identical to SEQ ID NO: 10557
  source 1..50: mol_type = genomic DNA

SEQ ID NO: 23753 - DNA, 40 bp, Streptococcus pyogenes; identical to SEQ ID NO: 23708
  source 1..40: mol_type = genomic DNA

SEQ ID NO: 23754 - DNA, 40 bp, Streptococcus pyogenes; identical to SEQ ID NO: 23708
  source 1..40: mol_type = genomic DNA

SEQ ID NO: 23755 - DNA, 50 bp, Streptococcus pyogenes; identical to SEQ ID NO: 23680
  source 1..50: mol_type = genomic DNA

SEQ ID NO: 23756 - protein, 583 aa, Streptococcus pyogenes; identical to SEQ ID NO: 10776

SEQ ID NO: 23757 - DNA, 50 bp, Streptococcus pyogenes; identical to SEQ ID NO: 10557
  source 1..50: mol_type = genomic DNA

SEQ ID NO: 23758 - DNA, 40 bp, Streptococcus pyogenes; identical to SEQ ID NO: 23708
  source 1..40: mol_type = genomic DNA

SEQ ID NO: 23759 - DNA, 40 bp, Streptococcus pyogenes; identical to SEQ ID NO: 23708
  source 1..40: mol_type = genomic DNA

SEQ ID NO: 23760 - DNA, 50 bp, Streptococcus pyogenes; identical to SEQ ID NO: 23680
  source 1..50: mol_type = genomic DNA

SEQ ID NO: 23761 - protein, 585 aa, Anaerococcus nagyae
MNTKVKLIKASNTGARNRNALDLDLKRVAAYCRVSTDSKDQLESYKSQVDYYTNLIKNNKNWTLAGIYADEATTGTTATKRADFMRLISDCQNGDIDMIITKSISRFARNTLDTLKYVRLLKENNVGVVFEEENIDTLTMDGELLLTILSSVAQQEVENTSAHVKKGLKMKMEKGELIGFQGCLGYDYDPITKSISINEEEAKIVRYIFKRYLEGNGGSVIGRELEEQGYLTPRGKTKWSDTTVLGIIKNEKYIGDILMGKTFTVDPITKRRLANFGESDKYHIENHHEPIISKEDFEKAQEIRLRRAQNRNTIANKDRKREKLSRQYAFSSMLECGFCGEILSRRTWHTSSIYKKINWQCVRSTKKGKKYCPHSKGIQEAAIEKAFVESYRQLCHADSTVIDDFLKIVEEEINDNTLVKVLKKIESQLNRIISQERKLVDLHLEDSIDEEVYAKKYKKLTKQKEELLDEKKTLELTIKDENSIKERLKQFKKVLENREIIEEFNRTVFESIVDKVVVGRIDKDGTVHPYDLTFYFKTGVKDSQDSNNFKDKRKNAKDNDSEKLCSYKNDEDKKLCSQSKDNACG

SEQ ID NO: 23762 - DNA, 50 bp, Anaerococcus nagyae; identical to SEQ ID NO: 10557
  source 1..50: mol_type = genomic DNA

SEQ ID NO: 23763 - DNA, 40 bp, Anaerococcus nagyae
  source 1..40: mol_type = genomic DNA
atgtttcctcagactatgcatgtggaggtaatttcatgtc

SEQ ID NO: 23764 - DNA, 40 bp, Anaerococcus nagyae
  source 1..40: mol_type = genomic DNA
atgtttcctcagactatgcacgtggaggtaatttcatgtc

SEQ ID NO: 23765 - DNA, 50 bp, Anaerococcus nagyae; identical to SEQ ID NO: 23680
  source 1..50: mol_type = genomic DNA

SEQ ID NO: 23766 - protein, 585 aa, Streptococcus agalactiae
MNTKVKLIKASNTGARNRNALHLDLKRVAAYCRVSTDSKDQLESYKSQVDYYTNLIKNNKNWTLAGIYADEATTGTTATKRADFMRLISDCQNGDIDMIITKSISRFARNTLDTLKYVRLLKENNVGVVFEEENIDTLTMDGELLLTILSSVAQQEVENTSAHVKKGLKMKMEKGELIGFQGCLGYNYDPITKSISINEEEAKIVRYIFKRYLEGNGGSVIGRELEEQGYLTPRGKTKWSDTTVLGIIKNEKYIGDILMGKTFTVDPITKRRLANFGESDKYHIENHHEPIISKEDFEKAQEIRLRRAQNRNTIANKDRKREKLSRQYAFSSMLECGFCGEILSRRTWHTSSIYKKINWQCVKSTKKGKKYCPHSKGIQEAAIEKAFVESYRQLCHADSTVIDDFLKIVEEEINDNTLVKDLKKIENQLNRIISQERKLVDLHLEDSIDEEVYAKKYKKLTKQKEELLDEKKTLELTIKDENSIKERLKQFKKVLENKEIIEEFNRTVFESIVDKVVVGTIDKDGTVHPYDLTFYFKTGIKDSQDSNNFKDKRKNAKDNDIKKLCSYKNDEDKKLCSQSKDNACG

SEQ ID NO: 23767 - DNA, 50 bp, Streptococcus agalactiae; identical to SEQ ID NO: 23702
  source 1..50: mol_type = genomic DNA

SEQ ID NO: 23768 - DNA, 40 bp, Streptococcus agalactiae
  source 1..40: mol_type = genomic DNA
ttattcccaatgacacatcatgtggagtgcgtagcgttgc

SEQ ID NO: 23769 - DNA, 40 bp, Streptococcus agalactiae
  source 1..40: mol_type = genomic DNA
ttattcccaatgacacatcacgtggagtgcgtagcgttgc

SEQ ID NO: 23770 - DNA, 50 bp, Streptococcus agalactiae; identical to SEQ ID NO: 23680
  source 1..50: mol_type = genomic DNA

SEQ ID NO: 23771 - protein, 584 aa, Streptococcus pyogenes
MNTKVKLIKASNIGARNRNALHLDLKRVAAYCRVSTDSKDQLESYKSQVDYYTNLIKNNKNWTLAGIYADEATTGTTATKRADFMRLISDCQNGDIDMIITKSISRFARNTLDTLKYVRLLKENNVGVVFEEENIDTLTMDGELLLTILSSVAQQEVENTSAHVKKGLKMKMEKGELIGFQGCLGYDYDPITKSISINEEEAKIVRYIFKRYLEGNGGSVIGRELEEQGYLTPRGKTKWSDTTVLGIIKNEKYIGDILMGKTFTVDPITKRRLANFGESDKYHIENHHEPIISKEDFEKAQEIRLRRAQNRNTIANKDRKREKLSRQYAFSSMLECGFCGEILSRRTWHTSSIYKKINWQCVKSTKKGKKYCPHSKGIQEAAIEKAFVESYRQLCHADSTVIDDFLKIVEEEINDNTLVKDLKKLENQLNRIISQERKLVDLHLEDSIDEEVYAKKYKKLTKQKEELLDEKKTLELTIKDEDSIKERLKQFKKVLENKEIIEEFNRTVFESIVDKVVVGRIDKDGTVHPYDLTFYFKTGVKDSQDSNNFKDKRKNAKDNDINKLCSYKNDEDKKLCSQSKDNAR

SEQ ID NO: 23772 - DNA, 50 bp, Streptococcus pyogenes; identical to SEQ ID NO: 23702
  source 1..50: mol_type = genomic DNA

SEQ ID NO: 23773 - DNA, 40 bp, Streptococcus pyogenes; identical to SEQ ID NO: 23708
  source 1..40: mol_type = genomic DNA

SEQ ID NO: 23774 - DNA, 40 bp, Streptococcus pyogenes; identical to SEQ ID NO: 23708
  source 1..40: mol_type = genomic DNA

SEQ ID NO: 23775 - DNA, 50 bp, Streptococcus pyogenes; identical to SEQ ID NO: 23680
  source 1..50: mol_type = genomic DNA

SEQ ID NO: 23776 - protein, 584 aa, Facklamia hominis
MNTKVKLIKASNTGARNRNALHLDLKRVAAYCRVSTDSKDQLESYKSQVDYYTNLIKNNKNWTLAGIYADEATTGTTATKRVDFMRLISDCQNGDIDMIITKSISRFARNTLDTLKYVRLLKENNVGVVFEEENIDTLTMDGELLLTILSSVAQQEVENTSAHVKKGLKMKMEKGELIGFQGCLGYDYDPITKSISINEEEAKIVRYIFKRYLEGNGGSVIGRELEEQGYLTPRGKTKWSDTTVLGIIKNEKYIGDILMGKTFTVDPITKRRLANFGESDKYHIENHHEPIISRDDFEKAQEIRLRRAQNRNTIANKDRKREKLSRQYAFSSMLECGFCGEILSRRTWHTSSIYKKINWQCVRSTKKGKKYCPHSKGIQEAAIEKAFVESYRQLCHADSTVIDDFLKIVEEEINDNTLVKDLKKLENQLNRIISQERKLVDLHLEDSIDEEVYAKKYKKLTKQREELLDEKKTLELTIKDENSIKERLKQFKKVLENKEIIEEFNRTVFESIVDKVVVGRIDKDGTVHPYDLTFYFKTGVKDSQDSNNFKDKRKNAKDNDINKLCSYKNDEDKKLCSQSKDNAC

SEQ ID NO: 23777 - DNA, 50 bp, Facklamia hominis; identical to SEQ ID NO: 10557
  source 1..50: mol_type = genomic DNA

SEQ ID NO: 23778 - DNA, 40 bp, Facklamia hominis
  source 1..40: mol_type = genomic DNA
ctcttcccgcagacggtgcatgtcgaagcagtgacactgc

SEQ ID NO: 23779 - DNA, 40 bp, Facklamia hominis
  source 1..40: mol_type = genomic DNA
ctcttcccgcagacggtgcacgtcgaagcagtgacactgc

SEQ ID NO: 23780 - DNA, 50 bp, Facklamia hominis; identical to SEQ ID NO: 23680
  source 1..50: mol_type = genomic DNA

SEQ ID NO: 23781 - protein, 585 aa, Aerococcus sanguinicola; identical to SEQ ID NO: 23686

SEQ ID NO: 23782 - DNA, 50 bp, Aerococcus sanguinicola; identical to SEQ ID NO: 10557
  source 1..50: mol_type = genomic DNA

SEQ ID NO: 23783 - DNA, 40 bp, Aerococcus sanguinicola
  source 1..40: mol_type = genomic DNA
caatttccccatacccagcatgtggaagcagtagctctat

SEQ ID NO: 23784 - DNA, 40 bp, Aerococcus sanguinicola
  source 1..40: mol_type = genomic DNA
caatttccccatacccagcacgtggaagcagtagctctat

SEQ ID NO: 23785 - DNA, 50 bp, Aerococcus sanguinicola; identical to SEQ ID NO: 23680
  source 1..50: mol_type = genomic DNA

SEQ ID NO: 23786 - protein, 585 aa, Fusobacterium necrophorum
MNTKVKLIKASNTGARNRNALHLDLKRVAAYCRVSTDSKDQLESYKSQVDYYTNLIKNNKNWTLAGIYADEATTGTTATKRADFMRLISDCQNGDIDMIITKSISRFARNTLDTLKYVRLLKENNVGVVFEEENIDTLTMDGELLLTILSSVAQQEVENTSAHVKKGLKMKMEKGELIGFQGCLGYDYDPTTKSISINEEEAKIVRYIFKRYLEGNGGSVIGRELEEQGYLTPRGKTKWSDTTVLGIIKNEKYIGDILMGKTFTVDPITKRRLANFGESDKYHIENHHEPIISKEDFEKAQEIRLRRAQNRNTIANKDRKREKLSRQYAFSSMLECGFCGEILSRRTWHTSSIYKKINWQCVRSTKKGKKYCPHSKGIQEAAIEKAFVESYRQLCHTDSTVIDDFLKIVEEEINDNTLVKDLKKIENQLNRIISQERKLVDLHLEDSIDEEVYAKKYKKITKQKEELLDEKKTLELTIKDENSIKERLKQFKKVLENKEIIEEFNRTVFESIVDKVVVGRIDKDGTVHPYDLTFYFKTGVKDSQDSNKFKDKRKNAKDNEINKLCSYKNDEDKKLCSQSKDNACG

SEQ ID NO: 23787 - DNA, 50 bp, Fusobacterium necrophorum; identical to SEQ ID NO: 10557
  source 1..50: mol_type = genomic DNA

SEQ ID NO: 23788 - DNA, 40 bp, Fusobacterium necrophorum
  source 1..40: mol_type = genomic DNA
atgtttcctcaaacttcacatgtggagtgtgtggtgttgc

SEQ ID NO: 23789 - DNA, 40 bp, Fusobacterium necrophorum
  source 1..40: mol_type = genomic DNA
atgtttcctcaaacttcacacgtggagtgtgtggtgttgc

SEQ ID NO: 23790 - DNA, 50 bp, Fusobacterium necrophorum; identical to SEQ ID NO: 23680
  source 1..50: mol_type = genomic DNA

SEQ ID NO: 23791 - protein, 535 aa, Cytobacillus gottheilii
MDKLPESVQYIFGYIRRSRQDIAREQKTEDDTLTEQRTTLTKSLENYYNYYDWDIYEEIGSGADAVEERPVFKNILEKIRQAPARSYAIFVKDISRLGRGNYEQMGIVEKILIDKVLYVITPSQIYDPSDFNDIEYLKFHMFFANLEYGKITRRMREARYTYASRGKWMTGGGGIPFGYKFNPKKQILEIDDETAWVVKKVYNAYTSQTDRKGYNAICNQLNTEGIPSPQGKKWKPIVVRRMLRNQVYIGTVLFRTTEIRNGKKEKLPEQFWIKAENAHDPIVSEEQFHLAAEIMEENKSSPKVKLDFEPQPLAGLIICSSCGNKMQRQYSVQNYVKKDGTTSSYKKEFMQCLPCKVYIKYRAIEDELLRILQEDFISLDSSTLKERLKELIDIEKIQDKGNPADLINMLENRLKQIERELTILRKQLIKERITEEEYDVEKEELLKEQNEKEKQLSLIQEEMASEKMDSINIEEIQGGFKSLYDLYMNGDLSRGEKNEILRGIFDYVILEKTGKGKFNLNAYINTKVIINSLTN

SEQ ID NO: 23792 - DNA, 50 bp, Cytobacillus gottheilii
  source 1..50: mol_type = genomic DNA
agtagtgatgattacacagccaattcattgatagtggtatcatatctact

SEQ ID NO: 23793 - DNA, 40 bp, Cytobacillus gottheilii
  source 1..40: mol_type = genomic DNA
cgtatgggcaacaattaattcatccgcagaaatgagggcg

SEQ ID NO: 23794 - DNA, 40 bp, Cytobacillus gottheilii
  source 1..40: mol_type = genomic DNA
cgtatgggcaacaattaatgaatccgcagaaatgagggcg

SEQ ID NO: 23795 - DNA, 50 bp, Cytobacillus gottheilii
  source 1..50: mol_type = genomic DNA
agtagtggttctgagacagctactgatttgatgcagaagttatatctgct

SEQ ID NO: 23796 - protein, 613 aa, Vibrio crassostreae
MAVPTIVNYARVSSTKQLQGVGLETQLQREVLEELSLEHGLHIHHEAYVDYGLSAYNGEHKTGELGRLLSHIEEGKIASGSIIVVYSLDRLSRQEVNEAMSDLLYILNRGVRIYSQADDQLYCRRSSSMFIDLMKSLISMERAHEESRVKSQRVKDAMKVGLKQWYETGKPQSTLGRVPLWIDQPTNEFNDNAQGIQKAVDLLLEGKTPYGVKIYLDKHFPFKVVKKRKFENDKMWSIDTITALHTRVSLIGTKVVRVDEVSHELEGYYPPLIDQKTFFRLKQIRAKTSGRATKNDKIHVLKGLATCHHCGSKMVFVDKGRPEPTYICSNASKGNHPREAFNVRVLEYLSLEISKDIYLSEKASLELIDNSEVRVKEELESAHERLEDLTKLYREKKSLTITELIVEAEEQIELLTSNKKDLKDEQFRVTSNYLKDDLYTDAVRKDFTEQSRAKHSEGLRNVLDRVILSRVEQVSQFTKTGSVSCIKICWLFKNGQKRELTVNPFEYVNDDESKEIYIPYRYKYDVPIDEFTRSSTLIHHCLKRLHEWNLLEKLYPSKGRYQWKERKLNLGQVSSAMTNMMPKGVDLGNCESIRRAFSVSGIQHTQIESNFRH

SEQ ID NO: 23797 - DNA, 50 bp, Vibrio crassostreae
  source 1..50: mol_type = genomic DNA
ccgaagaaaaatacttgactttggttcgccaaaaaagaacaatttccttc

SEQ ID NO: 23798 - DNA, 40 bp, Vibrio crassostreae
  source 1..40: mol_type = genomic DNA
tgaagaatatttgctgtggttcgataaaaaggggttcccc

SEQ ID NO: 23799 - DNA, 40 bp, Vibrio crassostreae
  source 1..40: mol_type = genomic DNA
tgaagaatatttgctgtggtccgataaaaaggggttcccc

SEQ ID NO: 23800 - DNA, 50 bp, Vibrio crassostreae
  source 1..50: mol_type = genomic DNA
tccaagagaaatttttgactgtgttcttccataaagtttctatttccttc

SEQ ID NO: 23801 - protein, 563 aa, Vibrio cholerae
MQKIIYPYVRFSSEQQSGGSSYKRQLGDILKYAKENGYTVNDSLELRDLGLSAYKADHIKKGSLGDFFDAIDTGIIETDGTAYLCVEQFDRLSRQSLDDASDVLRKILRANINVITLMDKRVYTKESLNDLMSVMYSSMLMAQANEESAKKSERILKSFDARLDALHDGKQIQYVGIFPGWIDNKGTKKETNFVLNKKAEIVKKIFKMYINGTSFNEIARTLNYEKIPQVAKKRQKNFTNLWSSAKVNHILKNRCVLGELYIRKTGDTFKNYYPQIISNDDWDIVQSMTKTKKIIKTSGRNSINIFTGKLFCSGCGQKYYFETDDKNLKSGKKYYHMLKCSGRRGLQCKSASIKYDDFLTSMPNMFGLIDKKPQDNSDKINKIKEKITEISGYSKDINDKLLLLEELNNNNELDFTIYLKESSKLQKQIRENDARIASFKVSISRLSSDNKLDYFDKNDPISIKKAKKFINENFAGFIISSDSRNCTALYNNGQIIHFKVKNSKIEKTKNIFEKADGFKEFFDLKEEVVQAYKNGTMDGRFAEILKATNFWGIETPEKIYTLE

SEQ ID NO: 23802 - DNA, 50 bp, Vibrio cholerae
  source 1..50: mol_type = genomic DNA
ttcctgtaaatcttgcataatactgtactttttaatatgatttacaggaa

SEQ ID NO: 23803 - DNA, 40 bp, Vibrio cholerae
  source 1..40: mol_type = genomic DNA
ggctggcgctaaattgaccgtaatgcgcttcgctggaaac

SEQ ID NO: 23804 - DNA, 40 bp, Vibrio cholerae
  source 1..40: mol_type = genomic DNA
ggctggcgctaaattgaccataatgcgcttcgctggaaac

SEQ ID NO: 23805 - DNA, 50 bp, Vibrio cholerae
  source 1..50: mol_type = genomic DNA
ttcatgtataaaaagcataataaaatatattttaaagaaaactacatgaa

SEQ ID NO: 23806 - protein, 527 aa, Clostridium leptum
MKAVIYARYSSDNQREESIEGQIRECTAFAEKNGITILRHYIDRAFSAKTDNRPEFQNMIKDSGKRLFDMIIVWKLDRFARNRYDSARYKAVLKKNGVKVVSATEVISDGAEGIILESVLEGYAEYYSADLSEKVVRGMTENALKCKFNGGTLPIGYQIDSDQHFQLDPLTAPFVREAFQRYDERATMTQIRDWLNEKGVKNTRGQKMTYNSIQHLLNNRRYIGEYTYRDIVVPDGISAIVPQDLFDRVQEKLAKNKKAPARHKAEDDYLLTTKLFCGYCGAYLCGESGTSHTGNVHHYYKCVSVKKKRTECHKKSVRKEWIEDLVVSETMKMVMDDTAIEAIVSMLMDLQDRENVNLPLYEQQLREADTAIQNLLNAIQQGILTKSTKGRLEELEATKEELENKIACEKLAKPKVSAEFMTFWLHRFRKLDVQQKSHRKMLIDTFINAIFLYDDKMVLTFNYKEGTATITFDDLKTALADQKTGSDLDCSTAPVESLDAQVAFGVFALLRLCARVYDGYLFCQRFP

SEQ ID NO: 23807 - DNA, 50 bp, Clostridium leptum
  source 1..50: mol_type = genomic DNA
gtatcttttttgtcaacgcttcccaaaccaatataatccgaacttgtttc

SEQ ID NO: 23808 - DNA, 40 bp, Clostridium leptum
  source 1..40: mol_type = genomic DNA
aagtcctgttatccgcaccagactgagtctgaacgcaatt

SEQ ID NO: 23809 - DNA, 40 bp, Clostridium leptum
  source 1..40: mol_type = genomic DNA
aagtcctgttatccgcaccttactgagtctgaacgcaatt

SEQ ID NO: 23810 - DNA, 50 bp, Clostridium leptum
  source 1..50: mol_type = genomic DNA
atatctcttctctaaacatttcccttcctattataacttaaactcgtctc

SEQ ID NO: 23811 - protein, 554 aa, Sinorhizobium medicae
MTRIAYSYLRFSTPEQSLGDSSRRQQAKTLEWCEKKEVKLDNLLKFHDLGKSGFTGAHFEEGALGEFFSLVKDGTIKAGSYLVLEAIDRFSRENPMTAAGRLFELVKAGITVVTVDDGEEYSPERLSGRDSNVMLLLVVKLTQAHAESLRKSDLVGQAWEKKKQIARTEKKPITKRCPEWLSIDGGKFVINEERAKIVYRIFEATIDGFGRRSISRRMNELGIPAFRGRKGWQTSSIAKVLSSKAVLGEYQPHVGRHSARNRSPQGEPISDYYPPIIDEKMFWQAQSVITSRQHGSAGRTGVRGAHILKGLAKCGECQSIMHISNKGQKPKGGVYLVCENAKRKMGCDNTKHYRVDETERKLLRALSQLVAEDIDFKRNEADQGSEVMSLSAQLADKETIRGKLLKLVEITDFDDALNERFQQTATEIKELKAKLKKAQADLKMVRSEYDSATRKALLDDLLADIQSADTMKVVATKVKLNAIIRGIVDHVTFSRIPGIQMTITNRSRFHVDTDGTYLIKGGQDIGTIVLLEENASDEAFEAFFGEPRSYFDWG

SEQ ID NO: 23812 - DNA, 50 bp, Sinorhizobium medicae
  source 1..50: mol_type = genomic DNA
attaatgtagcacaatgtcaagagattatgctacattaatcattatcgtt

SEQ ID NO: 23813 - DNA, 40 bp, Sinorhizobium medicae
  source 1..40: mol_type = genomic DNA
gcgggccgaccatcaggagattatgattgccggcggcggc

SEQ ID NO: 23814 - DNA, 40 bp, Sinorhizobium medicae
  source 1..40: mol_type = genomic DNA
gcgggccgaccatcaggagtatatgattgccggcggcggc

SEQ ID NO: 23815 - DNA, 50 bp, Sinorhizobium medicae
  source 1..50: mol_type = genomic DNA
atttttctgacatgatatcaaaagtatatactaaaaaatgaattatcgtt

SEQ ID NO: 23816 - protein, 585 aa, Proteiniphilum saccharofermentans
METKKGAIYARVSTDKQEYTRQLEELKEYANRNNISIEYIFEETESGLNSERPEYNKLINLTKEDIDIVLIWELSRLSRKSIEIQTDIRNFKNKGINVFIYDRGISIFDSNGEENSFINMLIGMLSAVAEEEIKTMKKRVVATKRHNVFMKGYSYTSHPPFGYTRVEKKMVISEPEAKIVKEIFDLSINGSSQYSIAVKLNADGVPTTSTKNALWSASTVSKMLQNTAYYGKAKYLDTFIDCPAIISKETFDLSQIKRKQRLTRSATKVGNTFLLRNLIKCKHCGTYFTNAKDKIHHQYKCTRLMNRTFQESKCTSPAVNFHNMNYLIWDIVSRYFREVYVDDRKRNNEANLLEAIEDKNRIKQSIDNEIKKENKKVGIIYSGLQELKIEFPDLIDLQEREKKKLSNIQSNIKRLNSEKEMLDNEIASLKSRMKDLSDVENMDLTTLDYNTKYDFLHRFIDYIYITKNVPDKSKLYYGESDKRYKVEIFLKSGNKVECKYHPQKKEYTINGVVNDMSEVPDGATAYQVTDKTILIEQTIKFPSVVPKIEPETEKAGWFRLSFYSGYSTLYCFIWFTMYFSSLEEV

SEQ ID NO: 23817 - DNA, 50 bp, Proteiniphilum saccharofermentans
  source 1..50: mol_type = genomic DNA
gtatgagtgtgcaagtattaaacatcattaaaaggtttgcatactcatca

SEQ ID NO: 23818 - DNA, 40 bp, Proteiniphilum saccharofermentans
  source 1..40: mol_type = genomic DNA
gtaggtattacctcctgcatcggttaaaggaaattcatct

SEQ ID NO: 23819 - DNA, 40 bp, Proteiniphilum saccharofermentans
  source 1..40: mol_type = genomic DNA
gtaggtattacctcctgcaacggttaaaggaaattcatct

SEQ ID NO: 23820 - DNA, 50 bp, Proteiniphilum saccharofermentans
  source 1..50: mol_type = genomic DNA
gaatgagtggaattcaaataaaaaacattaagagataccaatacacatcc

SEQ ID NO: 23821 - protein, 615 aa, Enterobacter ludwigii
MSAIVDLYTLHGTLHPMSKIIPYGYLRVSSLEQVRTGGGLDTQDEEVRRYITQKSDVFDIDKMVMMSDEGLSAYSGRNIKEGELGRFLADVNAGLIPAGSALVCYSVDRLSRQNPWVGTQLISTLIGAGIEIHSVAENQILRSDDPVGAIMSTIYLMRANNESVIKSERAKHGYTKRLNESIANKKVLTRQMPRWLYDNDGKYAIDPNMQKVIDFTFDSYIAGQSTGYIAKELNDMGLKYGDTSWRGSYVAKLIRDERLIGKHIRYSKQIKGVKREIIETIPDFYPVTIDTDKFHIANNMLTSVSKNIRGRTRITYGDTSILRNLFNGVIKCGVCSGETSVVQNTRKKIINGVVTYVPYKTFLRCRNRYELKTCTQGDIRYEVIERAILNHLMGLDIATLLAAPVDNKIERYRTELELCKAEEEELQVIIKERENEGKRPRPQTLKSYEDVADRIDELTQLIESHVEDNFIPHFNVDLDSITDVSNVSERSLIKKGITTIADSICYKRISDFILVEIKYRNLNDKHVLVINNKNSEMVVNFSIEYNEENKVYICNSFVMEYDNLSCEFTVSKTTMEDYAHMMNFVDYVSDDESYNAKEFLVNNFTHIKFIDKSNE

SEQ ID NO: 23822 - DNA, 50 bp, Enterobacter ludwigii
  source 1..50: mol_type = genomic DNA
tagtgttcttaacttccttaatgcctgctattgtagacctatatacacta

SEQ ID NO: 23823 - DNA, 40 bp, Enterobacter ludwigii
  source 1..40: mol_type = genomic DNA
ttagtgtaaagcataatgtctccgatctacacctgtgcag

SEQ ID NO: 23824 - DNA, 40 bp, Enterobacter ludwigii
  source 1..40: mol_type = genomic DNA
ttagtgtaaagcataatgtgaccgatctacacctgtgcag

SEQ ID NO: 23825 - DNA, 50 bp, Enterobacter ludwigii
  source 1..50: mol_type = genomic DNA
tagtgttatcagtctatttaatttgagctattctagggtggtatatagtg

SEQ ID NO: 23826 - protein, 530 aa, Shewanella xiamenensis
MSEPQKRQAVSYIRFSSDRQKGNSSEDRQNSLLRRWLVDHQEEFELYKKKFEDLGVSGRGAHLKHALGELLTAIEEGFIRSDAVILVEEIDRIGRLEPLEFISLISSILQKGISIITLQDGQIYSKDSIGSGNGQLFILAGKVEQAHRYSESLSKRIVASYARRETDAKAGKPVKRRTPFWLDSEGKLKPRETEALKQLFSDYIDGLGERKIRSRLIEAYPDIFIRTTKAGRNVTLNPSTVIKYLENKTAIGYWGEIPDVYPKAIDEITFYKAQKERERRHVVVGNQPHSLFLSGLVKCACGANISFVHTYRGNATFVNGRCNRRGRTPEQCNNRTTLPLKIFEFIFEHTKGDGDGWEFILRNNQAKEHDNVELIRIEGLLSEKLSKLRDYSEIFRDNPSKTVGAFITDLEAEIEELQDNKSAFITAELSGWTRSDENDFYVEPEDLDKYIPQDKQILKAKLIKYGFAIVASGREISINIPHPVFSNNGYRFRYDGVVRSKANKQYGKMKLVTLSYENGNSEGDGQIFYL

SEQ ID NO: 23827 - DNA, 50 bp, Shewanella xiamenensis
  source 1..50: mol_type = genomic DNA
ggcttgcacaatgtatctgatagtgagcaataagaaacaatgtacaaatg

SEQ ID NO: 23828 - DNA, 40 bp, Shewanella xiamenensis
  source 1..40: mol_type = genomic DNA
aattgaccattgtaattgtgagctaaaagcggcgcagact

SEQ ID NO: 23829 - DNA, 40 bp, Shewanella xiamenensis
  source 1..40: mol_type = genomic DNA
aattgaccattgtaattgtcagctaaaagcggcgcagact

SEQ ID NO: 23830 - DNA, 50 bp, Shewanella xiamenensis
  source 1..50: mol_type = genomic DNA
ggcttgcagcttaaatcagattgtcaataataataataatattactactg

SEQ ID NO: 23831 - protein, 626 aa, Roseburia hominis
MRNEKITPLYERLSRDDELQGESNSISHQKQMLEEFARRNGLPNPTHFTDDGVSGTRFDRPGFLAMMEEVEAGRVEAIVIKDMSRLGRDYLKVGQVMEILRQRGVRLIAINDGVDSLKGDDDFTPFRNIMNEFYARDTSRKIRSVFKSKGMSGKHLTGTVIYGYLWDEKREHWLVDEEAAAVVRHIFALAMEGYGPYQIATKLSEEKIEMPAVHLARYGEGVNKNKAFADIYRWSASTVVEILKKQEYLGHTVNFKTRKHFKDKKSHYVDESEWTIFENTHEAIIDQETFDNVQRIRGNARRYPDGFGEAHPLTGLMYCADCGGKMYVHRTYNGKRVPQYTCGQYGKYPIGSLCPTQHRIKAEAVLTLIADMLRAIAEYSRNDRAEFIRTVQETQVAQQTADISKKRKRLAAAQKRAGELEKLICKIYEDNVLGKLPDARYEALDAQYAKEQDALNAEIVELEKAVTGYEQSQKSAEKFIALIDKYENFDTLTNTMLNEFVEKILVHERARKGSQDTTQEIEIYFNFVGRYIPPALQPVPLTPEEQEELRKKEERKDRLHQNYLRRKANGKQKEWEERYNAKRKVQVEAAKAAIRAEDMEKGIFTTISQLPRQEPRKATVSASVAV

SEQ ID NO: 23832 - DNA, 50 bp, Roseburia hominis
  source 1..50: mol_type = genomic DNA
aaaagtccttgacaatttgtctctggagatgtatgctctaagtgacttct

SEQ ID NO: 23833 - DNA, 40 bp, Roseburia hominis
  source 1..40: mol_type = genomic DNA
catttacaagcaggcggcaggaaagaccgccaagtccatc

SEQ ID NO: 23834 - DNA, 40 bp, Roseburia hominis
  source 1..40: mol_type = genomic DNA
catttacaagcaggcggcaccaaagaccgccaagtccatc

SEQ ID NO: 23835 - DNA, 50 bp, Roseburia hominis
  source 1..50: mol_type = genomic DNA
caaggtttaaaatcatttgtctcaccacatgttttccatttgtgacttct

SEQ ID NO: 23836 - protein, 532 aa, Pseudomonas fluorescens
MKQAISYVRFSSDRQKYGSSVERQEGMIAAWLKAHPDYEMSGLKFSDLGKSGYHGEHIKEAGGFGKLLKALEDGFIRAGDVVLVEAIDRTGRLEPMDMLTLVINPILKAGVSIITLDDNTTYSKESVNTAQIFLLVAKIQAAHGYSAALSTRVADSYKKRRKDAAKYGTVPRRITPVWLNPDGTVREEVAPWIKTAFELYVSGVGKSTIAKRMRESGVERLAKASGPGVEGWLRNKAVIGKWETLEGTPGHQIIDDIYPAIIEPSLFYKAQVHAEKMKTQRPIKTANHFLVGLIRCGECGKNYIVQNLHGKPHTMRCRTRQSQNDCKNSHCVPKPVLDAIYRYTSVTAAVEAVQQQQMGVNDKEIVTREAELLTITKRVDGLVQALTQTGPIPEVIEALKQSRIEREAAESALVILRSTVVPSAGANWQDMGNVWKLEAEDAQRLAAMLKMVDYHITVAPTGDITSSHSDVLYRYIGVDRALDKYKLLANGKLILIPKGYVDDFPYHEPFQKMESENTWDESDYENLRLQYE

SEQ ID NO: 23837 - DNA, 50 bp, Pseudomonas fluorescens
  source 1..50: mol_type = genomic DNA
cagtgttacatacaaaatacttgcgaccagctttttcgcatgtaacactg

SEQ ID NO: 23838 - DNA, 40 bp, Pseudomonas fluorescens
  source 1..40: mol_type = genomic DNA
tcgcgtcatcaagggctgggatctgggcctgatgggcatg

SEQ ID NO: 23839 - DNA, 40 bp, Pseudomonas fluorescens
  source 1..40: mol_type = genomic DNA
tcgcgtcatcaagggctggtttctgggcctgatgggcatg

SEQ ID NO: 23840 - DNA, 50 bp, Pseudomonas fluorescens
  source 1..50: mol_type = genomic DNA
tagtttcatctctaaactacttgcttccagcttattttgaagcaaatctg

SEQ ID NO: 23841 - protein, 461 aa, Kocuria salsicia
MDAVIYARISRDVEGTSLGVNRQLEDCRQAASARGWAVVHEYVENDTSATRAKVRPQYQQMLRDLANGTAGALIVWDVDRLTRTPRELEDVIDLADAHSIALVSIGGEIDLATPQGRMTARIKGSVARHETDQMARRIRRKQRERAEQGLPNGLCPFGWRRVYKDQARRSGVRDVAYPPEAEQVRDGVARLLAGESIRSIATRWNADGLPTQRGNGWRTGTVRQTLRRAANAGLREHKGELFPSDVIEPLITEDELHRVRALLADPGRRVQHGTTPAYLLTGIAECGRCGGKMRYLKSRGRDGMPSYGCRDCTRVARSMGLVDAVVEGAVLGRLQQPDVLETLPTVDPARGDDLRSQAEALEAKLSEAADLFTAGTITGEQLSRITAGVRPQLDKTRAQLADLTPASAAAAIAGEDAVARWEDATLLVKREIVDTLMTITILPAGPGRGRDPESVKIEWKA

SEQ ID NO: 23842 - DNA, 50 bp, Kocuria salsicia
  source 1..50: mol_type = genomic DNA
agaaacctaaacgcgttttacgcaggtgtcaagattgagctagaatctct

SEQ ID NO: 23843 - DNA, 40 bp, Kocuria salsicia
  source 1..40: mol_type = genomic DNA
tgccacgtacacctcggccggaccgttgagccagatctcc

SEQ ID NO: 23844 - DNA, 40 bp, Kocuria salsicia
  source 1..40: mol_type = genomic DNA
tgccacgtacacctcggccttaccgttgagccagatctcc

SEQ ID NO: 23845 - DNA, 50 bp, Kocuria salsicia
  source 1..50: mol_type = genomic DNA
tgataactattataattatacgcatttgtcaagatggtttaaaacactct

SEQ ID NO: 23846 - protein, 461 aa, Kocuria rhizophila
MDAVIYARISRDAEGTSLGVNRQLEDCRQAASARGWTVVHEYVENDTSATRAKVRPQYQQMLRDLANGIAGALIVWDVDRLTRTPRELEDVIDLADAHSIALVSIGGEIDLATPQGRMTARIKGSVARHETDQMARRIRRKQRERAEQGLPNGLCPFGWRRVYDDQGRRAGSRDVAYAPEAEQIRDGVSRLLAGESVRSIAMRWNTEGLPTQRGNGWRTGTVRQTLRRAANAGLREHKGEIFPSDVIEPLITEDELHRVRALLADPGRRVQHGTTPAYLLTGIAECGRCGGKMRYLKPRGRHNIPSYGCRDCTRVARSMGLVDAVVEGAILGRLQRPDVLETLPTMDPKRGDDLRSQAEALEAKLSEAADLFTAGTITGEQLSRITAGVRPQLERTRAQLADLTPASAAAAIAGDDAVARWEDATLLVKREIVDTLMTVTILPAGPGRGRDPESVKIEWKA

SEQ ID NO: 23847 - DNA, 50 bp, Kocuria rhizophila; identical to SEQ ID NO: 23842
  source 1..50: mol_type = genomic DNA

SEQ ID NO: 23848 - DNA, 40 bp, Kocuria rhizophila
  source 1..40: mol_type = genomic DNA
ggccacgtagatctcggcgggcccgttgatccagatctcc

SEQ ID NO: 23849 - DNA, 40 bp, Kocuria rhizophila
  source 1..40: mol_type = genomic DNA
ggccacgtagatctcggcgttcccgttgatccagatctcc

SEQ ID NO: 23850 - DNA, 50 bp, Kocuria rhizophila; identical to SEQ ID NO: 23845
  source 1..50: mol_type = genomic DNA

SEQ ID NO: 23851 - protein, 555 aa, Bacillus velezensis
MELKNIVHSYNITNILGYLRRSRQDMEREKRTGEDTLTEQKELMNKILKSIEIPYELKMEIGSGESIEGRPVFKECLKDLEEGKYQAIAVKEITRLSRGSYSDAGQIVNLLQSKRLIIITPYKVYDPRNPADMRQIRFELFMAREEFEMTRERMTGAKYTYAAQGKWISGLAPYGYRLNKKTSKLVPVEEKAKVVQFIFNIFLNGLNGKDYSYTAIASHLTKLQIPTPSGKKRWNQYTIKAILQNEAYIGTVKYKVREKTKDGKRTIRPEKEQIVVSDAHAPIIDQEQFQQSQDKIANKVPLLPNKNALELSELAGVCTCSKCGEPLSKYETRRTRENKNGTESVYHVKSLTCKKNKCTYVRYNDVEYAILDYLSSLSNLDNKTLTKHITSMISKYEDVNSNVKTKKQMSEHLSQKEQELKNKENFIFEKYESGIYTDELFLKRKAVLDEEFKELQIAKHELNGTQEAQSEIDSNTVRNNINKIIDQYHIESSTEKKNALLRMVFKEVIVTMTQKRKGPIPAQFEITPILRFNFSFSTSPSLIVPQNAVHILKNR

SEQ ID NO: 23852 - DNA, 50 bp, Bacillus velezensis
  source 1..50: mol_type = genomic DNA
cagtacatatcttaaaaaaccgataaagctgtttattaagatacttacta

SEQ ID NO: 23853 - DNA, 40 bp, Bacillus velezensis; identical to SEQ ID NO: 22488
  source 1..40: mol_type = genomic DNA

SEQ ID NO: 23854 - DNA, 40 bp, Bacillus velezensis
  source 1..40: mol_type = genomic DNA
gattaatatcagtaccgatagagctgtttccccggtaaac

SEQ ID NO: 23855 - DNA, 50 bp, Bacillus velezensis
  source 1..50: mol_type = genomic DNA
gaatatatacctaaaataactaacagagctgtttattcaattaactacta

SEQ ID NO: 23856 - protein, 559 aa, Bacillus licheniformis
MLILKGDERLTTEQIMGLIGKINAIIYVRVSTTDQAEKGYSLESQIERCKERALTKFKYKESELIALVEPGGMGDDPNRPALNHALYLLEKGLGKKFIVLHPDRLTRDNTLQGIVSRKIWGMGVDIEFIEFEVDPTNPESMLMYNIQGSIAQYNKAKINANSKRGRVAKAKKGEFPSFKRLFGYKFNKETDLPEYDEEERQVLLEMKDMLLNRDMSSNEIAKELSKRGVPAPDGDTWYQATVSRILKNEDYTGDFYYGKSKVVQINGEAKQVPTPEEEWILIKIPPIWDHETRDQILNKLKENYKGRSRKTRDYLLKGKAKCGRCGSACGSGFTSKTKSGVYKYYSCRRKNAKAYQNGKKIIDCPGKNWRVDIVDDVFWKWFKKLLKNPTDFLEQFLSETSNEKKIEELQHKVNNLTKQIEEIDSEVSNYVILFGKGKINEDMFDKLTQPLEQKKEYIETELEIINSQINANKDVEDKNQKLKEYVSSFSEMVDKDLSMDEKRKFIDFFIEKVTLFDDDHMEIVWKGDGLNNNDDKVSLYNEGGAMKLNNSHKRLNYGQ

SEQ ID NO: 23857 - DNA, 50 bp, Bacillus licheniformis
  source 1..50: mol_type = genomic DNA
cacataaaagattaaactatggtcaagaacaaggttttaaattttatgtc

SEQ ID NO: 23858 - DNA, 40 bp, Bacillus licheniformis; identical to SEQ ID NO: 23428
  source 1..40: mol_type = genomic DNA

SEQ ID NO: 23859 - DNA, 40 bp, Bacillus licheniformis; identical to SEQ ID NO: 23429
  source 1..40: mol_type = genomic DNA

SEQ ID NO: 23860 - DNA, 50 bp, Bacillus licheniformis
  source 1..50: mol_type = genomic DNA
gacataaaagaggtaactaaggaatagaagaagcatgcaagttgtatgtg

SEQ ID NO: 23861 - protein, 522 aa, Vibrio parahaemolyticus
MRFSRPEQAKGTSIERQSNFAEQYALEHGLELDKSLTMMDKGLSAFHGVHKTKGAFGQFLAAVTAGKVPSGSVLVVESLDRLSREDPLIAQAALTDLILSGITVVTAADNQVYSREEIQQNPFKLIMSLVVMIRANEESETKQRRSNAFLKSALNQYQANGKIRRLGSDPSWLDFNKDNDTYSFNERVEVIRRILNLYNKGIGSLKIARQLTEESIPTLSGKRSAWGQTTVANIVKSHALYGMKRINVQSVEYDLEDFYPALITKSKWLALQQHRTKRSKSMHGRGEVVHLITGHGKGFTTCGYCGGGLGAQTQKQYKRSGEYSRTVTRLHCLTHKETSSCCSSVFLEPIESAVLFAACIGVEPQSLVPTVNNVNYSALIDEVENKVKHIVEQVTAGAPWDLFKDAHDKLKLEKQKLIKERDSQKPDVNQSDVQKWVNKLVELADKARANDKEARLKCRTLINSICKSIVIKLRGHDLKSEPVVTITFVTDEQFEFKVGKNGAVQFVDNGMAVNRRLKPLLA

SEQ ID NO: 23862 - DNA, 50 bp, Vibrio parahaemolyticus
  source 1..50: mol_type = genomic DNA
tagttatgcactgtgtatttgctttctgtctaatgtatagtgataactta

SEQ ID NO: 23863 - DNA, 40 bp, Vibrio parahaemolyticus; identical to SEQ ID NO: 7098
  source 1..40: mol_type = genomic DNA

SEQ ID NO: 23864 - DNA, 40 bp, Vibrio parahaemolyticus; identical to SEQ ID NO: 7099
  source 1..40: mol_type = genomic DNA

SEQ ID NO: 23865 - DNA, 50 bp, Vibrio parahaemolyticus
  source 1..50: mol_type = genomic DNA
taatcatgtttattgtatttttttggagtcttatgtctaaaggtaactaa

SEQ ID NO: 23866 - protein, 548 aa, Escherichia coli
MYATVSKRENKGMKVPVWSYARVSTLSQVDGFGIQRQVQTINQFIQYLVLDHRLPFTLDVDTITQMVAEGKSAFKGKNWNPKTKLGQYRKQVMDGVVPESVLIVENIDRLTRLDPFQAVEIISGMINRGTTILEIETGMTYSRYIPESITVLTMQINRANGESKRKSIMMQKSHVNRYGKVSKVRPRWFDVVEVDGMKQYRPNDTAKAIQRMYGDYVNGIGAAQIVRTYGKTDNGKQWTLVTVLRALSDKRVADDARYPSIVDKSLYERVQAMKIATNKTGSTHQKNMLNIFSGMSRCPVCKQAIIVKRNSHGGLYTVCLGKRTNKTCTARSMAYNALERPLLEAIKGLDFSEVYNHEESNVLTLRDQWIQNERDIAAFRERLNKASRHEKFAILDELETISKEQEELSIRLKSLDAPKDVQLTYNDDKLDLNVEYRIELNNRMKKLIQEINIGRVDTSKSTYTIYCTIKYWTDKVKHLVIIDSESTRIGKGGANTLTTTLRSVSSINADGTFYGNPDEEAVSYWKKSVNQVFIEAGKPAPFDDSYST

SEQ ID NO: 23867 - DNA, 50 bp, Escherichia coli
  source 1..50: mol_type = genomic DNA
cggtgtacatactttacctactacgagcagtcgtgctagtatgtacgcca

SEQ ID NO: 23868 - DNA, 40 bp, Escherichia coli
  source 1..40: mol_type = genomic DNA
cggccccatcagcagcaatgaacagtcagtcgtaccaccg

SEQ ID NO: 23869 - DNA, 40 bp, Escherichia coli
  source 1..40: mol_type = genomic DNA
cggccccatcagcagcaatatacagtcagtcgtaccaccg

SEQ ID NO: 23870 - DNA, 50 bp, Escherichia coli
  source 1..50: mol_type = genomic DNA
caatgtttattgggtacctactatatgcagacatgactctatgtactcca

SEQ ID NO: 23871 - protein, 543 aa, Clostridium beijerinckii; identical to SEQ ID NO: 11276

SEQ ID NO: 23872 - DNA, 50 bp, Clostridium beijerinckii
  source 1..50: mol_type = genomic DNA
acatgcagttagatagttcaagcgaatccatgaacattctaactacatat

SEQ ID NO: 23873 - DNA, 40 bp, Clostridium beijerinckii
  source 1..40: mol_type = genomic DNA
ttatacagatgcaacaggaaatccatggactgcaacttat

SEQ ID NO: 23874 - DNA, 40 bp, Clostridium beijerinckii
  source 1..40: mol_type = genomic DNA
ttatacagatgcaacaggacatccatggactgcaacttat

SEQ ID NO: 23875 - DNA, 50 bp, Clostridium beijerinckii
  source 1..50: mol_type = genomic DNA
agattcagatatttatttcaagcacatacctgaacattaaaattacttat

SEQ ID NO: 23876 - protein, 612 aa, Bacteroides caccae
MRAAFLIRCSTKKQDYERQVNDLTRLAKKFGYTSSDNMIFGEHITGKDDASKRDRQSIQRLKDAAINKEFDVVLVSEVSRMSRDPMSGRLYVRQLINMDIPVYFRDIDTWTIDPVTGKKVRDAETIIGAAFDAAWKYIKSMKTQIASGRRDELDNNQMSIGQPFFGYKRYGGRDKGKKNSWVINDDAAKVVVDVFEEYVKDGATLKSTALAITAKYGEQFNKKFSIGTIEHILTFEPYCTGIKVVSLTDPDTEDVDEFEVEIPTIITRAMFDKATTKRATNRTARTPYPKQATYILSKLLKCPICEHSLTPQKRGGDKGDKYRLMNGKVAIRWSCMSGINNATDCSSRITISNEKLEAIIWGLVKQELIGFANLNDEDRVAKVEELTDKITNLEMNIANFTSHISNMDRLIERAYSAYMDAPDSVMDIAKDKYYKTLTKCENERAECKDKIEALSAEKLRLENMRTFFNQPTLPKDAIEKAESDPIKMRNLVMELIDKIYPYRITTYVSSATNRIMRNGIVLLEVYTINGIYNVLYDGNQRNNKVAYYISGVYATFQNGRNKFDAYDTGEYFVISHATLVTETEDVDMLVTFNELIKICMQNGWEIDYTYKM

SEQ ID NO: 23877 - DNA, 50 bp, Bacteroides caccae; identical to SEQ ID NO: 2422
  source 1..50: mol_type = genomic DNA

SEQ ID NO: 23878 - DNA, 40 bp, Bacteroides caccae; identical to SEQ ID NO: 5433
  source 1..40: mol_type = genomic DNA

SEQ ID NO: 23879 - DNA, 40 bp, Bacteroides caccae; identical to SEQ ID NO: 5434
  source 1..40: mol_type = genomic DNA

SEQ ID NO: 23880 - DNA, 50 bp, Bacteroides caccae; identical to SEQ ID NO: 5430
  source 1..50: mol_type = genomic DNA

SEQ ID NO: 23881 - protein, 488 aa, Tissierella praeacuta
MENNIAFYMRLSVDEKEKLESESISNQRLLLKHYISLDKDLNAFNIKEYVDDGYSGTSLNRPALQRLFGDVKIGKVNCIIVKDISRFMRDYITLGDYLENIFPFLGIRFISVNDGYDSQKESDTGIDIGIQFKGLLSDFYAKETAEKVRNSLLALKQQGKCMQANPPYGYIRDPDERTKIMIDEKTGEYVKRMFGMILEGYSTIQIARTFNKESVITPSARKREITGQTYKERSIYTENHTKTIWMNSSVCRILKNEMYTGTFIFNTVRKTKLYGGLTTKIPREEWGRIYNHHPPLISYEEFNQVQSILASRAIKHVSSSKKKEKSALQEVLYCKDCGHSLVIMQRKEARNLACSTCMMKEIKTNFEKIEVIEKQVLQLLQEKIDVQERYVKGNIQEIHSYSLEIEKLEKEKIKSFEKYKANKISREDFIKVKNKINDRILRLNQCIHDTDPENVDNEDISILTKELVEKYILKILVHHNGGFEVQYK

SEQ ID NO: 23882 - DNA, 50 bp, Tissierella praeacuta
  source 1..50: mol_type = genomic DNA
tttatcattctcttgacatcaaagggtgctaatgatataatgatgacagt

SEQ ID NO: 23883 - DNA, 40 bp, Tissierella praeacuta
  source 1..40: mol_type = genomic DNA
tataatagtagctcaaacaggcatgggtaagacagaagct

SEQ ID NO: 23884 - DNA, 40 bp, Tissierella praeacuta
  source 1..40: mol_type = genomic DNA
tataatagtagctcaaacaaccatgggtaagacagaagct

SEQ ID NO: 23885 - DNA, 50 bp, Tissierella praeacuta
  source 1..50: mol_type = genomic DNA
taaatcattctactggcctcaaagactgcaaatgatcctctgttgccatc

SEQ ID NO: 23886 - protein, 492 aa, Veillonella parvula
MSETTQIGVIYARYSSDKQRDESIDGQIRECMAYAEREGITITNTYIDRALSAKTDDRPEFRQMILDSNKQAFNYVLVYQLDRFSRNRYDSAIYKAKLRKNGIRVISVKENIKDDPSGIILESVLEGMAEYYSAELSQKVMRGMTDNVLQGKWVGTVVPYGYKLSNNRQLEINEHEANVVRKLFDMYLQRHTLSEMASYMNANGHLTHKGKPFNTNSIKAIISNEKYIGVYSWGSERIENAIPPIIDKSIFEKAQHKRNLRAKKKGNRSELYQLCGKLECGRCGGNYVGSTGTSKTGALHHYYVCSNRRRKNACKAQNIRRDALDDIVISQTLAILNKPNVINKIAKYAANSGKNLQSETVAQIDIIDAHIRDLKKSLDNYMTAIANGFISDVLKHRIETTEQELKDHIEIKTSLENTIIPVELTEDHIRFFLLKMAKENPSTLRGRARIIEAFVHHVTIYEDHIEIVFNYKNELSEFHDKTLESSLLNDLV

SEQ ID NO: 23887 - DNA, 50 bp, Veillonella parvula
  source 1..50: mol_type = genomic DNA
tgaaagttcgcttttaaatgatttggtgaaccgttttaagctaaatacga

SEQ ID NO: 23888 - DNA, 40 bp, Veillonella parvula
  source 1..40: mol_type = genomic DNA
tactgtgatgctttaatttggtgacccagaagggattcga

SEQ ID NO: 23889 - DNA, 40 bp, Veillonella parvula
  source 1..40: mol_type = genomic DNA
tactgtgatgctttaatttgttgacccagaagggattcga

SEQ ID NO: 23890 - DNA, 50 bp, Veillonella parvula
  source 1..50: mol_type = genomic DNA
tgtaaattctaggataaatgatttgttgactggttcttttatagaaacta

SEQ ID NO: 23891 - protein, 492 aa, Veillonella parvula
MSETTQIGVIYARYSSDKQRDESIDGQIRECMAYAEREGITITNTYIDRALSAKTDDRPEFRQMILDSNKQAFNYVLVYQLDRFSRNRYDSAIYKAKLRKNGIRVISVKENIKDDPSGIILESVLEGMSEYYSAELSQKVMRGMTDNVLQGKWVGTVVPYGYKLSNNRQLEINEHEANVVRKLFDMYLQRHTLSEMASYMNANGHLTHKGKPFNTNSIKAIISNEKYIGVYSWGSERIENAIPPIIDKNIFEKAQHKRNLRAKKKGNRSELYQLCGKLECGRCGGNYVGSTGTSKTGALHHYYVCSNRRRKNACKAQNIRRDALDDIVISQTLAILNKPNVVNKIAKYAASSGKNLQSETVAQIDIIDAHIRDLKKSLDNYMTAIANGFISDVLKHRIESTEQELKDQIEIKTNLENTIIPVELTEDHIRFFLLKMAKENPSTLRGRARIIEAFVHHVTIYEDHIEIVFNYKNELSEFHDKTLESSLLNDLV

SEQ ID NO: 23892 - DNA, 50 bp, Veillonella parvula; identical to SEQ ID NO: 23887
  source 1..50: mol_type = genomic DNA

SEQ ID NO: 23893 - DNA, 40 bp, Veillonella parvula; identical to SEQ ID NO: 23888
  source 1..40: mol_type = genomic DNA

SEQ ID NO: 23894 - DNA, 40 bp, Veillonella parvula; identical to SEQ ID NO: 23889
  source 1..40: mol_type = genomic DNA

SEQ ID NO: 23895 - DNA, 50 bp, Veillonella parvula; identical to SEQ ID NO: 23890
  source 1..50: mol_type = genomic DNA

SEQ ID NO: 23896 - protein, 503 aa, Clostridium saudiense
MIKIRVAIYCRKSVFVEGSVSIETQINLCKDYINKKYSNSTFEIFEDEGFSGGNTNRPAFQKMLKLIELNQLDIVICYKIDRIARNTLDFLNTLEKFKNKNVELISVSEGFDPNTQIGKMMLTLLASFAEMERSNIQQRVSDNMLSIAKKGRWTGGSAPTGFMHGENGGIEISNGELILDIFDMKYHNTLNSKIITHAEEKHNHKFTGVTLANAFRKPIYVKSSESVSLYLKHKGYTVLGEENLTNSYLTYTDKDNKYAVVSNIPGLINPEVWLDINKRMDENITRTGNRFSEKYWLTKTLHCKCCGKTYCGHTKSTKTRYYKKDGTEKIYESTTYYYMCRDMLRGKLKTCTNTKRVKKDYLEVRVSELIYSLKDIDNFNAAYNVNSVDNKKLIASLERKIKSIDKNINNLTDKLSLLSNEASIIFINKIETLVKEKSNIKNEILSLEMHELENINNNHDFVFYNISNFNDNMTVDEKRACCMNIFKEITYDPKEDTFEFSFK

SEQ ID NO: 23897 - DNA, 50 bp, Clostridium saudiense
  source 1..50: mol_type = genomic DNA
ttggtttaaattgaaagtgtaggacatccaccactttttatttatatact

SEQ ID NO: 23898 - DNA, 40 bp, Clostridium saudiense
  source 1..40: mol_type = genomic DNA
tttcattccaattggtgagcatccaccatgaatatatcct

SEQ ID NO: 23899 - DNA, 40 bp, Clostridium saudiense
  source 1..40: mol_type = genomic DNA
tttcattccaattggtgagtatccaccatgaatatatcct

SEQ ID NO: 23900 - DNA, 50 bp, Clostridium saudiense
  source 1..50: mol_type = genomic DNA
taggtttaaagtccaagtgtaccttatccaccctctgcgtattctatcct

SEQ ID NO: 23901 - protein, 463 aa, Staphylococcus aureus; identical to SEQ ID NO: 14001

SEQ ID NO: 23902 - DNA, 50 bp, Staphylococcus aureus
  source 1..50: mol_type = genomic DNA
gtgttatgtaactagaaagaacgcaatagttacaaaacattcattaaaaa

SEQ ID NO: 23903 - DNA, 40 bp, Staphylococcus aureus
  source 1..40: mol_type = genomic DNA
atggtaccacttctaccgcacacgttcccccaatataact

SEQ ID NO: 23904 - DNA, 40 bp, Staphylococcus aureus
  source 1..40: mol_type = genomic DNA
atggtaccacttctaccgcatacgttcccccaatataact

SEQ ID NO: 23905 - DNA, 50 bp, Staphylococcus aureus
  source 1..50: mol_type = genomic DNA
atgttatttaccaagaaacaaaccattatttacataagacacatttagaa

SEQ ID NO: 23906 - protein, 562 aa, Vibrio harveyi
MDKIIYPYVRFSSEQQSGGSSYKRQMDDILKYAKENGYTVNNSLELKDLGLSAYTAKHIEKGSLGDFLDALDAGVIEADGSAYLCIEQIDRLSRQSIDEAYQVFRKILKANVNVITLMDKKTYTKDSLNDLMSIMYSSMLMGQANEESAKKSERILKSFDKKIDQLNNNEPIQYVGIFPGWIDNRGTKQKRDFIINKKAKIVQNVFKMYIEGTSMGDIARIFNEKGIEQVAKRRHKNFTNSWSSAKINHLLKNRCVLGELYIKKTGEVYKNYYPQIISIDDWDVVQSMTSTKKITKTSGRKSINIFTGKIFCSGCGQKYYFETDDKVTKKGRTLYYMLKCQGRRVLGCKSKSIKYDDFLSSTPNMFGMITKTKKDNSEEIKKIKQKISEISSETKEVEKNINTLESMNDNGSLDYETYLKESSKQRKKIRVNDTRIADFKANIARLSSDNKLSYFDKTDPVSIIKGKRFVNENFAGFVISSDSKACTALYLNGQVIHFVLKNSKIEKQENVKAVDGFGEFFELKQEILDAYGSGKMDGRFIEILRATNFWGVDTPEKDYSFE

SEQ ID NO: 23907 - DNA, 50 bp, Vibrio harveyi
  source 1..50: mol_type = genomic DNA
ctgttaatcttgcgtagtactgtaattttatgtatgattaacaggaataa

SEQ ID NO: 23908 - DNA, 40 bp, Vibrio harveyi
  source 1..40: mol_type = genomic DNA
aggagccaaattgaccgtgattcgttttgctggaaactga

SEQ ID NO: 23909 - DNA, 40 bp, Vibrio harveyi
  source 1..40: mol_type = genomic DNA
aggagccaaattgaccgtgtatcgttttgctggaaactga

SEQ ID NO: 23910 - DNA, 50 bp, Vibrio harveyi
  source 1..50: mol_type = genomic DNA
ctgtaaatcacttggagctctggatatttctgtctgactgggaagaataa

SEQ ID NO: 23911 - protein, 502 aa, Pectobacterium brasiliense
MTLAFSYVRFSTKSQAVGTSLDRQLNASRLFCSERNLNLSPKGYHDLGVSGFKHVKRPELDQMLEAIRSGDIPSGSYILIEAIDRLSRKGISHTQDVLKQILLHKVKVAFVGEDAKTLAGQILDEHSLNDLSKVILVALAADLAHKESARKSKLVKSAKAIIRQKAIEGYKIRGHTMFWIDWSEKQKNFVLNDRVKDVELIINYRIKGNGPRKIAKMLNDDYISSPRGKQWNHMSVSAILKSPVLYGAYQTHQIFENKKIPDVLIENHYPAIIDYETFIQIQADSSRANKGRPSKSNPFSGLLRCQCGQAMNFSRKTNIGKNGKILEYEYHFCIGSTDGRCEHKKRIRDLVPLLVSLMDKLQIKEPTNKNVNIELIKSKQEKIEHLNKMLIELDTPPLSVLKTISALEKELQILLNTPIAPEITQKHVKNLGSITDAQEYNQHLKQLVRSIVIYQGNEKKSIRVKVNKSDGHSQNFLIKNGIVKFKSDTKALQELLNGFRKN

SEQ ID NO: 23912 - DNA, 50 bp, Pectobacterium brasiliense
  source 1..50: mol_type = genomic DNA
aatggtaacaatgtaaatatcttccggaagatgtttacattattaccatt

SEQ ID NO: 23913 - DNA, 40 bp, Pectobacterium brasiliense
  source 1..40: mol_type = genomic DNA
gatactggcaaaaaagtcacggaagatgttcgcacccaga

SEQ ID NO: 23914 - DNA, 40 bp, Pectobacterium brasiliense
  source 1..40: mol_type = genomic DNA
gatactggcaaaaaagtcagggaagatgttcgcacccaga

SEQ ID NO: 23915 - DNA, 50 bp, Pectobacterium brasiliense
  source 1..50: mol_type = genomic DNA
catggtgacctgtgaaaaatctttggccagttatgtgtggaattaccatt

SEQ ID NO: 23916 - protein, 502 aa, Pectobacterium brasiliense
MTLAFSYVRFSTKSQAVGTSLDRQLNASRLFCSERNLNLSPKGYHDLGVSGFKHVKRPELDQMLEAIRSGDIPSGSYILIEAIDRLSRKGISHTQDVLKQILLHKVKVAFVGEDAKTLAGQILDEHSLNDLSKVILVALAADLAHKESARKSKLVKSAKAIIRQKAIEGYKIRGHTMFWIDWSEKQKNFVLNDRVKDVELIINYRIKGNGPRKIAKMLNDDYISSPRGKQWNHMSVSAILKSPVLYGAYQTHQIFENKKIPDVLIENHYPAIIDYETFIQIQADSSRANKGRPSKSNPFSGLLRCQCGQAMNFSRKTNIGKNGKILEYEYHFCIGSTDGRCEHKKRIRDLVPLLVSLMDKLQIKEPTNKNVNIELIKSKQEKIEHLNKMLIELDTPPLSVLKTISALEKELQILLNTPIAPEITQKHVKNLGSITDAQEYNQHLKQLVRSIVIYQGNEKKSIRVKVNKSDGHSQNFLIKNGIVKFKSDTKALQELLNGFRKS

SEQ ID NO: 23917 - DNA, 50 bp, Pectobacterium brasiliense; identical to SEQ ID NO: 23912
  source 1..50: mol_type = genomic DNA

SEQ ID NO: 23918 - DNA, 40 bp, Pectobacterium brasiliense
  source 1..40: mol_type = genomic DNA
tctgggtgcgaacatcttccgtgacttttttgccagtatc

SEQ ID NO: 23919 - DNA, 40 bp, Pectobacterium brasiliense
  source 1..40: mol_type = genomic DNA
tctgggtgcgaacatcttcggtgacttttttgccagtatc

SEQ ID NO: 23920 - DNA, 50 bp, Pectobacterium brasiliense; identical to SEQ ID NO: 23915
  source 1..50: mol_type = genomic DNA

SEQ ID NO: 23921 - protein, 624 aa, Aliivibrio fischeri
MKFNSSKPQVYSYRRFSSPLQEKGTSLVRQSKLIKEVAEKFNLEVNDSLVMTDRGLSAFHAEHKNRGELGLFLSAIKEGLVKPGSVLIVESLDRLSREDAMTASTDLNNLINHGITIYTAMDGRTYSSETMANDPMNILWATIVMIKANEESMKKFERSIGFIQEQVRNFYENGLGDVAGAIPFWIKRKARENVKIKTGFEFNENEETIRLIIDMYFNEGRGLRSISRYLYEKQIKSPKGHDVWGVSTLSSVLENEALCGRKVFKLKVKKKYIDEYDNFELKDYYPAIMSEDDFDKMQAIKKRKAGGGKGDKSNRGGLVYLLTDYGKKSVCAKCGSGIGSQPQQQKNRIRRRLHCYKHKETANCCKSIIQDYLEDAFLVSVSRHIDYSLINKDIDATNIVLIEERLEAIDGELENAMDLIITVKDPKMKTILKKKYERLECEKVDLEKQKNELKEFKVSEDDIKTFITTVGKARNYKDNESRKIIKNILSQCIKKLSVHLDKKRLSCYGYPNICNNALVNVIDVEFYSEKNLSIFFCSETNALLFTRIDNEFSNDAMGSYTEDELMIWNNEGKEALDNVIKNNVVDNHNTSSPENLWFGSDVASMVFEAMLDELYESDEDNYLN

SEQ ID NO: 23922 - DNA, 50 bp, Aliivibrio fischeri
  source 1..50: mol_type = genomic DNA
ttagttatcagtgttcgcttgacatctgtctggtgatcactgatactttg

SEQ ID NO: 23923 - DNA, 40 bp, Aliivibrio fischeri
  source 1..40: mol_type = genomic DNA
gaagtaaccaaagcttccgtctgtccagtgaatgtcttgc

SEQ ID NO: 23924 - DNA, 40 bp, Aliivibrio fischeri
  source 1..40: mol_type = genomic DNA
gaagtaaccaaagcttccgaatgtccagtgaatgtcttgc

SEQ ID NO: 23925 - DNA, 50 bp, Aliivibrio fischeri
  source 1..50: mol_type = genomic DNA
ttggttttggtctttgtctttacaaatgtctggtgatccttggcactctg

SEQ ID NO: 23926 - protein, 539 aa, Yersinia enterocolitica
MVNKLVKPHIYLRVSNSKQQYGSGLDEQRDRIEQYIKSNHHLFTADYHEWVDIGFSAYKNKNIVDGKLGELVELVNVGKLGAGDHLIVYSIDRLSRRASWDEKTIQLIVSAGIRIHDITTPVVLDRDDPFSKIIFELILSRGHNESVVKSERSRSGWDAKHKHMVESGITMTKRLPRWLDWDATKGLVIKPREVSIIKRIFNSYVEGMSGPYLAKTLNAEKLLINDALWRPNAITKLIKDERLVGSFRGIKTQVVVPNIFPVIIEKDLFELANKRLSVNSAGIKGRVRVSKDDREVRNIITGICRCGLCGGPVSTSTNSIGVTYIRCRNRINFETCSNGGIRLDFTERALLGHIKQIDFQKLINNKHDDISELDLLNSEMELLLSDQAQCMTQIEERKKNKKSVSLPFAVALTDLNDRIGDVQGKINHISVSEPIERFEDYDIDMLCDVTNIPLRMNIRKMLTQVIETVSFVNTGGMGMIKINYVSSDLYAHLITFAKKTGEVLSVFAGNDKMIEFSDGADVVVYDKEKKTYTLNGDVV

SEQ ID NO: 23927 - DNA, 50 bp, Yersinia enterocolitica
  source 1..50: mol_type = genomic DNA
atgtgtaaatgatttaacaataccttggttttgtgataccatacacacat

SEQ ID NO: 23928 - DNA, 40 bp, Yersinia enterocolitica
  source 1..40: mol_type = genomic DNA
gttgcgtaatggggatatcttagtctatggtcatactcat

SEQ ID NO: 23929 - DNA, 40 bp, Yersinia enterocolitica
  source 1..40: mol_type = genomic DNA
gttgcgtaatggggatatcgaagtctatggtcatactcat

SEQ ID NO: 23930 - DNA, 50 bp, Yersinia enterocolitica
  source 1..50: mol_type = genomic DNA
atttgtaaccaccatagcaatacagagattttgtggtcattcacatgcat

SEQ ID NO: 23931 - protein, 580 aa, Klebsiella michiganensis
MKLYSYQRWSSAVQADGTSKARQSHAAEQYARDNNLEIVEIVDSGISGFRSLNSKNGALSQFLDAVDAGLIIKNSYLYVESLDRITRDEIDIALELFMGILRRGITIVTGMDNKIYTHAGIKGNPIDLLTSILLFTRAHEESKTKQQRTNGNALALIRRFQEGLPTTIKSIGSHPWWIDSSTDKFEAVRKHPILWKCAYDAVNLFLDGTSVFKVTKYLNETYPNAYKGKAWAIANVRKLRFNKAVYGTREITVDSKVYVLEHYYPALISEGQFLRLEKIRETTKYIGKVGEHTNNINLLSGMKIFRCGHCGGTMMAMRHNDTIRYLCEKGRGYNHDCKTWSLPGILVEHTLMLITTIAYINIQRKGGITREDYSHHISSTEELIADIGTKISRMTKLVSSGLGDIDEVINEMGELDKVRKQYVMELEVLQRKQLLSQDNSFEQLMMDFFTYAQYGVLQDPVHEYRNKLRDIVYSSIGEVKAWKVDRRLMISFQIKGDDEYYTFSAGDEPYNYIFYYGSPVQLGEDLTVQVAYELPADIKRRIRDYSNVYDASMKILGTANALLSVVNYPDLDGSLFWPRK

SEQ ID NO: 23932 - DNA, 50 bp, Klebsiella michiganensis
  source 1..50: mol_type = genomic DNA
atgtgtgtagaaaatcattttgggaatccaagagtaaattctacacatta

SEQ ID NO: 23933 - DNA, 40 bp, Klebsiella michiganensis
  source 1..40: mol_type = genomic DNA
tatcattagccatccgggtaatcctaagtttcccgttgat

SEQ ID NO: 23934 - DNA, 40 bp, Klebsiella michiganensis
  source 1..40: mol_type = genomic DNA
tatcattagccatccgggtattcctaagtttcccgttgat

SEQ ID NO: 23935 - DNA, 50 bp, Klebsiella michiganensis
  source 1..50: mol_type = genomic DNA
atgtgcctaatttctcactattggattccaagaggaaattatacaggcta

SEQ ID NO: 23936 - protein, 580 aa, Klebsiella grimontii; identical to SEQ ID NO: 23931

SEQ ID NO: 23937 - DNA, 50 bp, Klebsiella grimontii; identical to SEQ ID NO: 23932
  source 1..50: mol_type = genomic DNA

SEQ ID NO: 23938 - DNA, 40 bp, Klebsiella grimontii
  source 1..40: mol_type = genomic DNA
tatcattagccatccgggtaaccctaaatttcccgttgac

SEQ ID NO: 23939 - DNA, 40 bp, Klebsiella grimontii
  source 1..40: mol_type = genomic DNA
tatcattagccatccgggtatccctaaatttcccgttgac

SEQ ID NO: 23940 - DNA, 50 bp, Klebsiella grimontii; identical to SEQ ID NO: 23935
  source 1..50: mol_type = genomic DNA

SEQ ID NO: 23941 - protein, 543 aa, Flavonifractor plautii
MTIYELRDLLEHSDIADLPLRCSTYSRVSTEKETQAASLHNMTDDFRDYIERHKNWTFVKAFIDDGKSGLTTKKRKDFLNLLAAGAAGEYDLLVTGEISRFGRNTMEGLQNIQYLKDKGIPVIFLYDDLNTYDTDCDIQIQQKLVDAENESRKISKRVKRGHQKSIQKGHVLGCRMWGYKKVNCKLEIDEKTAPMVRRIFELYATNQYSMKEIEEIIFQEGYRNNNGNRLSHTTMSNIITNPKYKGYFVGGKVKVIDIFNKRQKFLPEDEWLMYKDEDGTTVPALVSEELWQAANEVFKRRSIDVKGRRNCSTHKNIYTGKLYCTEDGAPYYCKDVHYKGTNVSKWLCSHKINHGTASCRSIAIYESELNPIILDAFREFSKGADEILATYLEQYRQVMDDTAHYKTERERIAKELSSIDEKQDQLLDMKVSGDLTLDEFKRMMDKTRAQKAELEKALDSMANWEEIAEQMEAQVERLKRALSFKLEDLEDGMINRDFVDNFIKRIDVTPNSDRQISLKIHLLTGEIVQKELEKIKGRTGQLS

SEQ ID NO: 23942 - DNA, 50 bp, Flavonifractor plautii
  source 1..50: mol_type = genomic DNA
aaaggtcgtactggtcaattaagtaaacatatatgtccagtacgaacagt

SEQ ID NO: 23943 - DNA, 40 bp, Flavonifractor plautii
  source 1..40: mol_type = genomic DNA
cgttggcggccagatggtcaagaagatgatccaggcgtac

SEQ ID NO: 23944 - DNA, 40 bp, Flavonifractor plautii
  source 1..40: mol_type = genomic DNA
cgttggcggccagatggtcttgaagatgatccaggcgtac

SEQ ID NO: 23945 - DNA, 50 bp, Flavonifractor plautii
  source 1..50: mol_type = genomic DNA
aataatcattagagtcaatgaagtttacatacatgttaaggaagaaaact

SEQ ID NO: 23946 - protein, 548 aa, Bacillus halotolerans
MELKNIVNSYNITNILGYLRRSRQDMEREKRTGEDTLTEQKELMNKILTAIEIPYELKMEIGSGESIEGRPVFKECLKDLEEGKYQAIAVKEITRLSRGSYSDAGQIVNLLQSKRLIIITPYKVYDPRNPVDMRQIRFELFMAREEFEMTRERMTGAKYTYAAQGKWISGLAPYGYQLNKKTSKLDPVEEEAKVVELIFDLFLNGLNGKDYSYNAIATHLTNLQIPSPAGKKKWNRFTVKAILENEAYIGTVKYKVREKEKDGKRTIRPENEQIIVPDAHTPIIDKDQFEEANKKIENKIPLLPNRSDYKLNELAGVCICADCGGPLSKYEAKRKRQNKNGTESLYHVKVLRCLNNKCMNVRYNDVEEAILDYFRLFQSLNDKELTNLIEDMVHSHENKNNIKSQKQINEQFEQREKELQNKLNFIFDKYESGIYSDEIFLQRKATLDKEMKELKKAKDELNGLTDIKSGIDISKVRSQMKNLIQIYETSNDKEERNNLLRIALEKVIVKMTAKRKGPVPAQFEITPILRFGLLTGDKLTDTKESSFS

SEQ ID NO: 23947 - DNA, 50 bp, Bacillus halotolerans
  source 1..50: mol_type = genomic DNA
tagtcagtatctcgataaacagataaagctgtttttaaagatactgacta

SEQ ID NO: 23948 - DNA, 40 bp, Bacillus halotolerans
  source 1..40: mol_type = genomic DNA
catcaatatcagtacagataaagctgtgtcccctgtaaac

SEQ ID NO: 23949 - DNA, 40 bp, Bacillus halotolerans
  source 1..40: mol_type = genomic DNA
catcaatatcagtacagatacagctgtgtcccctgtaaac

SEQ ID NO: 23950 - DNA, 50 bp, Bacillus halotolerans
  source 1..50: mol_type = genomic DNA
tagttagtttatactaaaactgatacagttgagtttatttctactgtcta

SEQ ID NO: 23951 - protein, 509 aa, Vibrio cyclitrophicus
MVQRKQAISYQRFSSARQRNNSSLDRQSDSIKHWLKQNPDVDLIDQYVDEAMSGWSGKHIEQGSLGKLLQAIEEGIVQAETLILVEHFSRLSRQNIDKTEELLRKIWQHGITIVTIRDNGLYPPSTINDMPLRIRLIVEIEQAFKESEWRSAKVKGSYVKREKDAKNGVTPRMRRPFWLNKDGTLNDHHLVIKDIFNWYMEGLGQQRIIVKLKEKYQSVPSVQKMNPQTVMRWLTSDIVRGLWRGCKVYEAAVDDTLYFNVQTVHNSRMYHNVKPDRNWPLSGLLQCGVCGRGMSIQKSKDSLPVIRCSSKQRDQSCQRKTTFPYALVHLYMFNTVRKRASRLYTQKTVTKENALRLGHIDNDLVKLRKQIKEEKQLYDEASSEGKSGRLILKIMLETDERIQDLERERDSIQSSIEASNNLFISDEANNLVLTPRNFNLEMHKLGFKIVVGEYSLNTEGLSDKAPEWQYLGYSRKKRAYEWEVLGKTYFMPTASFNEDVLMLEDKEEI

SEQ ID NO: 23952 - DNA, 50 bp, Vibrio cyclitrophicus
  source 1..50: mol_type = genomic DNA
cacatgcacacctatatatttagtgaactaatagcgtaggtgtgcatatg

SEQ ID NO: 23953 - DNA, 40 bp, Vibrio cyclitrophicus
  source 1..40: mol_type = genomic DNA
acgcgatcacatgctttgtgagcttaaagcggctcaaagc

SEQ ID NO: 23954 - DNA, 40 bp, Vibrio cyclitrophicus
  source 1..40: mol_type = genomic DNA
acgcgatcacatgctttgtgtgcttaaagcggctcaaagc

SEQ ID NO: 23955 - DNA, 50 bp, Vibrio cyclitrophicus
  source 1..50: mol_type = genomic DNA
catatacactatactatagatagtgtacatatagtgtgtatgtgtatata

SEQ ID NO: 23956 - protein, 536 aa, Monoglobus pectinilyticus
MLRQTNQQPITALYPRLSHEDELQGESNSISNQKRILETYAKQNGFSNLRWYTDDGYSGANFQRPGFQAMLADIEAGKVGTVIVKDMSRLGRNYLQVGMYTEMIFPQKGVRFIAINDGVDSAQGDNDFAPLRNIFNEWLVRDTSKKIKAVKRSKGMSGKPITSKPVYGYLMDEDENFIIDEETAPVVKQIYNLCLAGNGPTKIARMLTEQQIPTPGTLEYRRTGSTRRYHPGYECKWATNTVVHILENREYTGCLVNFKTEKLSYKVKHSVENPPEKQVIFENHHEPIIDTQTWERVQELRKQRKRPNRYDEVGLFSGILFCADCGSVMYQQRYQTDKRKQDCYICGNYKKRTHDCTAHFIRTDLLTAGVLSNLRKVTSYAAKHEARFMKLLIEQNEDGGKRRNAAKKKELEAAEKRIAELSAIFKRLYEDSVTGRISDERFTELSADYEAEQRELKERAAAIQAELSKAQEATVNAEKFMNVVRRHTSFEELTPTLLREFVEKIVVHECSYDENKTRRQDIEIYYSFVGKVDLPE

SEQ ID NO: 23957 - DNA, 50 bp, Monoglobus pectinilyticus
  source 1..50: mol_type = genomic DNA
ttacttctttatcacacatcagcaaatgctcatggttaataaagaagtaa

SEQ ID NO: 23958 - DNA, 40 bp, Monoglobus pectinilyticus
  source 1..40: mol_type = genomic DNA
caacgataatcccggcgcaaagtcgcagggaattaaacag

SEQ ID NO: 23959 - DNA, 40 bp, Monoglobus pectinilyticus
  source 1..40: mol_type = genomic DNA
caacgataatcccggcgcaatgtcgcagggaattaaacag

SEQ ID NO: 23960 - DNA, 50 bp, Monoglobus pectinilyticus
  source 1..50: mol_type = genomic DNA
ttcattcttcttgccacataagcaatgcctcagggagagaaaaaaattaa

SEQ ID NO: 23961 - protein, 524 aa, Bacillus subtilis
MIKNLENIHHVAIYLRISQEKKGENVETLENHRQILIEFCEEHGFTYEEFGEVISGGKSEITQRVALKRLLDNIEKYDAIACFELTRISRNGLISQTVKQYCIDYDKPILTPYQSYDLANSETDRLLFDVGSMISSHEHSTIGKRSKANKMQMSKAGLHVSGNVPFGYKRNNETKKLEIDEEAAPTIRYIFQLHSEGYGSFKIRDILNNEGYKSATGKAFNLPSIKRIIRNPAYKGTLIFNNRKKIKRNGKFEYDNVETITVENAHPAIIPPDVWDKANQDRESRALKSISIREKPAIKSGVTLLKDLIFCGVCGRKMIIRKDTKSSTGYTLKKCEYLLPNGEKCPNCGKKLDAVIARVLTGLTKYADDLSQMEEQLRKNNASDLNEKNQLKLNQIDKAIMEVEQKQKNLIELAMEGLFSFEEIREKKQELVKRMDELKAKREEVINSINSLSVEEEIELIQEKRKLILSLREDMDQEYGNELLKRFIKKIHFTRVIPEDILKRSTRNSERQNYPFNIKFEFFD

SEQ ID NO: 23962 - DNA, 50 bp, Bacillus subtilis
  source 1..50: mol_type = genomic DNA
atacatacaataaaaaacgacatacctactgtgttttttaaaataagtat

SEQ ID NO: 23963 - DNA, 40 bp, Bacillus subtilis; identical to SEQ ID NO: 648
  source 1..40: mol_type = genomic DNA

SEQ ID NO: 23964 - DNA, 40 bp, Bacillus subtilis
  source 1..40: mol_type = genomic DNA
tacctcaggctatgcggttaatacctttgtcgttgacgca

SEQ ID NO: 23965 - DNA, 50 bp, Bacillus subtilis
  source 1..50: mol_type = genomic DNA
atacatctattatatacccacaaaaataatgtgtttaaaaaaagaaatat

SEQ ID NO: 23966 - protein, 524 aa, Bacillus subtilis
MIKNLENIHHVAIYLRISQEKKGENVETLENHRQILIEFCEEHGFTYEEFGEVISGGKSEITQRVALKRLLDNIEKYDAITCFELTRISRNGLISQTVKQYCIDYDKPILTPYQSYDLANSETDRLLFDVGSMISSHEHSTIGKRSKANKMQMSKAGLHVSGNVPFGYKRNNETKKLEIDEEAAPTIRYIFQLHSEGYGSFKIRDILNNEGYKSATGKAFNLPSIKRIIRNPAYKGTLIFNNRKKIKRNGKFEYDNVETITVENAHPAIIPPDVWDKANQDRESRALKSISIREKPAIKSGVTLLKDLIFCGVCGRKMIIRKDTKSSTGYTLKKCEYLLPNGEKCPNCGKKLDAVIARVLTGLTKYADDLSQMEEQLRKNNASDLNEKNQLKLNQIDKAIMEVEQKQKNLIELAMEGLFSFEEIREKKQELVKRMDELKAKREEVINSINSLSVEEEIELIQEKRKLILSLREDMDQEYGNELLKRFIKKIHFTRVIPEDILKRSTRNSERQNYPFNIKFEFFD

SEQ ID NO: 23967 - DNA, 50 bp, Bacillus subtilis; identical to SEQ ID NO: 23962
  source 1..50: mol_type = genomic DNA

SEQ ID NO: 23968 - DNA, 40 bp, Bacillus subtilis; identical to SEQ ID NO: 648
  source 1..40: mol_type = genomic DNA

SEQ ID NO: 23969 - DNA, 40 bp, Bacillus subtilis; identical to SEQ ID NO: 23964
  source 1..40: mol_type = genomic DNA

SEQ ID NO: 23970 - DNA, 50 bp, Bacillus subtilis; identical to SEQ ID NO: 23965
  source 1..50: mol_type = genomic DNA

SEQ ID NO: 23971 - protein, 487 aa, Bacillus cereus
MAYAVYVRVSSDKDEQVSSVENQIDICRYWLENNGFEWDKNAVYFDDGISGTAWLERHAMQLILAKARKKELDTVVFKSIHRLARDLKDALEIKEILLGHGVRLITIEEGYDSHYEGKNDMKFEMYAMFASQLPKTLSVSVTAALAAKVRRGGYTGGFVPYGYEIVDDKYAINEEEAELVREIFELYAQGFGYIKISNIINDQGKRTRKGAPWTYSTLCKMIKNPTYKGDYTMQKYGTVKVNGKKKKVINPEEKWVVFENHHPAIVSRELWDKVNNKDPNKFQKKRRISTTNELRGITFCAHCGTAMSKRNNVRVNKNGTVKEYSYMICDWSRVTARRECVKHVPIHYKDLRALVLSKLKEKESVLDKEFYSDEDQLDVKLKKLNRDIKDLKFKRERLLDLYLEDERIDKDTFTIRDAKLEKEIELKELEMRKANNIELQMKERQEIRDAFALLEESKDLNSAFKKLIKRIEVAQDGAVDIHYRFAE

SEQ ID NO: 23972 - DNA, 50 bp, Bacillus cereus
  source 1..50: mol_type = genomic DNA
tgtcttattgacataccgcaagtgcggtgtataattatggcatacaaata

SEQ ID NO: 23973 - DNA, 40 bp, Bacillus cereus
  source 1..40: mol_type = genomic DNA
gcgtttgagggagcgagtgcggttggtaagagcacaacgt

SEQ ID NO: 23974 - DNA, 40 bp, Bacillus cereus
  source 1..40: mol_type = genomic DNA
gcgtttgagggagcgagtgatgttggtaagagcacaacgt

SEQ ID NO: 23975 - DNA, 50 bp, Bacillus cereus
  source 1..50: mol_type = genomic DNA
tgtcttattattaacttacaagtgatttttatatattctggatacaaatc

SEQ ID NO: 23976 - protein, 452 aa, Listeria monocytogenes; identical to SEQ ID NO: 7751

SEQ ID NO: 23977 - DNA, 50 bp, Listeria monocytogenes
  source 1..50: mol_type = genomic DNA
tttagttcctcgttttctctcgttggacggagaataaatgagatactaat

SEQ ID NO: 23978 - DNA, 40 bp, Listeria monocytogenes; identical to SEQ ID NO: 1298
  source 1..40: mol_type = genomic DNA

SEQ ID NO: 23979 - DNA, 40 bp, Listeria monocytogenes
  source 1..40: mol_type = genomic DNA
tttcggatcaagctatgaggcacgcaaagagggaactaaa

SEQ ID NO: 23980 - DNA, 50 bp, Listeria monocytogenes
  source 1..50: mol_type = genomic DNA
tttaattctaaaccctgtcttgttgcaagcaggataatactaatactaat

SEQ ID NO: 23981 - protein, 516 aa, Vibrio parahaemolyticus
MSNNKALAFLYIRFSTKKQEQGDSIRRQIDAAEAWCKEKDIELSAQTFEDLGVSAFKEGGKRPALEDMLFAIEQGRIPRNSYLLLEDHDRLSRRGWLHTQTLVHKVVKLGVKIVMLRSRTVYDQSNINNISDNIMLMFSADRAFQESERKSQLIKASRNNARKNREVTGKLPAWIARNGDEFIFNDKLTTIQELIGCKLSGKSHQATAKHLNSLGMTTGSGSVWSASGVRAIIQNHALYGAKAYFDTGADGRMNAKPIEIVPDIFPQLISFQQYQSLNVKKASGRTSKRGAFTQLLKCGRCGSAMTTRSSNYKGQPRTYKMCVRATEGSCSQVERVREPERYLNDVLRKLTYQISKGAYVSRTGEYEKQLETLNETKDKLISLGLTDALTDVYVDMNRVRELIEDSKIADQANIEPDVDFAYVCDIENIEERNTELRKLLSKIVFYCISKRGQTSQWKVVIHQVNGFTISFLLDQQYGFGNTNVKFVADKQQYIKDTQVDMYAWEDEYVDAILDNV

SEQ ID NO: 23982 - DNA, 50 bp, Vibrio parahaemolyticus
  source 1..50: mol_type = genomic DNA
gtgcattgaaatgaacatgttactaaagtactatacagattatgatgcac

SEQ ID NO: 23983 - DNA, 40 bp, Vibrio parahaemolyticus; identical to SEQ ID NO: 4428
  source 1..40: mol_type = genomic DNA

SEQ ID NO: 23984 - DNA, 40 bp, Vibrio parahaemolyticus; identical to SEQ ID NO: 5479
  source 1..40: mol_type = genomic DNA

SEQ ID NO: 23985 - DNA, 50 bp, Vibrio parahaemolyticus; identical to SEQ ID NO: 5480
  source 1..50: mol_type = genomic DNA

SEQ ID NO: 23986 - protein, 522 aa, Mycobacteroides abscessus
MTAMQVRAIIGARVSIFTDGKESQITQRSKGTAYAESQGWTVVGTFEDLDVSAIKQSPWDRPDLKRWLTDRADDWDALVFAKTDRVFRSAADCVKLSEWCRDHKKILVLVDDGIKLDYFHPDSQQDAFAGAMSKVFLILASVFAEIEGQRFVQRALDRVTQYRHQPRWAYGVPPYGFQVVDRPEGGKTLGHDLEAQQVLQGIATRLLSGDSLTRITADLNDTGVLSPADRLRQRTGKELRGSRWTVITVQTILTNPATQGVKTAKGKPVLDAGGEPVRVGPPSFDPETWGRIHSELAQRSQSGQQRRHSDNPLLGVAKCGVCGKNMRHFQRTKGERHYRYYICGSTPKACPGVLINADNAELAVETSFLDVHTSRRIKERVWRAGSDHSAELEQTTNTIKALWEDRALGLFTTPEDQDMFRQQMAALVAKRDALALTPVIKAGWVDVETEQTYGAVWPDATPVERRKMLTDAGMKLTVYRANEYETYVDLDKAIGEGAVGEDLHNELEARAADERRRWGIPD

SEQ ID NO: 23987 - DNA, 50 bp, Mycobacteroides abscessus
  source 1..50: mol_type = genomic DNA
acactacggagtgtgtataagtatgaatactgttatacactccgcaaata

SEQ ID NO: 23988 - DNA, 40 bp, Mycobacteroides abscessus
  source 1..40: mol_type = genomic DNA
ggactcggtgtgggtctacgaccactttcacaccgtgccg

SEQ ID NO: 23989 - DNA, 40 bp, Mycobacteroides abscessus
  source 1..40: mol_type = genomic DNA
ggactcggtgtgggtctactgccactttcacaccgtgccg

SEQ ID NO: 23990 - DNA, 50 bp, Mycobacteroides abscessus
  source 1..50: mol_type = genomic DNA
acattactgcaaaagtataatcattgatattgttttttcttctgtaaaaa

SEQ ID NO: 23991 - protein, 534 aa, Raoultella ornithinolytica
MDEKVYKYADVKNNPTDLIISLLMFTRAHDESLTKKNRVEAQARALIRHNLSRQPGTAAKAIESIGQNVWWVDTKSGNVEPHPIYFNTAQKIIELKQSGETLLGIQRYLNEHYPAPRKRVYKNQEGNVQPPKTEKWGQHLLRTFLNPTVHGQKVFTLDKRDESGAVIYDTETDEALKETYTIPDYYPALMSEIDYLTLSQLDHHRAVTRSSSKHPEGNPEPEIPLLSGLGILFCGNCSSFMFKSGSSKNKYRYICGSKIVQGKPCGKKGFTSYQLEHAVLQLIADHVWTNHLEDKTAWYESEIAKESERIEKLLKLAILTDNIDALAEQINAHNKIKEQLENEFKRYKISRSETQISGWDQFKNFNVHDTKNPDRKRIRLRVKQAIKRIDCYDINDRCGHFSVIFADDKKQRIVIKFNRNRSPGTTYVDRATIKNDEILKMQGLVLHSFIDELIDPIGFALQVKENHEFSKLNPTFITELEDDLHQQTEDTFATYVVMSNGDSKATVTVDSVVHEINSLEDIDKFEVAEKSSST

SEQ ID NO: 23992 - DNA, 50 bp, Raoultella ornithinolytica
  source 1..50: mol_type = genomic DNA
actatgagtaattgactattaggtttgccaaatatacaattgttcactgt

SEQ ID NO: 23993 - DNA, 40 bp, Raoultella ornithinolytica
  source 1..40: mol_type = genomic DNA
gcagcgcgtgttagcaggcttgccgtcaggcattccgggg

SEQ ID NO: 23994 - DNA, 40 bp, Raoultella ornithinolytica
  source 1..40: mol_type = genomic DNA
gcagcgcgtgttagcaggcgtgccgtcaggcattccgggg

SEQ ID NO: 23995 - DNA, 50 bp, Raoultella ornithinolytica
  source 1..50: mol_type = genomic DNA
aatattgctgcttcactattggctgtgccaaatataatttttctcactat

SEQ ID NO: 23996 - protein, 578 aa, Mesorhizobium japonicum
MSTDIQLKGDSLRRQTERSKQYADDHDLQLVEDFRLEDIGVSAFKGDNLSTGELGKFLEAVKAGRIPKGSYLLVESFDRLSRQKLSAAVPLFFDITSNGINLVTLSDNQLYKAGEAEFAQLIISIAMMARANEESEIKSQRLSAAWDAKRRAIDDKKLTGLCPAWLELSDDRKNFGVLEDRAQIVRRIFEDSASGQGSFVITRRLNDLGTHAFGRSNGWVQSYVTKILQTRAVLGEFQPHTKQNGKRIPFGDPIPGYYPKIVDEELFLRAQFARGKRRIEGGGRKGEALRNLFTHLAKCGYCGSPMHFLNKGFGPGGGTYLKCSQALRGLDCVSTPWRYQDFERSFFLYVKEIDLGEMLAASATKSDAIALDDRLTSLKEKRNQLEVQRERSYALINQAISIDFVSAKLKECESDLAGVDVQISEVELQLSAIREQQSISPDELHRLIDQLQVTEGPDAFAQRTMLAGRLREIVSDLRLDVEGSKPRLKKAEALFDQAGTDPTERQRILEVIERTNLEAKRYNRSFSVVLADGVSRRIVLNNEDPTDFVAEVTVDAAGNPAVSEGGTDLQTLFELPSE

SEQ ID NO: 23997 - DNA, 50 bp, Mesorhizobium japonicum
  source 1..50: mol_type = genomic DNA
tgtcgtttaattagccacaatgttaggacattgtgccgtattaaaatatt

SEQ ID NO: 23998 - DNA, 40 bp, Mesorhizobium japonicum
  source 1..40: mol_type = genomic DNA
tccgggcggcccgaccatcagcagattgtggccgccggcc

SEQ ID NO: 23999 - DNA, 40 bp, Mesorhizobium japonicum
  source 1..40: mol_type = genomic DNA
tccgggcggcccgaccatcaacagattgtggccgccggcc

SEQ ID NO: 24000 - DNA, 50 bp, Mesorhizobium japonicum
  source 1..50: mol_type = genomic DNA
tgtggtttaatgaagcccactgctaagacgtactgctttgaaaaaatatt

SEQ ID NO: 24001 - protein, 655 aa, Vibrio parahaemolyticus
MKPTIITYLRYSSKQQADGLSEFRQSEINRKFVEKFCEEHGVDLNEVISLKDLGVSAYRGLNLTLGSFSQTIKKFKSGEIKKRFNEDGEINTYLIVESLDRITRTGPFKSTQIFTELLEYTNIVVLADGEKKIYSKKSIDSTHGMMDLFMALISLQRSHTESLMKEYRSRKSWEKKREDLLNYFTLPEDEREGLERPKNATAMCPFWLTAKKDGRGYDFIPENKKVMDFLIEKLLDGNGMTRAVRLLNDEIDNGNLKPKLKKANRKTRHFRAAAYSGLFNSVISTVKGDYLLTESYYPTEDDVEQGKYPEKHLGKRVRKEVAVLKNYYPALMTESQAAYIRKMMDERRTSGTKPNKSIKNLAQGILRCPYCNSTYIKSKDRRNVYLRCNLAREGLCNAKVIKHDVFEHNLLQFCKGLNINKIISNQACDQVLDSSLKELEQKMIPLKVRKSELEDDIEQIVKNISSIKIPSLLEKVQDDYLAKENELKKVVQEIDLIETSIMKLQQQIAMSDGDNSLQELIDLTLDESADDEIRQRFNVELKKVVKSMTVLYRDTEDNPFGYHMISIQFLDGVHRLIPVHEKMTDKIHNILPYQDAVKVDSVDFSETVILPTDYLEGLESGKYPQLDGMAKYYQENPAKYLKLKYQIDHSQEIYE

SEQ ID NO: 24002 - DNA, 50 bp, Vibrio parahaemolyticus
  source 1..50: mol_type = genomic DNA
ggcagtacttatttctcaccaatggagatggttgaactatttgtgcagta

SEQ ID NO: 24003 - DNA, 40 bp, Vibrio parahaemolyticus
  source 1..40: mol_type = genomic DNA
aacggcaccaagcccaatggaaatggtgctaatggccgct

SEQ ID NO: 24004 - DNA, 40 bp, Vibrio parahaemolyticus
  source 1..40: mol_type = genomic DNA
aacggcaccaagcccaatgtcaatggtgctaatggccgct

SEQ ID NO: 24005 - DNA, 50 bp, Vibrio parahaemolyticus
  source 1..50: mol_type = genomic DNA
tgcagtactcctcactcagcattttcaatggttgaagaggactttcagca

SEQ ID NO: 24006 - protein, 542 aa, Pseudomonas reactans
MHSLHGVQSIMPVKNTLPRAFSDVFRDDETINVYSYIRFSSKAQALGFGEVRQLEQLNRFFEQYPQARQVERYEDLGVSAFKGKNLKSGQLARFVERIKSKEILPNALLLVESFDRISRMGGYDALELIISIIQSDCSIYTLFDNRLYSKRKKDSSVDISLIQNILERANDESKSKSERISDAKARNLEKGENGGIITKRCPFWISFVDDKFVLNEHAKAVKRMTELCFDFGFQSIAKELNKENHPKKYTDSTIGKVLHKHAIYGSFLAMKNDENGNRTIVNKEIRNYYPAIISESEFHRISEKLKERQDPSLAGRKAQEFRNILRGLVFCKCGSTFRFHAQKSLYVDLVCHSSTLGQCKYALPGKGIRHRYARIEEIFLAYQSLIPFHKIIVKNEDIKALEKEHQEILGQIIIKEKALANNFSILEKSSDSAQKYITNRIDEVSQELDKLKADEHKLNLQINSLHLTTKSDLKSIEIFRLLITEKGRIKINNFLHSQKIKLIITPVKKKFFSLDIYHDEKHIDTIDVTPDGYAAHHKPHLK

SEQ ID NO: 24007 - DNA, 50 bp, Pseudomonas reactans
  source 1..50: mol_type = genomic DNA
attctacaaaaagagccagtcattgcaatgacaggaggcttttgtataaa

SEQ ID NO: 24008 - DNA, 40 bp, Pseudomonas reactans; identical to SEQ ID NO: 23028
  source 1..40: mol_type = genomic DNA

SEQ ID NO: 24009 - DNA, 40 bp, Pseudomonas reactans
  source 1..40: mol_type = genomic DNA
ttccagcatgccgatgacgtcgttcatcggtgtgcgtatt

SEQ ID NO: 24010 - DNA, 50 bp, Pseudomonas reactans
  source 1..50: mol_type = genomic DNA
attctacatgtctaatctgtcacttcaattacagtatttacttgtacaca

SEQ ID NO: 24011 - protein, 496 aa, Coprococcus comes
MYEEIKTACLYLRYSSSNQTEQSIEGQMHVCQDFCKRHNIRIVEMYIDRATSASKDIEKRVEFLKMIKDSEKGNFNAVIVYKLDRFARSRYDSATYKYRLKRNGVQLISATENITQDPEGIILESVLEGMAEFYSAELSQKINRGMRESAMKHNSIGGAIPLGYKTVDKKLVIDETTAPIVREAFQMYADGESVAEICRTFNNRGYKTSKGTRFGKSSFTKIFRNEKYIGVYKYHDYRAEDVIPPIIDKDLWDRVQVRVGKIKKAPARNKARHTYLLTGKLFCGHCGSAMNADGNSQGYLYYRCYGKKNLDKQCNKRNMEKNLIERLVAQDAMSFLTDEYIEKIATIACDRNKQEIESDSPIPVIRDRIRQVDVSLNNLLKAIETGSAPDMLVKRMGELETEKKDMEVQLKKEMAHQVYIDKEQVIFWLEKFREGDINDEEFCQTVIDLFVNSVTVWDEPDDKFKITIAYNLTSIPQKTYRLSKDGRLSDYASNTP

SEQ ID NO: 24012 - DNA, 50 bp, Coprococcus comes
  source 1..50: mol_type = genomic DNA
ttatcggattacgcttccaatactccaccattgagtgcaaatccaatgat

SEQ ID NO: 24013 - DNA, 40 bp, Coprococcus comes
  source 1..40: mol_type = genomic DNA
catggcatgctcatcacctccatgaaggaaaaccaacgca

SEQ ID NO: 24014 - DNA, 40 bp, Coprococcus comes
  source 1..40: mol_type = genomic DNA
catggcatgctcatcacctttatgaaggaaaaccaacgca

SEQ ID NO: 24015 - DNA, 50 bp, Coprococcus comes
  source 1..50: mol_type = genomic DNA
tccccagatacaggtttcaattccttaccatttagtctggttccattgat

SEQ ID NO: 24016 - protein, 640 aa, Roseburia hominis
MRRKKDKSNGITALYERLSRDDDNAGESNSIVHQKQILEDYAMKHGFTNLVHFTDDGWSGATFDRPSWNRLVEGVKNGEITACICKDMSRIGRDHLQVGFFTDILFREKEVRFIAINNGIDSDRQETSEFAPFLNIMNEWFVRDTSKKIKAVLKSRGSSGNAHTSNIPPYGYLKDPENPDHWIIDEEAAEVVRRIYRMTIEGKGPYQIARELSEEKIERPSYYLGKKGLGNHASNYDKENPYMWRGNQVTTLIARPEYIGKTVNFRTFKNSYKDKKTKRADKEDWVVFDDTQEPIVDEETWLLAQKLRQNVRKADPMGEPNVLTGKIYCADCGAPMYNHRQRKGRERIYYTAKGEKRTSHSNPADCYECSTYNLGCQRYDRHCTCHHISTKALKSIILKTIQETCHYVSLNEREFVYSLQEESAMKDIAVSETVKKRIERNQKRVHELDMLIRKIYEDNVIGRLPDRLFQSMLTDYENEQNELNKIIETDTADMQRIIGGQNNVERFLKLVKKYENITELTPAMINEFIDKILVHEPQGKGADRTTEVEIYLNYVGQFQVPVEQHEPTEEERIAAEKEAERLRRKRESNRKYMKKIREKSKEFAEHERIAEEKSSDSNVCVEQNATSKSNRQKVKGEKIA

SEQ ID NO: 24017 - DNA, 50 bp, Roseburia hominis
  source 1..50: mol_type = genomic DNA
gcacccccttgacaaaagctttcagatgtgatattttgtgagcgtaagga

SEQ ID NO: 24018 - DNA, 40 bp, Roseburia hominis
  source 1..40: mol_type = genomic DNA
tccgcctcagcactttacggaggacaccctattgtccgcg

SEQ ID NO: 24019 - DNA, 40 bp, Roseburia hominis
  source 1..40: mol_type = genomic DNA
tccgcctcagcactttacgaaggacaccctattgtccgcg

SEQ ID NO: 24020 - DNA, 50 bp, Roseburia hominis
  source 1..50: mol_type = genomic DNA
gctcttcctcatgcaaagctttcaaatgtgctttttcttctgtctaaata

SEQ ID NO: 24021 - protein, 640 aa, Anaerobutyricum soehngenii
MRRKKDKSNGITALYERLSRDDDNAGESNSIVHQKQMLEDYAMKHGFTNLVHFTDDGWSGATFDRPSWNRLVEGVKNGEITACICKDMSRIGRDHLQVGFFTDILFREKEVRFIAINNGIDSDRQETSEFAPFLNIMNEWFVRDTSKKIKAVLKSRGSSGNAHTSNIPPYGYLKDPENPDHWIIDEEAAEVVRRIYRMTIEGKGPYQIARELSEEKIERPSYYLGKKGLGNHASNYDKENPYMWRGNQVTTLIARPEYIGKTVNFRTFKNSYKDKKTKRADKEDWVVFDDTQEPIVDEETWLLAQKLRQNVRKADPMGEPNVLTGKIYCADCGAPMYNHRQRKGRERIYYTAKGEKRTSYSNPADCYECSTYNLAYQKYDRHCTCHHISTKALKSIILKTIQETCHYVSLNEREFVYSLQEESAMKDIAVSETVKNRIERNQKRVHELDMLIRKIYEDNVIGRLPDRLFQSMLTDYENEQNELNKIIETDTADMQRIIGGQNNVERFLKLVKKYENITELTPAMINEFIDKILVHEPQGKGADRTTEVEIYLNYVGQFQVPVEQHEPTEEERIAAEKEAERLRRKRESNRKYMKKIREKSKEFAEHERIAEEKSSDSNVCVEQNATSKSNRQKVKGEKIA

SEQ ID NO: 24022 - DNA, 50 bp, Anaerobutyricum soehngenii; identical to SEQ ID NO: 24017
  source 1..50: mol_type = genomic DNA

SEQ ID NO: 24023 - DNA, 40 bp, Anaerobutyricum soehngenii
  source 1..40: mol_type = genomic DNA
tccgccgaaaccattcaatgaagatacgctcctcgctgca

SEQ ID NO: 24024 - DNA, 40 bp, Anaerobutyricum soehngenii
  source 1..40: mol_type = genomic DNA
tccgccgaaaccattcaataaagatacgctcctcgctgca

SEQ ID NO: 24025 - DNA, 50 bp, Anaerobutyricum soehngenii; identical to SEQ ID NO: 24020
  source 1..50: mol_type = genomic DNA

SEQ ID NO: 24026 - protein, 640 aa, Blautia massiliensis
MRRKKDRSNGITALYERLSRDDDNAGESNSIVHQKQMLEDYAIKHGFTNLVHFTDDGWSGATFDRPSWNRLVEGVKNGEITACICKDMSRIGRDHLQVGFFTDILFREKEVRFIAINNGIDSDRQETSEFAPFLNIMNEWFVRDTSKKIKAVLKSRGSSGNAHTSNIPPYGYLKDPENPDHWIIDEEAAEVVRRIYRMTIEGKGPYQIARELSEEKIERPSYYLGKKGLGNHASNYDKENPYMWRGNQVTTLIARPEYIGKTVNFRTFKNSYKDKKTKRADKEDWVVFDDTQEPIVDEETWLLAQKLRQNVRKADPMGEPNVLTGKIYCADCGAPMYNHRQRKGRERIYYTAKGEKRTSYSNPADCYECSTYNLAYQKYDRHCTCHHISTKALKSIILKTIQETCHYVSLNEREFVYSLQEESAMKDIAASETVKNRIERNQKRVHELDMLIRKIYEDNVIGRLPDRLFQSMLTDYENEQNELNKIIETDTADMQRIIGGQNNVERFLKLVKKYENITELTPAMINEFIDKILVHEPQGKGADRTTEVEIYLNYVGQFQVPVEQHEPTEEERIAAEKEAERLRRKRESNRKYMKKIREKSKEFAEHERIAEEKSSDSNVCVEQNATSKSNRQKVKGEKIA

SEQ ID NO: 24027 - DNA, 50 bp, Blautia massiliensis; identical to SEQ ID NO: 24017
  source 1..50: mol_type = genomic DNA

SEQ ID NO: 24028 - DNA, 40 bp, Blautia massiliensis
  source 1..40: mol_type = genomic DNA
accgccgaaacattatacggaggatacgctccttagtgcc

SEQ ID NO: 24029 - DNA, 40 bp, Blautia massiliensis
  source 1..40: mol_type = genomic DNA
accgccgaaacattatacgaaggatacgctccttagtgcc

SEQ ID NO: 24030 - DNA, 50 bp, Blautia massiliensis; identical to SEQ ID NO: 24020
  source 1..50: mol_type = genomic DNA

SEQ ID NO: 24031 - protein, 640 aa, Clostridium innocuum
MRRKKDRSNGITALYERLSRDDDNAGESNSIVHQKQMLEDYAMKHGFTNLVHFTDDGWSGATFDRPSWNRLVEGVKNGEITACICKDMSRIGRDHLQVGFFTDILFREKEVRFIAINNGIDSDRQETSEFAPFLNIMNEWFVRDTSKKIKAVLKSRGSSGNAHTSNIPPYGYLKDPENPDHWIIDEEAAEVVRRIYRMTIEGKGPYQIARELSEEKIERPSYYLGKKGLGNHASNYDKENPYMWRGNQVTTLIARPEYIGKTVNFRTFKNSYKDKKTKRADKEDWVVFDDTQEPIVDEETWLLAQKLRQNVRKADPMGEPNVLTGKIYCADCGAPMYNHRQRKGRERIYYTAKGEKRTSHSNPADCYECSTYNLGCQRYDRHCTCHHISTKALKSIILKTIQETCHYVSLNEREFVYSLQEESAMKDIAVSETVKNRIERNQKRVHELDMLIRKIYEDNVIGRLPDRLFQSMLTDYENEQNELNKIIETDTADMQRIIGGQNNVERFLKLVKKYENITELTPAMINEFIDKILVHEPQGKGADRTTEVEIYLNYVGQFQVPVEQHEPTEEERIAAEKEAERLRRKRESNRKYMKKIREKSKEFAEHERIAEEKSSDSNVCVEQNATSKSNRQKVKGEKIA

SEQ ID NO: 24032 - DNA, 50 bp, Clostridium innocuum; identical to SEQ ID NO: 24017
  source 1..50: mol_type = genomic DNA

SEQ ID NO: 24033 - DNA, 40 bp, Clostridium innocuum
  source 1..40: mol_type = genomic DNA
accgccgaaacactatacggaggacacactgctgtccgct

SEQ ID NO: 24034 - DNA, 40 bp, Clostridium innocuum
  source 1..40: mol_type = genomic DNA
accgccgaaacactatacgaaggacacactgctgtccgct

SEQ ID NO: 24035 - DNA, 50 bp, Clostridium innocuum; identical to SEQ ID NO: 24020
  source 1..50: mol_type = genomic DNA

SEQ ID NO: 24036 - protein, 640 aa, Ruminococcus lactaris
MRRKKDKSNGITALYERLSRDDDNAGESNSIVHQKQMLEDYAMKHGFTNLVHFTDDGWSGATFDRPSWNRLVEGVKNGEITACICKDMSRIGRDHLQVGFFTDILFREKEVRFIAINNGIDSDRQETSEFAPFLNIMNEWFVRDTSKKIKAVLKSRGSSGNAHTSNIPPYGYLKDPENPDHWIIDEEAAEVVRRIYRMTIEGKGPYQIARELSEEKIERPSYYLGKKGLGNHASNYDKENPYMWRGNQVTTLIARPEYIGKTVNFRTFKNSYKDKKTKRADKEDWVVFDDTQEPIVDEETWMLAQKLRQNVRKADPMGEPNVLTGKIYCADCGAPMYNHRQRKGRERIYYTTKGEKRISHSNPADCYECSTYNLAYQKYDRHCTCHHISTKALKSIILKTIQETCHYVSLNEQEFVYSLQEESAMKDIAVSETVKKRIERNQKRVHELDMLIRKIYEDNVIGRLPDRLFQSMLTDYENEQNELNKIIETDTADMQRIIGGQNNVERFLKLVKKYENITELTPAMINEFIDKILVHEPQGKGADRTTEVEIYLNYVGQFQVPVEQHEPTEEERIAAEKEADRLRRKRESNRKYMKKIREKSKKFAEHERIAEENNSDSKLCAEQNATSKSNRQKVKGEKIA

SEQ ID NO: 24037 - DNA, 50 bp, Ruminococcus lactaris; identical to SEQ ID NO: 24017
  source 1..50: mol_type = genomic DNA

SEQ ID NO: 24038 - DNA, 40 bp, Ruminococcus lactaris
  source 1..40: mol_type = genomic DNA
tggcattaggagaaatccagatgtgggtggactttttgta

SEQ ID NO: 24039 - DNA, 40 bp, Ruminococcus lactaris
  source 1..40: mol_type = genomic DNA
tggcattaggagaaatccaaatgtgggtggactttttgta

SEQ ID NO: 24040 - DNA, 50 bp, Ruminococcus lactaris; identical to SEQ ID NO: 24020
  source 1..50: mol_type = genomic DNA

SEQ ID NO: 24041 - protein, 640 aa, Ruminococcus lactaris
MRRKKDRSNGITALYERLSRDDDNAGESNSIVHQKQMLEDYAIKHGFTNLVHFTDDGWSGATFDRPSWNRLVEGVKNGEITACICKDMSRIGRDHLQVGFFTDILFREKEVRFIAINNGIDSDRQETSEFAPFLNIMNEWFVRDTSKKIKAVLKSRGSSGNAHTSNIPPYGYLKDPENPDHWIIDEEAAEVVRRIYRMTIEGKGPYQIARELSEEKIERPSYYLGKKGLGNHASNYDKENPYMWRGNQVTTLIARPEYIGKTVNFRTFKNSYKDKKTKRADKEDWVVFDDTQEPIVDEETWMLAQKLRQNVRKADPMGEPNVLTGKIYCADCGAPMYNHRQRKGRERIYYTTKGEKRISHSNPADCYECSTYNLAYQKYDRHCTCHHISTKALKSIILKTIQETCHYVSLNEQEFVYSLQEESAMKDIAVSETVKKRIERNQKRVHELDMLIRKIYEDNVIGRLPDRLFQSMLTDYENEQNELNKIIETDTADMQRIIGGQNNVERFLKLVKKYENITELTPAMINEFIDKILVHEPQGKGADRTTEVEIYLNYVGQFQVPVEQHEPTEEERIAAEKEADRLRRKRESNRKYMKKIREKSKKFAEHERIAEENNSDSKLCAEQNATSKSNRQKVKGEKIA

SEQ ID NO: 24042 - DNA, 50 bp, Ruminococcus lactaris; identical to SEQ ID NO: 24017
  source 1..50: mol_type = genomic DNA

SEQ ID NO: 24043 - DNA, 40 bp, Ruminococcus lactaris
  source 1..40: mol_type = genomic DNA
gccaccgaaacagtacacagaagataccctgctttctgcg

SEQ ID NO: 24044 - DNA, 40 bp, Ruminococcus lactaris
  source 1..40: mol_type = genomic DNA
gccaccgaaacagtacacaaaagataccctgctttctgcg

SEQ ID NO: 24045 - DNA, 50 bp, Ruminococcus lactaris; identical to SEQ ID NO: 24020
  source 1..50: mol_type = genomic DNA

SEQ ID NO: 24046 - protein, 640 aa, Blautia obeum
MRRKKDKSNGITALYERLSRDDDNAGESNSIVHQKQMLEDYAIKHGFTNLVHFTDDGWSGATFDRPSWNRLVEGVKNGEITACICKDMSRIGRDHLQVGFFTDILFREKEVRFIAINNGIDSDRQETSEFAPFLNIMNEWFVRDTSKKIKAVLKSRGSSGNAHTSNIPPYGYLKDPENPDHWIIDEEAAEVVRRIYRMTIEGKGPYQIARELSEEKIERPSYYLGKKGLGNHASNYDKENPYMWRGNQVTTLIARPEYIGKTVNFRTFKNSYKDKKTKRADKEDWVVFDDTQEPIVDEETWLLAQKLRQNVRKADPMGEPNVLTGKIYCADCGAPMYNHRQRKGRERIYYTAKGEKRTSYSNPADCYECSTYNLAYQKYDRHCTCHHISTKALKSIILKTIQETCHYVSLNEQEFVYSLQEESAMKDIAVSETVKNRIERNQKRVHELDMLIRKIYEDNVIGRLPDRLFQSMLTDYENEQNELNKIIETDTADMQRIIGGQNNVERFLKLVKKYENITELTPAMINEFIDKILVHEPQGKGADRTTEVEIYLNYVGQFQVPVEQHEPTEEERIAAEKEAERLRRKRESNRKYMKKIREKSKEFAEHERIAEEKSSDSNVCVEQNATSKSNRQKVKGEKIA

SEQ ID NO: 24047 - DNA, 50 bp, Blautia obeum; identical to SEQ ID NO: 24017
  source 1..50: mol_type = genomic DNA

SEQ ID NO: 24048 - DNA, 40 bp, Blautia obeum
  source 1..40: mol_type = genomic DNA
accgccgaaacattatacggaagatacgcttcttagtgcc

SEQ ID NO: 24049 - DNA, 40 bp, Blautia obeum
  source 1..40: mol_type = genomic DNA
accgccgaaacattatacgaaagatacgcttcttagtgcc

SEQ ID NO: 24050 - DNA, 50 bp, Blautia obeum; identical to SEQ ID NO: 24020
  source 1..50: mol_type = genomic DNA

SEQ ID NO: 24051 - protein, 640 aa, Coprococcus comes
MRRKKDRSNGITALYERLSRDDDNAGESNSIVHQKQMLEDYAMKHGFTNLVHFTDDGWSGATFDRPSWNRLVEGVKNGEITACICKDMSRIGRDHLQVGFFTDILFREKEVRFIAINNGIDSDRQETSEFAPFLNIMNEWFVRDTSKKIKAVLKSRGSSGNAHTSNIPPYGYLKDPENPDHWIIDEEAAEVVRRIYRMTIEGKGPYQIARELSEEKIERPSYYLGKKGLGNHASNYDKENPYMWRGNQVTTLIARPEYIGKTVNFRTFKNSYKDKKTKRADKEDWVVFDDTQEPIVDEETWLLAQKLRQNVRKADPMGEPNVLTGKIYCADCGAPMYNHRQRKGRERIYYTAKGEKRTSYSNPADCYECSTYNLAYQKYDRHCTCHHISTKALKSIILKTIQETCHYVSLNEREFVYSLQEESAMKDIAVSETVKNRIERNQKRVHELDMLIRKIYEDNVIGRLPDRLFQSMLTDYENEQNELNKIIETDTADMQRIIGGQNNVERFLKLVKKYENITELTPAMINEFIDKILVHEPQGKGADRTTEVEIYLNYVGQFQVPVEQHEPTEEERIAAEKEAERLRRKRESNRKYMKKIREKSKEFAEHERIAEEKSSDSNVCVEQNATSKSNRQKVKGEKIA

SEQ ID NO: 24052 - DNA, 50 bp, Coprococcus comes; identical to SEQ ID NO: 24017
  source 1..50: mol_type = genomic DNA

SEQ ID NO: 24053 - DNA, 40 bp, Coprococcus comes
  source 1..40: mol_type = genomic DNA
gccaccgaaacagtacacagaagataccctgctttctgct

SEQ ID NO: 24054 - DNA, 40 bp, Coprococcus comes
  source 1..40: mol_type = genomic DNA
gccaccgaaacagtacacaaaagataccctgctttctgct

SEQ ID NO: 24055 - DNA, 50 bp, Coprococcus comes; identical to SEQ ID NO: 24020
  source 1..50: mol_type = genomic DNA

SEQ ID NO: 24056 - protein, 640 aa, Faecalibacterium prausnitzii
MRRKKDKSNGITALYERLSRDDDNAGESNSIVHQKQMLEDYAMKHGFTNLVHFTDDGWSGATFDRPSWNRLVEGVKNGEITACICKDMSRIGRDHLQVGFFTDILFREKEVRFIAINNGIDSDRQETSEFAPFLNIMNEWFVRDTSKKIKAVLKSRGSSGNAHTSNIPPYGYLKDPENPDHWIIDEEAAEVVRRIYRMTIEGKGPYQIARELSEEKIERPSYYLGKKGLGNHASNYDKENPYMWRGNQVTTLIARPEYIGKTVNFRTFKNSYKDKKTKRADKEDWVVFDDTQEPIVDEETWLLAQKLRQNVRKADPMGEPNVLTGKIYCADCGAPMYNHRQRKGRERIYYTAKGEKRTSYSNPADCYECSTYNLAYQKYDRHCTCHHISTKALKSIILKTIQETCHYVSLNEREFVYSLQEESAMKDIAVSETVKNRIERNQKRVHELDMLIRKIYEDNVIGRLPDRLFQSMLTDYENEQNELNKIIETDTADMQRIIGGQNNVERFLKLVKKYENITELTPAMINEFIDKILVHEPQGKGADRTTEVEIYLNYVGQFQVPVEQHEPTEEERIAAEKEAERLRRKRESNRKYMKKIREKSKEFAEHERIAEEKSSDSNVCVEQNVTSKSNRQKVKGEKIA

SEQ ID NO: 24057 - DNA, 50 bp, Faecalibacterium prausnitzii; identical to SEQ ID NO: 24017
  source 1..50: mol_type = genomic DNA

SEQ ID NO: 24058 - DNA, 40 bp, Faecalibacterium prausnitzii
  source 1..40: mol_type = genomic DNA
gccgccgaagcactttaccgaggacaccctgctgcacgct

SEQ ID NO: 24059 - DNA, 40 bp, Faecalibacterium prausnitzii
  source 1..40: mol_type = genomic DNA
gccgccgaagcactttaccaaggacaccctgctgcacgct

SEQ ID NO: 24060 - DNA, 50 bp, Faecalibacterium prausnitzii; identical to SEQ ID NO: 24020
  source 1..50: mol_type = genomic DNA

SEQ ID NO: 24061 - protein, 538 aa, Peptococcaceae bacterium
MNNKQLKVAAYCRVSTDKEDQANSLESQRQYFEAYITRQEDWDLVEVYYDEGISGTSLKNRDGFNRMLEAARSRKIDVILTKEVSRFARNTVDTLQITRELKQLGVGVHFLNDGINTMDTERDWELRLAIMASIAQEESRKTSERVKWGQKRQMEKGVVFGRDMLGYRVENGKLIIVPEEAEIVRLIFHKYLNEGKGTTTIAKELHEAGIFTINGNLWSNTVLLRLLRNEKYVGDLLQKKTYTPDYLTHSKKYNKGEEEQVYLKDHHEAIIDRETWEATQRELERRSPSPEHKTKHSNRYWCSGKLICGECGKYVVSRKKKLKNGGIRKAWMCVSATQHGISKVDADGNLIGCDNKEVNDKVIQAAAKYTLSLVQSDKDKLVSEVMNEIRSVQKNVPKVDVAKLQKEIENLEKKKIKIVDLFLEETLTKETFMKQQQHFDDEIAKVKLKINGVEQWEEMQARQIEMYEKMILQLERMICFDLESEEIYKQVIGKIILYKNKKLEVRLNGIPVNVLMRYTVSGKCEDYKVEFDEVELVA

SEQ ID NO: 24062 - DNA, 50 bp, Peptococcaceae bacterium
  source 1..50: mol_type = genomic DNA
atcatctaaatagtatcctcggtgcctgtatcggtaactatttagatact

SEQ ID NO: 24063 - DNA, 40 bp, Peptococcaceae bacterium
  source 1..40: mol_type = genomic DNA
atgagcgatttcttcggtgccgatgtcggttaataatgct

SEQ ID NO: 24064 - DNA, 40 bp, Peptococcaceae bacterium
  source 1..40: mol_type = genomic DNA
atgagcgatttcttcggtgaggatgtcggttaataatgct

SEQ ID NO: 24065 - DNA, 50 bp, Peptococcaceae bacterium
  source 1..50: mol_type = genomic DNA
atcatctcagtgtcatccctgttgagtgaatcagtgattgattagatatc

SEQ ID NO: 24066 - protein, 629 aa, Burkholderia pseudomallei
MPTAYSYIRFSTPEQKKGDSLRRQKELSERYARENGLTLDTSLHLQDLGVSAFDGSNVTRGALGGFLKAVDEGRVAPGSYLLVESLDRLSRDRVKEALNLFLSIQNRGITIVTLSDGRVYDPETDNTADLIVSITIMARAHEESLTKSRRLKAAWTNKRTRLHEKKLTARCPLWMQLNDDRTRFEFIPARASVVREIISLAKNGMGQTIIAKTLNSRSVPSFSGNPKGWHPSYIQKILTSTALYGEYQPGIFESGRVIPHGEPVADYYPALITREEFYSLQAYRSQNAVGGGKARKGETVPNLLSGLLRCGYCGNPMVIAGAAAKRIRSADGKEVKRPPKKVLVCDGGRRGLGCYAVQWGHKDFETSFLSFCRGIEFERILADVRSGNQESRELTLDERIRSVEAEMSAKDARIKNLMVAIEEGNAPASLVERIRSLEEEVAELARTKTRLSTELNLHRAARQELTSTAKTARSMIDTMEAMSGDELFRVRAALAAQFRRTIASVTLYPAGRLFTHELVERQRASLIDAGWVAGQVDQYVAERYPTEPRRQGRGNRGRYASRKDIGRFFRIDTVNGGFGIVYPNFDDPATARIVAGVDDDATPIYQHLAGTMTPLMATDQSEDLSSVKI

SEQ ID NO: 24067 - DNA, 50 bp, Burkholderia pseudomallei
  source 1..50: mol_type = genomic DNA
ttgtgtgttcttcaccacaacattgcaatgaaatggcgatgaacacatac

SEQ ID NO: 24068 - DNA, 40 bp, Burkholderia pseudomallei
  source 1..40: mol_type = genomic DNA
cggcacgagccatctcgtcgcgatttccgggctgcacgtc

SEQ ID NO: 24069 - DNA, 40 bp, Burkholderia pseudomallei
  source 1..40: mol_type = genomic DNA
cggcacgagccatctcgtcaggatttccgggctgcacgtc

SEQ ID NO: 24070 - DNA, 50 bp, Burkholderia pseudomallei
  source 1..50: mol_type = genomic DNA
ttttgtgtttacaatgacaacattagtaagacaaggctgctaatacattc

SEQ ID NO: 24071 - protein, 452 aa, Listeria monocytogenes; identical to SEQ ID NO: 22451

SEQ ID NO: 24072 - DNA, 50 bp, Listeria monocytogenes
  source 1..50: mol_type = genomic DNA
tttagtacctcaatttctctctctggagggagaggaaatgggatacaaaa

SEQ ID NO: 24073 - DNA, 40 bp, Listeria monocytogenes; identical to SEQ ID NO: 1298
  source 1..40: mol_type = genomic DNA

SEQ ID NO: 24074 - DNA, 40 bp, Listeria monocytogenes; identical to SEQ ID NO: 1298
  source 1..40: mol_type = genomic DNA

SEQ ID NO: 24075 - DNA, 50 bp, Listeria monocytogenes
  source 1..50: mol_type = genomic DNA
tttgggaccaataattctttttctggtggttgaggctgcgagacacaaaa

SEQ ID NO: 24076 - protein, 579 aa, Pseudomonas lactis
MPTAYAYIRYSSKAQGGADRDSVDRQMSSIEAITKHQNIELLPENIFSDTGVSGYDGSNSRTGKLKELIDRINSLEIRTGDYVFVESIDRLSRQRLLQAKELVNNILEKGIVLITTIDGQRYEKPNDVNGIDDLQQDILLSVISKRAHEESRTKSIRRKSAWNRAKANAETDQKIFNAHNPPYGIFFDKKTNSFKINEDEAKEIRQIFESLKFVGVSQTIKEINTTSKRKWTNKNVSHLFSTKYPLGYYMAQRRDEHKKKVFESYIENYYPQIISFELWQEVRNAMEGRKHRRNYGSHSLGNLNIFRHVIKCGECKASLLFEMNKNPKGIQYSYFHCHTRKEIKGKCNQPRFRFEYALGILLELVKNATENPNYIGEGYVDPDYIDVLDPDIWEARHNNFKELLADIMNDKGGAIANQQKLSTLEAELSKNLVIEQNLNKSFEAYSDGVIPDLFINRVIKVKKSITELRTEITKLKASLNTNKTDLRIYSTKDILRLYETEKGRLELNNFFTVNEISFIFEYSKENRTLVGKVLHKGVFIQWVEKKFSLHNPLVEEYGIQNINKMSETSKAIEPSQSQN

SEQ ID NO: 24077 - DNA, 50 bp, Pseudomonas lactis
  source 1..50: mol_type = genomic DNA
atgtgttatatagccctaccgttcgagaatggtaggtggtatcctcacac

SEQ ID NO: 24078 - DNA, 40 bp, Pseudomonas lactis
  source 1..40: mol_type = genomic DNA
ggtactgcgtgagccattggaatcggggcatatcgtgatc

SEQ ID NO: 24079 - DNA, 40 bp, Pseudomonas lactis
  source 1..40: mol_type = genomic DNA
ggtactgcgtgagccattgcaatcggggcatatcgtgatc

SEQ ID NO: 24080 - DNA, 50 bp, Pseudomonas lactis
  source 1..50: mol_type = genomic DNA
atgtgtggtggtttcctaacgattcagtgtggtggggcagctcctgacac

SEQ ID NO: 24081 - protein, 579 aa, Pseudomonas fluorescens; identical to SEQ ID NO: 24076

SEQ ID NO: 24082 - DNA, 50 bp, Pseudomonas fluorescens; identical to SEQ ID NO: 24077
  source 1..50: mol_type = genomic DNA

SEQ ID NO: 24083 - DNA, 40 bp, Pseudomonas fluorescens
  source 1..40: mol_type = genomic DNA
ggtgctgcgcgagccgctggagtctgggcatatcgtgatt

SEQ ID NO: 24084 - DNA, 40 bp, Pseudomonas fluorescens
  source 1..40: mol_type = genomic DNA
ggtgctgcgcgagccgctgcagtctgggcatatcgtgatt

SEQ ID NO: 24085 - DNA, 50 bp, Pseudomonas fluorescens; identical to SEQ ID NO: 24080
  source 1..50: mol_type = genomic DNA

SEQ ID NO: 24086 - protein, 473 aa, Clostridium scindens
MLADIEAGKVGTVIVKDMSRLGRNYLQVGFYTEMLFPQKGVRFIAVNDNVDSENGGMDNDFTPLRNLFNEWLVRDTSKKIKAVKRAKGMSGKPITSKPVYGYLMDEDENYIMDEETAPIVQKIYQLCLAGNGPTKIARMLTEQQIPTPGTLEYRRTGSTRRYHPGYECKWATNTVVHILENREYTGCLVNFKTEKPSYKTKHSVENPIEKQAIFPGHHEPIIDAETWERVQELRKQRKRPNRYDEVGLFSGMLFCADCGSVLYQQRYQTDKRKQDCYICGSYKKRTRDCTAHFIRTDLLTAGVLSNLRQVTEYAAKHESRFVKLLIQQNEIGGKRKTAAATKQLEQVQERISEISRIIKRLYEDNVSGKISDERFMELSADYEQEQRELKDRAAGLQEELDKSQAATVNAEKFMGIVKKHLAFEELTPTLLREMIEKIVVHESESLDGKRRGKLRRQEIEIYYSFVGKIDLPE

SEQ ID NO: 24087 - DNA, 50 bp, Clostridium scindens
  source 1..50: mol_type = genomic DNA
ttacttctttatcgcacatcagcaaatgctaatgttacataaagaagcag

SEQ ID NO: 24088 - DNA, 40 bp, Clostridium scindens
  source 1..40: mol_type = genomic DNA
tgattacaaacgccgcgttgatagaacgggaatccagcat

SEQ ID NO: 24089 - DNA, 40 bp, Clostridium scindens
  source 1..40: mol_type = genomic DNA
tgattacaaacgccgcgtttatagaacgggaatccagcat

SEQ ID NO: 24090 - DNA, 50 bp, Clostridium scindens
  source 1..50: mol_type = genomic DNA
ttactttttctttagacatctgcataaggtacacttgatacaaaaagcag

SEQ ID NO: 24091 - protein, 596 aa, Pseudomonas simiae
MARAYAYVRYSSMKQREGDTVERQVTPLEAFTEDTGVVIAETFFDEGVSSFRGNNAKFGELKVILDRIKSGELRHGDYLVVESIDRITRQKVFDGVELLSSILKSGVRIYTTTDKKTYSLDDSAKHFETLMMISLIAQRANEESETKSDRRKKKWRSAKRLAVEEGKVFNKHNPPYGIRYCEDSQRFVLDEKQAEEVRQIFELLKVTGVSNVIRIVNQTSERRWTNKAINVLLRSQYPRGVMMSQKRGDGQKKVFIEFIEGYYPAIVTNTQFNEAIAAMQSRRTRKEYGNSTIGNLNVFRHVVKCGSCGESFVFEKQRNQKGELYYYFNCKTRKEHKGDCVQRFRYDLAIGMLLRAVSLLSPAKKIMTKPMAINLPEEIERLIRKDGDNRLKAMPEVSKNRGFIAGTIAESPEQKQIRLRMRKFGDDLFSKIMNHAGATSKLENKLDNAKEKLARLQMTLDNLNENMNAVVDENVGRIPRALLDKIGSVEQERDDQQEIVDALGVEVSEMSVTIPIASAKDLIEKFQTEEGRLELNGFFKKQKVVFSFEFDPEVRRLDMTVFQNSEVVWKDQSYFGLHKPLSQFGISKLEDVMSSE

SEQ ID NO: 24092 - DNA, 50 bp, Pseudomonas simiae
  source 1..50: mol_type = genomic DNA
atgtgagtattagggctaccattctcgaacgggggtcagtataatcacat

SEQ ID NO: 24093 - DNA, 40 bp, Pseudomonas simiae
  source 1..40: mol_type = genomic DNA
aatcacgatgtgccctgattccagtggctcgcgcagcacc

SEQ ID NO: 24094 - DNA, 40 bp, Pseudomonas simiae
  source 1..40: mol_type = genomic DNA
aatcacgatgtgccctgatatcagtggctcgcgcagcacc

SEQ ID NO: 24095 - DNA, 50 bp, Pseudomonas simiae
  source 1..50: mol_type = genomic DNA
agatgagcacagatggtcacattcatgaactggggttgctgaaaacacat

SEQ ID NO: 24096 - protein, 513 aa, Bacteroides stercoris
MSKKKSKEKVVEFSKLTNKVAAVWTRVSTERQADTNGSLESQRRICTEYAESHAIRIKKYYGGTNESAKVEGKLYREMIAEVARDKEINIILVYSFDRFSRAGYEAMMTKAYLKAKGIYVVSATQATDPDSAAGGFMEDVIFLFNQFENNLRKDKCITGMVECLRNGNWYSKPPLGYDKLKVGREHVLTVNEKGKILRNAFVWKATEGIGDIEIVQRLKGLGLVIDRKHLNKILHNPFYCGFIQHSLLGDEVIKGNQEILIDEATFNKVNGISNAGYEHKEITEPFPLKRHIICSDCGGYLTGYTVKARGRDYYKCNKKGCKSNHSTEKLHQKYINLLNGYNIPDEFIPILTDVLRKVFEEYNQSKGETKKVLLKRKTECENRINAVKVRFGLGEINSEIYMATMSELNSRLAEIRRDLEDAGKNLSNMMNYINQTIEISCKLGCLWSDSDFSNRQKIQNLVYPGGIYFDKKNDDYRTENENEVFRIFRRFTAVCEGEKEKATTDFTRLSPSV

SEQ ID NO: 24097 - DNA, 50 bp, Bacteroides stercoris
  source 1..50: mol_type = genomic DNA
attttactcgtttgtcgccttctgtcggctacactatcgaattatcgaac

SEQ ID NO: 24098 - DNA, 40 bp, Bacteroides stercoris
  source 1..40: mol_type = genomic DNA
ttacagtggttttttcgtgtcggaatgaggcgactcgaac

SEQ ID NO: 24099 - DNA, 40 bp, Bacteroides stercoris
  source 1..40: mol_type = genomic DNA
ttacagtggttttttcgtgtaggaatgaggcgactcgaac

SEQ ID NO: 24100 - DNA, 50 bp, Bacteroides stercoris
  source 1..50: mol_type = genomic DNA
atttggctctgtgttcccagtatttagcatacactaaataattatcgaac

SEQ ID NO: 24101 - protein, 600 aa, Proteiniphilum saccharofermentans
MNAYGYIRVSTDKQDLNRQKNLIRKHCQRNNYNLIGTIGQKVSGSKEDTESIERLKSLSKNDCDIIIVTEISRLSRSDRLAYTITLLSGIIEEKQIKVVFTDDPEKIYDTILNPDELKYILSEAEGAAKERKKITYRMVTGMDDKYDEDPNAFRGSVVPLGFKVIDNDKYDENDKSSKYSKKLLVPDEAKIHIIEDIFNSVINGVTLHDIAKKLNESGYISNKGKKFRDSAIGYIIKNKMYNGKMKRRDEIYDLPFKIIDDDLFKTANIKLTENQLIKTKGKKNFNQLKGILTCACGKNMMMIRNIDYYVYTCVTKANKIRHEVKCSNQGIDADLLNEIVWNVVTLSLDENKYRENNDIQIKDKEKDIKRNDSRIEELKEEIFDLKSQNKKLTDRIEEFITKDNTPISLINSLTEKYQNRENEISEKEKTLNTLQNQNIKIKSEIDKILNSGKDQFFKEIRISERARLFRQYLKSVAYYNVTQYKGFIHIIFENGYERIIAVKKYPRPYYSLLPDSFKFNTQSRTIIYSHLDHKPKYGEGFYLSFKKSELTYEGVEKQFRELETDWKLNITLPERPQIMKVRKENEAKRKQKMRSQLKTN

SEQ ID NO: 24102 - DNA, 50 bp, Proteiniphilum saccharofermentans
  source 1..50: mol_type = genomic DNA
gatctaaactttgatgaaattgcataagcaaacccttcaaagtttcaatc

SEQ ID NO: 24103 - DNA, 40 bp, Proteiniphilum saccharofermentans
  source 1..40: mol_type = genomic DNA
gatgccagcccagacggcataggcggttcctgtcggaatc

SEQ ID NO: 24104 - DNA, 40 bp, Proteiniphilum saccharofermentans
  source 1..40: mol_type = genomic DNA
gatgccagcccagacggcagtggcggttcctgtcggaatc

SEQ ID NO: 24105 - DNA, 50 bp, Proteiniphilum saccharofermentans
  source 1..50: mol_type = genomic DNA
gatctaaacttagctgataaggcagtggcaaggcctgagaggattgactc

SEQ ID NO: 24106 - protein, 600 aa, Paenibacillus dendritiformis
MTNFKVVNSGDKCLLIGYTRISRDEDRKNYATIIAQKKIIANHAKEVFGKEIPEKNLYEDDNYSGYSFNRPDFNRMLGDINFAIENGYQVVLLVKDISRIGRHNAYTLLFLEDMKRLGVRVILISDSYDSFVDDDSILGIKTWYNERYVKDISTKIKDNNKTKMIDGKYLSAVPYGYKRDPLDREKVIIDEETAWVVKKIFEMYLQGDGYRKICIYLTENEVPTPSMVIQRNKEAEGKVYKKDVTHVWVQRMVQRIVRNDFYIGVLRQGKYKLAEINGKILRVDPSQHYVFANNHEPLVSVEDFELAQEIAEKRLTMHYRGSGHKHVNLFTGFLVCADCGRGFVALNKEGKHKSYICGTYRRVGKIACTTHYILDRTLLLAIKAHLVVLREKLSDAISGFDGKLKDQVKRTDNLDKSLQRLNSSLKQLSDELKVTMKQRINEVARSPEDEEIISEAYAEIEAEKRVLIKDIQRQIDDLTEIKKQSSRFQEGSVTALSVLDELIGKEMFDRKDLSLLVDKIIVNEDGEPTIYLKANIEKLLQYEGGDHDPDGNGGGYKATVTYKAGAVIKTLVSTLASNFYGGELVNDTVGLKEPSCTTRL

SEQ ID NO: 24107 - DNA, 50 bp, Paenibacillus dendritiformis
  source 1..50: mol_type = genomic DNA
agaaccatcgtgcactacaaggctggggcgtacgacaccacaatgcacct

SEQ ID NO: 24108 - DNA, 40 bp, Paenibacillus dendritiformis
  source 1..40: mol_type = genomic DNA
agagccgatggacaaagccggctcctacggcatacaaggc

SEQ ID NO: 24109 - DNA, 40 bp, Paenibacillus dendritiformis
  source 1..40: mol_type = genomic DNA
agagccgatggacaaagccctctcctacggcatacaaggc

SEQ ID NO: 24110 - DNA, 50 bp, Paenibacillus dendritiformis
  source 1..50: mol_type = genomic DNA
agaaccggctgcccctacaattctctggcttacgtgaaccagctgcacct

SEQ ID NO: 24111 - protein, 667 aa, Elizabethkingia anophelis
MLAIYARVSQDKDDNQNSIETQVDLGKRYADKLGLNYDIYADNNISGTLEIENRPELFRMLQDIASEKITHIFAYDQSRLERNNVVWSNLYMLFQKNSIKLYFQADGDFDFESDSNFLTSNILSVFNSFYVKLTKKKVITALQRNVENGKVHAKPPFGYDKDENKLLIINNKESEIVKRIYKMSLEGKGTDKIAEILNYEGVLTAYSKLEKGGVYKIRDRYNPNIVIEKKKSDAKWRGRTIQGIIKNTIYMGKRSWKGKLYPAPAIFDEVYWQKVNENLKKNRNNTGKKVEHKYLLKGIIKCGCGKNMYGRSRVNKRDHTYICSSRRYKGESCGNKSINIDKIENLIWENFFIRKELLELLNNSSDNQNSLLEDIKQEEALLDQRIINLKKNKSNLIKAISNNIITDDDAKSEINNINNSLIKHSQDKISLASRIVDIRNFKSLIIDTRADFEAFSADVDFDTKRTLINKYIERIIISYDNGKKFQNGNTLPKHIYYIQIEFKNNIIKESYIYNVKNNVIISLRDSKFKLLSKEGIIDALDFTTFEKVLMRLSNGKIIPKPIIGKDNKTIILSNTIIPYGDAKLWSIQNIVDFYTLNTTWLSEKTGINIATENKNLKSYQWLVKEYCNYKNKPLIDWVTFLYKIFGYNDKPKSFKSSQEIDLNHVKF

SEQ ID NO: 24112 - DNA, 50 bp, Elizabethkingia anophelis
  source 1..50: mol_type = genomic DNA
gcccccacatttaaaacaattacttgatgttattgtatagaatgtggtgt

SEQ ID NO: 24113 - DNA, 40 bp, Elizabethkingia anophelis
  source 1..40: mol_type = genomic DNA
atcctcaccacacaatatcagatgtcgctctggtgggcgg

SEQ ID NO: 24114 - DNA, 40 bp, Elizabethkingia anophelis
  source 1..40: mol_type = genomic DNA
atcctcaccacacaatatcgtatgtcgctctggtgggcgg

SEQ ID NO: 24115 - DNA, 50 bp, Elizabethkingia anophelis
  source 1..50: mol_type = genomic DNA
gactcctcaaaaaaaaaaatttccgtaggttattggggtacaggtggtgt

SEQ ID NO: 24116 - protein, 531 aa, Pseudomonas saxonica
MTIQNTLPHAFAEVFRDDETINVYSYVRFSSKAQSLGFSEVRQIEQINRFFEQYPSARQVERYEDLGVSAFKGKNLKSGQLAKFVERIKSKEIQPNALLLVESFDRISRVGGYDALELIISIIQSNCAIYTLFDNRLYSKRKINSSSDINLIQNILERANHESRNKSDRISDAKARNLEKGEHGGIITKRCPFWIDFSDGKFVLNEHAKAVKKATELCFDMGFQSIAKELNKESTTRKYSDSSVGKLLHKPAIYGSFLAMKNDENGRRTIVNKEIKNYYPAVISESEFHRISAKLKERQDPKLAGRKATDFKNVLRGLVFCACGSTFRFHAQKAMYVDLVCHSSASGQCEYAKKKMGVRHRYARIEEIFFAYQNKMPFNLITTKNEDIKALEKEHNEITGQIILKEKALENTFAMLEKTSESAQKYISIKIDELSSELDKLKTDEHKINLKISSIHLSSKSDINTKEIFRLLISEKGRMKINNFLHSQSVKLIITPLRKKYYSIDIFHADKHLDTIDVTPDGYTARRGIHA

SEQ ID NO: 24117 - DNA, 50 bp, Pseudomonas saxonica
  source 1..50: mol_type = genomic DNA
tttatacaaatcgctcctgtcattgcaatgagaggggctttttgtataaa

SEQ ID NO: 24118 - DNA, 40 bp, Pseudomonas saxonica
  source 1..40: mol_type = genomic DNA
gattcgcacgccgatgaatgcggtgattggcatgcttgag

SEQ ID NO: 24119 - DNA, 40 bp, Pseudomonas saxonica
  source 1..40: mol_type = genomic DNA
gattcgcacgccgatgaatcaggtgattggcatgcttgag

SEQ ID NO: 24120 - DNA, 50 bp, Pseudomonas saxonica
  source 1..50: mol_type = genomic DNA
attataccaaatgttgctgtaagtcaaatgagagtggactgttggattta

SEQ ID NO: 24121 - protein, 522 aa, Vibrio parahaemolyticus; identical to SEQ ID NO: 23861

SEQ ID NO: 24122 - DNA, 50 bp, Vibrio parahaemolyticus
  source 1..50: mol_type = genomic DNA
tagttatgcactgtacattttctttctgtctaatgtatagtgataacttg

SEQ ID NO: 24123 - DNA, 40 bp, Vibrio parahaemolyticus; identical to SEQ ID NO: 7098
  source 1..40: mol_type = genomic DNA

SEQ ID NO: 24124 - DNA, 40 bp, Vibrio parahaemolyticus
  source 1..40: mol_type = genomic DNA
gaaataaccaaaagagccgagagtccaatggatgtcttgc

SEQ ID NO: 24125 - DNA, 50 bp, Vibrio parahaemolyticus
  source 1..50: mol_type = genomic DNA
tacttattctaaaaacatttacttagtgtctaccatacaccagtcacttg

SEQ ID NO: 24126 - protein, 499 aa, Mycobacteroides chelonae
MPRKRPRALVGARVSVLSGPQKVSHEAQIDTATKWATAHDYPVVGSFEDLGVSASVPPDERPELGPWIRERSHEWEAIIWSKLDRAFRSMRHCSDFIKWAEANKKIVVFAEDGMTLNYLDPSKGIDSILGELFVQMAAAFAQIELNRFKSRAEDMHRAIRPTTRWAAGLPPLGYRVIDHPSGRGKGLAIDPDAANLVREMADKLVDGWSFVRITEWLNESGKLTSQGRSRKARGLEPKGRWTTTNVIEILTGYRTLGIKTHKGQPVLDDNGEPIQLAPALFTPERWDEVQRAAQLRKGKPRTPSDTSNPMLEVGFCAVCGSSLAQQFSKTRPRKSDGHVTYYRYYRCSRTPINCKEVFVVADNLDELLSEQFLRERGDRRVTERVFVPGEDNSYELDSINQRIDQLREDRASGLFPSGEDEAVYRNQIRQLLARRDELTSVPIRQPGYENIELEKTYREVWPSATPEEKRKMLIDAEISIRLGESPGRSLRAELVVNRN

SEQ ID NO: 24127 - DNA, 50 bp, Mycobacteroides chelonae
  source 1..50: mol_type = genomic DNA
attctcataggtgtacttctcgatcaatagtcacctacactcttgaaaca

SEQ ID NO: 24128 - DNA, 40 bp, Mycobacteroides chelonae; identical to SEQ ID NO: 20143
  source 1..40: mol_type = genomic DNA

SEQ ID NO: 24129 - DNA, 40 bp, Mycobacteroides chelonae
  source 1..40: mol_type = genomic DNA
gatcgccatgctcctcgatccacagatcccgatggaagtg

SEQ ID NO: 24130 - DNA, 50 bp, Mycobacteroides chelonae
  source 1..50: mol_type = genomic DNA
cttctcattgtatccattcttcctccataatcacctctattcttgaaact

SEQ ID NO: 24131 - protein, 471 aa, Vibrio splendidus
MTTVLYYARFSSSKQRDGSSIERQLRLCDTYRLTHKLPSPNHTYTDKGTSAYHSKQLEGELGQLVHDLENSVYQKPITILCEAIDRISRASIRDSQTIINSITEHADLVTVSDGKIYTHSDDSLETSLIQLVKSATSREESDKKSKRAKEYWATCKENGVAQNSVCPKYLKLNADRKGYTVKGDIADEIRGIYKLLKAGKGIKKAHQSFPSWSPSSIARLRKDERIVEHGIISDTDFWKVQSTLKTTRKSGAKNSKNLFRSLFVCGECGSNLVYVAPRPSRPTWSGHLMCKNRQAKGRVACPNSKNINYNKFEPIFLDFLESVSSELFRSNLSEVEAKKSQLEALVMQYEQLEKKVDNLYDILGEAPTKRGKAKIDQLEAQLNELEATKEKLEAEVQGYTDIQLEQPSTDLEREEFNTQLLHAFKSITIKYPTEGNQWFTFDDKFEISSDFTRWELIHTDTNEQPVILEFD

SEQ ID NO: 24132 - DNA, 50 bp, Vibrio splendidus
  source 1..50: mol_type = genomic DNA
acaattaattgccaaacgacaagcctgctggtaatctattgaacaaaggt

SEQ ID NO: 24133 - DNA, 40 bp, Vibrio splendidus
  source 1..40: mol_type = genomic DNA
ggaatgccgaatggtaagcctgctggcgtgcgctgcatcc

SEQ ID NO: 24134 - DNA, 40 bp, Vibrio splendidus
  source 1..40: mol_type = genomic DNA
ggaatgccgaatggtaagccagctggcgtgcgctgcatcc

SEQ ID NO: 24135 - DNA, 50 bp, Vibrio splendidus
  source 1..50: mol_type = genomic DNA
aaaaatgatcctggaaagccaagccagctggtaagcccatcaaacaatgt

SEQ ID NO: 24136 - protein, 643 aa, Coprococcus comes
MNAGYVRLSRDDDKRNYVSIENQKLIINQYAADHGMVIDRWYEDDGISGYIFDRPGFQQMMADLDKDIDAVYVKDFSRLGRHNAKVLLLLDEFQERGKHLVVIDDNYDSMDSSDDTIGIKTWFNERYVKDTSKKIKRAIGARQKEGTLITRPPFGYRRNEKDKTILEIVAKEAEYIKQIYDLYLSGSGYRKIAIYLTEQGAPTPSMIQREREIEEGRLSKRKVASKWSDAMIKEILDNDFYIGTFRLKKRARNTVHGKDKRVPKEEQCIFENHHPAIIDKATFTLVQELKEKRNRTNYRGSRGQWLGSEIPNPFGSCLFCKDCGSRLTPIKRQTSSRERKYYICTTYNTKGRRYCSKAHLIEEDDLMKDVLTYIKMCRNALCEVISTYDLKDFEAEKKTIEEKRQELHIAINERKSQLKVLLTQKVKDLAVAAGNEDLINETYDSMQKDLFAQIHGLEMQIKELNETAIETPEVKDKLKNALEVVDKIIAGGSLDRRDIELLIEKIVVDEYGMPEITLKYGLSNLISYSPADEMNRRENTIIAIVMKLIAEDERGYTSAKYLSEHISDLGFKKTKQSILPYIELMKELGILESTDNPLKPYNIVKTKEAIEQLVKDYLPDISTEITAKQLSDNYLHGICDDRW

SEQ ID NO: 24137 - DNA, 50 bp, Coprococcus comes
  source 1..50: mol_type = genomic DNA
atttacatggtatttgtgacgacaggtggcgtacatatatcaatgtaaat

SEQ ID NO: 24138 - DNA, 40 bp, Coprococcus comes; identical to SEQ ID NO: 5538
  source 1..40: mol_type = genomic DNA

SEQ ID NO: 24139 - DNA, 40 bp, Coprococcus comes; identical to SEQ ID NO: 5539
  source 1..40: mol_type = genomic DNA

SEQ ID NO: 24140 - DNA, 50 bp, Coprococcus comes; identical to SEQ ID NO: 5540
  source 1..50: mol_type = genomic DNA

SEQ ID NO: 24141 - protein, 505 aa, Klebsiella quasipneumoniae; identical to SEQ ID NO: 14386

SEQ ID NO: 24142 - DNA, 50 bp, Klebsiella quasipneumoniae
  source 1..50: mol_type = genomic DNA
aatattataaatgaatctgtgatccaggtaatagtatcattttacaaaaa

SEQ ID NO: 24143 - DNA, 40 bp, Klebsiella quasipneumoniae; identical to SEQ ID NO: 21943
  source 1..40: mol_type = genomic DNA

SEQ ID NO: 24144 - DNA, 40 bp, Klebsiella quasipneumoniae; identical to SEQ ID NO: 21944
  source 1..40: mol_type = genomic DNA

SEQ ID NO: 24145 - DNA, 50 bp, Klebsiella quasipneumoniae
  source 1..50: mol_type = genomic DNA
aatattataacttgatttcttattatagtaacatttgcttattgcaaaaa

SEQ ID NO: 24146 - protein, 589 aa, Citrobacter sp FDAARGOS 156
MSAHVTILRNTVLPVKFNTMNRPRLYSYIRYSSERQGKGSSIERQKSYISEMAKQIATEYDLEIFEEYQDLGVSAYKGKNVQEGALSDFIAQVESGLIPKGSFLLIESLDRFSRQNAMQAVNLFTSLLLNGITVITGIDKQVYRQTEVNTETLQQLMFSVMLFSRANEESSTKSHRTIASALSKIRRHQERKPGDPVVAIKELGSDKWWTDSSTGYVNPHPVLFPIAQEIIQLKQDGWSNRMILQHLKNNYDGPVIGNKKSKGIWNMQHCSRILEPAIYGRKVITVNNAEYVLDDYYPAIISKDEYEALKLQVGNKGFAPNRESNPEIPLLSGIGILHCAHCSCYMVKAKSTLKNHPHAYRYQCASRDLHQDCNKWGFRASTLERTILQLIADRIFLQTKYQPSGLEGKIADIQSQIENYVLAIGSAKSPVIINSLTSQIDQLEQEKQSLIVEKRLYDESIVQMNTEGWDKFRKFDIDDALNPLRTKIRANIKTVIMRVDCSRIDKKHNLFTITYRDQHKQRIVIENNSGWKKGKIYVEAQTINDIQLLESEGLILHDHIDILINRDKFMTEAKKRLEHPRTLLDELTE

SEQ ID NO: 24147 - DNA, 50 bp, Citrobacter sp FDAARGOS 156
  source 1..50: mol_type = genomic DNA
aattatacctattacactttagtgaagaccaaagtaaactacacctcatt

SEQ ID NO: 24148 - DNA, 40 bp, Citrobacter sp FDAARGOS 156
  source 1..40: mol_type = genomic DNA
actcggtgtgactatcggcaacacagacggtaacctgatt

SEQ ID NO: 24149 - DNA, 40 bp, Citrobacter sp FDAARGOS 156; identical to SEQ ID NO: 24148
  source 1..40: mol_type = genomic DNA

SEQ ID NO: 24150 - DNA, 50 bp, Citrobacter sp FDAARGOS 156
  source 1..50: mol_type = genomic DNA
gatcctccctaatccactttggggaagaccaaagtagactggtcctcttt

SEQ ID NO: 24151 - protein, 589 aa, Citrobacter braakii
MSAHVTILRNTLLPVKFNTMNRSRLYSYIRYSSERQGRGNSIERQKRYIAEMAKKIAAEYDLEIFEEYQDLGVSAYKGKNVQEGALSDFIAQVESGLIPKGSFLLIESLDRFSRQNAMQAVNLFTSLLLNGITVITGIDKQIYRQTEVNTEILQQLMFSVMLFSRANEESSTKSHRTIASALSKIRRHQKRKPGDPVIAIKELGSDKWWTDSSTGYVNPHPVLFPIAKKIIQLKQDGWSNRMILMHLKNNYDGPVIGNKKSKGIWNMQHCSRILEPAIYGRKVITVNNAEYVLDDYYPAIISKDEYEALKIQVGNKGFAPNREINPEIPLLSGIGILHCAHCSCYMVKAKSTLKNHPHAYRYQCASRDLHQDCNKWGFRASTLERTILQLIADRIFLQTKYQPSGLEWKISDIESKIENYVLAIGTAKSPAIINSLTSQIEQLEQEKQSLVEEKRLYDESIVQMNTEGWDKFRKFDINDALNPLRAKIRANIKTVITRIDCSRIDKKHNLFTITYRDQHKQRIVIENNSGWKKGKIYVEAQTINDTQILESEGLILHDHIDILINRDKFMTEAKKRLEHPRTLIDELTE

SEQ ID NO: 24152 - DNA, 50 bp, Citrobacter braakii
  source 1..50: mol_type = genomic DNA
aatcatacctatcgcactttagtgaacaccaaagtaaaatacacctcatt

SEQ ID NO: 24153 - DNA, 40 bp, Citrobacter braakii
  source 1..40: mol_type = genomic DNA
gcttggcgtcactatcggtaacactgacggtaacctgatt

SEQ ID NO: 24154 - DNA, 40 bp, Citrobacter braakii; identical to SEQ ID NO: 24153
  source 1..40: mol_type = genomic DNA

SEQ ID NO: 24155 - DNA, 50 bp, Citrobacter braakii; identical to SEQ ID NO: 24150
  source 1..50: mol_type = genomic DNA

SEQ ID NO: 24156 - protein, 673 aa, Vibrio parahaemolyticus; identical to SEQ ID NO: 11821

SEQ ID NO: 24157 - DNA, 50 bp, Vibrio parahaemolyticus
  source 1..50: mol_type = genomic DNA
tttcatcatctaaattcgatacctttatgtctttagataaaatctttatt

SEQ ID NO: 24158 - DNA, 40 bp, Vibrio parahaemolyticus
  source 1..40: mol_type = genomic DNA
tctacgagcgtattcagttttatgtcctttaaggtgaaaa

SEQ ID NO: 24159 - DNA, 40 bp, Vibrio parahaemolyticus
  source 1..40: mol_type = genomic DNA
tctacgagcgtattcagttgcatgtcctttaaggtgaaaa

SEQ ID NO: 24160 - DNA, 50 bp, Vibrio parahaemolyticus
  source 1..50: mol_type = genomic DNA
tttcataatttcttatttaaacatgcatgtcttttgtttaaaactttgtt

SEQ ID NO: 24161 - protein, 638 aa, Enterobacter asburiae; identical to SEQ ID NO: 15546

SEQ ID NO: 24162 - DNA, 50 bp, Enterobacter asburiae; identical to SEQ ID NO: 15547
  source 1..50: mol_type = genomic DNA

SEQ ID NO: 24163 - DNA, 40 bp, Enterobacter asburiae; identical to SEQ ID NO: 4743
  source 1..40: mol_type = genomic DNA

SEQ ID NO: 24164 - DNA, 40 bp, Enterobacter asburiae
  source 1..40: mol_type = genomic DNA
gcagcgggtattggcaggcgagccctccggcattcctgga

SEQ ID NO: 24165 - DNA, 50 bp, Enterobacter asburiae
  source 1..50: mol_type = genomic DNA
agtacaaatgtaatcctgtcagaggaacctaaaatatatgtattttctgt

SEQ ID NO: 24166 - protein, 535 aa, Tyzzerella sp
MKQPYNTALYYRLSRDDENFGDSVSIETQRTILQQFARDNQFRVVDEYIDDGWSGTNFDRPAFQRMMDDVDAGRINCIITKDLSRFGREHVMMDYYLEFVFPEKNIRYIAVTENEDTEKGLSDFVPFKNLFNEWFAKDTSRKVKAALRAKHAAGQRICTYAPLGYKKHPEIKNAIVVDEETKWIVEKIFELAYHGSGAASIAHRLIEEKVPTSGWLNYTRYGTFAHIYADAPEEKQYDWSIGQVKEILKDETYIGNSVHNKQTNISYKNKKKIRKPKEEWFRIENTHEPIISKDVFYHVQEQIASRRRKQKDGTTKIFSGLIKCADCGWSLAYGENRQNKTPYGHYHCSNYGQGTGKCSMHYIRYDTLYTYVLLRVQYWTKAVREDEEKLLESILKAGDKERAAAMKKHTAELAKAEKRKTEVDRLFAKMYEDRVSERITEYNFNMLSQKYQMEQLELDEKIQKLKAALSESKQSVEDARKWIEIVKQHSEPTELTAELLNNMIDRIVVHEAVKYNNGFREQKIEIYYRFVGKID

SEQ ID NO: 24167 - DNA, 50 bp, Tyzzerella sp
  source 1..50: mol_type = genomic DNA
caatatctttaactaagggaaacaggcgcttacaaaagttaaagaaacca

SEQ ID NO: 24168 - DNA, 40 bp, Tyzzerella sp
  source 1..40: mol_type = genomic DNA
attggtcggtcgggtcggtggagcaggccttctcgaattc

SEQ ID NO: 24169 - DNA, 40 bp, Tyzzerella sp
  source 1..40: mol_type = genomic DNA
attggtcggtcgggtcggtgaagcaggccttctcgaattc

SEQ ID NO: 24170 - DNA, 50 bp, Tyzzerella sp
  source 1..50: mol_type = genomic DNA
caacatcctaaccaaagagcaaaagatgcttaaaaacccaaaagaattca

SEQ ID NO: 24171 - protein, 536 aa, Chryseobacterium arthrosphaerae
MLLDSISTLNNNFPTAILDNLLKKMEIMKIADLYIRVSTDEQADKGYSQRDQEDRLKRYCSSNNISIGQIIYEDHSAKSFNRPEWIKLLTTLKKRSCKTNLILFTKWDRFSRNAGDAYQMISTLSKLGIEPQAVDQPLDLSIPENKMMLAIYLAAPEVENDRRALNVFYGMRRAKKEGRVMGKAPFGYVNKSRENGEKYIVPQEPEASAMKWAFNEIAKGILASNQIRKKVNELTIKKVSRTSFHIAIRNPIYYGKVFLEKHKDEEAYLVDGQHEALISEDLFNRVQEVLDGKRRLQRPNTKILSGENFPLRGFLVCPKCGKNITASASKGRNNRYYYYHCNAACGFRHRAELVNSVFEEGLKQLEMNEPAKKLIRKVFLDNYQKFIKAPQDERKKISQEIDKLNSKISVARNKLLSEVIDDEEYLEIKTEFKEQIEKLERQLSDKPKENKVDIPKLLEKVLETLTSIWKVYTEGDIAVKRQIIGSIFPEKLEFDGNHYRTARINTVAHYIFQINNGLSSNKNRKNDNYNHFSCYV

SEQ ID NO: 24172 - DNA, 50 bp, Chryseobacterium arthrosphaerae
  source 1..50: mol_type = genomic DNA
ttataatcatttctcctgttatgtagtcttaaacgaacaaatatcgaaac

SEQ ID NO: 24173 - DNA, 40 bp, Chryseobacterium arthrosphaerae
  source 1..40: mol_type = genomic DNA
atcatttctctttgaacgtagactcacagggattcgaacc

SEQ ID NO: 24174 - DNA, 40 bp, Chryseobacterium arthrosphaerae
  source 1..40: mol_type = genomic DNA
atcatttctctttgaacgtttactcacagggattcgaacc

SEQ ID NO: 24175 - DNA, 50 bp, Chryseobacterium arthrosphaerae
  source 1..50: mol_type = genomic DNA
ttataagcatgttacctcttatgtttacttaaaaaatattttacagctac

SEQ ID NO: 24176 - protein, 604 aa, Escherichia coli
MKKVFVYHRVSSDQQLDGSGIARQAELLEGYLERTGICFEMDDPIPVVLSDQGVSAFKGLNISEGELGAWMEEVRKGMWDSSILVVESIDRFSRQNPFDVMGYINALMAHNVAIHDVMANIVISRSNSKDLPFVMMNAQRAYDESKYKSDRIRKGWAKKREQAFNKGTIVTNKRPQWIDVEDDKYILNHKAAVIKEIFELYKTGLGCPTIAKELQKKEGEQYKFNRAWTGELVHKILTNRRVTGKIFISETIRNHDDLDNPVTQKKYQMNVYPIVVNEDEFELVQDLLKSRRPNAGRITIKKTDNEEVLIKSNLFSGIARCMDCGGPMYHNVVRAKRTPKKGDPKVEEYRYIRCLSERDGLCNNKAMTYETVERFVVEHLIGMDISTVIKEQEFNPELEIIRIQIDQVKDQIANYENGIERRKSVGKVISFEMREELDDARLQLEELLARQASLATVNVDIPVLKNVDVNELFNVNNVDIRTRYENELNKIVSTVRLKRVDDSYIIDIKYKNNDLKRHVIFVEHKKKEQKLIGDVIIENIDGTILYSTSSFWIRVKDGAIRFQPTKDDLSIIDYHLLLNYVDGLERDNMVAVWMRHNINFLFDK

SEQ ID NO: 24177 - DNA, 50 bp, Escherichia coli
  source 1..50: mol_type = genomic DNA
tttttgtaataagcgttccacactcaaatgtgttatgattatacaaacaa

SEQ ID NO: 24178 - DNA, 40 bp, Escherichia coli; identical to SEQ ID NO: 1288
  source 1..40: mol_type = genomic DNA

SEQ ID NO: 24179 - DNA, 40 bp, Escherichia coli
  source 1..40: mol_type = genomic DNA
tttttgcatgataatcataccaataggtgccattacagca

SEQ ID NO: 24180 - DNA, 50 bp, Escherichia coli
  source 1..50: mol_type = genomic DNA
tgttgtttccaaatgttccacactccagtgtgatttttggataccaacaa

SEQ ID NO: 24181 - protein, 604 aa, Escherichia coli
MKKVFVYHRVSSDQQLDGSGIARQAELLEGYLERTGICFEMDDPIPVVLSDQGVSAFKGLNISEGELGAWMEEVRKGVWDSSILVVESIDRFSRQNPFDVMGYINALMAHNVAIHDVMANIVISRSNSKDLPFVMMNAQRAYDESKYKSDRIRKGWAKKREQAFNKGTIVTNKRPQWIDVEDDKYILNHKAAVIKEIFELYKTGLGCPTIAKELQKKEGEQYKFNRAWTGELVHKILTNRRVTGKIFISETIRNHDDLDNPVTQKKYQMNVYPIVVNEDEFELVQDLLKSRRPNAGRITIKKTDNEEVLIKSNLFSGIARCMDCGGPMYHNVVRAKRTPKKGDPKVEEYRYIRCLSERDGLCNNKAMTYETVERFVVEHLIGMDISTVIKEQEFNPELEIIRIQIDQVKDQIANYENGIERRKSVGKVISFEMREELDDARLQLEELLARQASLATVNVDIPVLKNVDVNELFNVNNVDIRTRYENELNKIVSTVRLKRVDDSYIIDIKYKNNDLKRHVIFVEHKKKEQKLIGDVIIENIDGTILYSTSSFWIRVKDGAIRFQPTKDDLSIIDYHLLLNYVDGLERDNMVAVWMRHNINFLFDK

SEQ ID NO: 24182 - DNA, 50 bp, Escherichia coli; identical to SEQ ID NO: 24177
  source 1..50: mol_type = genomic DNA

SEQ ID NO: 24183 - DNA, 40 bp, Escherichia coli; identical to SEQ ID NO: 1288
  source 1..40: mol_type = genomic DNA

SEQ ID NO: 24184 - DNA, 40 bp, Escherichia coli; identical to SEQ ID NO: 24179
  source 1..40: mol_type = genomic DNA

SEQ ID NO: 24185 - DNA, 50 bp, Escherichia coli; identical to SEQ ID NO: 24180
  source 1..50: mol_type = genomic DNA

SEQ ID NO: 24186 - protein, 475 aa, Lactobacillus fermentum
MKIAVYVRVSTLEQAESGYSISEQTEKLTAYCRIKDWQVTKIYTDPGFSGSSLDRPAMQQLISDCKLGVFDAVLVYKLDRLSRSQKDTLYLIEDVFNAYNIHFMSLSENFDTSTPFGKAMIGLLSVFAQLEREQIKERMQMGKLGRVKAGKISAWSNVPFGYTKVKDSYDVDPLRAGIVKRIYADYLAGKSITKITKELNREGHIGKGVNWSYRTVRQILGNVTYTGRILFKGQVYDGLHTGIISKADWDEAQRVLKIRQLDQAKKSNNPRPFQAQYMLSGLLKCHYCGATLAIAKSHTKNGPLWRYVCPTRHVNKYHRNNAARYRIPPVNCELTYKYKDDLEKAVLREVKKVALDPDSVVASQDDGQPTIDKQAIKAQLAKIKRKQAKLVDLYLLSDDLNVDQLHDRAEKLKVQADALQAQLIHNTKKVDAFKKTATDAKRIDQLDYEHQTAIVRMLIDHINVSNTGLDIYWQI

SEQ ID NO: 24187 - DNA, 50 bp, Lactobacillus fermentum
  source 1..50: mol_type = genomic DNA
taaaaagatttagagagcgtcatttcaaccaccatctctaaatcttttct

SEQ ID NO: 24188 - DNA, 40 bp, Lactobacillus fermentum; identical to SEQ ID NO: 6858
  source 1..40: mol_type = genomic DNA

SEQ ID NO: 24189 - DNA, 40 bp, Lactobacillus fermentum
  source 1..40: mol_type = genomic DNA
gaacaagacaatcgtcattttcaccagggtaaagcccttg

SEQ ID NO: 24190 - DNA, 50 bp, Lactobacillus fermentum
  source 1..50: mol_type = genomic DNA
ttaaaagatattatctgcctcattttagccagtgtcatgtcatcttttat

SEQ ID NO: 24191 - protein, 587 aa, Klebsiella quasivariicola
MPQLYSYIRWSSERQQKGTTRQRQVIGAKEFAIANGLELVEIEDPGVSAFRGKNTTHGKLGDFIDAVRQGAIPPDSWLYVENLDRLTRQEVTTAQKLFIELLDLGLTLVTGMDKRVYTLESVNKNPTDLMISLLLFSRANEESKTKQARTIGNVESLIERHRQGLPVNIKSCGRHPFWIEDSGSQYESVKRHAIYWEIAREAIELFLSGYGIYKVKRFLDEKYPNGLNGKEWGYQVLKKMRESRALIGERQINIGSHTYTLRDYYPSLCKNEVEFLHLQELKGQNSYKSKKNPSKEQIKLLSGLAILRCSKCGGTMSSFMNKGKPRYICLNGRHLQKGCVGWSLTAPLVDHCVIIALLMGYMDANRKERQDTSHISALIEAKKTSVGELNVSITNLVAVIEAGVNVSELASRLKILSTERETFLKDIERLKERKALIDSKGSFEVSMMDFINLIHWNVFSDYAHESRDKIRSTINKIIEHVIIDKTDGCITIKIKCRGSDEQLIFCGVGRKPHWKFDIALYVEHDKDGDTTFEEKSILPMANQLMEEATKQFALIREGYISYFGKVCEILAAIGYPDIDGAAFWPNR

SEQ ID NO: 24192 - DNA, 50 bp, Klebsiella quasivariicola
  source 1..50: mol_type = genomic DNA
caatatttttcttgatgtttcgggcaccctaatgataaaaatccaatctt

SEQ ID NO: 24193 - DNA, 40 bp, Klebsiella quasivariicola; identical to SEQ ID NO: 5518
  source 1..40: mol_type = genomic DNA

SEQ ID NO: 24194 - DNA, 40 bp, Klebsiella quasivariicola
  source 1..40: mol_type = genomic DNA
gtccacgaggtttttcgggtcgcccagggagacgaagccg

SEQ ID NO: 24195 - DNA, 50 bp, Klebsiella quasivariicola
  source 1..50: mol_type = genomic DNA
caatattttgtttaaggtcttgtgtcacttaatgatagggatacattctg

SEQ ID NO: 24196 - protein, 587 aa, Klebsiella pneumoniae
MPQLYSYIRWSSERQQKGTTRQRQVIGAKEFAIANGLELVEIEDPGVSAFRGKNTTHGKLGDFIDAVRQGAIPPDSWLYVENLDRLTRQEVTTAQKLFIELLDLGLTLVTGMDKRVYTLESVNNNPTDLMISLLLFSRANEESKTKQARTIGNVESLIERHRQGLPVNIKSCGRHPFWIEDSGSQYESVKRHAIYWEIAREAIELFLSGYGIYKVKRFLDEKYPNGLNGKEWGYQVLKKMRESRALIGERQINIGSHTYTLRDYYPSLCKNEVEFLHLQELKGQNSYKSKKNPSKEQIKLLSGLAILRCSKCGGTMSSFMNKGKPRYICLNGRHLQKGCVGWSLTAPLVDHCVIIALLMGYMDANRKERQDTSHISALIEAKNTSVGELNVSITNLVAVIESGVNVSELASRLKILSTERETFLKDIERLKERKALIDSKGSFEVSMMDFINLIHWNVFSDYAHESRDKIRSTINKIIEHVIIDKTDGCITIKIKCRGSDEQLIFCGVGRKPHWKFDIALYVEHDKDGDTTFEEKSILPMANQLMEEATKQFALIREGYISYFGKVCEILAAIGYPDIDGAAFWPNR

SEQ ID NO: 24197 - DNA, 50 bp, Klebsiella pneumoniae; identical to SEQ ID NO: 24192
  source 1..50: mol_type = genomic DNA

SEQ ID NO: 24198 - DNA, 40 bp, Klebsiella pneumoniae; identical to SEQ ID NO: 5518
  source 1..40: mol_type = genomic DNA

SEQ ID NO: 24199 - DNA, 40 bp, Klebsiella pneumoniae; identical to SEQ ID NO: 24194
  source 1..40: mol_type = genomic DNA

SEQ ID NO: 24200 - DNA, 50 bp, Klebsiella pneumoniae; identical to SEQ ID NO: 24195
  source 1..50: mol_type = genomic DNA

SEQ ID NO: 24201 - protein, 587 aa, Klebsiella pneumoniae
MPQLYSYIRWSSERQQKGTTRQRQVIGAKEFAIANGLELVEIEDPGVSAFRGKNTTHGKLGDFIDAVRQGAIPPDSWLYVENLDRLTRQEVTTAQKLFIELLDLGLTLVTGMDKRVYTLESVNKNPTDLMISLLLFSRANEESKTKQARTIGNVESLIERHRQGLPVNIKSCGRHPFWIEDSGSQYESVKRHAIYWEIAREAIELFLSGYGIYKVKRFLDEKYPNGLNGKEWGYQVLKKMRESRALIGERQINIGSHTYTLRDYYPSLCKNEVEFLHLQELKGQNSYKSKKNPSKEQIKLLSGLAILRCSKCGGTMSSFMNKGKPRYICLNGRHSQKGCVGWSLTAPLVDHCVIIALLMGYMDANRKERQDTSHISALIEAKKTSVGELNVSITNLVAVIEAGVNVSELASRLKILSTERETFLKDIERLKERKALIDSKGSFEVSMMDFINLIHWNVFSDYAHESRDKIRSTINKIIEHVIIDKTDGCITIKIKCRGSDEQLIFCGVGRKPHWKFDIALYVEHDKDGDTTFEEKSILPMANQLMEEATKQFALIREGYISYFGKVCEILAAIGYPDIDGAAFWPNR

SEQ ID NO: 24202 - DNA, 50 bp, Klebsiella pneumoniae; identical to SEQ ID NO: 24192
  source 1..50: mol_type = genomic DNA

SEQ ID NO: 24203 - DNA, 40 bp, Klebsiella pneumoniae; identical to SEQ ID NO: 5518
  source 1..40: mol_type = genomic DNA

SEQ ID NO: 24204 - DNA, 40 bp, Klebsiella pneumoniae; identical to SEQ ID NO: 24194
  source 1..40: mol_type = genomic DNA

SEQ ID NO: 24205 - DNA, 50 bp, Klebsiella pneumoniae; identical to SEQ ID NO: 24195
  source 1..50: mol_type = genomic DNA

SEQ ID NO: 24206 - protein, 587 aa, Klebsiella pneumoniae; identical to SEQ ID NO: 17411

SEQ ID NO: 24207 - DNA, 50 bp, Klebsiella pneumoniae
  source 1..50: mol_type = genomic DNA
caatgtttttcttgatgttttgggcaccctaatgataaaaatccaatctt

SEQ ID NO: 24208 - DNA, 40 bp, Klebsiella pneumoniae; identical to SEQ ID NO: 5518
  source 1..40: mol_type = genomic DNA

SEQ ID NO: 24209 - DNA, 40 bp, Klebsiella pneumoniae; identical to SEQ ID NO: 24194
  source 1..40: mol_type = genomic DNA

SEQ ID NO: 24210 - DNA, 50 bp, Klebsiella pneumoniae; identical to SEQ ID NO: 24195
  source 1..50: mol_type = genomic DNA

SEQ ID NO: 24211 - protein, 587 aa, Klebsiella oxytoca; identical to SEQ ID NO: 24196

SEQ ID NO: 24212 - DNA, 50 bp, Klebsiella oxytoca; identical to SEQ ID NO: 24192
  source 1..50: mol_type = genomic DNA

SEQ ID NO: 24213 - DNA, 40 bp, Klebsiella oxytoca
  source 1..40: mol_type = genomic DNA
gtccaccagatttttcgggcagcccagagagacaaagccg

SEQ ID NO: 24214 - DNA, 40 bp, Klebsiella oxytoca
  source 1..40: mol_type = genomic DNA
gtccaccagatttttcgggtcgcccagagagacaaagccg

SEQ ID NO: 24215 - DNA, 50 bp, Klebsiella oxytoca; identical to SEQ ID NO: 24195
  source 1..50: mol_type = genomic DNA

SEQ ID NO: 24216 - protein, 587 aa, Raoultella ornithinolytica; identical to SEQ ID NO: 24191

SEQ ID NO: 24217 - DNA, 50 bp, Raoultella ornithinolytica; identical to SEQ ID NO: 24192
  source 1..50: mol_type = genomic DNA

SEQ ID NO: 24218 - DNA, 40 bp, Raoultella ornithinolytica
  source 1..40: mol_type = genomic DNA
gtccacgaggtttttcgggcagcccagagagacaaagccg

SEQ ID NO: 24219 - DNA, 40 bp, Raoultella ornithinolytica
  source 1..40: mol_type = genomic DNA
gtccacgaggtttttcgggtcgcccagagagacaaagccg

SEQ ID NO: 24220 - DNA, 50 bp, Raoultella ornithinolytica; identical to SEQ ID NO: 24195
  source 1..50: mol_type = genomic DNA

SEQ ID NO: 24221 - protein, 587 aa, Klebsiella aerogenes; identical to SEQ ID NO: 24191

SEQ ID NO: 24222 - DNA, 50 bp, Klebsiella aerogenes; identical to SEQ ID NO: 24192
  source 1..50: mol_type = genomic DNA

SEQ ID NO: 24223 - DNA, 40 bp, Klebsiella aerogenes
  source 1..40: mol_type = genomic DNA
gtctaccaggtttttcgggcagcccagggagacgaagccg

SEQ ID NO: 24224 - DNA, 40 bp, Klebsiella aerogenes
  source 1..40: mol_type = genomic DNA
gtctaccaggtttttcgggtcgcccagggagacgaagccg

SEQ ID NO: 24225 - DNA, 50 bp, Klebsiella aerogenes; identical to SEQ ID NO: 24195
  source 1..50: mol_type = genomic DNA

SEQ ID NO: 24226 - protein, 629 aa, Enterobacter cloacae
MPQLYSYIRWSTDRQDKGTTRTRQVAAAKAYAEEAGLEMVEIIEPGVSAFRGKNRAGKLGDFIDAVKNAAIPSDSWLYCENLDRLSRDQVDEALRLFLELIGLGLTIVTGMDRKVYNRDTIRQNPTDLMISILMFIRGNEESETKSNRTVGNVVALVERHKEGLPVNIKSVGRHPFWIDDTGSQYEAVKKHPFYWNIAREIIDMFLSGNGVYSVKKYLDEKYPNGLKGREWDYQVLKKMRDNRALIGERTINIRGVPYKLENYYPWLCKDEAEFFLLEKRKQQNNYKSKKDGADTIKLLSGLSILRCSKCGGTMHSFMNHGKARYICTNGVHLQKKCSGWSITAQLVEHCTMIALLIGYMDKSRKNGSDTTLIEEELNEKEKLIKSLDSKISNLVTAIAIAPDVNSLAHSLNEINSKRKELVLSVEKLKERLVSLQGKGSFEVDIMEFLILIQWAVFTNMEDNDRDKIRKIIDAIIEYIVVDKTNDCITIKIKYYGNDEVLVFGGVDRKPHWRFSIDFDTGKEGALTVLENDLINMPEIQKAVGYLHKLKESYVAMYDAAVTMLSEVGYPEIKGSQFWPNTGKHEKVTVAFEGVVYTISFNGRLPKAITSALETTGLTRQQFIEKFKVQ

SEQ ID NO: 24227 - DNA, 50 bp, Enterobacter cloacae
  source 1..50: mol_type = genomic DNA
gattttatttcttgatttttagggcaccctaatgatataaatccaatctt

SEQ ID NO: 24228 - DNA, 40 bp, Enterobacter cloacae
  source 1..40: mol_type = genomic DNA
atccaccaggtttttcgggcagcccagggagacaaagccg

SEQ ID NO: 24229 - DNA, 40 bp, Enterobacter cloacae; identical to SEQ ID NO: 24228
  source 1..40: mol_type = genomic DNA

SEQ ID NO: 24230 - DNA, 50 bp, Enterobacter cloacae
  source 1..50: mol_type = genomic DNA
cctttcattctgccttttattgggcaccctaaggattctctttcagtctt

SEQ ID NO: 24231 - protein, 499 aa, Escherichia coli; identical to SEQ ID NO: 8566

SEQ ID NO: 24232 - DNA, 50 bp, Escherichia coli
  source 1..50: mol_type = genomic DNA
tcttgttcactttgaaactatattgtgattttgttgcaaagaagcaaaat

SEQ ID NO: 24233 - DNA, 40 bp, Escherichia coli; identical to SEQ ID NO: 4473
  source 1..40: mol_type = genomic DNA

SEQ ID NO: 24234 - DNA, 40 bp, Escherichia coli
  source 1..40: mol_type = genomic DNA
cttactgccgaactgcatgttgacgttactggaaactaac

SEQ ID NO: 24235 - DNA, 50 bp, Escherichia coli
  source 1..50: mol_type = genomic DNA
tgttgttcatggctcaactgtatttttctttttctggtctcaattaaaat

SEQ ID NO: 24236 - protein, 484 aa, Streptococcus dysgalactiae; identical to SEQ ID NO: 1986

SEQ ID NO: 24237 - DNA, 50 bp, Streptococcus dysgalactiae; identical to SEQ ID NO: 1987
  source 1..50: mol_type = genomic DNA

SEQ ID NO: 24238 - DNA, 40 bp, Streptococcus dysgalactiae
  source 1..40: mol_type = genomic DNA
aagtgcgttttcagtcattgacaggaatgtcaaggctgat

SEQ ID NO: 24239 - DNA, 40 bp, Streptococcus dysgalactiae
  source 1..40: mol_type = genomic DNA
aagtgcgttttcagtcattagcaggaatgtcaaggctgat

SEQ ID NO: 24240 - DNA, 50 bp, Streptococcus dysgalactiae
  source 1..50: mol_type = genomic DNA
gcgtgaattttaattagtaggcaaagatgcagagtagatacaattcttac

SEQ ID NO: 24241 - protein, 537 aa, Enterococcus faecium; identical to SEQ ID NO: 17731

SEQ ID NO: 24242 - DNA, 50 bp, Enterococcus faecium; identical to SEQ ID NO: 3072
  source 1..50: mol_type = genomic DNA

SEQ ID NO: 24243 - DNA, 40 bp, Enterococcus faecium; identical to SEQ ID NO: 6568
  source 1..40: mol_type = genomic DNA

SEQ ID NO: 24244 - DNA, 40 bp, Enterococcus faecium; identical to SEQ ID NO: 6568
  source 1..40: mol_type = genomic DNA

SEQ ID NO: 24245 - DNA, 50 bp, Enterococcus faecium
  source 1..50: mol_type = genomic DNA
aaacattttaaaacatgggaaagaggagtttcccaaatatcatcatatag

SEQ ID NO: 24246 - protein, 537 aa, Clostridioides difficile
MKQQIYNTALYLRLSRDDELQGESSSITTQRSMLRLYAKEHHLNVIDEYIDDGWSGTNFDRPSFQRMIEDIEAGKINCVVTKDLSRLGRNYIMTGQYTELYFPSHNVRYIAIDDGVDSEKGESEIAPFKNIINEWVARDTSRKVKSAFKTKFAEGAHYSAYAPLGYKKHPDIKGKLLIDDETKWIIEKIFSLAYQGYGSAKITKQLRAEKVPTASWLNFTRYGTFAHIFEGKPESKRYEWTIAHVKAILKSEVYIGNSVHNMQSTVSFKSKKKVRKPESEWFRVENTHEPIIDKEVFYRVQEQIKSRRRQTKEKATPIFAGLVKCADCGWSMRFGTNKTNKTPYSYYACSYYGQFGKGNCSMHYIRYDVLYQAVLERLQYWAKAVQQDEEKVLNKIQKVGNAERIREKKKKASTLKKAENRQNEIDRLFAKMYEDRACEKITERNFVMLSSKYQKEQIELEQQITSLREELSKMEQDMIGAEKWIELIKEYSVPKELTAPLLNAMIEKILIHEATTNEDNERIQEIEIYYRFIGKVE

SEQ ID NO: 24247 - DNA, 50 bp, Clostridioides difficile; identical to SEQ ID NO: 3072
  source 1..50: mol_type = genomic DNA

SEQ ID NO: 24248 - DNA, 40 bp, Clostridioides difficile
  source 1..40: mol_type = genomic DNA
aatatctaaatgggagcaaggattgtcggttcctgattct

SEQ ID NO: 24249 - DNA, 40 bp, Clostridioides difficile; identical to SEQ ID NO: 24248
  source 1..40: mol_type = genomic DNA

SEQ ID NO: 24250 - DNA, 50 bp, Clostridioides difficile; identical to SEQ ID NO: 24245
  source 1..50: mol_type = genomic DNA

SEQ ID NO: 24251 - protein, 537 aa, Amedibacillus dolichus
MKQQIYNTALYLRLSRDDELQGESSSITTQRSMLRLYAKEHHLNVIDEYIDDGWSGTNFDRPSFQRMIEDIEAGKINCVVTKDLSRLGRNYIMTGQYTELYFPSHNVRYIAIDDGVDSEKGESEIAPFKNIINEWVARDTSRKVKSAFKTKFAEGAHYGAYAPLGYKKHPDIKGKLLIDDETKWIIEKIFSLAYQGYGSAKITKQLRAEKVPTASWLNFTRYGTFAHIFEGNPESKRYEWTIAHVKAILKSEVYIGNSVHNMQSTVSFKSKKKVRKPESEWFRVENTHEPIIDKEVFYRVQEQIKSRRRQTKEKATPIFAGLVKCADCGWSMRFGTNKANKTPYSYYACSYYGQFGKGNCSMHYIRYDVLYQAVLERLQYWAKAVQQDEEKALNKIQKVGNAERIREKKKKASTLKKAENRQSEIDRLFAKMYEDRACEKITERNFVMLSSKYQKEQIELEQQITSLREELSKMEQDMIGAEKWIELIKEYSIPKELTAPLLNAMIEKILIHEATTNEDNERIQEIEIYYRFIGKVE

SEQ ID NO: 24252 - DNA, 50 bp, Amedibacillus dolichus; identical to SEQ ID NO: 3072
  source 1..50: mol_type = genomic DNA

SEQ ID NO: 24253 - DNA, 40 bp, Amedibacillus dolichus
  source 1..40: mol_type = genomic DNA
tatatgctgcttggaaatcggaaaatgaatgccggacata

SEQ ID NO: 24254 - DNA, 40 bp, Amedibacillus dolichus; identical to SEQ ID NO: 24253
  source 1..40: mol_type = genomic DNA

SEQ ID NO: 24255 - DNA, 50 bp, Amedibacillus dolichus; identical to SEQ ID NO: 24245
  source 1..50: mol_type = genomic DNA

SEQ ID NO: 24256 - protein, 505 aa, Klebsiella pneumoniae
MTLAFSYVRFSTKHQASGTSLERQVNASKLFCSQNGLTLSNQSYHDLGISGFKNVRRPELEQMLEAIQTGDIPSGSYILIEAIDRLSRKGISHTQDILKKILQYDVKVAFVGEDAKTLQGHILNKDSLNDLSSVILVALAADLAHKESLRKSKLVKASKAIAREKAADGEILPGKSVFYLDYDKKNKKYVFNKRVDLARKIIQMRLEGKGPRKIARLLNEENIPGPTGKQWYQMSVKRLLKSPVLYGAYQTHQIIEEKYIPVSLIENYYPALIDYQTFSQIQFDDKRVSKGRPSRHKFSGVLYCECGAVLCRKVNTYETKQGPKEYQYFNCFGAFEGRCKNNKAIKDLHIPLGKAIDKLQIKTRSVKNIKNEQIIAKREKIDQLNKMLLELEMPPVSVLKTISTLEKELQELLEQPDVQPPKSADVKTLVAIKDAEQYNLYLKRLVKRITIFQLNGPKNIRIKIEKTDGHYQSFIVNNGKIMFNADTKALQEHLRKLKEGTSDED

SEQ ID NO: 24257 - DNA, 50 bp, Klebsiella pneumoniae
  source 1..50: mol_type = genomic DNA
ttttgtcaaaatgaaactgttctccgggtaatagtatcattttacaaaag

SEQ ID NO: 24258 - DNA, 40 bp, Klebsiella pneumoniae
  source 1..40: mol_type = genomic DNA
atatgaaagaactattacccgcggcacatttctgcgaggg

SEQ ID NO: 24259 - DNA, 40 bp, Klebsiella pneumoniae
  source 1..40: mol_type = genomic DNA
atatgaaagaactattacctacggcacatttctgcgaggg

SEQ ID NO: 24260 - DNA, 50 bp, Klebsiella pneumoniae
  source 1..50: mol_type = genomic DNA
ttttgacaactgtgtcttgttctctaggtaagagcaaagttctaaaatag

SEQ ID NO: 24261 - protein, 505 aa, Klebsiella pneumoniae
MTLAFSYVRFSTKHQASGTSLERQVNASKLFCSQNGLTLSNQSYHDLGISGFKNVRRPELEQMLEAIQTGDIPSGSYILIEAIDRLSRKGISHTQDILKKILQYDVKVAFVGEDAKTLQGHILNKDSLNDLSSVILVALAADLAHKESLRKSKLVKASKAIAREKAADGEILPGKSVFYLDYDKKNKKYVFNKRVDLARKIIQMRLEGKGPRKIARLLNEENIPGPTGKQWYQMSVKRLLKSPVLYGAYQTHQIIEEKYIPVSLIENYYPALIDYQTFSQIQFDDKRVSKGRPSRHKFSGVLYCECGAVLCRKVNTYETKQGPKEYQYFNCFGAFEGRCKNNKAIKDLHIPLEKAIDKLQIKTRSVKNIKNEQIIAKREKIDQLNKMLLELEMPPVSVLKTISTLEKELQELLEQPDVQPPKSADVKALVAIKDAEQYNLYLKRLVKRITIFQLNGPKNIRIKIEKTDGHYQSFIVNNGKIMFNADTKALQEHLRKLKEGTSDED

SEQ ID NO: 24262 - DNA, 50 bp, Klebsiella pneumoniae; identical to SEQ ID NO: 24257
  source 1..50: mol_type = genomic DNA

SEQ ID NO: 24263 - DNA, 40 bp, Klebsiella pneumoniae; identical to SEQ ID NO: 883
  source 1..40: mol_type = genomic DNA

SEQ ID NO: 24264 - DNA, 40 bp, Klebsiella pneumoniae
  source 1..40: mol_type = genomic DNA
ccctcgcagaaatgtgccgtaggtaatagttctttcatat

SEQ ID NO: 24265 - DNA, 50 bp, Klebsiella pneumoniae; identical to SEQ ID NO: 24260
  source 1..50: mol_type = genomic DNA

SEQ ID NO: 24266 - protein, 505 aa, Klebsiella pneumoniae
MTLAFSYVRFSTKHQASGTSLERQVNTSKLFCSQNGLTLSNQSYHDLGISGFKNVRRPELEQMLEAIQTGDIPSGSYILIEAIDRLSRKGISHTQDILKKILQYDVKVAFVGEDAKTLQGHILNKDSLNDLSSVILVALAADLAHKESLRKSKLVKASKAIAREKAADGEILPGKSVFYLDYDKKNKKYVFNKRVDLARKIIQMRLEGKGPRKIARLLNEENIPGPTGKQWYQMSVKRLLKSPVLYGAYQTHQIIEEKYIPVSLIENYYPALIDYQTFSQIQFDDKRVSKGRPSRHKFSGVLYCECGAVLCRKVNTYETKQGPKEYQYFNCFGAFEGRCKNNKAIKDLHIPLEKAIDKLQIKTRSVKNIKNEQIIAKREKIDQLNKMLLELEMPPVSVLKTISTLEKELQELLEQPDVQPPKSADVKTLVAIKDAEQYNLYLKRLVKRITIFQLNGPKNIRIKIEKTDGHYQSFIVNNGKIMFNADTKALQEHLRKLKEGTSDED

SEQ ID NO: 24267 - DNA, 50 bp, Klebsiella pneumoniae; identical to SEQ ID NO: 24257
  source 1..50: mol_type = genomic DNA

SEQ ID NO: 24268 - DNA, 40 bp, Klebsiella pneumoniae; identical to SEQ ID NO: 883
  source 1..40: mol_type = genomic DNA

SEQ ID NO: 24269 - DNA, 40 bp, Klebsiella pneumoniae; identical to SEQ ID NO: 24264
  source 1..40: mol_type = genomic DNA

SEQ ID NO: 24270 - DNA, 50 bp, Klebsiella pneumoniae; identical to SEQ ID NO: 24260
  source 1..50: mol_type = genomic DNA

SEQ ID NO: 24271 - protein, 505 aa, Klebsiella pneumoniae
MTLAFSYVRFSTKHQASGTSLERQVNASKLFCSQNGLTLSNQSYHDLGISGFKNVRRPELEQMLEAIQTGDIPSGSYILIEAIDRLSRKGISHTQDILKKILQYDVKVAFVGEDAKTLQGHILNKDSLNDLSSVILVALAADLAHKESLRKSKLVKASKAIARDKAADGEILPGKSVFYLDYDKKNKKYVFNKRVDLARKIIQMRLEGKGPRKIARLLNEENIPGPTGKQWYQMSVKRLLKSPVLYGAYQTHQIIEEKYIPVSLIENYYPALIDYQTFSQIQFDDKRVSKGRPSRHKFSGVLYCECGAVLCRKVNTYETKQGPKEYQYFNCFGAFEGRCKNNKAIKDLHIPLEKAIDKLQIKTRSVKNIKNEQIIAKREKIDQLNKMLLELEMPPVSVLKTISTLEKELQELLEQPDIQPPKSADVKTLVAIKDAEQYNLYLKRLVKRITIFQLNGPKNIRIKIEKTDGHYQSFIVNNGKIMFNADTKALQEHLRKLKEGTSDED

SEQ ID NO: 24272 - DNA, 50 bp, Klebsiella pneumoniae; identical to SEQ ID NO: 24257
  source 1..50: mol_type = genomic DNA

SEQ ID NO: 24273 - DNA, 40 bp, Klebsiella pneumoniae; identical to SEQ ID NO: 24258
  source 1..40: mol_type = genomic DNA

SEQ ID NO: 24274 - DNA, 40 bp, Klebsiella pneumoniae; identical to SEQ ID NO: 24259
  source 1..40: mol_type = genomic DNA

SEQ ID NO: 24275 - DNA, 50 bp, Klebsiella pneumoniae; identical to SEQ ID NO: 24260
  source 1..50: mol_type = genomic DNA

SEQ ID NO: 24276 - protein, 505 aa, Klebsiella pneumoniae; identical to SEQ ID NO: 881

SEQ ID NO: 24277 - DNA, 50 bp, Klebsiella pneumoniae; identical to SEQ ID NO: 24257
  source 1..50: mol_type = genomic DNA

SEQ ID NO: 24278 - DNA, 40 bp, Klebsiella pneumoniae; identical to SEQ ID NO: 883
  source 1..40: mol_type = genomic DNA

SEQ ID NO: 24279 - DNA, 40 bp, Klebsiella pneumoniae; identical to SEQ ID NO: 24264
  source 1..40: mol_type = genomic DNA

SEQ ID NO: 24280 - DNA, 50 bp, Klebsiella pneumoniae; identical to SEQ ID NO: 24260
  source 1..50: mol_type = genomic DNA

SEQ ID NO: 24281 - protein, 551 aa, Anaerobutyricum hallii
MHIRNILKKGYSLFCYLQLYFRWYNKVVTERLKYNRKVLDMNIAAYCRVSTDKADQLNSLEAQKEFFSEYTQRTGDNLVRLYADEGISGTKIKNRKEFLRMMADAEHGLFDMVVVKDISRFARNTVDLLQNVRKLKALGIETQFLTANMTSMGNSEFVLTIFGALAQEESANTSKRVKFGKKMNAEKGRVPNIVYGYDKTIGDYFNLAINEEEAAVIRQIYKWYIEEGYGAAKIANMLNAKGIRTKRNCQWSQNATCRILTNELYTGKIINGKQEVADFLTGQRTEKDETEWMVTERPELRIIEPEMYEKAQEILECRSKTFKLTKERQSNKYLFSTLIKCKECGWSFRRTVRTYKNTYIRWVCSGHNGRGADSCPNAQTVDEEELIEVLSEYFSELLKAKKNVIRHVTGEFQRVYKAKDENLNYEKELNAQLHKLQKMRQKYMDMYTDDLITREELNEKIGGTKQEIERLENELKMVAYHLTKGEQLETILNRTFKEIEDISDVHQMTNAQLKRIIQKIEVDKDGNVDIYLRIFGDLGLDEIVLISDNQT

SEQ ID NO: 24282 - DNA, 50 bp, Anaerobutyricum hallii
  source 1..50: mol_type = genomic DNA
tcgttctaattagtgacaaccaaacatatggtagcaacaaaatagaacgg

SEQ ID NO: 24283 - DNA, 40 bp, Anaerobutyricum hallii
  source 1..40: mol_type = genomic DNA
gataagcaaaagtacggtacataaagatgtcacagaccgg

SEQ ID NO: 24284 - DNA, 40 bp, Anaerobutyricum hallii
  source 1..40: mol_type = genomic DNA
gataagcaaaagtacggtatataaagatgtcacagaccgg

SEQ ID NO: 24285 - DNA, 50 bp, Anaerobutyricum hallii
  source 1..50: mol_type = genomic DNA
tatttataattttggaaaaccaaatacattttagcataaccatagaatga

SEQ ID NO: 24286 - protein, 516 aa, Pseudomonas putida
MPTAFSYARFSSSTQKKGSSLERQKTMVARWLVAHPDYSLSDQTFQDLGKSGWKGEHIKEGGGFAELLAAVQAGLIQKGDAVLVEAIDRTGRLPVLDMLSNIVSPILRAGVSIVTLEDSLVFTEASLNEGGHIYILVGKIQAARQYSDNLSRRLTASYDSRRRLAKEGTPPKRNTPVWLTSKGEVIQEIADQIKLAFELYTSGLGKAVIAKRMRESGVPALAKTSGPGVEGWLRNEAAIGRWNGAEVYKPIVDLSRYQLAQIEGERRKTAPTAKTATHFYVGLVKCGSCGGNFIMRTIKGVQVSMRCRKRQELKGCDNKKVIPKVVIDAVYRYTATPAARKVVAHEHRGVNEKAIIAAEARVLELSKGIEEMAQAFRGGRKIPEVVDQIRAMDGEREAVERELVLLKAKVERSPTNWRVQGRVDDLGRTDPQRLAAMLRSVGYTITIHTDGRLCTSESETVYRYAGVDRREDMYRLAVVGGKELLVSKIAEEVFDEWWEPGDGDEVIESTYTDGSE

SEQ ID NO: 24287 - DNA, 50 bp, Pseudomonas putida
  source 1..50: mol_type = genomic DNA
tatgtgtacatgtgaaattgttgcttgtaggtatttcacatgtttacaat

SEQ ID NO: 24288 - DNA, 40 bp, Pseudomonas putida
  source 1..40: mol_type = genomic DNA
tttgtgcatgaggcgcttcttgtaggtgctgacagtcttg

SEQ ID NO: 24289 - DNA, 40 bp, Pseudomonas putida
  source 1..40: mol_type = genomic DNA
tttgtgcatgaggcgcttcaagtaggtgctgacagtcttg

SEQ ID NO: 24290 - DNA, 50 bp, Pseudomonas putida
  source 1..50: mol_type = genomic DNA
aatgtttacacatgggatttttgcaagtatttttttttaatttttacaat

SEQ ID NO: 24291 - protein, 554 aa, Rhizobium leguminosarum
MKLKAYSYIRMSTDIQLKGDSLRRQSEESRRYADENDLDLVEDFRLEDIGVSAFHGKNVAQGALGEFLVLCEQQIIQAGSYLIVESLDRISRQNPQVATSLFLQILGAGINIVTLTDRHVYRAGSSDFTDIIVSVVIMSRAYEESRTKSLRVGAAWENKRRNIHDKKLTQVAPIWLRLSADRTAFETVPERVAVLRWIFDEADQGKGSLQISRALNQQGVPTFAPSKGWYESYVSKVLTNRAVLGEFQPHRYIDGKRMRSGEPIPNYFPAIVTREQFERIQVGRAVRRVRGAGRKGRNNINLFQGVATCGYCSARMMIVNKGTGPKGGVYLRCDRARRNADCSASGWPLDHFEGAFLWFVEELDIGAIVQGAASEEARKALEGQAATISADLETQKKIRERAFDLLGEPTSATAFVRGKIDDASMKIDELEMKLASIKEATMIAAASQKRPLEEVRLMIKEIGGWQTADGDSRSRVADWIKRNVKELLLFTDGLDQSDQIAADAKLRQFSVALVGGEFRTVQIGGNDPTVASYSVHANDDQWVLTQDGERSFHR

SEQ ID NO: 24292 - DNA, 50 bp, Rhizobium leguminosarum
  source 1..50: mol_type = genomic DNA
tctggattaatccacctcataatccagatgttgaggtggattaattaatg

SEQ ID NO: 24293 - DNA, 40 bp, Rhizobium leguminosarum
  source 1..40: mol_type = genomic DNA
gcctggcaaggtcggcatgcagatcgtcggtctgcccgac

SEQ ID NO: 24294 - DNA, 40 bp, Rhizobium leguminosarum
  source 1..40: mol_type = genomic DNA
gcctggcaaggtcggcatgaagatcgtcggtctgcccgac

SEQ ID NO: 24295 - DNA, 50 bp, Rhizobium leguminosarum
  source 1..50: mol_type = genomic DNA
tctggattaacacacacaataataaagtagttgcggatatttaattagtt

SEQ ID NO: 24296 - protein, 545 aa, Flavonifractor plautii
MPEVLQQMLNYVIAIYIRLSAEDGDLSDEKNESNSVVNQRAYIRRFIELRPEFAGAQILEFCDDGYSGTNMERPAVRRLLEQVRQRKINCIIVKDMSRFGRDYIVVGDYLEQIFPFLDVRFIAINDSYDSKDHKYGSAGLIDVSFRNVIYDLYSKDLSEKVRSTKKQLAEKGYCVAPYAFFGYQKAPGNKHTLLVDEDAAAVVRRVFDLFTSGLSTTEIARKFNTEGVLTPLQRKRLQKVNRRWNCVDQSKNYWTSAMVRKILDDERYTGKAIYGKTTRKKVGSSRVKAVTEDQWTVVDGAFPAIITQEIFNTAKSLNRNSHPGSAGESTRVFYRKIRCGHCGLAMERLQSAHPCYVCRTDRYKPDIGCPQDRIDEKELEQTVLAAIRMMAQLVRGAVQAKQRQSAKDTRYNQRLDRQIKAHQNSIQMRQQEKMAAFEDMVSGKVSAEDYQHKRGQCEKHIQRLETKIKELGDAKRRAKEEELSTYNIIPYTNVRTLTRELVDLLIQNIYIYSSTSIEIVWKCGDEYQRLLADTTKKEAAEREQG

SEQ ID NO: 24297 - DNA, 50 bp, Flavonifractor plautii
  source 1..50: mol_type = genomic DNA
tttggttttctcttgacatcaggagatgatacagctatacttggactaaa

SEQ ID NO: 24298 - DNA, 40 bp, Flavonifractor plautii
  source 1..40: mol_type = genomic DNA
ctgcgcgggcattttcgccgacgagggcctgtcaggcacc

SEQ ID NO: 24299 - DNA, 40 bp, Flavonifractor plautii
  source 1..40: mol_type = genomic DNA
ctgcgcgggcattttcgccaacgagggcctgtcaggcacc

SEQ ID NO: 24300 - DNA, 50 bp, Flavonifractor plautii
  source 1..50: mol_type = genomic DNA
tttggttttaattatatatcaagcaatcaaacagctaggataggactcta

SEQ ID NO: 24301 - protein, 476 aa, Mycobacterium kubicae; identical to SEQ ID NO: 15291

SEQ ID NO: 24302 - DNA, 50 bp, Mycobacterium kubicae; identical to SEQ ID NO: 15292
  source 1..50: mol_type = genomic DNA

SEQ ID NO: 24303 - DNA, 40 bp, Mycobacterium kubicae
  source 1..40: mol_type = genomic DNA
caaatgtttgtgccgaaaacatcatctgctcaagaccttt

SEQ ID NO: 24304 - DNA, 40 bp, Mycobacterium kubicae
  source 1..40: mol_type = genomic DNA
caaatgtttgtgccgaaaaaatcatctgctcaagaccttt

SEQ ID NO: 24305 - DNA, 50 bp, Mycobacterium kubicae
  source 1..50: mol_type = genomic DNA
aaatgtattacctgtgaccagtccaatcacctgctagcgagtgtacatta

SEQ ID NO: 24306 - protein, 476 aa, Mycobacterium kubicae; identical to SEQ ID NO: 15291

SEQ ID NO: 24307 - DNA, 50 bp, Mycobacterium kubicae; identical to SEQ ID NO: 15292
  source 1..50: mol_type = genomic DNA

SEQ ID NO: 24308 - DNA, 40 bp, Mycobacterium kubicae
  source 1..40: mol_type = genomic DNA
gaaatgcctgtgccggttgcatcatcggctcaagaccttc

SEQ ID NO: 24309 - DNA, 40 bp, Mycobacterium kubicae
  source 1..40: mol_type = genomic DNA
gaaatgcctgtgccggttgaatcatcggctcaagaccttc

SEQ ID NO: 24310 - DNA, 50 bp, Mycobacterium kubicae; identical to SEQ ID NO: 24305
  source 1..50: mol_type = genomic DNA

SEQ ID NO: 24311 - protein, 669 aa, Vibrio parahaemolyticus
MQLSEMVQATDDMKPVVITYTRFSTNIQKDGLSEFRQNELTQRYVLDFCEENGVPVEDIISLKDRGISAYRGKNMTKGSLSEIIAKFKSDELPKVYNEQGEINTFLFIESLDRLSRADLHTANKLFLDLVEYCNIVVVAENEKKIYSLNSLKTDLGMLDLFSALLTLSRSHNESRMKEMRHRANWSKKRQVVIDYFELPEDEREGVEYPLNPTKTCPWWLRPKENNRGFEFIEEHKKAMLYFLNRMINGHGLTSSIRRLNEKIENGDFKVEFTERQKKAKGFQTHTFYQLLSGNDNESIIGNLIFHQDYYPTEKDIQQGLYEPKTLGKKVRIPVFTAKGFYPALLSEVEYMRLKQQMKQRKQSQTKPTKKVQNIAQGLLKCPLCGYSYVYVADNRQGRHHNLVCSFSRSKKCKAYTFRYKWFEKNLLNYCRNLDMNRIMGIKVDNRIKEEIAELEINLDVYEKEIEAKSAELEQLVTNLSKITIPSLLEKAQDQFVKMENDIKVITYEREKTEIELLDLRKRSIKSNVVSNEMYKLIDSVQLKDNINLRERLNLELKKVITELYIYHKDNPNNYFGRNMIVVKFRDEYIRFIPLDRELEREELYNILPTISTKKAVDYSNYQILPFDYLDGLAEGRYPEHQFITKFYQENPDVLAEILKELDEADDVYV

SEQ ID NO: 24312 - DNA, 50 bp, Vibrio parahaemolyticus
  source 1..50: mol_type = genomic DNA
tgctgaactttactttttactatattcatagtgacaaacaaagtttagca

SEQ ID NO: 24313 - DNA, 40 bp, Vibrio parahaemolyticus; identical to SEQ ID NO: 23278
  source 1..40: mol_type = genomic DNA

SEQ ID NO: 24314 - DNA, 40 bp, Vibrio parahaemolyticus
  source 1..40: mol_type = genomic DNA
tgcaatgatcatcactttatcgatcatccaaaccattgca

SEQ ID NO: 24315 - DNA, 50 bp, Vibrio parahaemolyticus
  source 1..50: mol_type = genomic DNA
tgctaaaatgcaggtattatcatctccataatgacaaaggttgtttagcc

SEQ ID NO: 24316 - protein, 668 aa, Faecalibacterium prausnitzii
MRLQNQKSIVSLLHIVSPLKIKEGETMAKSNQGKITALYERLSRDDELQGESNSILNQKKYLEDYARKNGFNNIQHFTDDGYSGTNFNRPGFQSMIAEIDAGHIATVIVKDMSRFGRNYLEVGFYTEIQFPSKGVRFIAINNNVDSANPTDNDFTPFLNIMNEWYAKDTSNKIRAVFKSRMQDGKRCSGSIPYGYKRVPGDKQTLHVDEEAASVVRRIFDMAASGASLAQIGQTLSDEKVLIPSAYEERYHPESARHHSYHDPYRWNTNTLTYILDRQEYLGHTVLCKSIRENFKLKKRRAATPEERIVFKNTHEAIIDQETWDKAQRLRKRNPKKLPSGTYSHRLAGMVFCADCGSRMSFSSPESKHRDSDVVYDSDSSWQCSKYRNMYVSCTSHFIKTSTIEAAILNAIKAMTKEIIENEDEFAEQLQVAWENQNTQVSSESKKELHSVQKRIDELDALIRSLYENSVLGKIPERQYQRLMAQYDEEQAVCEARIAELKKELDVVETTKVDLKRFIKLIRKYKDCETLTDEMLYELVEKVVIHSASGGRTIYRQQQIDIYFNFIGDTFPSQIEISRGDKKNLTEQQLAKRKKYQNTAGENRKKKRAALREAAKTDPQAAAEYEALLQKGRERCRKYAQNKKLAQQESADTVPIQFEPSEEMKGESA

SEQ ID NO: 24317 - DNA, 50 bp, Faecalibacterium prausnitzii
  source 1..50: mol_type = genomic DNA
ttttatcttgacaaaatgcagcccaagggttataattatcgaggataaag

SEQ ID NO: 24318 - DNA, 40 bp, Faecalibacterium prausnitzii
  source 1..40: mol_type = genomic DNA
atttgtggtcactgacccgaaaggtactctggttctggaa

SEQ ID NO: 24319 - DNA, 40 bp, Faecalibacterium prausnitzii
  source 1..40: mol_type = genomic DNA
atttgtggtcactgacccgcaaggtactctggttctggaa

SEQ ID NO: 24320 - DNA, 50 bp, Faecalibacterium prausnitzii
  source 1..50: mol_type = genomic DNA
ttatatctttcactaaagcagcctcagggtacaaatgcaataagataaca

SEQ ID NO: 24321 - protein, 493 aa, Bacillus cereus
MIILLFNNENIKHVAVYLRLSRDEENQGIEQVLANHRQTLISLCNENKWSYELFEEVASSSTIVNREKMVKLLERVEQNYYDAVIVMDVDRLSRNEFDASLIKRILLETETYIVTPYRIYDLTKDDDSLLLGITNLIASGEYKQILKRMQRGKKFAQQQGLWTNGIAPLGYSKDQKTRKLVPNERAKDVQFIFSEIVKGTTIPELIRLLNNLGIKTRQGYDFKYNSIQRIINNDAYKGTIASNKTIGQYKPRPKEGWIIVHNAHPPIVDEATWETANKIVNEYSFKAPRSKNRIYPTSNLIYCANCGRIQGCNEHKRLNKVYIKHCKCGNRSFYYNTVLAIIKEEVLGYKETVLKELELLEVGTQVDDTQHRKETLLSRLNKSKKALKHNNFLFEEEEIDIIEYRERKAIRQEEIKLIEEEILALEKEDKSAKIDNLKEQIEAYENLVGNWDFLDGEGYSDEKINRTLHGLVSGILWTFRKGDKSPDLFIIYK

SEQ ID NO: 24322 - DNA, 50 bp, Bacillus cereus
  source 1..50: mol_type = genomic DNA
aaattatacccaaaaactgaacaaacttgttgagtacttagggacaacgt

SEQ ID NO: 24323 - DNA, 40 bp, Bacillus cereus
  source 1..40: mol_type = genomic DNA
actcgtatttactggaccgactggatctgggaagacgacg

SEQ ID NO: 24324 - DNA, 40 bp, Bacillus cereus
  source 1..40: mol_type = genomic DNA
actcgtatttactggaccgcatggatctgggaagacgacg

SEQ ID NO: 24325 - DNA, 50 bp, Bacillus cereus
  source 1..50: mol_type = genomic DNA
aaattacaccagttatctcacaaacatttttgagtatactaggaaaaaat

SEQ ID NO: 24326 - protein, 586 aa, Pseudomonas viridiflava
MPKIWPYIRFSSEEQKRGDSLRRQKDLIARFAARPEIIAEGAQIDESLNLNDLGVSGYTGKNLLKGRFKAFLDAVDSEVVKPGDYLAVEALNRITRLNPLESLPIILRLVQEKGVRIAITSSSQIYQRGDDISSLYIAIGELQRGYKESQEKGMRVKEAWDSKKRRAADFGEIATSRVPLWLSVDSIRLENGTIKRVITEIDERVAVVKEIFRLSDNNIGAVATARILTERGVPTFTRENARKNSNYGDFWQVTYVRKILANRAVLGRYQPMQWLVVDGRRTRVKHGSEIASYFPQIITSELFDRVQIKKDARRIEGQGNKGLRFSNLFTKIAFCSACGAVAHHVNKGKDLKKGGRYLVCYRAKYGSCSYKSWKYEKVEALILSYLAEADIKNIMHDEDKIELLVNERYKIESEQVAVAEMLDNFKRDFKALKGRVSNVERELAIENEARLAEIKLDLHALDTHILEAIEQQKTDIKNEVKVLQELDSVADEHKVFEVRSKINARLKLVVDSIVLNFELQLAEVRFKNGIVRHIHENGVFANILPPSTPEQSIEDMKEIEEWASLSDDEKKAKWANEKFRIVPLKI

SEQ ID NO: 24327 - DNA, 50 bp, Pseudomonas viridiflava
  source 1..50: mol_type = genomic DNA
gaggtccaatggttgtgttaaacaaggatttaagatagcattggaccttt

SEQ ID NO: 24328 - DNA, 40 bp, Pseudomonas viridiflava
  source 1..40: mol_type = genomic DNA
gccgggcggaccgctgaacagcaggttatgcgcgccggcc

SEQ ID NO: 24329 - DNA, 40 bp, Pseudomonas viridiflava
  source 1..40: mol_type = genomic DNA
gccgggcggaccgctgaacttcaggttatgcgcgccggcc

SEQ ID NO: 24330 - DNA, 50 bp, Pseudomonas viridiflava
  source 1..50: mol_type = genomic DNA
gatttccaaactaccctttaagcattgatttaggaaaaatctggtccttt

SEQ ID NO: 24331 - protein, 499 aa, Escherichia coli
MQKQNGLAYSYIRFSSKKQEQGDSVRRQTELAEKYAHENNLTLSEKNFQDLGISAFKEGNRPSLGDMLSAIEQGAIESGSTIIIESLDRLSRRGIDVTQQIIKSILQHNVFIASLVDGLLLNRESVNDLVSVIRIALAADLAHKESEKKSQRLRETKGQQRKAALEGKVINKILPFWLSREKDQFVFSDRLDAVKRIIELKRKGLGTNKIAKTLNDEGFKPLRSAGWNHTTVGKTISSVALYGAYQTTETTKDRKVILLDIIENYYPAVISKEDWMLLQSDAKQNKPGYKSEQNAFTGLIKHSCGGALVRKFHVVTGKTYQYHVCANARDGNCSVTKNFKNIEIALYKIMKHLKLEKKTTLDGTLVKERTETQEKIASLNEMLMTMAKPPMSVLTTISNLEEKLQELDQAISKQTDMVISENSVDFNLLSEVKDPLELNMLLKRVIKSIVVSNLEKSWRIKVLYLNGHSQSFRWDGKNITFKSDTKKLLEFMNSIEEKE

SEQ ID NO: 24332 - DNA, 50 bp, Escherichia coli
  source 1..50: mol_type = genomic DNA
aattagttgctttgaaactatattgtgatattgttgctaaggagcaaaat

SEQ ID NO: 24333 - DNA, 40 bp, Escherichia coli; identical to SEQ ID NO: 4473
  source 1..40: mol_type = genomic DNA

SEQ ID NO: 24334 - DNA, 40 bp, Escherichia coli
  source 1..40: mol_type = genomic DNA
cttactgccgaactgcatgaggacgttactggaaactaac

SEQ ID NO: 24335 - DNA, 50 bp, Escherichia coli
  source 1..50: mol_type = genomic DNA
aaatagtttatttcaaactattttagcatagttttaattaacagaaaaat

SEQ ID NO: 24336 - protein, 499 aa, Escherichia coli
MQKQNGLAYSYIRFSSKKQEQGDSVRRQTELAEKYAHENNLTLSEKNFQDLGISAFKEGNRPSLGDMLSAIEQGAIESGSTIIIESLDRLSRRGIDVTQQIIKSILQHNVFIASLVDGLLLNRESVNDLVSVIRIALAADLAHKESEKKSQRLRETKGQQRKAALEGKVINKILPFWLSREKDQFVFSDRLDAVKRIIELKRKGLGTNKIAKTLNDEGFKPLRSAGWNHTTVGKTISSVALYGAYQTTETTKDRKVILLDIIENYYPAVISKEDWMLLQSDAKQNKPGYKSEQNAFTGLIKHSCGGALVRKFHVVTGKTYQYHVCANARDGNCSVTKNFKNIEIALYKIMKHLKLEKKTTLDGTLVKERAEIQEKIASLNEMLMTMAKPPMSVLTTISNLEEKLQELDQAISKQTDMVISENSVDFNLLSEVKDPLELNMLLKRVIKSIVVSNLEKSWRIKILYLNGHSQSFRWDGKNITFKSDTKKLLEFMNSIEEKE

SEQ ID NO: 24337 - DNA, 50 bp, Escherichia coli; identical to SEQ ID NO: 24332
  source 1..50: mol_type = genomic DNA

SEQ ID NO: 24338 - DNA, 40 bp, Escherichia coli
  source 1..40: mol_type = genomic DNA
cttactgccgaactgcatggtgacgttactagaaactaac

SEQ ID NO: 24339 - DNA, 40 bp, Escherichia coli
  source 1..40: mol_type = genomic DNA
cttactgccgaactgcatgaggacgttactagaaactaac

SEQ ID NO: 24340 - DNA, 50 bp, Escherichia coli; identical to SEQ ID NO: 24335
  source 1..50: mol_type = genomic DNA

SEQ ID NO: 24341 - protein, 565 aa, Sphingobium xenophagum
MKPHAYIYARFSTKRQDRGESLSRQYELTQKMCEDNGWEVVETLTDKGQSAWRGNHLRVGELGRFKERIDHGDIPPGSYLVVENLDRLSRQDIKKARRWIEEVTDAGIRVAVASPAPGKIFDEVSLSGENIVDLLQYLLEAQRSNKEAERKSQFQQKAVEGFMNKARNGIVYSKRVPAWLKGEKNGSFEVDEIRAAVVRQIYEWCAAGQGIHLITKKLNASVEPWTVGHKSAPSWKVGYVRDILTGWQAEGEYHVRSGPNRVRTGEVITNYYPRVVPPELVAAARSAMDSRRGATGPNHSEAKNVFAGRVKCGHCGDTMIRTVQRNTRGTQYEYLKCTRFNNGAECVNTTLYRYDNFERAALDQILHLALDHSHFVRSDETGPLLAHVAQLSKDVELLETERSNLMAFIRKHGEDDDTERDIVLLRPKLAAARADLEKARDALERAKGHATPEEHLARVLEVKDAIASEDDEVRQEARRIVRDAVRSVVQVVTCRREYMEGRKTPNRQIQMTLAGGLLAFLFDNDGTLLQKVDKSSLPDEMLTGLKGTGAEQAIKDVKRRRSKAL

SEQ ID NO: 24342 - DNA, 50 bp, Sphingobium xenophagum
  source 1..50: mol_type = genomic DNA
tgtttgcactacaatttgtatgtgaacacgtaaaaacggttgtgcaaacc

SEQ ID NO: 24343 - DNA, 40 bp, Sphingobium xenophagum
  source 1..40: mol_type = genomic DNA
ggtgcgggtgctgcacctgaatgcgcgcaacatgctgatc

SEQ ID NO: 24344 - DNA, 40 bp, Sphingobium xenophagum; identical to SEQ ID NO: 24343
  source 1..40: mol_type = genomic DNA

SEQ ID NO: 24345 - DNA, 50 bp, Sphingobium xenophagum
  source 1..50: mol_type = genomic DNA
tctttgcagataaatttgtatgtgaatacttacaaaagaatgtagaagac

SEQ ID NO: 24346 - protein, 577 aa, Gordonia bronchialis
MGKSRPRALIVVRLSRVTDATTSPERQLEACRELCDQRGYEVVGVAEDLDVSAGATTPFDRPQLGPWLANRHNEIDVIVMYRMDRLVRRLLDLADVIRWGQERDVAIVSATEAFLDLTAPFGDIIAMLVAKTAEMELAAISARNASASTHNIRSGKWRGGVPPWGYVPERGDDKVWRLVQDPQQVEVIQEVAERVLAGERLRPIAADLTKRGVLTPKDRFAQVKGREVKGYAWSSQRMKESLLSRTLLGQIVTRDPVLDAKGEIQRDAKGQRILGPEFVVTDETGAPVVRAEPILTRAVFDRLGAALRSREVDRTATVTSGLLLQVLFCGECGRPAYRLTGGPGRKPRYRCAFAQDRSGAAGALGPCDNRSVPLDWADHEVEAHVLERLGSMERMTRVWFSGNDSRSELAEVDELLGDLTDQLGTGAFRRGTPQRERLDGRIRALTERQEELRVRPVEAPSWRYEGTGETVRAWWERSDSATRTAWLREHGIRATWLSSTEGGRTKIDSFEIDMGAPNLESGALPGWVASAAELKARGGWAWSVDDPVLKRAEESLPDVLAQIHWTQGDPDEGDSVE

SEQ ID NO: 24347 - DNA, 50 bp, Gordonia bronchialis
  source 1..50: mol_type = genomic DNA
agggtgtaattaggttctatggagtactcagtaagtcgttattcatgccc

SEQ ID NO: 24348 - DNA, 40 bp, Gordonia bronchialis
  source 1..40: mol_type = genomic DNA
cgcgatggtgccgatcgcgtattccgccgtggacatgccg

SEQ ID NO: 24349 - DNA, 40 bp, Gordonia bronchialis
  source 1..40: mol_type = genomic DNA
cgcgatggtgccgatcgcgacttccgccgtggacatgccg

SEQ ID NO: 24350 - DNA, 50 bp, Gordonia bronchialis
  source 1..50: mol_type = genomic DNA
atggtggaatctgcttctagggagacctcagggagcttttactcatggcg

SEQ ID NO: 24351 - protein, 486 aa, Microbacterium chengjingii
MRPAIDIRPATPRAVLYLRQSTYREESISLELQEAAGRAHAEKNGYRVVDVLADPGISGRTWKRPAVQRVMEMIEHGDADVIVLWRWSRLSRNRKDWALAADRADLAGGRIESATEPNDATAAGRFARGVMTELAAFESERIGEQWKEAHDRRRRLGLPAEGGPRFGYIKQDDGKYVPDNDQSIVLAEMYRRYNAGEGFTRIARSLNERGILTNAGNVWSRISVTQILDAGFGAGKIVHRPGRRKMKPSESIYLDGAHQPVISADDWRAYLARREDAPAPRVVEPKYILAGLIFCGDCGAPMHVGNRGLVDYKCSAKASGKTNTGLAIKRLRAEQFVTEWLFDLAGQVDELAAAETKAANRRVRAVNSREAITARIAKLDQRMARLTAKWLDGELPESAYKATIVQLDTERASLDARQKIDERQANREIDVRRLIVETVKVWADMTVLEKRSALQGCIARIDIMPPTRPGAGVWRERVKITTAWDT

SEQ ID NO: 24352 - DNA, 50 bp, Microbacterium chengjingii
  source 1..50: mol_type = genomic DNA
tacataggtttccgctttgcaacacacgttgtgatgcgcaaacatatgca

SEQ ID NO: 24353 - DNA, 40 bp, Microbacterium chengjingii
  source 1..40: mol_type = genomic DNA
cgtcgatggctcgcgccttcacgttgtgattcccgacgtc

SEQ ID NO: 24354 - DNA, 40 bp, Microbacterium chengjingii
  source 1..40: mol_type = genomic DNA
cgtcgatggctcgcgccttaacgttgtgattcccgacgtc

SEQ ID NO: 24355 - DNA, 50 bp, Microbacterium chengjingii
  source 1..50: mol_type = genomic DNA
tttctaggttgccttttttgaaaaaacgtagtgttgcccatacatatgca

SEQ ID NO: 24356 - protein, 590 aa, Sphingobium fuliginis
MDAIIYIRWSSLEQTKGDSYTRQINRCSAFCEANGYNVLETVVDEGRSAYTGENIHTGNLGKLVERFERREVPQGTLVVVEQLDRLTRLPALEVVGWLTRVFPTGIRFVTADRGTMVSRAAMEADQLSFMSLIFDSFRSHGESKRKSDLLLDSWQSRRNGVAEGRKRNITGVCPAWLRWDREANEFIAISDPDPRLDRKLIVQRIFNERDTGVGHAIIARKLNEDGIPSWGVGKRKADGWHPSYVYKILHNPAVIGEFQPRSRRKGEVTGTKIGQPIPDYYPQIISPAQFERVSAAKQVMNVGGGTKGRVNLLAGLVYCGVCNQRMIYLKKANAGRTRTNPKTGTITIDKSNGIYLKCSGAHRGHRCDHKASFNYNWIADAVLDNLLNSALRDNHFEQRSAMVQLADRLASARRELERFEAQAQTALDMTLDPAFKHDQRIKQRYVDLGRQADQQRELVDKLDAELAASKGQVSPAEHLSRVASVRNSLDSEDERIRDAARTKVMDALQRLVDRITFKSDRTVEVSALDGSLGWQFDDKGNLLNRFDLTVGLHEERLRNAILRRDNVDRQDIAQEIEEMKKRRLDALRGS

SEQ ID NO: 24357 - DNA, 50 bp, Sphingobium fuliginis
  source 1..50: mol_type = genomic DNA
ctttatgtttgcgtcaacacaagcatacttgtataagcgcaaacactgtt

SEQ ID NO: 24358 - DNA, 40 bp, Sphingobium fuliginis
  source 1..40: mol_type = genomic DNA
tcccggccttcccaatttcatcgtcgtcggcctgccggac

SEQ ID NO: 24359 - DNA, 40 bp, Sphingobium fuliginis
  source 1..40: mol_type = genomic DNA
tcccggccttcccaatttcctcgtcgtcggcctgccggac

SEQ ID NO: 24360 - DNA, 50 bp, Sphingobium fuliginis
  source 1..50: mol_type = genomic DNA
ctttatatttactagaatataaggctttgtgaataaaattgaacactgtt

SEQ ID NO: 24361 - protein, 558 aa, Corynebacterium sp ATCC 6931
MKALIVTRLSRLVDESSSAERQQQDCREVCERHGWEVVGVAEDLNVSAGKTSPFQRPELGRWLGDGVSDPGRMHEIDVIVFWRLDRLVRSVTQLAEMISWAERFGVTLKSATESHFDLSSSMGKVIASMVASFAEMELEAIRERITADQQHRVRAGLYRGGKMPFGYRVEPRSDGTGKQLVPDPEQGKIVRRLTEGILAGKSANQLAFELNSEGVPCSADLTAIREGKEPTGGSWHGGHIKRLLLSPALRGLVETSDPLLDQNGRPVIKNGRKQYGKRYVLRNEDGTPVQRAQPLISSDEYAKLKKILDDRAVGQRPNRATVSLLTGVLFCGSCGSITYRMRGGKGRRVRYRCDSARRPEVECHNPVLMVDFEWVNNAVETQLLSLMEGSMKRRRVWDPGTDTLEEQTALQESLDAMIEKIGTPPFLIGTPAYESLERQIGALSVKIDELKKTKGIPAGWKWEETGETFADWWHRISLQEKNQFLKNSEVRATFLHSEDRKKGEVPFLNVEFNLEALNGDHTEGSGVTKYKDLLAQLPAGQTLYLGDGDHQLKSRQHK

SEQ ID NO: 24362 - DNA, 50 bp, Corynebacterium sp ATCC 6931
  source 1..50: mol_type = genomic DNA
ttgtaaataattaccaattgcatacgcgaatgtgagatagttatagccat

SEQ ID NO: 24363 - DNA, 40 bp, Corynebacterium sp ATCC 6931
  source 1..40: mol_type = genomic DNA
gcatgtcaaccgtggaatatgctttgggaacaatcgctgc

SEQ ID NO: 24364 - DNA, 40 bp, Corynebacterium sp ATCC 6931
  source 1..40: mol_type = genomic DNA
gcatgtcaaccgtggaatatactttgggaacaatcgctgc

SEQ ID NO: 24365 - DNA, 50 bp, Corynebacterium sp ATCC 6931
  source 1..50: mol_type = genomic DNA
ttgttaataaactccaaatgcaaatacaaaaagtggagttatatagccat

SEQ ID NO: 24366 - protein, 498 aa, Vibrio parahaemolyticus
MRLFSYIRFSTEKQIDGDSVDRQTNSAKKYAQLHGYDFQNKSFSDLGISGFKNVDRDGLTSMLEAIQSGGISRGDLIFIENVDRLTRQGFQHANDLIVKIVNSGVLLHFERERVTFKSPSDLNDMMSLMKVCMSASLAFEESQKKSERIASAKQKQRNLMKQGIAVKHKAPHWIEFDEEGKCFHLGNTKIIRRVIELRRDGFSVSKIISTMNKEGFKAPYGGTLRSSTVKQWLQSPALYGAVMVEDELIKDYYPALMSYDEATKLYNKLTNNKAPENQNNHLRGLIYCSKCDSAMGLRFTTSSGKSKKKIPTFYCIKQREGGCDAPSVSNIMPLIEKMVSHMKTIEHKVDVAAITARIDEISSNLERISKSVTTDNFKMMMDMMDKFEKEKRELQTSLTVSDDVDTDTLLSHIDNPVEFNNIARRYIDKIKVTFKGGTRRKRTFHFKLIQRNGHIVNLTRFGSGQITIGKTEILSTFGQPESEFGEEMTYLEELELVG

SEQ ID NO: 24367 - DNA, 50 bp, Vibrio parahaemolyticus
  source 1..50: mol_type = genomic DNA
tacagttacaagagttatttcacaaaagataaatgtttctgttgatcgtt

SEQ ID NO: 24368 - DNA, 40 bp, Vibrio parahaemolyticus; identical to SEQ ID NO: 21838
  source 1..40: mol_type = genomic DNA

SEQ ID NO: 24369 - DNA, 40 bp, Vibrio parahaemolyticus
  source 1..40: mol_type = genomic DNA
acgtgtcgttctttacgtcggagacaaatgccctcactgc

SEQ ID NO: 24370 - DNA, 50 bp, Vibrio parahaemolyticus
  source 1..50: mol_type = genomic DNA
cattgttactgaattaatttcacaggatataaatgtatttcttcatactg

SEQ ID NO: 24371 - protein, 452 aa, Listeria monocytogenes
MKAAIYIRVSTQEQIENYSIQAQTEKLTALCRSKDWDVYDIFIDGGYSGSNMNRPALNEMLSKLHEIDAVVVYRLDRLSRSQRDTITLIEEYFLKNNVEFVSLSETLDTSSPFGRAMIGILSVFAQLERETIRDRMVMGKIKRIEAGLPLTTAKGRTFGYDVIDTKLYINEEEAKQLQMIYDIFEEEKSITSLQKRLKKLGFKVKSYSSYNNWLTNDLYCGYVSYADKVHTKGVHEPIISEEQFYRVQEIFSRMGKNPNMNRDSASLLNNLVVCSKCGLGFVHRRKDTVSRGKKYHYRYYSCKTYKHTHELEKCGNKIWRADKLEELIIDRVNNYSFASRNVDKEDELDNLNEKLKTEHTKKKRLFDLYISGSYEVSELDGMMADIDAQINYYEAQIEANEELKKNKKIQENLADLATVDFDSLEFREKQLYLKSLINKIYIDGEQVTIEWL

SEQ ID NO: 24372 - DNA, 50 bp, Listeria monocytogenes
  source 1..50: mol_type = genomic DNA
tttagttcctcgttttctctcgttggaagaagaagaaacgagatgccaaa

SEQ ID NO: 24373 - DNA, 40 bp, Listeria monocytogenes; identical to SEQ ID NO: 1298
  source 1..40: mol_type = genomic DNA

SEQ ID NO: 24374 - DNA, 40 bp, Listeria monocytogenes
  source 1..40: mol_type = genomic DNA
tttcggatcaagctatgagagacgcaaagagggaactaaa

SEQ ID NO: 24375 - DNA, 50 bp, Listeria monocytogenes
  source 1..50: mol_type = genomic DNA
attgcttccattttttctctggttagtaggagaaaatataatatgctaaa

SEQ ID NO: 24376 - protein, 452 aa, Listeria monocytogenes; identical to SEQ ID NO: 7791

SEQ ID NO: 24377 - DNA, 50 bp, Listeria monocytogenes
  source 1..50: mol_type = genomic DNA
tttagttcctcgttttctctcgttggacggagaagaaacgagatgcaaaa

SEQ ID NO: 24378 - DNA, 40 bp, Listeria monocytogenes; identical to SEQ ID NO: 1298
  source 1..40: mol_type = genomic DNA

SEQ ID NO: 24379 - DNA, 40 bp, Listeria monocytogenes; identical to SEQ ID NO: 24374
  source 1..40: mol_type = genomic DNA

SEQ ID NO: 24380 - DNA, 50 bp, Listeria monocytogenes; identical to SEQ ID NO: 24375
  source 1..50: mol_type = genomic DNA

SEQ ID NO: 24381 - protein, 452 aa, Listeria innocua
MKAAIYIRVSTQEQVENYSIQAQTEKLTALCRSKDWDVYDTFIDGGYSGSNMNRPALNEMLSKLHEIDAVVVYRLDRLSRSQKDTITLIEEYFLKNNVEFVSLSETLDTSSPFGRAMIGILSVFAQLERETIRDRMVMGKIKRIEAGLPLTTAKGRTFGYDVIDTKLYINEEEAKQLRLIYDIFEEEQSITFLQKRLKKLGFKVRTYNRYNNWLTNDLYCGYVSYKDKVHVKGIHEPIISEEQFYRVQEIFSRMGKNPNMNKESASLLNNLVVCSKCGLGFVHRRKDTVSRGKKYHYRYYSCKTYKHTHELEKCGNKIWRADKLEELIIDRVNNYSFASRNIDKEDELDSLNEKLKIEHAKKKRLFDLYINGSYEVSELDSMMNDIDAQINYYEARIEANEELKKNKKIQENLADLATVDFNSLEFREKQLYLKSLINKIYIDGEQVTIEWL

SEQ ID NO: 24382 - DNA, 50 bp, Listeria innocua
  source 1..50: mol_type = genomic DNA
tttagttcctcgttttctctcgttggaagaagaagaaacgataaactaaa

SEQ ID NO: 24383 - DNA, 40 bp, Listeria innocua; identical to SEQ ID NO: 23248
  source 1..40: mol_type = genomic DNA

SEQ ID NO: 24384 - DNA, 40 bp, Listeria innocua
  source 1..40: mol_type = genomic DNA
tttcggatcaagttatgatagacgtaaagagggaacaaag

SEQ ID NO: 24385 - DNA, 50 bp, Listeria innocua; identical to SEQ ID NO: 24375
  source 1..50: mol_type = genomic DNA
